United States Patent Application Publication US 2011/0014706 A2 - sequence listing, part 2

SEQ ID NO: 1369 - DNA, 5752 bp, Arabidopsis thaliana landsberg
aatagcccctcactgagttttctttactcaccccctttttccctttttcctcaggttagtaagcgtgaagagttgtgtgcaatattttgttcgtgtgtgaagttcaaagaaaacgtttttggcaagatcagatgaaaacatgccgtcttggtctatatggcgggacgggtgttacacgaagaaggtgggaaaaataaatcaaaaataaaagaaaagaaagaaagggaaaagaaaaatcaaaccagtgtgttgcctaccactaagcgcttgtttatagtcaatagcttgactttgatggaatttggggatcaggtggatcagatggtggcagtaaatattgcggagaaagacctctcatcatccatactggtgtataagcaattagtgtatgaggtctatctaggaagagaggagcatcagtagggtggaactcatgtatgggtggaatactcttttgtcctgcaaaagcattagaagaaagaacaagcgctcgacgagaaactcgtggcttgcttaaccgtaaaacagtttttggaaattttaaggtctttattgatgaaatcaggaggtttaggaggaggagatgagtaccttagccgtttaggaggaggtaatgagtaccttagctttttaggaggtggatgaagtaggagaggtgcagtgtgtgacttgacaatagttcttagactgatagtagtgatcctagcttgaaaagtagctatcgaagatgatttttcttcaactagtgatgtgtgtcgatcgacgcgagtggtggtgtcgatcgacactcatgctacaactcgactttccttaggatgttgacaattcagcgatgcagtctgcgtccagtgtcgatcgacactaggtgagtgtcagttgacactactatctcgtattgatcctcctttgtcaatcttgctcgattctgctccgtcaaacgtcaacacttcctcaagttggtactggtgtcgatcgacacccaggtggggtcggttgacactatcaatgtgtgtcgaacgattctggagatcaatgtcgagcctggtcgattttgcttcgtcacaacccgatgtctcgtatatatgcgatggtgtcgatcgacaccaagggttggtgtcgttcaacactgcctatgcaactgcaaaatcctcactaactcatactcactttccattgaagcagcgtgccaagaaatagtgaggctcctctcattccatctagggataggtctctttaagatcctttgttgaccttccagaatctggttccagcaatgattctatcttgctcttaggtctgggtagaagggggggggggggcttggtaagaagcaagattatagtttcttgtgaagctgaaactattgctattctgtagcggttgctggaactgagaattttgagtgtagctagttggaccattcccataggaacctgtgtagccttcttggtgatgaaatctctgattcggaaaacctctgctccgaacataatcgacatcctccacaagttgattgtggaccgcgtcaagcttactctcgttcatgtttctcgcttgttcccgattttgttattagacaaagacctgaaatacacaagaaaaaaagaagagagaaaacataagtaactaaaaggaaaaagaaaaactaaagcttagacaaaactctaatcttaatctaatggtgaatcgtagagaacttcggcaacagcgccaaatttgatataggtcaaattgccttaagaccactctctcaaataagagatcgatcgtagcacttaagggtcgaattccacaaagctctcggatcacacaatagaccaaggttttgaattaagctaagtaagatagtattgaaaataaaaagaaacaaaaggaagcaatagcagattgtgaggttgtaaggcaagaaagtaaaaacgtcagggcttagggtattctcaggaaaatattggttagtagatctaataatagccagattgttatcgaaccattgttaaactcaaactctaattatggaataacaggtgggtgtgccgcgaaactctctatatctatagctaagaataaccgaagaagccgagagattattaacctaaatatacattcttaacgagttcgattgttcaccttagtagataggcctattctttttacacacctataaacctgacttatcaaataatagatccaactacagatacctatggcgggtatatctattatctggattcaagttctaggtgatcaatctagatctagcattaagaacaattaaagatgaagaattctacagataacctagcaggggggcgataagttgcgtctacagacgaggcatcatttcactcgatctctttactcgatccaggcagctacaaaggaggctgtagtttactcgaccctcttactcgatcaaggcagccttagatgaagcagcagattgatctactcgcccctcctgctcgatcctctactcgacccatttactcgaccaatggtgaccaactctacaagacttgttgagctatcaaagcctcttcggatcctcttcattcctcttttgttaggatttgattagacctgctaggcatatggatttggttagaatggtcatggcaataaactagagaatgttgggagttcctgtgttttcaaaccttttccacgggttcgggttttgtgttttgcttgagggcaagcaaaagctaagtccgggggagttgatatgatcctatttttactgcttttagctatgatttacgtataggttttagagtctatttgttatttctagagtcttttctagtcattttcaggtctttacctgtttgagattcatttggagataatggaggattctagaggaaaacagagaatttatggtgctgaagaaatccggagacaaaaatgcatgtaggtgtcgagcgacaccaatacttgacgacaattcaattgcgcaacctattaatgttttgaagatttccaaattcggcccataactttcccttattactaaagaaggcccatcacgttttagaaacttatatattgatttttatgggcattgtttagacctaactcttattctctattctggacttgggagcataaccctgtggagactctctctagagaagatctttctaaactatattctcttcttgtttcttacattgatttctaccttaaacatgttttggtctttgataatcatgtatgaatagttctcttgttgggtttagggactctcaatagggatttagatgaattagtagaccgaaaatcctgttaggataatatatttagaattcttcatctttgattgttcttagtgctagttctagaattactagaacttgattttaggttaataggtagtactcaaaaagacttctattactagaactatcttagatgagcctagtatttagatgcggactagcgtcgatttagatacttaggtgaacttatcaaacatgattataatgcttgcttagttctagggatttacaaaagagttagaatcaatactactaagcatagtgagtaatgcggcgaaccaccggttactctataatagtgattagagttctagaatggttcgatagtaattctaatttattgctagatctactattctgatatttcctgagaatttccctaaacccaacgttttaatcatctgaatctacaaccaattttaattgattttcttgtcttttatttttataatattttcagtttagctttatttgaaactattaatctattgtgtgatccgagaactttgtggaattcgatccctaagtgctctaacaacctctttatttgagagagtagtcattagggtaatttgactcatatcagcatccttgatggtgtgaaaggatttgaggcagtcctcatcgaattcaaactcggtctcctagcacaatagtctggttaacggcctggctatcttggagaagtctttaataaatcttctgtagaacccagcatgaccaatgaaacttctgatgtccttcaccgtttttggtggctgcaactgcatcatcacttcaattttttctttgtcaacctctatgcccttttctgatatcttgtgacacaacactatgccttccttcaccatgaaatgacacttttcccaattgagaacaaggttcgtctcttcgcacctggtcaataccctgccaagattcaacaaacatgaggagaaagaggggccatagaccgaaaaatcgtccatgaagacctccaccatctcaacgattaaatctaaaaatatagaggtcatacacctctgaaatgttgcaggagcattgcataaaccaaatgccattcttttataggcaaaagttccataaggacacgtgaaagtggttttttcttgatcattagggtgaattggtatttgaaagaaaccactgtatccatcaagaaagcaataatatggatgattagccaaacgttcaagcatttggtcaatgaatggtaaaggaaaatgatctttcctagatgcagcattcaacttcctataatctatgcacattctatgaccagttatagttctagtagggatcagttcatctttttcatttttgacaacagtcattccaccctttttagggacgcaatgcactggagaaacccaagtactatcagagatagggtagatgacaccagcatcaagcagttttaaaatttcttttttcactacttctttcaaattgggatttaacctcctctgtggttcaatgctggaataggattcgttttcaagatggatcctatggttgcataaactaggtgaaattcccttaatgtcggataatgaataaccaattgctctcctatactttctaagctcagataatagcaggttcacttcatcactatttaactcagcattaatgatcacagggtaagtagagtttggaccaaagaatgcgtaccttagatctttaggaagtggtttgagatcaaccttcggtgccttaagttcagaccagtcatctgaagttggaatgatcggctccccagattctttggcagacaaggtcgagtggttgcttgagtacgtcctcgagagtgcatgttgaactcgagttgacccttcttcgctcattaccattacctctgttgctggtccatttaattcctcaaagggttctgattctttcatcgctttatgggagtctaacagcttctggtatcccaatgtttccaaatgcagaaacccatcttcaccacttttggttaaagcactgttaagatgatcttcttctgccagctcttctagtaactcatcaactaaatgatccatttcttcgatccaaaagagttgctcttctatggtaggctttttcatcgcgtctttgacatcaaaggtcatcctaaagtctttgccaaagtttagatcaatcttccctttcttgacatcaatcatagctcctgcagttgctaagaaaggtctccctagaatcaaagggtccttgggttcttcatccatctccaggattacaaagttagttggtatgtccacagcaccaatcctgatttgtaggttttcgagcaagccatgagggatccttactgacctgtcagctaggattagagatatattgcagggtttgtattgagtgaatctcaatcttttgatgacagagagcgacatgagactgactgatgctcctaaatcacataggcatctgttgaaagccaatggacctaaagagcatggtagagtgaa

SEQ ID NO: 1370 - DNA, 980 bp, Arabidopsis thaliana landsberg
caagaccaatcaatcttatttaatcaaacctatctttatatatatgcaataaacaacctatgtatattttttctgcatcattttaattttgggagattttgataatccaggtagagcaaagcggattatggattatcacgtgatatccgtgcgtaatcatccctacctctgctatgcttttgtaaatattttattattgaaaattaatgttgcgtcaccatttctcatatatttttaaaattaaggtttttttgataaaccttatctcattaatttctgacaaatgtttttctgataatccgatcttcgtgatgttgaagatagtcatgtgggttttgcccatgcacgtctctctcactgcagatttgatctgtgaaatgactaattgggaaataatactctgctcaagttatgtagtcaaagtgttcgatgaaatgcctcatagaaagctaatgagacatattgtgggattattgttaaaggagacgacttttgtcgaaaatatatcatcttggggattccattgtcaacacttaaccagattagtattactttattcattatttcctctatggatatgatcacgtggagcatgggagctaataatatatgcgtaagctttgttaaagttattatagacattcaaacattctgatttcaattagcttcttttgcatcttgcttctccttgttgttgttgttgttgttaagtttgtttgtttttggataaactttgttcttgagttcatttggtttttatctgaaaatagcccaaacagtaatttggattttcacaactggtagaactgttacatacaagtataaaataaatcaagtaagaacctttttttggattcttttacttaacaggaaaattcttcagaggcggatcggatttgttttgttctgttgtttcttcaaatttggtgtatatggtctaaaatgttcgacttcaaagcaacgtgtctttcaccattgag

SEQ ID NO: 1371 - DNA, 599 bp, Arabidopsis thaliana landsberg
  unsure (1)..(599): unsure at all n locations
ctcctgaaacgcttttcaaaaccatgtaaagagagttttttttaaaattatatctacataagatcttgacagcgtcttcatgagatggaaaccccacatggtacatattatcgataccatgttgctgcaaaagctctttgttctctgtggtaactacaatcctacttccaggaccaaaccatgtagtttcattcgccaacgccattaattgcttaatattgttcacatcatcaagaatgatgagcactctctgcttgcatagcctgtcttctatcacgccggaatggcgtatcctaataccatcttggttcaatatattttcttgtaaacgtactacatcaaaaccactatgatagcttcccctaaggttgtccacaaaacaactaagttgaaaccttttagagagtaaaccatataaagctctggcaatagtagtcttaccaatcccagcaggaccagcgattgcaactatcttaacttcaacattatctaaatctagcaaagactntatttctctcaaatgagcttcaattcccaccataccatcaaaatccctagatggtgtagcattcagttaatctaaaacatctctggcaatc

SEQ ID NO: 1372 - DNA, 555 bp, Arabidopsis thaliana landsberg
taatttgtaataaataataaatttagacggcaaaaaaaaagaaacaatagatttatgacatatttaaaattacatcttacagtgaaaattagaaagaaaaaaactgaaatatgaaaatcatcaaattaacaggaaaaagggataactcgttggatgctgaatcttagatacaattccacgaacaaaagaataatctgtttaaccctctgtaatacgttgggaatagacaacgacgcatgcaacgagtacaaattggtcgggagagagaactgttgagacaaaggctaacctctattcttctcggcgcataacctttatactcggtgaattgcgagtaaacatagaattttaatgcagttgtgataggcttcatgtaaatatgtatccctagtaaacattcagcatgaagagttgtgcagcagtcattgcatttataaactgacaactttctttcttttattttgccttcgcaaatctcacaccagtctggttgatcacctgcctcttcccatcacaaatactgagaaaatgactgtcatgcttataccttacctt

SEQ ID NO: 1373 - DNA, 551 bp, Arabidopsis thaliana landsberg
  unsure (1)..(551): unsure at all n locations
aaccgattgaatatgatcaatcttttttcaaatggcttcattatcccatccatttattcattaggaactcaatggcatcatcatcattaccctctcaaaatatcatactaccatcaccatcatcatcatactatcttcaacataatcatatcaacatatcatagnnnnnnnnnnnnnnnnnnnnnnnnnnacattatcataaactcttaattttcccgctaaaaacataaactcttaatttttttcccaaaaaaccgtaaacccgtaatttttccgccaaaaacgtaaacccataattttcccaccaaaaccagaaacccgtaatttttccgctaaaaacataaacccgtaatttttccgccaaaaacataaaatcgtaattttcctaccataaacgtaaatccgttaaccaatcataaagctcccgcaattgcacctagttntaatcgctaaaccgtaaccgtccgattccgtaaactcctgctgtcataatcgtaaccgttgtgtttcaaccagtcgggcccttaaataagttttttagtcatgggcat

SEQ ID NO: 1374 - DNA, 782 bp, Arabidopsis thaliana landsberg
gggcttctgttaattgggttatctaggtgtcttaatatttaacttacactaatctccttcttcttcgttcgatcgggcgtcatgaattcacatttcttaacgaatgatctcatcctggaggttttgtcaagattgcctttaaagtcagtcgcgaggtttcattgcgtgtcaaagcggtgggcatcaatgtttggtagtccatatttcaaagagttgttcctgaccagatcctctgctaagccacgcctcttattcgccatcgtacaaaacggtgtgtggagattcttttcgtctcctcagttggagaagtcatcgtcgactcttgtagcaaccgctgaatttcatgtgagattatctccagacaatctactgatctatcaacatgatgacatgagatatttttcaattggctactcctctggcttgatctatttatatggtgatcgatacgaggctacacctctgatatgtaaccccaacacaggaaggtatacgatcttacctaagtgctatacttatagaaaggcgtttagctttttcgggtttgacccaattgacaagcaatacaaggcattgtccatgattgatccatctggtcctggtcatagtaaaattcttacttttggagatggagatatgaattggaaaaagataaaatatcgtgtactacatgatatttacagtcaagggatatgcatcaatggtgttttgtattacttaggtgacacgtcagattgggataatgatcatgatgtaacgtctggtaatgtgttagtttgttg

SEQ ID NO: 1375 - DNA, 465 bp, Arabidopsis thaliana landsberg
agtgaccgtttgagagagggaaagggttgaaagagacccggtctttgtgaccacctcaacggggagtaggtttgcaagaaccgaaccttggtaaaacaaatccttgtgtctcactcttcatttgcttgcaatttgtttttcaccctctctctcggactcattcatatttctaaagctaacccggcttgtagttgtgcttaagtttataaatttcagattcgccctattcaccccccctctaagcgactttcaattggtatcaaagcctaaccgctcgaattgatgtcgggagcatccgccaagatggagatcgggaccgacgagaagcccgccacaagccatgggaaggttccatccggggagtccgccaacaaggtgaagggatccccttcacacgacaagtcgcgatggagcggtgacaagaagaagaagatgaagatggtggtctactacgagaccgactct

SEQ ID NO: 1376 - DNA, 661 bp, Arabidopsis thaliana landsberg
atcccccagctgggtggaacggacgatgacaacctcatcatccgcaacctccccctgttcctctccgacgccgcccgagcctagctggagcatctgcctcctgcgcagatctccaactgggacgacctggtcaaagactcctgggatctccgaagctgccaccagcagccaggagaatccctgcaggactatatccgacgattttcgaagcagcgcaccgagctgcccaacatcaccgactcagatgtcatcggcgcgttcctcgccggcaccacttgccgcgacctggtgagcaagctgggtcacaagactcccaccagggcgagcgagctgatggacatcgccaccaagttcgcctctggtcaggaggcggtcgaggccatcttccagaaggacaagcagccatagggacgccagcaggaagacgtccccgaggcgtctgctcagcgcgacacgaagaagaagggcaagaagaagtcgcaagcgaaacgcgacgccgccgacgcagatcttgtcgccgccgcacccttgaggagtgctgcatgctttggcaagatgctcaaggagtgcgtcatcccctatcatcagggtgtgctttgcaagatgtcaaggagtctgtatgctgcgacgcagatcttgtcgacaagatgctaaggagttg

SEQ ID NO: 1377 - DNA, 577 bp, Arabidopsis thaliana landsberg
  unsure (1)..(577): unsure at all n locations
ataaattagaaaaacttgatttaacaaataactagtggaaatacatatttgtctgcttaattatatattggccgaaatcatgaaataacattataaagatagtatgaggtattttttttacaattgtagatatctttggatcacctgattaaaagggaacttcttagaagaggcaaaggcaatggaaacagcagggttgaaatgtgcaccggagacatgaccaattgagtagatcataaccgttacggttagtccccataccaaagctataccgggaagtgtcaccggtttgccatacgtctcatttaccacgatggctgagcaaccggcaaatatcatagtgaatgtccccacgaactctccaatcaactatagagtactttcaacaaaaaaaatcaactaaagagagaacaataatgtttgttttatttgattattatacttcatagattggaaaatcagttaccaataattagaaccaaagtcaagattgagcttgcatataggctatagcaaacatcacacgaaatataaaatcttgatttggattaacaaatatttcacgacanattaagaa

SEQ ID NO: 1378 - DNA, 764 bp, Arabidopsis thaliana landsberg
  unsure (1)..(764): unsure at all n locations
agcttaatcttgacatttagctcattagtgtgaacaaaaggactttgtggactacgacccttaaatactgcaatcgatctcttatttgagagagaggtcttaaggcaatttaaaccatatcactttatatcttggtgcttccactccaggtattcccgcctttctagtgaaaatccatcaacagcctatgatcttgataccctcaagtttatccacaagatcccatgtgtgattctttcccattggcatcatttcttctttcatggctcctctccatttatcccattcagggtctcttagagccgcctggtaagaatttggttctaagtgatcaccatcttcagtgaagaaggcaaaaccaaccaagtttgactcattatactttgggtttgacttaaccgctattcttgctctatctctaactaactgatagtcacttaagtcttcttcttctgattcagaatgattctcctctgaaacttgagtattattttgattatggacttgtgtttgagaactagtaggtgatccagtgtcttgactcgtatcattctgatcgttttccatcaaagtagctccaccttgatctgctatttcgtgatcaaaaataacaccagaagagttaaatctgatgttgaggtgtgtaagcacatgtcttgtgccttacaatgccttcgtctttacanaaatttttgaaataatggttgcagtactctagaaacattatccgtctcagnttcttcactttcttgtcagactgattc

SEQ ID NO: 1379 - DNA, 922 bp, Arabidopsis thaliana landsberg
taatcaaaaggtaaaaagtaatttacttgagtgactaaaccattttatgtatcatacaaaacttttgaaacagaggatattctccaatggcgaggacagagctcaaagttgaaccacgtgccactattgcatctaacttttatttcgttagccttttgattccattcccctctaaagttctttcattttttgcaacgctgctttctcaactgagtaacgagtttcacattaatgttttgatgcgatgatcaagactgtggaagaatgcttcattagaatccctaatctcttacctgttaggccactaagtgttcaaaaaccgacttcaggtacaggaagctacccccagctcggctcctgaacccaatactcagtttattctcgaccacagagttctgacttgctggagacagaatggaaccatcagtttcagtccctagtgacactgccacaagactggctgttacagatatagctgatccactacttgacccagacggatttgctgataaaacatatggattctgcagcattagaatctttttgtaagatgtttggtttaccaaatagttatagagaaatgaatgtcatgaatgaagaaagtaacctttccttggaggccacgtgcgctccaaccatctgggatggagaaagatcgaaaatgagcccattcacttaaactggctttgcccaagatcacagcaccagattctctcagtcttttaacaacacccgcgtctcgagccacgaccgaaccaagcaaggcaaacgagccagccgtggtgttaagcttgtccttggtagatatggaatccttgagaagaaccggaacaccgtgcaagataggaagcttagtggagtttttaaggtcacgttctctgtctgcgatctctgcttggatcaacgcatcaggattcgtcct

SEQ ID NO: 1380 - DNA, 1166 bp, Arabidopsis thaliana landsberg
ctcgtcttgactcactctccaaggctccttttttccaccatttcctcagagcatagccggagtgatgacaatcagagcttttattaaacagccactgtttaggcacgagaatgcgaagcgagtgaacgccaatctcaggatggacttccacaacactggttcaaacgaatggctcggttttcggttagagctgattgggagctgggtactctgcatctcggctctgtccatggtcatgttaccaagcaacattatcaaaccaggtatgaagaagagtgactaagcttgttttatagcacaacattagttttccttgtgatgattttttcttgggattcaatgcagagaatgttgggctatcactttcttacggactatcgctgaacggtgttctgttttgggcaatatatctaagctgtttcattgagaacaagatggtttctgttgagagaatcaaacagttcactgacattcccgcggaagcgaaatgggagatcaaagagagccgtccacctccaaattggccatacaaaggtaacatacgtctcgaagatgtcaaggtacgatatagaccaaacacgcctcttgtgctcaagggacttacaatagacatcaaaggaggagagaagattggtgtagttggcagaacaggaagcggcaagtcgactttgattcaggttttgtttagacttgtggagccatctggtgggaagataatcatcgacggaatcgatatctgcactttaggacttcatgatctaaggtcaagattcggtatcattcctcaagaacctgttctcttcgaaggaaccgtaaggagtaacattgatccaacagagaaatactctgatgaagaaatctggaaggttagaggtttaaaagattaaaccttttttattcgattcttgatccaacattttataaaatttgttctgttatttctttggtttatagagtctcgagcgatgtcaacttaaggatgttgttgcttccaagcccgagaagctcgactctctcggtgagttaaaagttacttgttttgaaacttaattcacagatgttacttgagatgatcattaacattggtgaatatttgccacagtggcggataatggcgagaactggagtgttgtcaaagacattactgtgtttagaagggtatgctg

SEQ ID NO: 1381 - DNA, 1303 bp, Arabidopsis thaliana landsberg
tatgaagtaaaagtttcgtaaactattaaagttggacttcgctttattttttcgcattctgacaatagtatcttgtttggatcatttacagtataatattagtatcttataaccactaaggccagaatagtaagtatatagtttgatcatttaatttacacaatcctttatccaaaaaatatattgtatacagtatcatctatagggtttgcttcacagtcttaacttttcctgactcgaagagccaatctcgagagagcaaaaggtcccacgtgctttatccaacactctttattaaatcctgaataaaagtatctcaaagtgacaaagatttctataacataaaaggtttggctcttataagtcatatctagaaaaagaaaattcgttgctaactttgtaacgtgctaaagtattctcgaaaatactactacctcaagattaaagtacacaaaaaaaaaaaattggatacccatagtttctttttaagattgggcttggagcttgcaggtgggctctcaggaatgtatatcggagattttgagtgtggtcaaggaaggtgttgagtttgccttccatttgcaacccgactctcagtgcctgacatcattggcatgtaagactgatgactctctgagcaaataggaagctctctgctaataaataactttatgtatatgctcttgtttgcttgctggttgcatatataaagttatataaatccatcatttcaagtttagacattaccaccatgaaatatctatacttagatattatcctttcaatcaacatagaccatacttcattcattagcataaacaaaacaaccaaaacacttgtttgatttctatcactcaagagccttaatatcttacattaaggacaaagaagtgagtatctcataaatagtaagtcgattgattggatgtaaaaggacaatcacctttgtaaagtgggaatgtttagattcacttcatgtgtcgatattagtataaatagtatgacaacgacgattatatatatagaaatagtattatccaattaaatatattaaagaagatgagaaaaagagagagagaagtggacctacaaacaaaaggtgtggaagagatgagaatagaaagaaaaaaattaaactcataataaagagacaagtgaggatcatgtgttgcatctatcttttggttttgaccatttcagctatagaaacgtgaacaccattaatggcttatgaatcaaaatctcacacttctttctttattcagatacatgagaaaaaagatgatgtggggcaaaaaatttt

SEQ ID NO: 1382 - DNA, 3973 bp, Arabidopsis thaliana landsberg
  unsure (1)..(3973): unsure at all n locations
cacatttcttcacatctctttatacgaaataacattttaagattattaagccggcatcaatattctttcttgtcatgaattacatagttttaagaaataaaatcaaagaattttgaatatatgtcacacagaacacttccacagtttcttgtataaaatacaaatcatgctaacaaatcttataaaaccaaacagttttatttgtattgctcttccaagtgccacattctctgcttcaagtagttataaattaaaaaagtttggaagtcttgtgttttagtttatagctatttcaatggatagtgaatttaaaacgtattacaaaacctttgatcacaattttaccctatttgtataaacagagtttataaggattaaaaatgatgttgataaaagtattagttaactgaaaagtaaaaatgatgttgataaaagtagggtaaattgcgggccacacccgttgaccatattttattttcatggattgtcaaagtcaaatgtggttttcaccatttgtcttttcgctactggatgccgggagaaatgtcagtgctgatagatactaaacgccctcctgtatacattgacagtcagatgggtctcgaaacgttttttttggttcgtggtgggtatctttctctcaacttcttcgtctctttcaataataccgtgaaggcgttcgggaatactgtctctaggtctcatggtgaagtttctgaaagtgaccgtgtgtttgatagtgctacaaatgttgatgaaaataatgaggatgcagaggagcaagccgatgttgaagacgatacaacagaagaggatgaagtggaggaggacaacgaagatgatgatgggtgtgatgattatcttggtgtggatggatctattgggggaagtaccctgtatcctaccacagacggtagtgaaggtattggcgaagaatacgattacaacaagtggaacgatgtaatagtagaagaatatgtacaaggaaatcttgaggaagacgtcagtctcactcaacagactgctcaacatccaggggaattcagtcgtttattggaaacgtgtacgtacacgggtgttagtgtacctggcggagatacaggggaattcagtcgtctcttggaaacgtgtacgtacactggtcttagtgtacctggcgaagaaacaatttctccattgggttacggtacacgctgcgaagggcaaagggattccaatcttatttgtatagacgaagtcaccggggatgaagtgatcgacggtattggagcttcctcaactgggacacaaaatgataatggggtagttaccgcagctgaggcttaccaagtgtataatgaatttcctaagttacatggtggcgagttggcgaatctcggtaacgatgctgctcctgtgttcgatgacttactcaattttcgagctgatgagacacaggttgaaatcagcaccacaggcgaaactttgtttgttggaagtgtttttaagaatagaaaagtcctgcaacaaacaatgtctcttcaagcgataaagcaatgcttttgcttcaagcaacctaagtcatgtcctaaaacattgaagatggtgtgcgttgatgagacttgtccatggcaattgactgctcgcgtcgtgaaggattcagaaagtttcaaaatcacttcgtatgctacgacacatacgtgtaacatcgactctcggaagaactacaataaacatgctaattataagctcctcggagaagttgtgaggagcagatactgttctacgcagggtgggccgctagctgtcgatttaccacagctgctcctaaatgatctgaatgtgcggatttcatattctaccgcttggagagcaaaagaggttgcagtggaaaatgtaaggggggatgagatagcaaattataggtttttgccgacctatctgtatattctccaattagctaatccgggtacaataacacacctacactatacaccagaagatgatggtaagcagcgcttcaagtatgtctttgtctctcttggcgcttctatcaaaggtctgatatatatgaggaaggtagttgtggtagatggaacgcagctagtcggaccttacaaaggatgtctccttattgcatgtgcccaagatgagaacttccaaatattcccaatagcttttggtgttgttgatggtgagaccgatgcttcttgggcatggttttttgaaaagttagctgagattgttccagacagtgacgatttaatgattgtctcagacagacattcatctatatacaaaggcctaagtgttgtttacccgagagcgcatcatggagcatgtgctgttcaccttgagcgaaacctctccacctattatggtaagtttggtgtgtctgctttatttttcagcgctgccaaagcttatagggtcagggatttcgagaaatattttgaactgttaagggaaaagagtgctaaatgcgcaaaatacctagaggacataggatttgagcattggacaagagctcactgtagaggagaacgctacaatatcatgtctagcaacaactctgagtccatgaatcatgtgttaacaaaagcaaaaacttatccgattgtttacatgatcgagttcattcgggatgtcctaatgcgatggttcgcatcgaagaggaagaaagttgctaggtgcaaatcttctgtgacacctgaggttgatgagagatttctacaagagttgcctgcgtcaggtaaatacgctgtgaagatgtctggaccgtggagctatcaagtgacaagtaaatccnnnnnnnnnnnnnnnnnnnnnnnnnnccagtgtacgtgtacgtgtcttaggtacaccaagttaagaatcccatgtgaacacgctctagcagctgcaatcgagcatggaattgatccgaagtcttgtgtcggatggtggtatggccttcaaatgttttctgattctttccaagaaccaattctacctatcgcggatccgaaagatgttgtcatcccacaacatatagtggatttgatactcattcctccatacagtagacggccaccaggaagaccactgtccaaaaggatcccatctagaggtgaaaaccgggtatgtactaacatcgttcattcatctacttgtattttgagtattaccatgcggagatttgtaacttcctgtctttgtcacttcagaaaaagagacagaaaagacttttaccaaatcagtgctcacgctgtcgacaagcaggtcataacaagaagacgtgcaaaaatccaatctagttctggtgacaagtttctgagccggccaatatagtgtacgcttctgtgttttctcggtgtacgtaagtttatatataatccacctgtaactatgtacgttgtgtacgtacgtttaaactctacgttcgtataactatgtacgtttttgtctttgtacgtgttaaagttcatgtaataagggtacatagaggtggttgctcaatattttgagtagtttgaaataagttttttgaaaatctaacttattccccctcttaaatgaacggagttggagacatggttgggtatattgtggttgtgttggtatttaatggaaaagacgtaactgttgctgattattgtcaaatcaacgttataattaccctatatgacggttaccaggctattacccaaaatttgaatcaagtgtagttggaaccgcattaataactgtaaccgttccaaatttcctctatttaagtctcctcccttccttaattttatccacaatcctcattctaaacccatttcttgtgccggcagttatatcattcataaaaaaaaatttaggctttcgattcgcttgttcttgctatccgtgagatggaggggtttcatatggtctcagaattgtgtcctctgatcactgggtggcgaatttatgtctttgtcgtgagagtcttcaagaaggttatatcgccaaacgttttcgaactcgg

SEQ ID NO: 1383 - DNA, 1025 bp, Arabidopsis thaliana landsberg
  unsure (1)..(1025): unsure at all n locations
gttcatcaaggatttttttccatggtgttttatcccagaaatagatcaaagatggcaaaaacacaaataacgctcaatctcaacaaaattcacgctcaaacgaaatttaaacacccgaaaacctaacacaaacacacttccaaacgcatgcatattccaaagaaagaagaagaaaaaagttccccattcacggtcaatcgtagaaaaattcttactcaaacaggaaaactccaccataggaaccaaaaacttcacattccccgaattgatgtgtaacttgcaggaaaaagtcctctattaattcccaggtacctgtttattctggttatctccataatgtttaaggctttttaaatttgatgacctctgaatcagttttgattattaaatggttatagtttatggaggaaccatggacggtagattggagtcctcctcctaaccccgcttggggttgacatggttttgtgatgctcgaaactcgattgttctcgaaccagtcagtaagattaaacattgacatttgtgggttctttctcgattgttctcagctcttcggttctcttctttttgattagtgattacatgttaactctgcccttttgtgtataatgcaatgtcttccatggtagatcattctaccgagcttttcttcacacaagtctatagtcaaatcagacaaattctgcaaaaagcttaacctatgtcaagaagtgacggcccttacttcagaattccacctaggaaactgcgaggcttggcgcgagactgtcaccaagctcaaggatcctgagacaaaggtttgcaccttcctccactatcacaaactttaattttgaattctcaattgagatattgctgctaaaaataagattttgccttgcagctgaaactccgtatatctctgaaagtatgtagtcgctaaacaattaccaggtaaaggtagctaactaaagaaatgccagaaaagctcaaagtgcctcgaacatattaatggntttcttagctgcttcgataatccattt

SEQ ID NO: 1384 - DNA, 1281 bp, Arabidopsis thaliana landsberg
attcatcatacatgcatacatacatacatgcattcatacaatcatgcattcatacatttatatatacatacatacatacatacattcatcatacatgcataaattcatacatacatgcatactgcatacttgttcccttgcacattcataattgcttaatgtattacatgctatgttttcagtcttatattttcgggtttccattatagatgaagttaacaacttaagtagttgtaagaaaaagttgtgaagcttacgagagcctattttgaagtgttttcttatcaaaatatttattttcatttgtaatgcaattcttggctgctcttggaggtggaagtgggatcgagtatgaaatactaaagactaatcccatcttggaagcatttggaaatgcaaaaacattgagaaacgatcattccagtcgttttgtaagctctccaaactccaaaataccttttgcttactctttttatttttactatgtgtctttctaatcgttctgggtctttatttaactcagaatctgtctccgattttaaattgacagggtaagttgatagagattcattttagtgaaacagggaatatttcgggtgctcaattcaaacatgtaaagcataaaccctatgtgctgcttcacacatttttttcatttttcctttacaaaatctaacagcttttttcttgttgtcttatattttgcagttttactagaaaaggtaaattcctcaatatttttgctgcttcagtttctttcatgttgaaaaataattcttaatattgacatcctttcatgttctgttgtcacactttaatagtcaagagtggttcaatgtacggaaggagaaaggtcatatcatatattgtgcatgatagtaaagaagatcaagaaagtgtatttgcaatttttgctgtagtatatagacgctcgtgaataatggaaaaccactattaaacctgagatcacttcagcaggaatgtccaacccctcatgcacgaagagtgtctccatttgtaacaattcttgtgagtaacaccacgtttcatgtttttaggaatttgaacgaaaaccttatacttttgattatcttaccacaggatcaagttattcaaccctttaatgagacttttacacaaactcggttgggaaaagtgttttttgacattgttgcaataactgcaccccccagtaacaattaatcaaacagaagccaggggcaaccttttctgttctttttctccgacttcagcaaacgtgaaaattcaaatttacgattt

SEQ ID NO: 1385 - DNA, 511 bp, Arabidopsis thaliana landsberg
gacccggttctcttctacgcacgctcagccatacttgctgctacctgaggatccagcatcgtaccttgtttcatcaccaccagatggcatggatgatcgaattgacaaggaagaacaacagtatgatgcataggatgtggagagccatctcaaagatcaggccttgtgtttgcactcgcggaggaggagtggatgatggagaccgtgaacatcggtccaagactactaaggatcgacacgctgagaggttggtccctactgttggagcttccacctcgcagccaccaccagagcactccctaggccgttgtttaggcaggagcaggaggcagccaggagagcagagctctagcgagagccctacccaccaacgttgagtaccgatgtaactcacactcttaccttgttacacatctttattttgatttttaatgtgtttgtgcggcaactttcctttgaactgttttcacaccgagtttgtgtgaagcaagtcggggggaggttggcactt

SEQ ID NO: 1386 - DNA, 1063 bp, Arabidopsis thaliana landsberg
aaagcattaatatcagcataatcatcaagagccagtccaatcaattcgattccacagtgataaaaccttaagcaaaacttaaaaatagttggaaaatctcaccgatacatgaaaggatgagaaatctctagagagttgaagaatcacacgggtttagtggaatttttgtagttgaaacgatttgtgtgactgaagatatagatcgttgacgactctaaactccatggatgtttcctggaaaatatagtgagattttgtggaaaatattgctaccgacaaaattactgtccctatgctccaccattcactgtctcaaacaaagttacgtccacacaatatatatatttttctttctatttctctcctaataataataatgataaaacaaaagagttaatatcattcaatcttgtaaagagttcatatcattcaatcgtgtaaagagttcagtttaacaagatttatatcagcaagtttcaagcttcacatcatttttctgttataatacagtacctatgaaagaaacaggtagacaagtaacatatcaagattcaactttccaagtgacttttgtctcttcttatctgccttcttatctgcctctgcctaaaaattcaatgaaaatgctctgaaaaatctcctaaaaagagttccaaagtccagcaaaaaccaaaaaaacactaacggtaccttcttatctgcctctggctttccacacattataagcctttaatatatcctctacaaacattcaaactcatattatcgactaggatgctttaatctctctattgatggagctttttcttcttgtaatcaaaatctctttctctctttcaatctcccgtttgctaatttctttgcgaattgggttttgaaatggctttctctatgcatttcacaggacatgctgaatgtgttaaattcgtgaagaagttcaatcttcccttactggtatctaatctctcttgacttatatctagtacgactttttgtaattaagttcctctacgaataagtcagttcttttccgattgttgattaggttacaggagggaaggaa

SEQ ID NO: 1387 - DNA, 1012 bp, Arabidopsis thaliana landsberg
ttgacaaaaagatccggttgaaaaatagcaaatagaaaatccaaattttttttaaattagtatgtaaaatttattgttgggataggtctaaatgtaaggcataatgataattattttaaattaattattttagtttaattcatagtaaatataaatatttgtaacatcttatctcgtttttaaaaattttgaaataaattttcgttttatatttcaaaatacttaacccaaaattctaaaattgaatttatttatctatcacaaattataatttttttattcatgatatcaagcaagtcttatgattttttaaaattttaaaataaaacttaacttccaaaatgttagtttaataatattgtataatttgatatcaaatctaagtttttcaatttttattggttaacatattttaagaaatatattttattttttcgtctataattaataggaaagagaaagtaagtttaattttgggaaactaataagtacttaaaagaatattaccactttttatatttaaatctattaattttgtgattactattgtatccttaatgaatttatttaaaaatactaaaaatcaatggcattttatgtaatattctaccatttataaggttgtttatttttaatgattcccaatctactctattatttgagacgtacgttaagtgattctcggttaaatcatatgtttaaaatgttaatgtcatgaaaaagtttaccttttactgagaataacttaagttacgttataatcttggccgttcgcttgaattgttttgacagtccgatctcgagccttcacttaaaaaacacgcggatccttatgacccgggtttacaattattgggtcatacgttataatcttggccattcaattgaagtgtttgtgtccgtttgatctctcgccttcacttaacccacacgcggatccttatgactgggtttaaatttttgggtcatacgttattatcttggccattcgattacagtgtgtgtttccgtt

SEQ ID NO: 1388 - DNA, 660 bp, Arabidopsis thaliana landsberg
  unsure (1)..(660): unsure at all n locations
tgtgatatgacatcaagcattatacactactacagcacacctctgtacaggcggtctggttcgccactacacaggcggttccaggaaccgcttgtggtgcaccgcctgtgatgtaaaacaacatcacaggcggtcaatcaaaaaccgcctgtgaaaaacacagattacaggcgnnnnnnnnnnnnnnnnnnnnnngtgatagacacacatcaattcgttttcattttcatgcacatcaattcgtttcatggtacctattgttgcaatgtttgcttcattttcatgcacatcaactcgtttcatgttttatggatgaattcaattaattaatgattttattgatgttaatcaatataaggataggtaatggaccgaggttggatgtacaatgtgccaagaccacatccgttgtatattcgaaatttgagaagctttattgaagcggccaacaagcacgcgaatttgcgaaagagcaaggagatattatgtccgtgcatcgactgtgataataagatagcttggagagatacaggagtaaccaatcacatctgctaaaaagagggtttaaagacaattacacgatatggtcagacatggtgagttggatccgctgaagtgctggtangacgagagagttgctggatttagacctaaagtgat

SEQ ID NO: 1389 - DNA, 1308 bp, Arabidopsis thaliana landsberg
  unsure (1)..(1308): unsure at all n locations
aacgacgaattcccgttgccaaggatagactctctagtcgatgcagcagcttcttcagagctcatgagtctcttggactgttactcaggataccatcaaatctggatgaaaaaggaagataagccgaaaactagcttcataactccaagtggcacgtattgctatcttcggatgcctgaggggctcaaaaacgctggaggaagtttcagcagaatgactgcgaacgttcttcagtctcaaataggcagaaatgtgttgacctatgtcgatgacatcatagtaaaaagcacgaaacaagaaaatcatattgccgacctgcaagaaacatttgccaattttaggagggctggtctcaagctaaatccagagaaatgtgtcttcggggtgaagaagggaaaatttcttgggtgccttgtatctacaaaaggaattaaagcaaatccaagcaaaatagaagctatacttcggatggagccaccaaggacaataaaagtgctcagaggttaacagaaaggccaaagtctttcaatggggaccaattcaacaaaaggctttcgaagagctaaagaaatatctgatacaactaaaaacattaactccaccttcgctaggagccccatcgctactgtatgtagctgcttcctacgctgtagtcagtgcagcgctggtgcaggagagacaagatgagcaagcgaacaagcaagtcccagtatattttatctctgaagtgttgagcttatcaaataaaaattacacagaattggagaaagtgatgtatgctgtgttaatggcttccaggaagcttcggcattattttcaggcttaccacataattgttccatcatcacagcctttgaaggatataatgaggaacagagaagctactagaagggttggaaagtgggccgcggacgtcaatgaattcaccattgactacgtgcatagatcttcaattcaatctcaggcgctacgagacttcatagctgattggacaccaggggctcacgaggaagggacaagcaaagatgccgaagcttggacggtattttgcgatggttcttggggaacttcggtgcaggagcagctgcggtcctagtagcaccttcaaaagtcaaaacatgttttgcagtcaaactggacttcagttgcacaaataatattgctgagtacgaagcacttttattggggcttcggaaactaagggcaatgggaataagaagggccgttttaaagactgattccaagtcatagctggccatgtggatnaaagcagcagggcaccgagatcgaagcttgaaaatatttgga

SEQ ID NO: 1390 - DNA, 813 bp, Arabidopsis thaliana landsberg
tttgattgctatgtaaagtccaagaggcctcaaaaaggggggtcaaacaaaccagtaagaaatacaaatattttggggagaaataaatcgtttttctggacttaaattaaatagtttgagaatctcaccaaaaaaaaaaagtttgaaggtaaatacatgtatttaaagtttaaaccgaacaacaaacaaaagaataaccaacacaatacaagcctgtagttatgacatagaaaagaagcaagtaatttagtgattatctaaaactaatacaaaaatataaagatattataacaaaaaaaaattaatagagagttatatatatatatatacctttgtccgttcgagaaaggaattgaccatcagaataatatataagtcctctctgccgcttaactcttttcttcttgtctatctattttttgataaccatggtgagagctgatgatcaattcaatggtttgcagggagacaacagagcgttagatattgtacgtctcgaggataataagagagagagaacgaaaagagtaattaattacaatctaaggagcacaacgatgatttccagcttaagcaaatgactgaagattgatgagtgcaagaatcaagacccggaacaaaaccctaatcgtgttgcttcttctccaagtttgtgccatgtagagtccaagaggcctcaaaaaggggtttcaaacaaaccggtaaaaaaaagaaagccgcttaaagttatagtgacggatgaagataggacaccgacggaatgactgattaacgtgatgagagaagtgaacggtgtggattgcaagctgatat

SEQ ID NO: 1391 - DNA, 3525 bp, Arabidopsis thaliana landsberg
gttcacaagcaaaaccgacaaccatcacttgcatcaagcggtgaacaaaagcaatgtaagtcttctaatcttttaaaattcaggggagtcacttgttataactgtcgtaagaaaggacatttagttgcaacttgccctgaaaaatttgagctaactaatacttcattagaatcgaaactgagctcaccaaattcaagtagtgaagtagttagtcaaggattagaaaattctagttcttgtgtcatgcacttgttcttgtcaaaggatgttgattcaggtcagactatggagcatgagaatgacaaaactgaaggaagcacaaaagaggagaatcatcatttggtgtcaaccacttcacaagcttgtcgagctgactatgtttcaaaaatcaccatcttgaacatgaaaggaccgccatatgtatcccaaccagttctaaaccgagagttacctaaacaagaaccacgtgaattacgaggattcactcaagttgaggctatcattgtccacaaacaatcacctagagctgaatgcaatatagccctcacggatcaaccaccagatgctacaccaccatttaaaactcgaggttgtacactgttgaggccaatcaagaagactaatgatcgtgagataagcactcatcatatgagtcaatcaagagatcctcgtgaagattatcaaaatcaacttcggctaaagcacatggaagaatgcataaaggagcctaaaatggatatttcttcatttagtactttccatacctatcagtggcgaccaggagagttgttagatagctctagagaggaagagttggtcaccaacaatgccttgatccaaaaagaacccccggatccaacgccacttccatttgtcatgatgataccaagcaccgaacacactgtgaaccttactcaagtaagtaactctttagctcgatttgtttctcatgtttcaagaactgttactatgggtttatcatatttaggaaacattgagaaagagttagatttatttaaagaatatttggaatcaaactcttgtcttaggataaaagtaaaacatgaacatttcaagaatgatgcattgattaaaattgagcaatgtttacttgtttatagtgatttcatgactatgataacgcacttgctttttgccaaaggtgttgacaacattgcaggtataaaagaggagccaccagacttagaatttctatcgtccaatctttttgagaggactggaattggagttgttttgatgccacagatcgattacccgttcaaccgaacaagaaaaaaaagcgacaatgcttatgaacttgagttgcaaggtaagtataatgtgagttccaatttcaatgattcttacttggttgttttcattgtaggtgaattggatttgaggtcaaatccttttcaagtgggagaggatgatgtgatcatggaaagcacaaagaacatggaatttgatcaagagcttgtagccgcggaagagcttgaagcagaggagcagcttgaacctgaggagcattttgaagcataaaataaacttataacggagaaagagtatgggaaagatgttatcttaacctcattggttttgatacatgatcatcaaatgggcatgtgtctcatttgtactctttttcccttgtcaagttttgtcccaatgggttttcttgacaaggtttttaatgaggcaaatgattcacattcaaatcacccatttgatgatccaaaccatggtataacattcagaagttggcccaatggaatatatatgaagtccagccaattttatgaccatcacaagcccaagaagagcccaaaccaagtgggtaatttgctggtcaagagaagtgacgaaaatagcatatcaagagtcattttggagccaagaagtggaagggttatttttaaactttcaaccaagtctttatttctttttattttccaaggtagtcttgtgagtgtgttccaagacttccttcttctttataaactccttgtaatctcttatgagaactgatctatctttttttaccaaaaactctttcttaaaaatagattatggatccattttcgtatgtcgaattttgatctttctcgacttatgaaaaggcttttccgcatccttttgtggcgtcattcaatccatcatctcgtctttcagtcgtgtgtcgtctctatttcgggaatatccactccagatcttccaagtgccgaaattgggattgattcctcaccaggatcatatcatgtggtatcagagcacacttggaggttgagtcgtttctgtctgtcatcttgttttaattttcataattatttggtgtgtgataaaattgtgaaatcaactgtcacgggttcgaaaaagagtctagtatttcgtaaaattgtttccccaatttcccgaaacgatttgataattttagcgtccggtaaagtcaaacggtcgtaattagggttctaggagagtttgtgtgtaagttgaagggtcattttgtgttttgttgtgttgaatcctttctattacaaaaagaacttgttactggtgtatttgtgctttgtttctcaggtcgcaatgtcaacaactgaggagagatcaagccacaaccgcaacaagcatctaattgaagctcttaccactgaaatggggcaaattttcgacatccacttaaatcaaattcgtcaagggcatcacaaagcacgaaaaaggaaggaacaagagtttaagtctaagccaccggataactcattgagatcaatacagagcagcccacagaaaatcacccacactcccaaatccaaatctgtgtttcattctgattataaaccgactaatgcacttttcaaattttcaggaaaacaagattacctagagtgggagaaaaacatggacgagtggttttcctacaaaaacttcttgagcgaaatgagatttgtttgtgcacttagccacctcacgggagccgcttacaaatggtggttgcaagaaaatgaaaatcgcttatattataaggagcgacctatcacattgtggagagatcttaagaaactgctaaggaataagtatgctctacaagcactaaaatgcactccaaaaggcaatcccaaaatccaaggattagcagttcaagaaaagaaagaagtcttagcctcatattcgaagaaaaaccccatagctagtgatgttaatatgggcgatgaaactctaagacgggggatggtgtatctttatgatccgacggtccagaatcatcaaagacctctgatattcaaacttttgtttccaacgttttaacgtccaaaatcctaaataaattctataaaaaaatcagtcggtgttcttgttcaacaagggcacgtgagttgctgcgatgtgtactttagttttattttatttttcagttttccctcgcaatttcggcttctactaaaagttgaaaaccgcgcccctttacgatgtgcgttatcagaataaaaaaaatcatggaagtacctccctatagcaacctatcttgct

SEQ ID NO: 1392 - DNA, 938 bp, Arabidopsis thaliana landsberg
gctattcacattggtttaatatcaggtatgaataaggagtcaagatctatgaatactaacagtttgaagaggtataatgaagagcggtgagataagctctagccttagtggattgtgttggaaactaagatatcctcaagtctgttggtttgccatctggatttttcaatagtcggattgagtcgaacctgtaacattcatcaactagacaataatctagagaaatatagatcatgattcctaactaaactaaacaaaaacattttttttttagaaagtgactcaataaactcaaaaacgaaaaataataagaatcaaaaataaaaacataattagtaagtgtctccttcagatttaaacgacacagtctccagtagcattcaaatccgaaaaaaacgagaaaaataaatctaaaataaaagaaaggaaaagaaaagaaaagaaaaatcaaaccactgagttgcctcccactaagcgcttcttttgagtcaatagcttgacttggcggaatttaggacgtggatggaggaacaagggacttgtgctgcttagcggattgcaatctcgccttccaaagtagtgtgtaaacagatcgggtcatgtctagcctctcagcaacagacttgggcatgaggttgatgcttgatcccagataacacaaggagtgactaaatctgctagtaggtattattaagcaatcaagaacaaagctacctagatcggggagcttctcaatccttcttatggcagtccaatgtctggtaattttccttatgacagtccatactttagtggtaattcatggggtcaaacttcaggtggccactgggtacaccaccaaatgctccacaatggggtagacccccaaatgctccacaatggagtacaccacaaaaaaaacctcaatagagttcatcaccaagtgttcaataatgggg

SEQ ID NO: 1393 - DNA, 647 bp, Arabidopsis thaliana landsberg
agtcagctaggactgggggtgggtttatgttttgaacagggtcgctcccccactcattgagctcgatcgcccacttagccagtcgacctaactggctcggactatgcaggatagcacggagcggcatggatcccatcaccacgatggagtgggactggaagtagggtcgcagtttccaagatgacattatgattgctaaagcaagcttctccatttgcgggtagcgagattatgcacttcgcgtttgttttgaggcgatgccattcccaataacgcctcgatttgcttcggatttgcctcgatgccgagttacgtaactagatatccgaggaattcaccgaatcttactctgaatcggcattaggccggattaagcttgacgttatagaggttaagttgccggaaacattcgcgcaaatgggctatgtgttcttcctcttccatggattttaccaacatatcgtcgatgtacacttccatcgttttaaaatatcatatattcatgttgtgtgtattcatgataataaacaaattttagaatcttggatataaaaattatcagattatacatgaaaatatatggaaattgatatttagattcaaaaatgaatctaacaataaaaaatgtaagttcataacatgagtct

SEQ ID NO: 1394 - DNA, 573 bp, Arabidopsis thaliana landsberg
acgcaattcccatcaatatcccagtatgcatatgagacacattttcagtatctattacaagatgcaaactctggggaagggaagcttgatgtgaaagcaaacacctgttgacattatcaggaaacatccaatcatcaaacttaagccgaggcaacatcttccaaagagacctccatcgtttagacaagacactcatggctactactttttttgttggaagtaaagacaatatctgcagaagcaaagcttcaggcaactcactgatcctgtcctcattactcaaactttgaccacaacttttgctgtaaagagaaaagcccctaattcaagaaacgaaagggtgttaaagaaaccctaagaacagttcatagaattaagtaagcacacatagaagaaacataccctcgattcattgtcaccgacaacaaacgaagtgaatcaaaatctcctcttaatcaataccttccgagtactatcgcatttataatcgcagacgcatcgcaacactgcaaacgatagctcttcgatagagaacaactgaattcctaatggtcatcaaatccagctgcgtta

SEQ ID NO: 1395 - DNA, 958 bp, Arabidopsis thaliana landsberg
gaaacagattcaaacaacaaattagggtttctaggtttaaggagaatgactcattcttggccaacaagcaagcgcttccatggctatggattaccttttccgattgatctgaaggttctagtggcttccctgacacttcctctatccgaaaccaccgtcgttgggtctatctatccttcggagtgaccagaaacgcttcctaaaaaccttaagatgaaacagcactgtgattttctagtttcaggaaaaactgtgatttttcactaacttgtaagtcattttgcgaatggagcttaccttggattgtaaaaacgagacttgatacttcttgctctcctcaagatctttccaacgacaccaaattcatgatctgattccttcaaatctgacgggaaatagatccttaaaacctctacctctgattttggatccgaaaactgttctgaaaacttgggaacgagatctattcagaaccggtaagaactcgcccaaactcctttggacgtgatgggaaacggatcaccaattccaccacctgaactgtttccttttttcacatattcacacaaaaacccaaaagctaacttgatatatctgccacaaattcaatggctaagagagacaattccagtagaaagaaggcataaatagattaggttttccttacccaatcaatccgttgtttaatggtgatgatccgtgatattcgctttcactccacccttgtatgggctccatggacttttgtttttaacaaaacaaaaagggtgggttcaagggattgggtttagggtgttacagacatcttcaccgaattagggtcagtcactttgtagaagtagcagatttctaatcaaaaagtagtggagtataagatagatttagcagcttatatttctaatttcataaaactttgtcatttgaatattttatgaacatctgtatggaacaaatttta

SEQ ID NO: 1396 - DNA, 1580 bp, Arabidopsis thaliana landsberg
aaaccacttcgtagttcaagtttgtgcctctcagatttagttgtagtatttcctgttgtgcatggcattccaggatcgtggaatgattttgccacttaaatcggcgagttcatagacgtcgggtcggacaactttcgagactaagtatggtcctttcctgtttgccccgagcttcccattgtttcgctcggcagtgttctgaaatactttgcggagaacccgatctcattcttgaaatctttgctgccgaacgttcgagttgtagtatcaagccgtatcattctggtaattttgtattcgcactaaggctgaatctcttcgttcattgatcagatctaactcgtcgagcatgctttaagtattatccaattcgtgctcgagaaacagactccgacgcagattcggtaccgtcatttcggcttggattacacactctgtatcgtagactagtgcgaatggagtttcacctgtggctcgacgagacgttgttcgatgtgaccagagtactccttcaagctcgtcggcccacgagcccttcttagcgttgagtcgtttcttcaggccgtcgaggattgttttgtttgggcctcggcttggttgttcccctggtgagaccgtggtgttgacttgcttagctggattccccacttatcacagaaactttgcgagccgttgtccgtgacgatctcgtaagggatcccgtagcgacataaaatgtgcttccatacgaagttatcgacacttgaagagtttttcttcgaccagaacaaaacgcgcagcctgagctttcagctttccagcttcccacttatcccaaggtactttcccctcggatatatagcttctgatgggttcaatccattctgaatcacaatccaagtctgagacgtcattcgacttcgaagcatcttcgcaattcgcggcactctgcacgggaaaagcatgttcctctttgtcgagctcgatgctaggcttttcgattaattcgactgggatcaccctcctcaggttcgggtcggatgttgaggccaaggcagctaggacatcagccgatgtattttctcctcggggaatcctagtcagctcaaactcgttgaattgttttgccagactttgtacgttggctagataagctttcattctttcgtcccgagccgtgtaatcaccgttgaactgatttgcgacgagctgagaatcacaaaatgctcgtattttcgcaatcttcagccctcgagctatattaagcccggctacgagtgctttgtattcggccacgttgttggttgccttgaaatttagtctgaaagattgctcgagaacctcgcatgtgggcgaagtgagacggatgcccacgcccgaaccttgttttgatgatgaattgtccacgtgcaggagccaagtcgtatcgagcggattctctcgagctttttttgtaggtagttcgacgataaagtcggctaggacttgtgactttgcacatgttttgtttcgatatttgatatggtactcactgagtttggttgcccacttagccagtcgacctgattagcttggactatgcagcatagcgcagagcggca

SEQ ID NO: 1397 - DNA, 667 bp, Arabidopsis thaliana landsberg
ttattgtttcagattgaatccctaaattttgattgttaattccatgatttaatatttggtaaaaaattgaccaacacccggctagttttttctaataaagtgtttaccctgaaaaaaaaatctataagaatacgcgtaaatggataataaattaggagataaatatcattagaacataaagtaatttacatatgaatctctatctattttttttaaagaatcaatattctagattgattgtgaggcaatatgaatgtatgcataacatttttaagagatagattgtacacaaaatttgattttaatttggattcaatcttagctttactgaaaaaaactaatcataattacatattttaaatttaggatgacgaaaatgtttttttaaaagctaaaattagatctcaacgattttggtatgtttttcaattaaacttatccttatgcattatcgcaaatatggtagtcattattgttctaatacaattaatgatctgtcaaaaaaatcatattactgattgttctcattttgactatttgcattaaaaattttaaacattggtatttaaactttgtttcactgttttaaaaaaaaagaaataatcgaatctagaagtatgattatttcaaaagcttgtaactattttaatacatttaaaaggatttt

SEQ ID NO: 1398 - DNA, 649 bp, Arabidopsis thaliana landsberg
actaccgtccagcctcttgccatggagggtacacgctactctcgccatctctccacgcccattgcgtgttatcttcttctggtattagtctgcctgaggcaaagcttacccatgacgaggcatgtgagcagttaaagggtcctcggtcatcaagcctacatcggcacggtccttaatcgactaagacaaagaactacactgagactcctttctcgtgcaagtcacccgcccggtctcagcttaattatttcaaacccaaagtttggtacctggcagaggtacatgttttccgatgttgaacccatcacagccatgatggatccaccatcaagttttattttcaaaaacatccctcccactttgacacatcatctttttgtaaaaacaaaacattttgttttgctagagcaagactaagcataggaaaaaccttttgtaaaacagggattcaaggaaggtaatcaaattcagggaaggtaatgcaggaactgttttagcactcaactcctatcacctaatgcatcaagcaagtgagaaagattttaaatgcaccggggcttgcattggtttacaggtgattcgggctcagacctgcagatgtcaaataaaacagatgctgcatgatgttgtcaggtggtggtggtggagc

SEQ ID NO: 1399 - DNA, 1579 bp, Arabidopsis thaliana landsberg
  unsure (1)..(1579): unsure at all n locations
tgacagtctagagtattgaaatgggaaaaaagaaaaacagttttgctttgtttgatctaaattcacctccaccttgagagaagagaccacgtttaggtcacataacagctttacaaagccaacttactcagcttaatggatctaattctaatgattctgtgcctattagatcagctttcaatacagttttcagagatatcactaatttgccactcagttttgatgttaataatcaaccatcttcttctacacaaccatttgattcagcaacttctatacaacattcacatggtactgtcattactatacaatatccaactttcagattctatccgctttagaagattttaaaaatggttgtcacagttattaagaatgtgtttgaactactcgcaggttcagttgaaagatcaggacttaactcgattggcagagaaaattttcatcggcataagacagcttctactagaccatttagtgatctcaccaagccaaatcttcaaccatcacctcaaaatttatatgcaatgatgacaccagctactgcatatacattgaacacatattagttgntatatatgtatcttttagttctccaaactactctgtctattatgtaatttttaacttttaaatatttgaatcattaatctaaatctgattttatgtatgacaaggacaagacctgagtaatccatattcatgtataagcatccaaactcaaacaccagtaatgtcaacagagtattctcatgtacgaaatttacaagcagaatttgagaaagcatcaacatttgctaccaatccgagtaagaatatataggtttcttttcatttatattaaagtatcattttatataaggtgtgttaatcttatagatattatatttgatcataggagcagaagctaaaatcaattcagatactagcagtgatgatgaaaacatggccaatatgatgtttgatggtgcagtatatgaaagtgatactgatgtggatcaaaattactctcttagtagcactgacgatgaaagtgaagacccaaccacaatgcaaacagaatttgaatcaatggctaatgtcttctacttcatgagtagatacttgatacattcagctcacagatagatagatttatgattccaacagaatctactcaaacagcaaatgtcccagaatctgctcctaagaaaagaggccgtccaagattggctgtaaccaagcgaatgagaatgaaagaaattacacaacagaataagccagatattgtttgttatctaaattattcattgtcatacatttatttcagatattgtaatgcaaacccaaattatagttgtttcaggttatcttgatcacggtgatcctacttacaagtgtaagtattgtggtgctatgatgtggtatgatgagcggattagaaaaaaggagacaaacaaagaatctgttttcactctttgttgtggagaaggacgtgtcaaactgccatttctgaaggagtccccacatcttctcaagaccttctctaagaaaccattcactctctaacatacagagacatgctagattttaatatgat

SEQ ID NO: 1400 - DNA, 2679 bp, Arabidopsis thaliana landsberg
ctatcataactcgcgtatcacggtacgggttgcaaagccttaggccgtgatagaaaggtaaacgtatttctcgcggttggacaacttcgggcgagcggtcgtattcagtgaacctgggtttgccggctgcgggagtcaaccgtgatgcttccggatttgttcttggcctagagcggtttgggggtgttatagcaggtatatctattatccggaatcaagttctagttagttacactagaactagcattaagaacaactaaagatgaagaattctacaaataacctaacaaaggggcaatctactaaatcatctataaccctaatgagaaactctaaacctaactagaagactaatcaaacatggagattgtagcaaataacatgattgaataagaaatcaatgaagaaaacaagaagagattaatgtttagaaggatcttctttaacggagtctccacagggttttgctcccaatgtacaaaagagaaaagaagattagcctctccaagcttaggtctaaacaatgaccttaaaatctatatatataacctaaaacgtgatgggccttctttagaaataaggaaaagttttcggccgaatttgaaaatcttcaaaacttaagtaagttgtgtctttgaattgtcgtcaagtattggtgtggctcgacaccaagggtagtctcaatcgacacctacgcgatttttagtctctagatttcttttgcagcataagttctctgttttcctccagaatgctccattatctccaaatgaatcccaaacattgaaaaacctgaaaatgactagaaaagactctacaaataataaatagactctaaaacctatacctaaatcatagctaaaacagtaaaaatagggatatatcatttattaatacacgtcagcgattattgacttgacgacgcggtttttgctgacatggcaatgacattccttgtaattacgttttttcctttaacgtttagtagagacacgatgggtatataaaatagggtcaaaatatgatagtaataaaaaatgttttgtatggttcttgtaaatacacctaatttctataacatccgagtaactctccctaaaagatatggttattattattacaacgaaagaaaaaaaaaaccttgacgtgaatccacgcactcctctcttttctctcttcagtttcaaagaaccaaagtagatatacgcaaaactttgtattgcctctccggtatgctgtttccggtgccggagagggctccttttttttacttctcagctgtcttttcctccccctttggtaggctttgagtttgttatggttctctgtcttgatctgcagctctagaaggtggttgttccgaggtttgatgcggcgtggtggcaaggagtgtcacagctttggctaacgtcttctctttgagcggtgattattctctcaggttctggtcatagcttaggtgagttgtctagataagatatgtgagcttggtttggtggtttgcgtttttttgcggcattgtgtaagagctcgcgtgtaagaaattcagctcggattattctacatggggagagcttgatggcagaggaggtaatggaatttgaggacggctttgaatctaactctttcatgccttcgatgtggtctctcagccaggttttggaattagatcggttttgcttctctctttgggccctttgtggtgataactgcctcgtcggagttctcggtgagggtttttttagtcgttcattacggttgtggtagtggttgatggctgggtggttttgcggctccgtttttccgttatggctctttcgtgacttgctttgattactacttgtgtgttgctggtatttgttgttgtagtttcagcctacgctggtttgcagcgaagatctctttgcgtgttgccctggtggggttctctgtggggaatagaggtggtggtttggtctaggtggcttcactatctgtgggagatatttcttgttgattcgcaaaaagattggtggctggaggcagcttatctagctgctcgtagatgctctcgtgtcgccgggtaagggtattagttttctatagccgctttgtttttgcgttagtcttcggaaaagttgtaggtgctcctacttgaggtttgaggacggctttgagtttgggttgctcatggcaacaaatatgaggattctacgtccttcgagttgaggaaaccacgcaactgtctgaccttttctgtttagaatcggtgtgtcttcatgggtttctgcttttgttcgctagtatttgcttcatgttttctacttgtgaattgttattttggtctttttgtagctttcagtttctcattcttcttgttttctctataatttttgtcaaaaaaattcgaaaaaagtaaaaattttaacttttactaaaaataaatatggttattgttcatttagaaatacaaagaaagaaaaacttataaaatatagaataaaaaacatttatgtatttttcatataaaattcgacaaatcatgttttagaactgctcatttgtaccaaactgctcatgccctgagactgtcggattttgaagtttcaatatttttcacgtatctgctgagaattataaatgaaaaaggaggttcttttattctatatagtttatactgtagatagtagatgcaagcag

SEQ ID NO: 1401 - DNA, 589 bp, Arabidopsis thaliana landsberg
attttctgtcagcctcccccgttccctgatatccacatgccttaacatttagctgctaaaatagtgagcttaatttctaaggacggtgttgatatgttaaaggcttggattcaatcacgacccgatggcaaaggcgctgtttttcaagggaaactctttcttctgttcgactagataagtcccttgttttcattcacatggctcatgaatcgtctagttatcacatgtttgacaccaaatgcatagccttcaaaaatctgtatgccctatatcttcagaagcaattgctattttggatgctattaaagacgttttctcacatgctggtctactttacatcatgcttcatagttgcggtggatcaatcacgtggcaattttatactcagtacaagcgacagtattataaatttagtgaagtcgacttattcgcagataagctaatgtttcatatcaccgaggttggtccacgtcgccaagggacatacaaaagttcctgggagtttgaggattaccgtgaagctgtggtcgaccatcagaacctcaatgagtatgagggacagaggtgtaacacatgtatttacttttac

SEQ ID NO: 1402 - DNA, 500 bp, Arabidopsis thaliana landsberg
cacatcggtgacatgctgttcagtagggatcccagaatctaattcattgtcaccctcgatgaccactgttgggggattcgtggatggaagaatttcttgacttcagtggaagagcgtacatcggactcaagagaagaaaacttgtctttctaggccataacgtcatgttccctatcaagcaacaacctctcgtaatactcaatcatgtcattgagtttgctgtttgcctgaaccaagggttacaaaggtgagttagcgtataagggaaagagtagagctaaaaggtcacaaataaagagagctaacccgagatgagtgatgggcgccacctgtcaaaagtcggcacgattatgtctttccgagtcttgaagcattggaagacgtttccctctgtttccatcgctgtcaaagtaataatgaagttaggccgatgaatcgaacgatatagcaagtgaagataataaatggtaatttctaacctgtgagtgacttggtttgag

SEQ ID NO: 1403 - DNA, 2268 bp, Arabidopsis thaliana landsberg
aggaaactataagagcaaaaacaattaatgtggagaaatatgaggcaaagaagatactggataatgtatttaccatttaacttacatggatatcttacaatgcttatatcttccttgcttaaccgataaattacggtcaggtttgaaataaaactttgtttgaaaatttggattgaattatcttctttttggactacaggaaatacaaggataataacgatccagtttgttgttaatttgtcataaatggggtttacattaatatagcaacaaaaatcaattctgtggacattgatttaaataaatctacattccaggtaaatatgatatattgttttaaataattacatttatcgtttattcatcataatcgctaacaatcaatagtaaatttttcgttcgaaataacaaatttggtcattaaaatgatggtaattttactctaatttttgtccaaataacaacaaatttaagataataattgagattttaggaaaaaatagaaaccgctcccatgcttttatatcgagaaagctaccctagccttgatttctgaacccaatgaagctttggctcgccaacataagaatttgtctcttcttgctcacaacttttgtaattgtattatccctttagtctcgttttggtccatatctcactcatttcaatatttttgttctcctggaaagtttcaaacaaagctcaaacaacagttatagaagacaaagaagatacccagtgactcctctctctttcctccctctgttcacatccctcctcgcaaagctgttaccaccaaatctgtctaaattcttttgatcaggattaaatatgatctctatagaagcttatccactggactttgttgatggcaagaatatttactcttggaatggatatttgcaccatgtctgatggagtcattaacggagcacggggggatttgtaattcacctttgagatcaaagagttcctcttgttccactctcaactgttcatcatatccatgtaaagcatttaaatctatagtttacccatggctacacatggcatctagacatgttcagtaataccacataaagatcatgtgagctgagtagagtcatcaaagctttacgtaaatttctttctataaatatatttgattcttaaaaatatgaagtacaacgaatgcttgtttaaatacactagtttcacatgcatatataagagatgtcatagataaatagtacgaaacggtgattttatgtttgccttagtatgacttccactaaatctgaattatgtcattgggacctcttttagtgatgttagagttttgatttatggtcaagcattttactttgagaaagtttagaaatttcagatttttggtttgattcaattagagtcattggatatttgtgagttgaagtgttgtcatatcaactccaaataatatgcaactaatttttctttcattggttgaaccatttggctgttgttatagtttttgtgttcatggttgagattgagtaactcattagccgacaagaatgacacttggaatatttaactgtaccgaagaatactaatgggagaatacatgtttggttgtttaatttcttggcatgtccaaagattcagtgatttagaacataaataagaaaatagatggaatgtaaaaggtacttacaaagaagttttaactaatgaaacaaatgattttaagaattttgcattttactaatttcactaaatcgacaaaaaaacgttttttcttgagcaaagttgacaggaaatttgatgaagggattaaatgctcgatgtcccatggtgaaactttatcatgtctttcatttttacctgataaggtttcaatatggaaaatcgagcatttaatgctttcatcaattatttcttactcaacatacccatgggtctaattagatcaaatcaaaaatctgaagtttctaaactctctacaaataaaatgactggccatattcaaaacccatacatcactaaaagaggtccaaatcacacaattcaattctacagtaggtcgtactaaggtaagcataaaatcatcattttcgtactatatatctacaacatctctttttgtaattatgtgaaactagtgtatttgaacaaacatttgttgtacctcaatatattaagacatcaaaaatatattagaaagaaatatgtgtacagctttgatgactcaactcggctcacatgatctttatgtggtgttattaaacatcttcaaatatgatgtgt

SEQ ID NO: 1404 - DNA, 495 bp, Arabidopsis thaliana landsberg
cagtggagctacacgtctcggcccgtgtcatagggcaaaacacttcgtctacacgtttcttcattaaaatctttatgagtggatgtttagattactaaggatgatttagttttataggcttggcttcattttctctaatccttttttaaaacttatattccaaccttttgggctctataaatggaaatgaccataagaaaaaacaataaaatactttaaaatctttttaaaaaaaaaggctttgtgcctaaatatttcaagataatttattatactatcggttttgaaacaattataatttcttgttaaaatatatacagtaagaagacatgagccacaccatacaaataaatgttacttctatctcaaaggaaataaaaaaaacctatcttgggctataaggcttcccacctaaaaactatcttgtacggtgagtgagaaaggaagtattagtcctcatgaagctcttagaacccgtttccaagcaccatactt

SEQ ID NO: 1405 - DNA, 518 bp, Arabidopsis thaliana landsberg
gattacgtatttttggcgcggagcgtgttttttcctcattttcgagcactaagactcgcctgttggttgtctgaaccgcttcaccaagcgtgagtcgccccgtgcaaaggtgacgagtgaggtatccgtatctcggaggcgtaggagtccctcggctcggtcggcctcgctgtccgaggcttctcttgcttagttaaaggaacccctcggccgctcttcgatgagccgaggccaggggtagcggcgtcacgacggacagaggcagagttggctcgaaaagaagacttggtcggccggagcttggccgggtcgtccgttagcgggaccgacgccggagtcgatctgccgaggcctcgggcggggctgatgtcttcgggggacagctggccgaggctcggggtgaccagccgagccgcctgctcgagctggattcttggaggagaccctggagtcgtcttcagagtggagatctcagaccgtgtcgcgtccgaggctaggtcggactcgtcgaaggtgta

SEQ ID NO: 1406 - DNA, 600 bp, Arabidopsis thaliana landsberg
ggagccaggaaatccggtctgtctccctgcccaaacccgaggcaaatccaaggttttgtcgtgtctagggctcgcgtcccaatgccatcttctggcacacgacagaggggttagttagacacaattttgtcaatggggccattaggattcgagttagggatcaaggtgaacatccctgatctttggctcaaggtctgaatttcagaattctgaaattcagaaatcccattaagtccccacatgagaagcttgatttggggttttatttgagttattttggctaagttttctcaacatttcttgttgcccattaaatatacttcaatttttataattggcccaattcataattttaaacttttcataccattttccttattttcttgaattttgctcatagggctcacttagggtttttactagagttgcacattcttaccttttttaaaaaaaagactcaaatgctttgatcatgatacttttaagtatatgcttggtgaattctttattacttaagttaatttcatgctcatgcttactcctgcggaatcttggatctcaggaattcctcggttcccatgtagctcctcctctgagtga

SEQ ID NO: 1407 - DNA, 605 bp, Arabidopsis thaliana landsberg
cgaatcaacaagttaaagccaaaacgcttcctgtaaccaataccttgatacagagccacgaatctctggaattagtggttcagaaatttcatcgaacaccttttgggtgcggaaatgtctaggctcaaattccagttgatcagaaagcaataggcattaagaacaactaatccagaaggaatctataaatcaaactcaaccacctagcatactgagaattctaaactactctaacccatcctcagaaaccaagtcactactcagacatcattgcagagagcataaacgaagataagaatgaaaacatgatagcaacagagtaatggcaagatgataacaggatgaacaacttagtaaacgaaatgaaaagcaaatactgaatagattaagagaaatgcggattaaaaaatgtcaagaacacaatgtctgcggaataaaacttgtctcgaaaaatgtaaagtacaagctacttatagcgaaatattctgaaaccctaatatttcaaacgacacaatattgggacggagccatgtaatcgagtgagtgatcgagtgaaggtgatggtggtactcgacctagaggccggtggtgatgtgaagtgatga

SEQ ID NO: 1408 - DNA, 615 bp, Arabidopsis thaliana landsberg
  unsure (1)..(615): unsure at all n locations
tgacactgaatcttatagcattataaacattataaatcatagcctatatatattgttattataagtcgataaatgaaagcgtttttgtaatgcgctggtagaatactctatcatagcatacagaaaaaatgctatcgtatatggagggtctaccataacaggggcnnnnnnnnnnnnnnnnnnnnnnnnnattaatgacattttatagcgtttctctcgtgataagaatgtggatatttcttgtagtgcttgcaagttgaattgaactcccttaataaaagaaacctattgtcacttcatttgagaatgtaaaacatgttgggcacaagtgggtattcgtgcgaaacaaaattgagagagatgagatcaaacgatattaagcccgacttgttgcacaaggtttctctcaaaggccatgagttgaatatgaagaaacatattctccggtcatggatgcaattacattcaagtacttaatgagcctttcggcatctaataatttagatatatatatatatatatatgaaaatcctgaaaggattaaaagttatagaggcattaaacacatcaaagtctaaagatatatatgtggtcacaatacagcgatcactttac

SEQ ID NO: 1409 - DNA, 597 bp, Arabidopsis thaliana landsberg
  unsure (1)..(597): unsure at all n locations
tcaaataaaataatatcatatatttataatcaactttacaataaaagtttttagtttaactaaaatataagcctacctgctgtataatgcaagttaaaattataaataagcagattaccatcacgatggatgtaccttctcacatacacacctatcaaaaacttaaaacctttcaaaacctcttggtatattcaaattaggattcttcattcatgaaatcattattccaaggattttgggatgtcttatgaaatgattttggcagaagaggatgtaaatttttttgaataaaaagtactcaccaaaacatatgtttattgggattttttagataattaaatcagagaatagggctgggcatatgagtacccattcgagttcaggtagaacccgttcggtcgcgtccagttgggtttaggtcagtttggataaaaagtttcaggcccaaagtactcaaaaaatagaaacggatattttgtatgtaaatagtgcatctccanacaaaaaaaccttttaaatttattaagttttaataaatttaattaatttgaatatatttactaaagttttacaaatatataaataattttaccaaca

SEQ ID NO: 1410 - DNA, 563 bp, Arabidopsis thaliana landsberg
aagttatatatttgttttgctgatatttttttattgatgtagtgcggagtttttaaattgtgtaattgcattttgattgttaactctaagattacatccatataatacaatcccgtgtgaatatggatccaaatctgtcccaccatataacaatcattttggcatttggttatgaaattcgagtatttatattattgaaaacttcaaaaaagttttaatatcgatccaaacttcatatgtatattgattgttacatatagaattccacccgaaatatatcgtcccgtattaatatattcttaatacttattatgattaaacttcttataaatttcaaaataaaccgaataacacttttaattttggatgtctgatatatcaagggtcatgctcattcatattcagaagcattttagtcttttttataatatgactccaaacgatttcccaattttttaagcaatgtgggatcttgcacacttattgttttcatcgattaagtattatatatctgtttttaaaaatttgaattacataagatggagaaaaatcaaatgtgagat

SEQ ID NO: 1411 - DNA, 623 bp, Arabidopsis thaliana landsberg
  unsure (1)..(623): unsure at all n locations
tattatacgcgagtattccgtactaatttatctccattaacagtgtcattgtgggaaactagagataaagaaactgatgaaaaatccatgcttgttcttctctacttcttctaannnnnnnnnnnnnnnnnggctggccaaatgacgaagcaccaactgtccaaattaggagttgctggccaaatgtccaagagatttaaaaagactctcaatcaacattggttcatgtgggttttggaagttcttgggacggtactgggaataaacttgacaatgtcggatatggttatacctccaagaatatacggcatatactcttgtgtaacaacatcatgctctcgggctccacgaactggcttctactgtcaaatctttaattgaagatgaagatgatgaacaaggattctgagaagaagaaaaagggaaatccagtgtcttcatcgactttgcctcagcgaattaagaagaaagccaaagatttatcaggtttatgacttaaaccaatattaaatcacaaattttgaatttaagggactgaagtctcgaactttcgatttaggggatcaaaactttaattttgattttgtgtgactcggaacgaggtctgacatttgtgtagttgt

SEQ ID NO: 1412 - DNA, 577 bp, Arabidopsis thaliana landsberg
tctcattttgctggaatgcggatgcaaccactctgtttttgattcgatgaagttgattctccaaggggggggaaggacaacaatgtcgaagcaagcatagatgacaaggaattgacacttgcatacattgaagccgttgtgaaatctgcagccttgagctgggaagagcttttaacaaggcccttttactcggaacagcttcttgagctagaactaacagatggcatagttttttcttctacacagctctgcgacgataagaatctcctttacgactgtatcaatgaagttcttatggacttctgttggaatgaattcaatcccgggccttggatttcattcgtgaaacctgaggtccagttgatctcagacatggaaatcgcagctaaagtagcacaagaaggagtttactggcatctccaacctttgccttcgcctcacactttagatcagatagtaaaaaaagacatggctagaactggaagctggatggatctccggtttgagatcggctgtcttggttcctatacatgtgaaatgatccttgatgagttagtagatgagatcatcatgagct

SEQ ID NO: 1413 - DNA, 578 bp, Arabidopsis thaliana landsberg
atcaaatcatatgttttaaatggagttagtagcaatggaagtaagaacatgctagttgcagatgttttgtgcttgagttacgagtacttgcctcaccatttaaagcaatgttcctgaagactacgaggttcatgtgggaacactagttagttactggatcgcagagggaatggttatgcctgtaaaacacacagaggctagcacgacagtagaagatgtcgggcaagattatcttgaggaattagtaaagagaagcatggttatggttgggaggagggacattgtaacttcggaagtcatgacatgccgtatgcatgactcatgagggaggtgtgttatcagagactgtctcaggtgaactacataaatcctcgatctagatctcttgtctatattataaagaatcaaggaagttcatgggcacttttgggtaaggtttccttcagaaagatgaaacttcttcgagttctagatctcgagggagtgcaaatcgagggagggaagttgccagacgatgtaggagatctcatccatttgaggaacctgagcgtgagattgacaaacgtgaaggaacttac

SEQ ID NO: 1414 - DNA, 590 bp, Arabidopsis thaliana landsberg
tgctcccaaagtacaaaagaggtgaggagaatagcctctccaagcttaggtctaaacaatgacttaaaaactctatatataacctaaaacacgtgatgggccttctttagaaataggagaaagttctgggctaaattggaaatcttcaaaacatcaataagttgcgtctcgcaattgccgtcaggtggtgtcgttcgacaagtacgtgcattttcgtctccggatttcttttgcagcttaaggtgtctgttttcctccagaatgctccattatctccaaatgaatcctaaacatgtaaagacctgaataagacttgaaaagactatagaaataacaaaatgactctaaaacctattcctaaatcatagctaaaagcagtaaaagtagggttatatcagcaagcaagagataagtttgggggagttgataacactgtattttactcattttaggtgtatgtttatcatcatttagccgtgcatttgatcttcttgcatacgcattgcatgttttggtgtgttttcaggtgcagaaggagctaaaaagaactttactcgatccattcactcaatcaagggagctacagaaga

SEQ ID NO: 1415 - DNA, 526 bp, Arabidopsis thaliana landsberg
agttcttcttcttcttcttcttcttctttttcttcttcttcttcttcttcttcttcttctttttctttttcttcttcttcttcttcttccatgttctctggttgtgagatagtctccggatttgaggttcttggtgttgtttgagtctgaatattacttacaccaagtcttccaaggatgattcggagatttgcagctctatccgagggagagtgagtaagatcttgaatatcttcccaattcttcttatcatagtagcttttagactcgagaaacttcacatctctagagataagaacttttcttgtttccggtacataacatttataccccttttgattaatagagtaaccaatgaacatgcctttaggactctttggttggagcttgtccctatgctctcctttattaagccacttcaaagggagaagagtctagtaagatcttagttggtgttcggttgattaagtaacacgctgagaccaccgcatcactccaaaaatgttttggaacatccgaatggaac

SEQ ID NO: 1416 - DNA, 512 bp, Arabidopsis thaliana landsberg
  unsure (1)..(512): unsure at all n locations
tcatctaatatataagataattatttcttagaaactaaaaagtattgtttttcaatttgggtatgagaaccctctcgagaagggttcaacataatgaaacatgagagagttagtgtacaaaagtgagcaaattttcattagaaattatatgtacttactatattagccgcaccaaactccacctaatcaagagcaaaatcagntntttttttttttttttttttttttttttttggggaaaaacgaatctgttaaatttgaacttatttcacaacttggaaaagacactctatgatataacatgtttcttttacttttaaggaataaccctaattataacttttgtagaacaaaatattttattgttgtatgcaatgttcaaaacgtagctggctagttccaccacaactcgatttacgtgttgagagttgaaagaggaaatataagaatttaaaaaggccaagttaataaactaacatggcagacaaaacctgagtgggagaatcgattta

SEQ ID NO: 1417 - DNA, 313 bp, Arabidopsis thaliana landsberg
ctaaccactggtgttttatgagttaaaagttcttatatgatattgtcaactctgggtaactcatgaatgctgatgaaatttaaaacaccattcaggtgttgggctacccaagcaaaccgattgggctgttcataagacgttcaatcatcttcagatctgattccaatggagaagatcttgaaggttatgcaggtgcaggcctctacgacaggtaatgtgaacataaatcaaaaacttatcgtcattgtcttgatctcatcatcttaacaacactggagcaaccatgaaatttttcctttccgtttcttgccat

SEQ ID NO: 1418 - DNA, 4310 bp, Arabidopsis thaliana landsberg
tgtctacttgtctcttctctgtattctctgttcactaggaaaactccaggaaatcccgtaattttcagtagacttgatgaactctctgtaagactctgtagctcctgttggtcgagtaaaatgatgatttaaaattttttgggttttaaacatcacacatactataccaatgtactcgagtgcaaggtctccaggtgcaacagaagattttcaaaattttgtactccaacgtgctgtacactcgatctccaggtcttctgtagagtaaaagttttgaatttttactctatctccacattgttcctttgttcctgagaaccacaaacataaccaagataaatcaaaaataacgagaaaataaaaatttatttacagagatagtcatgggacttcctcccaagtgagcttatttaaagtcattagcttgactcctttactcctttaatcattaagaagttcctggagatgaaccgatgtcacctctggaaggatttggtctgctaagtatttcttgagcctttgaccatttactgtgaagtctctactcttaccagctagagtgactgctccataaggacggacctcagtgatgcagaaggggccagaccatctggatttaagttttcctggaaagagtttcaagcgagagttgaatagcaacacctgatcaccaacctggaaatccttagtgatgatcttcttgtcatggaaaagcttggttctctccatgtagattttagaactctcataaggttctagacggatctcatcgaggtcactgagttggatcaatcgcttctcctcagcagtttttatgtcaaagttcagaagttttaccgcccacattgctttgtactcgagctcaacgggtagatgacatgattttccatagagaatattgaaaggagttgtaccaatgggggtcttgaaggctgtcctgtaagcccataatgcatcatctagctttgcagaccagtctttccttgtaatcccaacagtctttacgagaattgcttttatctccctattggagatctcaacctgcccgctcgtctgtggatgatagggagtggcgaccttgtactttactccatgcttcttcaagaggttctcaaaaaccttgttgatgaaatacttcccaccatcactgattactgggaactccaaatctcgggaagattatggtcttgaacagcttcagcacaacttttgcatcgttggtaggactagcaatagcttcgacccactttgatacgtagtctacgaggaccagtatatatttattaccgtatgaagatgggaatgaacccataaaatcaatcccccatacatcaaagatctcaacttccaagattggattctgaggcatctcatttcttctactgatgttgccttttctctggcatgaatcacactttgaaacaaactcctgagcatccttaaacattgttggccaccaaaagcctgcttgaagaatcttggacactgtcttgaacgtcgcgaagtgaccaccatatgctgagccatggcaatgcagcaggataccttccgcttcatcttctgagacacatctcctgtagatcttatctttacagagagtgtaaagataaggctcatcccagtagtaatggtgtatgtctctgaaaaacttcttcctttcataacttgtcaggttgggaggctctactccgcacgccaagtaattgacgtgatcagcataccatggagattctccttcaacagcattcagttggtggaactctttcccactagctctttccgaagaactctacaaccatgagctgctcttctggcattgaatcgtctatcggaaggggttcttcaattctcatccttgacagatggtccgctgcaccattttcaatgcctttcttatctactatctccatgtcaaagctcttgcaataaaagtatccatcttaacagttcttggtttactataccttcttggcatacagatgcctcaaagctgcatggtctgtatagacagttacctttgatccaaccaaatagcttctgaacttctcaaatgcgaatacaacagctagaagctccttctcatttgttgcatatcttccctgagcgtcatccaacgttcggctggcgtaatatatgacatgaagcttcttgtctattttctggcctaaaacagctcctactgcgtaatctgatgcatcacacatgatttcaaatggatagtcccaattaggcgctcgaacaaccgagcagataccaaagcgtccttgatagtttgaaaggatttgaggcagtcatcatcgaattcaaatttggtttccttgcacaatagtctggttaacggtctggctatcttggagaagtctttaatgaatcttctatagaatccagcatgaccaaggaagcttctgatgtccttcaccgtttttggtggctgcagctgcatcatcacttcaacttttcctttgtcaacctctatacccttctctgatatcttgtggcccaatactatgccttcctttaccatgaaatgacacttttcccaattgagaacaagattcgtctcttcgcacctagtcaataccctgccaagattcaacaaacatgaggagaaagaggggccatagatcgaaaaatcgtccatgaaaacctccaccatctcctcgattaagtctgaaaatatagaggtcatacacctctgaaatgttgcaggagcattgcataaaccaaatggcattcttttataggcaaaagttccataaggacacgtgaaagtggttttttcttgatcattagggtgaattggtatttgaaagaaaccactgtatccatcaagaaagcaataatatggatgattagccaaacgttgaagcatttggtcaatgaatggtaaaggaaaatgatctttcctagaggcagcattcaacttcctataatctatgcacattctatgaccagttatacttctagtagggatcagttcatctttttcatttttgacaacagtcattccaccctttttagggatgcaatgcactggagaaacccaagtactatcagagatagggtagatgacaccagcatcaagcagtttcaaaatttcttttttcattacttctttcaaattgggatttaacatcctctgtggttcaatgctagaataggattcgttttcaagatggatcatatggttgcataaactaggtgaaattcccttaatatcggataatgaataaccaatcgctctcctatactttctaagctaagataatagcaggttcacttcatcactatttaactcagcattaatgatcacagggtaagtagagtttggaccaaggaatgcgtaccttagaccttttggaagtggtttgagatcaactttcggtgccttaagttcagaccagtcatctgaagttgcaatgatcggctccccagattcgttggtagacaaggtcgagtggctggtcgagtacgtcctcgagagtgcatgttgaactcgagttgacccttcttcgctcattaccattacctccgttgctggtccattcaattcctcaaagggttctgatccttccatcgctttatgggagtctaacagcttctggtatcccaatgtttccaaatgcagaaatccatcttcaccacttttggttaaagcactgttaagatgatcttcttctgccagctcttccagtaattcatcggctaactgatccatttcttcgatccaaaagagttgcccttctacggtaggcttcttcatcgcgtctttgacatcaaaggtcatcctaaagtctttgccaaggtttagatcaatcttttctttcttgacatcaatcatagctcctgcagtggctaagaaaggtctccctagaatcaaagggtccttgaactgctttgcctgatagttggcttgtctgttttggagctgaagaagatgcaaaatgtccctctaagtatcgtactttggtattcagtgtttccatcttgacattgagatcattgacccctcacatcaccttgttatgacagtcagatatcttctttgccatctccatggagccagaggcttggttttttagcagctcttgtagcatttgtttcatgtcagggtcaggagcagcaggaccttggttttgctaaggtgcaaatccaggaggtggttgttgctagtagttcccttgaaattgctgtttgggaacaaaaccttgattgtaaggaaaaaaaggtctgttctgaccttgttgttgttgtggaggatacacttggtcttatgaattagcaacgttggtgctgcggtaggagaggtt

SEQ ID NO: 1419 - DNA, 687 bp, Arabidopsis thaliana landsberg
attagtagctcgagtagtgatgttgacccgaggttcatgcagaatagccccacgggtttgatgatttcccaatcgtcgtcgatgtgcaccgtaccgcctgggttagttccggttatgaatgatgattgggatgtgaattgcaggatgatagacattctttttttctttcttgtgtgaatatgaattttcctgatctgataaaaaaattgtgttcttgatgctgcttgtgtactggaactgtcatctagcatggcagcaacaccaccaataagctcaggttccggtttatctcagcagcttaataattcttctagttccaagttatgtcaagtggaaggatgtcaaaaaggagcaagagatgcatctggtcgttgcatttcccatggcggtggacgtagatgccagaaacctgattgccagaagggagctgaaggtaaaacagtgtactgtaaagcccacggaggtggtcgcagatgtgaatatcttggatgcaccaaaggcgcagaaggcagtactgatttttgtatagctcatggaggtggtcgaagatgcaaccatgaagattgcacacgatctgcttgggaagaacagaattctgtgtcaagcacggtggaggagcgagatgcaaaacatacggctgcggaaaaagcgctagtggtcctttgccattctgccgagcccatggtg

SEQ ID NO: 1420 - DNA, 2603 bp, Arabidopsis thaliana landsberg
tgctggagcatctgcctcctgcgcagatctccaactggacgacctgtcaaacgtttcgccgcaacttccaggcacatatgtgcgccctggaactcctgggatcttcgaagtaccgccagcagccgggagaatccctccaggactacatctcgcgattttcgaagcagcgcaccgagctgcccaacatcaccgactcagatgtcatcggcgcgttcctcgccggcaccacttgtcgcgacctggtgagcaagctgggtcgcaagacccccactagggcgagcgagctgatggacatcgccaccaagttcgcctctggttaggaggcggtcgaggccatcttccggaaggacaagcagcctcagggggccagccgaaagacgtccccagaggcgtcgctcagcgcggcaccaagaagaagggcaagaagaagtcgcaagcgaaacgcaatgccgccgacgcggaccttgtcgccgccgctgagtacaagaaccctcggaaacctcccggaggcgccaatctcttcgacaagatgctcaaggagccgtgcccctatcatcaggggcccgtcaagcacacccttgaggagtgcgccatgcttcggcgccactttcacaaggccgagccacctgcggaaggtggcagggcccacaacgacgataagaaggaggatcgcaaggcaggagagttccccgaggtccacgactgcttcatgatctacggtgggcaagtggcgaacgcctcggcttggcaccgcaagcaggagcgtcgggaggtctgctcggtgaaggtggcggcgcagtctacctagactggtccgacaagcccatcacctttgaccaggctgaccaccccgaccatgtgctgagcccggggaaatacccgctcgtcgtcgaccccgtcatcggcaacgtcaggctcaccaaggtcctgatggatgggggcagctgcctcaacatcatctacgccgagaccctcaagctcctgtgcatcgatctgtccttcgtccgggcaggcgctgcgcccttccacgggatcatccctgggaagcgcgtccagcccctcgggcgactcgacctccccgtctgcttcggaacgccctccaacttccgaagggagaccctgacgttcgaggtggtcgggttccgaggaacctaccacgctgtgctggggaggccatgctacgcgatgttcatggccgtccccaactacacctacttgaagctcaagatgccgggccccaacgagtgcatcaccgtcggccccacgtacaaacacgcgttcgaatgcgacgtggagtgcgtggagtacgccgaggccctcgccgagtccgaggccctcatcgccgacctggaaagcctctccaaagaggtgccagacgtgaagcgtcatgccggcaacttcgagccagtggagacggttaaggtcgtccccctcgaccccagtggcgacgcctccaagcagatccggatcggttccgggctcgaccccaaataggaaacagtgctcgtcgactttctccgcgcgaacgccgacgtcttcgcgtggagtccctcggacatgcccagcataccgagggatgtcgccgagcactcgctggatattcgggccggagccgaccacgtcaaaatagcctttgcgctgattcaacgaggagaagcgcagaggcgataggcgaggagatcacaagctaaaagaagcgaaaagcgtcaagctcaaccctgagaagtgtgtcttcggagtcccccgaggcatgctcttggggttcatcgtctccgagcggggcatcgaagccaacccggagaaaatcgcggccatcaccaacatggggcccatcaaggacttgaaaggcgtacagagggtcatgggatgccttgcggctctgagccgtttcatatcgcgcctcggcgaaagaggcctacctctgtaccgcctcttaagaaagaccgagtgcttcacttggacctccgaggccgaggaagcctcgggaacctgaaggcgctccttacgaacgcgcccatcttggtgccccccgctgtcgaagaagccctcttgatctacgtcgccgctaccactcaggtggtcagcgccgcgatcgtggttgagagatgagaagaagggcatgcattgcccatcgtagaggtcggtctacttcatcagtgagatactatccgagaccaagatccgctatccacaaattcagaagcttctgtacgcggtgattctgacgcagcggaagttgcgacactacttcgagtctcatccggtgactgtggtgtcatccttccccctgagggagatcatctagtgccgagagcgctcgggtagaattgcaaagtgggcggtggaaatcatgggcgaggcgatctcgttcgcccctcggaaggccatcaagtcccaggttttggcagactttgtggctgaatgggtcgacacccagctcccaacagctccgatccaaccggaactctggaccatgtttttcgacgggtcgctgatgaagacaggagcaggcgtgggcctctcgtcatctcacccctcgggaagcacctacgctacgtgctacgcctctatttcccagcgtccaacaatgtggccgagtacga

SEQ ID NO: 1421 - DNA, 1306 bp, Arabidopsis thaliana landsberg
cttgcagaaaaaattcggaattatcttccacacaaggagttactagaaatagtccaaaggttagcactaagacaccttttatctccctcttcttctgataaaacatacttctttttcttttggcgacttatgaatacagcaagcttgaagaatcaaatgtcgataatgtaagtgtagattctctaatatctatggaggaacagctcgagactgctctgtcagtaattagagctaagaaggtatttctactaagtgatcaaaccaattatcccaaaatcttttgattagttagattaaaaagaatagtcttctgacataatccgtaatgtcttgttctagacagaactaatgatggaggatatgaagtcacttcaagaaagggtacgtttagtgcttaatttggtttttaattgctatcaaagccatattgtagggtaatgctgattcttgaatacttttaacctccgattctgcagatctggcctttaaccaagtttaactctagatatttcttttggtcttgtcttagttccttatttgttcttggctttattttagatgaaaccctaatttgaacaacaaaaataaagcatttataaactcgtgatcatggtcagatagctttagaacttgttggaaactaatgaccttttgatcgtgtccaaacaggagaagttgctgatagaagagaaccagattctggctagccaggtgacaaaaacatctcttatgattcttcgagctaattcatcattacacttgcgttaaaacatatatataaaaattgaaggagtttgatggaagctaggcattttttttttgtgaaaatacaaatatcttgttactatttagttggagctgtagaaaaagaaatttgaaggacttcaatgaatgcaacacagttttgagtgaaactcacaatttagttttaagcaaaagaaaagtatactcttaaaaatctggatttcttgttaatgtttgttagctgtaggaaaataatgtaagaaagtttcttacaggtggggaagaagacgtttctggttatagaaggtgacagaggaatgtcacgggaaaatggctccggcaacaaagtaccggagactctttcgctgctcaagtaatcaccatcatcaacggctgagctttcaccataaacttactcacagcctgattcagaagcttttacaaaattgtaaattataaaaagctgcataataatctcaacctttttatcttcctcgcgccaatgtggaaataaaggtaaaacaaaacgaagctcttttcttttatgcgaaagaattgaaaa

SEQ ID NO: 1422 - DNA, 1858 bp, Arabidopsis thaliana landsberg
cttgcctcggttacaagtgagtattgatctcaagaaagaatgagaaagaagaaagcaatccaagcgcaagagctcaaaagaacacaacaaatcactctcacttaacactaaagcttttgtggaattgggagaggatttgatcacttgggtgtgtcttgtattgaatgcctagatcttgtaagtagttggaaggtggaaaacttggatgacttgaatgaggggtggttgggggtatttataaccccaaccaccaaactagccgtttggtggaggctgcagtcgcatggcgcaccggacagtccggtgcgcaccggacagtgtccgtgcgcctgaaagggaaatgtgcccttggccatttctaagtattttggtgattgagtgccaacacaagtgcttttgtgttagtctatgcaaagtggtggacaaagtgcaaatcaagtcaaaaggtatgtttttagacttagtacattgtctttatggactaatgtattgtgtctaagtgctggaaacaggaaaaatcgaattggaaatgagatgattttgttcaggtaaagtctgcgcagtttgggtgcaccggactgtccgatggtcacggacagtgtccggtgcgccaggatggtctccggtgaaaagaccgctctcgggaaaagatcagcagcgtacggctaaaattcaccggactgtccggtgagccaacggtcgccagcgcaatggtcggccgcgcaattccgcgggcgacgcgtggcccgcagaaacggtcggttggcacaccggactgtccggtgtgcaccggatagtgtccggtgcgccaaccgaccccgaggaccaacagtcggatgcgcccgaaaaggaaggagatcgcgcaccggacaactacagtgactgtccggtggtgcaccacccgacagaaggcaagtttgaccttccaagttggcctccaacggctcctagctgccttggggctataaaaaaagggacccctaggcgcatggaggagcaagacaagaattcactaacaatcctaagactccaagactccaactccacgcattcgattctttgtgttagcgatttgagctccaattgagtcgtgaactctgtgtgttgtgttttgagctcaagtcgtgacttgtgtgcgtggttgtgttgtggatttgagacttgtgtgtgttgctctctgtcacacccgggttttaggggtccaaagcccgggcgcgaacatcatcaccaggtgtgctgggaccaagtctcacacatatgatgattcatggcacaggatcgaatgtcacatctttactacataacaggagttctatacaaaataaataaataattacattataaggagacaacggtccagcaaccacagttggctgggagacgacggtctagaccactcacgagctcatcatggcatccttcatgcgcctcatcctgtggtacatgttcttgacctgtgggagggtgtgagacagcaagggtgagctcacttgtgttcatcgctcaacaagttatggagaataatatacatgaactcgccaaaggtgggagctcatctaaagtgtaaggcttaccaaagaggatggttgaagctgagcattgcttttaaagttggtcaaaaaaattttagtagttactaagtgtaagtagataccaacccaaataagtaatagatcaaaattaataactacaccccacaatgcaatgcatacgaccaattaagtttaatttcataagttaatcatgtgagtgtccgagccactcatgaccgtgagcacgactgatataccagttttacactctacagagattgcacatctttacccacaagtcgtgttacccatttgccaagagatca

SEQ ID NO: 1423 - DNA, 5158 bp, Arabidopsis thaliana landsberg
  unsure (1)..(5158): unsure at all n locations
aaacacttggccagcagcttgtcctgcttcttgcaccacttctaaagtttactgttatttttatgagcttcacgcaagctcttgctctccctcgctgggggtacatgttcaccaaagtgatacatgctagtgtcgaactccactgctctgtcttcatccatcccatcctcagcatcctctcctagaagatcatcctcatccaatggcggagcgttctcatagtagaggcgtccaatctcaggccgaaaatcaatgttatctccctctattatccgtgtaacctcagggctagggagaaggatgttagctctcttatctgtagagtgctcaaacctgaaccggtgcaagtcgccaacgattgcgaactctaggaatttgcagtggcgtagatgctcgatatccattgcccgtggcttgagtccatcagatgtgattgtgactccacaagcgatcagaatcggtgtcacaacaccacctatgcacagagcgcctagtgctctcttttgttattgccgacagcccagctcttgtatccacacagatggatcagaaaaagtacagagagagngtgtgtcattgatttcaccttggagagacatgctgttcttagtttggccaagagttcccttgagagccatagcgatcatctccatatcagaattagtaactgtccctgtgatctctcgggagtagagtacattggctatagaatgctggaagtacctgatgagagggctacgtatctgattgctctttgacctggcataattcagcggtacagagctgccaatggtgatccacaagtctttcaactcttctctgtcatacttgggcttagttcccattccactggggaaaccaaacaatccttccaagcgcttgattgataacctatactcatgacgatacacagagaatctcaagaatcccaatccttcacaattcaactcatcagaggtcatactttggtagagctccacttgcagcgtggagaggaattgaattgtctcatcttcatatgctatatacggataagccatcagagtgtccagatggcaactctggtacaggtgttgaacatcctccaacagtccgagttgtgcaagtgtggtcgagcatgggtatcttgtgctacataactcattcagttttaagagcctgatatactcctcagcaggcaatacatcaggttcgtgaagaagtttggtggctctgcgagtatgctcaggcatgtactcggcttccagatcctcatctataagctcatacctctctgtcattgctctcttcccttgagctatctcagcttttctcctgaagttatcatattctttctgttctctttttggccttgaagacgacgactctgtctcatccatgttatagtcaggatcaattgaagaactgccactgtagttactcatgattctcctgcaaaagatttagaactcaaaacccaaatattaataggttagtctcaaagataacaatgaaaccataatcgttatcaactggcaatgaaatggaccacattggtcgagtatagccttgtactcgagtaaacagggctgtctccgagttctgctttagtgaatcgagcaaaacagaaaccggtggtcgagtaaacctttggaggtcgagtaatgttgaggaagtcggtacagctggtgagttcagacggtcgagtgctttgtcggtgagccggaattggcaaggacgaagccacaaatcgatggtcgagtcttgtggatgtaatcgagtagctcttgggacttcgacggcaaactaggtggggactcgactgcggcggcgcaaagacggtcgagtatggcgagaacaaagagacgatgaacggtgaagtgaattggtcgagtatagggacgaaagtgaacttggtgacggtgacgaagcggtcgagtacggtgagaaggggttgtgtgattttcttcaccgcggtcgagtggtagccttgaagacagattggtcgagtgaaaaagatgtgggcgatttcaaaaaggagtggtggagattgagtttgagattctctctccatcttatcttcagggagaaagcgcgtggtccacactctgttgacttgtctttgaaacttcaggaaatcttctgtaacctgacaaaatccctgcaagtcttcgtagctcctgttggtcgagtataatcatgatttaaaactttttttttttttttgggtttaaacatcacatgtactcgactgaagtactcgactgatgtactcgactgatgtactcgaattcaactccaccggggtatacactcgatctccaggccttctgtagagtaaaagttttgaatttttactctatctccacgttgttcctttcctcctgaaaaccaaaaacacaattaagacaaataaaaaataacaagaaaggaaaaatttatttacagggatagtcatgggacttcttcctatgtgagcttttttaaagtcattagcttgactcctttactcctttaatcatcaagaagttcgtggagatgaaccgacgtcacctacggaaggatttgatctggtaagtatttcttaagcctttgaccatttactgtgaaatctccactcttaccagttagagtgactgctccataaggacggactttagtgatacagaagggatcagaccatctggatttaagttttcctggaaagattttcaagcgagagttgaacagcagcacctgatcaccaacctggaaatccttagtgattatcttcttgtcatggaaaagcttggttctctccttgtagattttagagctctcataagcttctagacggatctcatcgaggtcactgagttggatcaatcgcttctcctcagcagtttttatgtcaaagttcataagttttaccgcccacattgctttgtactcgagctcaacatgtaggtgacatgattttccatagagaagattgaaaggagttgtaccaatgggggtcttgaaggctgtcctgtaagcccataatgcatcatctagctttgtagaccagtctttccttgtaattccaacagtcttttccagaattgtttttatctccctattggagatctcaatctgcccgctcgtctgtggatgatagggagtggcgaccttgtgctttactccatgcttattcaagaggttctcaaaaaccttgttgatgaaatgcttcccaccatcactgattactaccttgggaactccaaatctcggaaagattatggtcttgaacagcttcagaacttttgcaataaaagtatccatctcaacagtcttggtttagtatccttcttggcatacacatgcctcaaagctgcatggtctgtatagacaattacctttgatccaaccaaatagcttctgaacttctcaaatgcgaatacaacagctaaaagctccttctcagttatttcatatcttccctgagcgtcatccaacgttcggctggcgtaatatatgacatgaagcttcttgtctattttctggcctaaaacagctcctactgcgtaatctgatgcaacacacatgatttcaaatggatagtcccaattaggcgctcgaacaaccggagcagataccaaagcatccttgatggtttgaaagtatttgaggcagtcatcatcgaattcaaattcggtttccttgcacaatagtctggttaacggtctggctatcttggagaagtctttaataaatcttctatagaatcgagcatgaccaaggaagcttctgatgtccttcaccatttttggtggctgcaactacatcatcacttcaactttttctttgtcaacctctatacctttctctgatatcttgtgacccaacactatgccttccttcaccatgaaatgacacttttcccaattgagaacaagatttgtctcttcgcacctggtcaataccctgccaagattcaacaaacatgaggagaatgaggggccatagaccaaaaaatcgtccatgaaaacctccaccatctcctcgattaagtctgaaaatatagaggtcatacacctctgaaatgttgcaggagcattgcataaaccaaatgacattctcttataggcaaaagttccataaggacatgtgaaagtgtttttttcttgatcattagggtcaattggtatttaaaagaaaccactatatccatcaagaaagcaatagtatggatgattagctaaacgttcaagcatttggtcaatgaatggtaaaagaaaatgatctttcctagatgcagcatttaacttcctataatcaatgcacattctatgtccagttatagttctagtagggatcagttcatccttttcatttttgacaacagtcattccaccctggtactatcagagatagggtagatgacaccagcatcaagaagtttcaaaatttcttttttctctacttctttcaaattgggatttaacctcctctgtgcttcaatgatagaataggattcgttttcaaggtggatcctatggttgcataaactaggtgaaattcccttaatgtcggataatgaataaccaattgctctcctatactttctaagcttagataatagcaggttcacttcatcatcatttaactcggcattaatgatcacatggtaagtagagtttggaccaaggaatgcgtaccttagacctttaggaagtggtttgagatcaacctttggcgccttgagttcagaccagtcatctgaagttggaatgatcggctccccagattcgttggcagacaagttcgagtggctggtcgagtgtgtcctcgagtgtgcatgttgaactcgtattgacccttcttcgctcataaccattacctccccgttgccggtccatccaattcctcaaagggttctaattcttccatcgctttatgggagtctaagagcttctggtatcccaatgtttccaaatgtagaaactcatctttaccacttttggttaaagcactgttaagatgatcttcttctgccagctcttccagtaacttatcggctaactgtcatcagagtcagatgtgcctctgacggtcctatcgcagtcctcgttgtaattaccatctgattgagcaaggttctcaaccaattcccagccttcttcaacatctttgttctggaaatttccattgctggcgg

SEQ ID NO: 1424 - DNA, 3509 bp, Arabidopsis thaliana landsberg
cagtccatatcaagtctaatatcagaagtaaacaaggcttttaaagaaaatcttctttattcaataaaaaataaaacacttacaatggattgggtaccctagcctaagagcatgtatgggggatactcatatagtatcataagtattttttagcattatttataatatttgtttattatcaactattttttatgatactcctactaaatatgtttgctaagtgtgtattttgcatgttttgagcatccatttgtcatcattttagcatcatatcatcactgttttataccatttcacatcatttgtcatcactttgcatgtttaggatagttttgcatgcatgttgcatatttgtgttgttttcaggtgatttagagctgtcgacgagctaactggaagaagcggacctgatcatgacaaaccactcgacccagaggtcgagtaggagcttcaagatctcaagagaccactcgacccttcaggatttctctttatctattcagtattcagtattcagcttttgttcttaatttcgtttactattgttcattctgttatcatcctgctgttacactgttgttttcatgttttcaacttgttcaacgtttatgcttactgttatgatgtctgagtagtgaataggtttctgaggatgggtaagagtagtgtagaattctcagtatgttaggtgattgagtattggttgatagatcccttctggattagttgttcttaatgcctattgctttctgatcaactggaatttgagcccaaacatttcctcgcccaaaagatgttcgatgaaatgtctgaaccactaattctagagattcttgaccctgtaccaaggtattggttgcagggagcgttttggctttaacttgttgattcataatgcatgttaggttagctctcgtcaatggtgattaagtctgtgactaggttaacttgagagtctctgttgcggtggcacttagatttggttaatgaacttgttgtctagggttaatttattgagcatgtcaatcacctgtaaactgaggaaacgaaactactcaattaccccatcctcggaaattctttatctgattgaattctttgtttactctactgttgtttactgcatcttgtcatctgttgcttagtttctgcaattctttactgttactcgacctgatactcgaccacccagttgtctggcaacaaactgtgcagtcgagtatccctgttatactttctgtctgttactcgacctcacccagtgctctgcaaagagctgtattggtcgagtgttttactgtttctgtttgattctctgatttctgcatgttcacttagaactgctagaacacaccaaaacctgttattgcttggcttgacttagtgacttctgatcacatcttgattgttagcatcacccccatttgggttgacaacctaaaatactacaacgatatgattggtgttttaggataattgactaaaaaacctattatcactggtttctataggagattcatcaaagacttcagcaaaatcgcaagacaactgaccgttttactctgaaaagaagtcaaattcgagtttacacaagagtgtcatgatgcctttcagcagtaaaacaagccttgatcagcgcactaattgttcaaccactagactgggatcgaccttttgaggtaatatgtgatgcgagtgattttgcagttgaggcggttctaggacagaggaaggataagaaacttcatgccatctactaggcaagtaggacacttgatgatgctcaaaggaattatgctactacggagaaggagttcttagctgtggtgtttgctttcgagaagttcctatcttatcttgttggatccaaggttattgatcacacatatcatgctgccttgatgtatttgatgcaaaagaaagatgctaagccaagacttttgagatggattttgcttcttcaggaatttgacatcgaggtaagagaaaagaaaggagttgagaatggtgtaacagattatttgtcacgcattaggattgatgatgatgtccttattaatgatttcttgtctgaggagaacatatacatgattgatacaactgaagaaggtgactgcaaatgtgataagttgcagaatcgagcttcagtgtcgatcgacactctcttttcagaggaagttgatattcgcagctgtcgatcgacaccctccctatcagacaagaaattggtcaccaactgagaactgcgccaccacaacggttgagaaggactacccatggtatgctaacattgttaattacctacttgcagatgtggaacctgataatttcactaattacaacaagaagagattcctgagagagattaggcgctattattgggatgagccttatctctataagcattgttcagatggagtttataggagatgcattgctgcaacagaggttcctgatatactatcgcattgtcagagctctagctatggtggtcattttgttatcttcaagacagtatccaaagttcttcgagcagacttttggtggcttacaatgtttcgagatgctcagaagttcatatcgcaatgttacccttgtcagagaaagggaaagatcagcaagcgtaatgagatgcctcaaaaatttatcctcgaagtcgaagtcttcgattgttggggtaaagatttcatgggacccttcccaccttccaacaagaatctctacatcctagtagttgtggattatgtctccaaatggttagaagctatagatagtccgaagaacgattcagcggttgtcatgaaactcttcaagtctatcatcttccctcattttggagtaccacgcatagtcattagtgacgtaggtaagcatttcattaagattcttgcgaaattgcttttacagtatggagttcaacatcgagttgctactccctaccatccacaaacgagcggtcaagttgaagtttccaacaggcaaatcaaagagattcttgagaaaacagtgggtaaagcgaaaaaggagtggtcttacaagttagatgatgcactgtgggcttacaggacagctttgaaaactctgcttgggaccacaccttttcatcttctatatggtaaagcttgtcatcttccagtggaattagagcacaaagtagcttgggcagtcaagatgatgaatttcgacatcaaatcagttggagaaaggagacttattcagttgaatgaggttgatgagatacaaattcatgcccatgacaactcgaagctctacaaggaacgcacaaaagcttaccacgacaagaagatcctcactcagacctttgagccaaatgaccaggtacttctttatgattctagattgacaatttttcgtggaaaattgtcttctcgttggtcatgtccctacacagtccactcggttaggccttatggaacagtaattctcaaaaacaacaatggaaaaccatttactgtgaatggacagagagtcaaacactactgggctga

SEQ ID NO: 1425 - DNA, 609 bp, Arabidopsis thaliana landsberg
  unsure (1)..(609): unsure at all n locations
gatggaggaagaagacgaggacaatgtttacattgttggggaggataataaattcatactactgaattttgtagttgtgacaattggaggagaatcgccaattattactacttatgttccaagtttggttcagatcgagctagctggaagcaaaaggaaaacagattactaaacaagctctacatttagtgtgttataatcctaactttaaacacagttttatttttattgatcaaaccatgtctagtaatgttttaagaagagaaaatttatgttccgaaactaaagctttttctaattcatgttggtcggtaattgagttttcagttaaaggttgtaagtttgtgttgtttcactcaagaggcacaagtagaaagagacacaagtatgaagtgacacaactaattgagttggtgtgtctatttgttttctatataaacaccttgtatcgtcatgtaaatactaacaagtttcagtttcaataaaacaaagttttgttcttgtcttcttcacaagagaagagatatgnctctcttactctggttttcttctttctctcaataatccaacaattcaatgacaaaagtgattcttaaaacatatactaac

SEQ ID NO: 1426 - DNA, 600 bp, Arabidopsis thaliana landsberg
tggctgtgtgcagccaaagtccagctcggagtggcacagcggacagtgtccggtggtgcaccggatagtgtccggtggccaggctggtttccggtgaacaggccgctctcgagaaatgtttggcggcgtatggctataattcaccggactgtccggtggtgcaccggactgtcgaagctgcaactgtcgtctgtgccagaaaaggaaggagatcgacaccggacaagctacaatagctgtccggtggcgcaccggactgttcggtgcgccactcgacagaaggcaaggatagccttccttgttgatcttcaatggctcctagctggcgcatggaggagctacacaagcattcactaagcatcctaaggcatccaaactttgttcccgcgcattcgtttcatgtgttagagagttgagctctattcgagtcgaggactccctgtgttgtcatttgagctcaagtcttctcttgtgtgcgtgggtgtgctgcgatttgtgtcttgtgtgtgttgctcatcccaaccttactcagtgctttcattgtgatctttgttgtaaggcgagagactcaatctcgtggagatcgtcgcaaacgggaat

SEQ ID NO: 1427 - DNA, 5816 bp, Arabidopsis thaliana landsberg
  unsure (1)..(5816): unsure at all n locations
tcgatctactgcttcttatgaggctgcaaggatcgtgtaagagggtcgagtgaattgctgcctccgatgtggctgcctggatcgagtgagtgggtcgagtacaatgctttgctgcttccctcctggttggatagagtagaaggtcgagttgaatccttttgagctccttctgcacctgaaaacacaccaaaacatgcaatgtgtatgcaagatgatcctaaatgcctaagtatgcaaaataagctaaaatggtgcaaaatgatatgatacaatgagcaaatgcaaagctaaatgatgataaatatacacctaaaatgagtaaaatacagtgttatcaactcccccaaacttatctcttgattgccctcgagtaaacaaaaaatcttaagttgaaagagaggtttgaaggtggggattcaaaaatcgaagcatgcatatagaacaggtaagctcaatgtccaggtagctaattctaggttgcaaagtgatagacccttacttaaaaccgttagccatactcgtcacaatgcaacctaacaacctgccttaatctatttaagcacgaacagtggatcaagcaaagcaatggttatgaactcacttggtttcgggcttaggctaagagacaaaaaatggtccctctagtgatttggtcgagtaacaggggactctcagagaaaagattgaggttcagcagaatgctaaaggtaaaagccaatggacacatacaagaacagactcccatctacccaatgatatagaatgatagctcagaagatgatcccagtcccatagatgtcctatctctaccctttttctcattctttctctcttttggttcaagttctaaggggttctctttgaaacgatttaagagtctagcggtttggttttatacttcgacaaacttaaggcttttcttctaatcttagcatcgagggcgttttacccttttctttgaatcacaatgcctaacttctttgaattccaaactctttactagactaacactttttttgtatccccctttagaactctaaactcttattctctattttntttttcttatcattctcattctctttcccattcattccatacacaatcccaatcccaaatacaagtctccacctagtcctagctaacccaaaaagcatgggctaggcctacatgactgctcttgtgggctcatacctaacacgttataccaagctcaatcggaaaaagacctcacaataacacacaaatgatctttggcttgaagtaaggttaggctcagggtatgggaaactgctctaaaagtgagagtcatctacttggtgaagtgaataagataatccaactacgtatatggtagccatgagttcacaaacaatgcatagacatgacaattgcaaattcatttcacgttttaatagatagggaatggcatcacacaagcgagacacgaatcaaagtagtatagtcaagccacaaattcaaagcaggatgcagtcacacttcagagatacaatcggacatgcagcagagaactaacaacctgggcattgaacacacttcattgaaccaaaacatgcttaccggtctgaaatcatcattatcccccatgcaaatgagcaatcctaaatgcaagcactctatatacaatcctaaaatgatatgcaatctacatgacactgtttttgatgaaatctttttctgaaaaatttcaaatttttatgatttttctgtgccttagatgatgcgaaatttgaaataagaaaagagaacacaatgtcaaacatgccttgaaccctcccctaaacttaaattacacagtcccttgtgtaataaaaatgtgaaagagaattcaagattaaaacacaaaacacacaaagaaaaataaaaagctaatggtatgtacaatggttgaggtggtgttacctcagtgatcaggtgaagtagatggagacatagtcatccatactctcttgggtatatgcaggggccgaagttgaggcgggagggtgttgctcgttctgtccagtcgagcgtgtggaagctcgtctctgccttctccttggctctctcaactcggagatcacttcctgaggctcaaaagatgaagctcggggttgatcgatccattcagctctccttgtagctgagctcgttgaaccgctccttcttacttcgggggttggagatggtggccttggcttgctctggtattccttgagttgaaaagccatactcttgagcgacttcttcattgttctcatcttcttcttgaaacccttcattgtcttgctgggaaggttcccaagctcttcaagtacaccgagattcttgtgaacttcagcaaactcatctcctccttggtcagtaccttctccataatgagcttgctcttgttcgctggtcccgtgctccggctgatctatatgttgctcaaactcgatttgttcctcataatcaacttgggtaaagtactcatgttgctcatagtcggctggactatattctggttcatcttcccgagctcctccaatgtcgatgttcaaggcaaagggagatggcatgaaattgatgttgcgccttgtcttcaccgaagtccgattctagcatggtaggggtagaagagaaggtccaagctccgagtggttgaacttgaagagatagcgatctgccggagttgttttctcaagaaaatccttccccttgagatagtctaggtcaatgaacttaggcaacacgtcaggggttccgaattccacacccacaactcctagtatttgcgttaagagaccaccaacacaaagactcccgcgaattctcgagcgatggatggttgcagcatactccttgtagctcaaaaggtgatctaagagaacaacactcaacaaagtgtccgctctatcacccaccatcttttccccatcttttggctccctcaaaatgaagaccaaagattgatctatcatgcatagctcctctacactaacaaatccggtggccttctttggaaagagggtgtcggcgatgcattggcggaggcatctaatcatgggattcccaatagaagaactcttgctcttggttggcgagaagggcttcggaccgacgattgtcttccaaagagatttcagctcttcttgatcatagtcttggcatattccttctccacttggaaacccaaaaatggtatcaagatggcatatatcaagagtatactcgacatccctaactttgaaagttatgtaaccaagacctcctctcctttctctgaatcatcaacacaaaaatgaaccttgaagggtgcaaggagttggcagctctcctctttgtatcccccacattagcagctcatgaatgttacaagattggctaattccatcaagtattccacatcaccacaaataccaagcttttgcatcgtttccttatgagggtaactagttccctcaaacttcaactccttcaaatattgatagtactcgctcggggttggttctctcttcctccttggtcggtttcttctcctaacaggggttggtgtatcatccccgatgttctcaacctcttcttcagaaaccgcttcttcaaagggtgcctcttcatggtgttcttcttcagcttcaacgaccctctttccccgagctacttcttctctttgcatggtcgaacggcttgagcttcctccttgaatcaagcttaatctttgagcacgacgagcttggcgaatttggcgttcagtcatgccactcatgtcaaacgcctcaacttcttcaggatcaaaagaggatcttcttgcccgagacgaactcttccttcttgaatccatggtggtgagtttcaacaaagcaatttgataagtgtgtattttgcatgttttgagcatccatttatcatcattttagcatcatatcatcactgttttataccatttcacaacatttatcatcactttgcatgtttaggatagttttgcatgcatgttgcatatttgcgttgatttcaggtgatttggagctgttgacgagctatctggaagaagcggacctgatcatgacaaaccactcgacccgagaggtcgagtaaggagcttcaagatctcaagagaccactcgacccccaggtggagtagaggacatcaccacttcacttcaccactcgaccacgaggtcgagtgccctcatctccttcaccagaacatcactcgatcacttcactcgaccatgaggtcgagtttcttcatctccatcaccagaacatcactcgagcacttcactcgaccatgaagtcgagtgtcttcacctccatcatcagacaatcactcgacctcatcagtcaacctggaagtcgagtatctcctgaccaacactcgatcacatcactcgaccccgaggtcgattgtcttcaccttcattgccaaaccactactcgacctcgtcactctacctggaagtcgagtatcaccatcaacaccactcgactacatactcgatgacaagcttcagagccttcttcattccgcactcaacaagacactcgcgcacaaggaagaaaagaagactccagctattcactcgacctcccactcgaccacatgggtcgagtacagttcttaatccgtcccaatacttcgtcgttttaagtattagggtttcggaatatttggctataagtagcatgtacttcacattttcgcagacaagaagtttttatctagttttattccgcagaccttgtgttctagacattttaacagtcctaagtattagtgctctgcaaagagctgtgttggtcgagtgtttcactatttctgtttgattttctgttttctgcatgttcacttaggactgttagaacacaccaaaacctgttattgcttggcttgacttagtgacttctgatcacatcttgattgttagcatcacacccatttggattgacaacctaaaatactacaacgacatgattggtgttttaggataattgactaaaaacctattatcaactgctactgtgataatttccaaaatcgtcttgagaaggttggggtcagctgaggaagagcgattccaatggccgccaggaaccgaactaaggcttcaggaagcgagagagtcaatctctatcctttaaagtaaatctcgtaaacgcaaaagtatcgcggacgatgattcttcgacgattcaatgggaaatggggtcattgactctaccataacttcagctagaatgcgacatagatccctagccaattaagagactggagggtacaagtggtcctatagtggagactcgcaatatcgttcgggtgagtgcataagtcgacccatgaacgaccctcgtcatcggagggggaattgggtctttcggaaggagatgaaggattcatggtttcagaagatgaggatgaaaggtatttaagattcctttaatcaaaaagacaagagagtaaagtaaaaataaaacaagatagaagaagaaaatttatccctcacgcgaaattgtggtgattagcaaaaccgcctcgggagtcgtggagaaagtggaaaggttttccccatttgaatagtgaataaatgaaatgcggtcataatgttaaaggtgtcatgtaaatgattatggatatttccaaaattaaggaagtgataaatcaatggcggaaaatcagagatcatgtcgcgcaatcttcgtcgaataaggaattcgtcattcgagctggcatgacagctcgaaagatttgggggactaattgatggtatcgaaccccaaacctaacgtgaacttaacgttcgagtccaaccgaagattgcccatgaacagaaa

SEQ ID NO: 1428 - DNA, 3016 bp, Arabidopsis thaliana landsberg
tggatctccaacgttcaggcgttgggctttgggtatcgtaagattacgaatgagtttaaatcatactgtaaatgattgtctttgcgaaatatgataataagtatcaaaattttcttttattcttatctccaaattgttaagtacaaaaggaggtaaagcaagcgacgatctggcgtttggtcattgagcagggacctggtcgataccgaagaaaggttaaactgtcaggtgagcagctgatcttcgttgatgggggatgcgatatctatttcccttattgaagtttcgcctttcagatggaagggttgaggtggtaattgcgtttgcggaggtgactgcctgcatacctggttaagggattaagcccttttgtgatttgattgaattggtggttctgctcttgggggagctgcctacgtatcctgccaagggatcaagccttatcgtagtttgattgtttttgagtacctattcgtggtatttcttgagatgcatggcattccaaggccgtaactcacgtactccgttgataacttttacgagcttatagactccgtcacgtaccacctcggtgattcgatagggaccttcccagttagttcccagtttatcggcgtttagctctctcgtgttgctgaacacttttcgtagaacgagctctcccacttaaaatctccaaattttgatattggagttatagtagcgggcggcagcttgttgatagttttgaactctgatcattgcctgatctctgcgttcatcgatgaagtccatgttgtcctgtagcatttgcgtgtttaggtccaagttagcaggactggcggttcttcttacgcttggtactatggtttcgacacggattactgcttctaaaccataggcgagagagaacgatgtttcttgcgttgatttgcgaggtgtagttcggtaggcccagagaactccgtggagtacgtcggactacattgattttttagaatcatgtcttttcttgatgttgctaagtatagctttgttgggggcttctacctgtctgttaccttgtgggtaactggggggtggacgtggtaagacggatcttccacttgtcgcagaatgctatgatttttcccgaggtgaagttagtcccgttatcggtgacgatctcatatggtatgccatgtcggcatacaatattttgccacaggaaggcctcaacttgtttctcggttacctgttggaaggctttagcctcaatccatttgttagagtagtcggtgaggaccagcaggttttttagtctcttcttcccactggaggcttccatgggacctacgacgtccatggaccacttcatgaacgggtaaggagaagatattgaggacatttcctcgggaggttggtgcagagtaggtgcgtgtcgttggcacttatcgcacctgagtgaatgagctacgcaatcggctagcattgttggccagaagtaaccttgcattttaattttaagggcgagggtacgtccactacagtggctacctcattgcccctcgtgcatgcttttcatgagatctttcgtttgttgcccataggtacacaccatgtagggacctgcgacgctgcggttcatcagtctcccttccatgatgcagtaccttgcgctctgggctttgagttttctggtctcccacttgtcgggaggtgtgatccctcgttcgatgtaatcgatgattgggattctccagtcgttgtacggttcaggttcgtacgaggcaggttgttcgggttactcgcgtaaagttgcaagttgccgaggtttccgtcccagcgtgtttggccgtgtacaggtacaacgagtctccttcttcgggttttgcgagtatgggtggttcggacaggtacgctttcaattgtttgaaggcttgctcgcagtcctcgttccaatcgaactttttatcctctcggaggagttgatagaaagggacgcatttatcggtggacctggatatgaacctgttgagggcggcgatacggccggttagtcgttggacctcccgtgctgtttttggcgacggcatgtcgttgaaggctgcaatctgcttaggattggcctcgatgcctctttcggttactaggtatccgaggaattctcttgagggaactccgaaagagcatttctcggggtttagtttcatttcgaatttgtttaggattttgaagcattttcttaattgcgggacgtggtcttttttgcgagctgatttgaccagaatgttgtcgatatagacctccatcgttttacctagctggtcggcgaacattctgttcaccaatctttggtaagtagctccagcgttttttaaaccaaagggtattactttataacagtaggtgcctcggtcagttataaaagctgttttttcttggtcatctgggcgcataagtatttggttgtacccgaagaatgcatccatgaaggacaatagttcgtgtcccgtagtggcctcaattagtcggtcgatatgtgggagtgggaaactgtctttaggacatgccttattcaggtccgtaaagtcaatgcatactctccacttcccgtttttctttttaacgacgaccgggttggcgagctgtcagggtattttacttctcttatcgatccaatcttgagcaatcgatcaatctggggacctagcttgcgacgtttctgctttataggtcagtaggtcggatcgacgttgagtttgtgtgaggttacctcgaggcttattcctcggaggttcgcacttgaccaggcaaaactgtctttgttttctttgagaaaggttatgacatcctctcgtatcgctgggtcgaggtcttgacctatcccaacgcatcgtttgggatctgattcgtctatgcagacctgtgttatcaatgacttttgaggtccgcgttgagaaggatcaaaggatctgcctctcttcatttccgcgagtttgtcttctatcataagtactatggggtcagcctttttgataaggtcgtagctgcccat

SEQ ID NO: 1429 - DNA, 513 bp, Arabidopsis thaliana landsberg
  unsure (1)..(513): unsure at all n locations
cattcgatgacaacctcatgatccgcaacctccccctgggcctctccgacgccgcccgagcctggctggagcatctgcctcctgcgcagatttccaactgggacgacctggtcaacgcctttgctggaaacttccagggcacgtacgtgcgccctgggaactcttgggatctcctggtgagcaaactgggtcgcaagactcccaccagtgcgagcgagttgatggacatcgccaccaagttctcctttggtcaggaggcggtcgaggccatcttccggaaggacaagcagcctcagggacgctagcaggaagatgtccccgaggcgtccgccgagcgcggcacgaataagtaggccaagaagaagtcacaagcaaagcgcaacgccgccgacacagatcttgtcgccgctgccgagcacaggaacctcggaagcctcccggagggnnnnnnnnnnnnnnnnnnnnnnnnnnnnnnnnnnnnnnnnnnnnccagggccccgtcagcacaccctt

SEQ ID NO: 1430 - DNA, 526 bp, Arabidopsis thaliana landsberg
aaaatttcctgaacttccgcacaaatacatgaatgtacacatgtttaaaatagacaagatagaatcactagttaagtgtctgaaacagagtaatataaccagcaaatggctttatacgcagtgtgtgctagccaggaggagcggatgttaatcactagttaagtgtcttgtgatatgcaacagaagttgacgtctttaatagttctctgattgccattgtggcataacaagaagatggaagagtgagtgccattttaagcgccatctgtgtctgctcagaatctggatttccagtgtctttttcagcctcattgctatctgtctggtctttcaaattggtttcaccagaatcatgtgggttagtatcagatttcattgattcatcttcaatttcctcagtagatccaactttctccaccggcttgttcatgggtatcctgtccagatccgtctctgccaatggtttattgctgtcagtgtaagtcagtaattcccattcaaagtctattggtttctggaaaacacg

SEQ ID NO: 1431 - DNA, 1445 bp, Arabidopsis thaliana landsberg
taaaagaattgtgttgattgaaaaaataagcaaacacatggccaagttacagctttaaattagttacagtgttgcattaaacatctcacaattacaatctctcccaatttcctgaaaaagcttcaaccaacaatggatttagttaatgttcattccaatgaccaaccaattctcatcaacaaagacatgttcaccaacaatcaactatccgaaccagtcaaagatcaaaacctccatggtttagccgaaatattgactcttcagagatgtggaggtacagaggaaattaccagaccgggtcaagaccaagactataagagtcaggagcagacttgctccgtgttctgtgagatcgaggtgataggagaagaggtcgggaagagaccacaggagacagttggttaatatcgttaagagacaagctcgatcaagcacatagagacgacgacacaacgatctggggagagctctgcatggagacgttgaccgaagttgaccaaccaaaactcatgaacgggcaagaaaaatcattggacatacttgacgataagggcaaattgcactgtctggatgtatttcgtcagagtctgctccagtctaatgctacaccgaatcaaagatctagactaatgaggttgactaagaatacgtatgtggtggacaagcgattgcaacaactggtaaattgcgtgacagagctaagaggagctggtgtaaagctcaggagaaggaatactgaccggttttgggatattcaattcaaaaatggttatttagagatacccaaactactaatccatgatggtaagctaaaaagctttcatttctttcctactttttattcattactcacatatgtttgcataaaaatctaatttgttcaaccggctatgtcaagaagtggttttcgatcccaaagatagtcatctatctcgactgtctggtgatgtaaaccgttattacaatcgtaagtggaatgttttgaaggctaccttgacacacaagtacttcaataatccttgggcatatttttctttttctgctgcagttattttgctacttctcacattatgtcagagtttttatgctgtttatgcttattataagcccaattctaaactctagttgggggtttttcccatcaatttggaatgtttgtattttcttgtttttcaacattttctatgtacttgaccaagattttgcattgtaataattgggttttggaataattatgttgttgcaaagcaattttaagaagtttgattttattaggggtgcaaaatttgtaaactaaccaacccaataaaaagctaacctaataacctaacccattaatggtctcttttgtttttttttcgctggtcatgaaatggattaatccatgtaaaaggattgcaataaatttatcacgaaaaataatttatccaaaatgtatatggaat

SEQ ID NO: 1432 - DNA, 602 bp, Arabidopsis thaliana landsberg
atgatactgtctacaaagattcctccatcgtgatggtggtaaacacatgaaccattgatcgattcatctcggtgatgattttttcaccagaatcgacgctcaaacggttattgacatgtggctaagatggagtccgacgaaaatttcttcaacaacaagcggtgatatattgagctctttttgggcctttaatgtttctggggctttatgtatagcccatgtaagatttggttgtggttaataatttctacttttgtgacaaaccctaaatccaatttacagtctttttgtttttgtttttaaatatgtacatagattttttttaatctaatcttaaattacacattatgatcaaactatcagatttaactatacgcaactcatgcgattatgatgtacgaatccacaaacaactccacgatgtgcaactctctctctaacatagtgatctcctacctaacgattctttatggtggatcatacctacgatgaacgatcttattcttacctaagacggacgattctgcttgcaacattctgagacttccgattagtatgccaaaatagttaattagaaaaagttaattaattatattaatcaa

SEQ ID NO: 1433 - DNA, 567 bp, Arabidopsis thaliana landsberg
attgtcgctgtcacacggcggtggaaggagcatcatgtcgtagctgccgtcgagggacacgaactcaagactcccgaaacggagcaccgtcccgggttggagaggttgccggagactgcccatctggagcttgacgggatgctgttcgtcaacacgcagcaggcccctacctggcgtgccaactgttggcgtttcgagaccggggggtccctgggccaacgagtgaaatgtcgctgcgtgccccagcccagatgggtcggcgcgaggccgagcgcgaaggggggagaaaggtggccggagacgggcgtgagagaggtggaaatcccgcggccttcgtgttcgtctcgcgcccaggtcgggtgcgcttgcagtaggggattacaagcgtccgcgcggccaaccccctgtaagagggccctggtccttccttttataggcgtaaggagaggatccaggtgtacaatagggggtgtagcagagtgctacgtgtctagcggaggagagctagcgccctaagtacacgccatcgtggcggccggagaggtcttggcacccgattcgtgtggt

SEQ ID NO: 1434 - DNA, 1325 bp, Arabidopsis thaliana landsberg
cggaactcataaatttagcaagaaatggtgttgaaaaaccctttataaaacatagtaatagttagtctaacctactgaagaaagaaaactaagattatgaagtttggattttcataaatggaagtagatttagttgcattaaggatttttccggcaatgtggtcacaaagacgagcaccaatctcattttgtaacagtgtgcgtgaattccgaaatatttatatattcttttcagattaattaaaagttttcgtcggcaaaggatgacagaaaatatcgtttctttagaaacaggttatctttgttgttgacacttcaatgcaagagttgtcgttcttttctttgatgtaatcattttgggccttggcctttaactttaagcttgtaagcttgtttgaatcaataataaagataacattctcgtgaaaaaaaataaaaaatcacttattcttcacaagcaagaactatgagaaaggtggagaaaatgttcctaattaaccagtaaacaccacttgtccattagtggctattacagacagtcgatgcaattgtgaccgaaatcgacctctgcatcgtctcctcgatctggctttagctgatgtatacaacaatcacaatctcaggacttaggagatactggctctgtacattgcaaaaccccttacatttcggtaaaaaaaatcgagcacagaaaccggtacatttcggtttactaactggtgacaagctggtttattaacacagttaaaccaaataattatttcgacttatatgagttagagttatgactgactcatcactttatatctctctttctcaaaaaaagtcaatggtgaatacgccttttccacagatttttgtgtatgtgaacttcaacttttctcgctagtcgctactctagtctctcatggcttcctcttcttcttcgcctcgcacctggagatatcgcgttttcacgagtttccatggacctgacgtccgtaaaacctttctcagtcatttacgtaaacagtttatctgcaatgggactaccatgttcgatgatcaagcaatcgaaagaggccaaaccatttcccctgaactcacacgagggattagggaatcgaggatctcgatcgtagtgctctcgaagaactatgcttcatcgagctggtgtttggatgagctgttggagattttgaaatgcaaggaagatattgggcaaatagtgatgactgtcttctacggagtagatccatctgatgtgcgcaaacaaaccggagatatcttaaagttttcaagaaaacttgttctggtagagcggaggagaagagacgaagatgggg

SEQ ID NO: 1435 - DNA, 607 bp, Arabidopsis thaliana landsberg
ctccttctactataaagaagcactagctttctttatttctcaaggtctcaaacagaaaacgctctcagttcttaaatctcgcatctctctccttcttaaaagtaagttcttagtttagtattttcgagagtatatcgtaaatcaagttcgcttgagtctattacttatgagctcgggtattagtttgtccggattcataaatcatgattgtctgaaagtagttacagctgatttagtaaattcaagaaaaagatatcgtatcttgcctctgtgatttactttatgtctttagatacagtccttgtaattggttcatgttatcgttatcttaataaatcttgtattttttctcaactcggattttgcgctactacaatcttaattcaataaatcggtcataataaaattgtaggagtgcaaaaccaaatggagaaaaatgccaattttattaagattacgataagaacaacaaattacaacgactgtatttaaagacaaaaagtaaatcactgagacaagatatgacatctttttccttaattcaatacatcgaccataggtgctttcaaacaatcacggtttaacaatccctagatcaactgatcac

SEQ ID NO: 1436 - DNA, 533 bp, Arabidopsis thaliana landsberg
gatttgcgacgacaaatgaagaatgttatatttctatttttataacgaaactatttatcttattattatggttggttagcgctcacacataaaaaggtaattttggtattaattaagttagagagaagaaaactaataaaaaataacatacatagatttttaatttttcattcctctatgcatattaattaatatgagcttatgttatattgttacgggatctgttgttgcatctaatagctctttccaacgagtatattagaaactaatccaatgataacagctagcacatcagttttataattatcacaagttattacatgtctttactatacgtgtacgattacaaaattttctaatctatcaggaaactgaatataagaaaatgtttagaattcatccgcctaataagagtttatattttcttctatatatgcaaatcaatttacgttgtaatatatatgttcgttaatcataatcatatcagcagtgtttaatgaagcatattgtagataattatattcaatttaatt

SEQ ID NO: 1437 - DNA, 588 bp, Arabidopsis thaliana landsberg
attccttattagattgaaattgtaaattgatccgaagtatctttcataattatattattgaaaaaagaacaatttagtgtttaggtgtcacatgacagatttatatggcagaatgggtttagaggagacgagtttacatggtaggacgggtttggatgagacgagtttatggggtgctatgagtttagatgagacaaatttggataccacgggtatactcatagaattaacaatcaaattacaactatacaatactaaacaaaacaaacaataataacataacaaatacaatttcaattttaaaattttagttacaaaaatacataaaatcaacattatagtataagtgttaatcttctttaacacctctaaatgttattcttctttgatacatttaaatgtgtaatttaatacaaagttactaaattacatatgttccacagattaaattttaaaacaccaaatatttaaaaacaacaaataacaacaaattatattttgtgataaagaacaattaataaaatatttaacacaaggtataccgcgggtcatatcctagtattaatacgaaatgtgagactcttttgt

SEQ ID NO: 1438 - DNA, 629 bp, Arabidopsis thaliana landsberg
ggtgtagtcaaagtggatcaatgcaagagcatagtatgaagccacctaacaactcattgttgaagaaggctttaacctactatgggaagaacccaagtatggttatttttttcgaaagttgcaaaggagatcaagctagaaagagtgaaggggaggagccaaattcacaagtcaacaagtaattacaagattatgagaagaggaatctaagaatttattcaatggaaaggatagattcagaagagtcatatggaggaggcccaaactttatacacaatggaatgtgttgtaaacttgataagaaaaacaagacgtagacgaggacaatgaagactaagagttgtgaagggtgtgaaccaaaaggaacggttacactatgtttaagcgtggaagttgtatgatgagtcaaaggtgaggagcagtaccaagaccgatggagttcattgaccaagattcaagaagagaagacaagaagttcagaagtccaaagaggttggaagaaaattatggagagacttataaaggtagccacccttaagacaagatgaaaccggttttattatgaaaacaataccaacctgtggttttattttggacttatgaaaagggggaaaattttattcaaaatg

SEQ ID NO: 1439 - DNA, 700 bp, Arabidopsis thaliana landsberg
gcaagtgacctaatagtgaagtaaacatctttattaatccttaggctaatgtttgagacaacatttaagtagatatatcatcagtttcatgtgacctagctaacatgaaccaaaaccgaaacaattcgggtagaaaaattaaggacaaacgataacgccgtcgataaccttgaggtcgaagcttgtgtcccaaacgtaattgaaaacgaagtccacgtgaggaaagatgaagttaccggcgttgaggagacaaatgtcaccggattttgacaacaacgaggtagcgacgggtgtaaccgattggaaaccgacacatgacaacttcgtgtactggaatttgcaattgttgcaagggttcgtcactctcacttcccactccggtttattctgaaccaattttccggtttttgattgtttcacagataggtaatttagatgacaatccccatacccttccgaatttccaaggaaaaacaaattttattattcggttatgtaataacaagaaaagacaaaaatttaattaaataacgttaagctttaatccaatggatacagagactatagggttatagtgatcatgtatatataatttgggaatacgaagtttgataatgagacaaataatatatacgcaaatttgaaactatgatatacttacttgttttatataaatgtatataaagtataatataccttg

SEQ ID NO: 1440 - DNA, 1906 bp, Arabidopsis thaliana landsberg
cacaattaggaggctttaaaaaacaaataaaaatacagacgaaaaaaataaaagtagcgttgacgacttaaaaagaaaaaactaaaattgtttaattggaagaaataaactgtaaggctgtgaaatgtagttacagcatatggtagattcttaaatgaatgaaataatatgataaggatttatcggtggttgtggttgtggttgtatttcacactaacaaaaaacttatataaacaagtttaccaaatatgctataatttttctaagaaaacgaaaaccaatttggataattggataaaaaaaattgattagtgggagtactgaaagtattttttctctttaaaagatttacatagttttggataagaaatcaccacttctactccaaaaagcgaacatgagacactagatctccatggtattgcaaaacttgtcatcaatactccaaaaagcaaacatgagatgctagatatccctggcattaccatcagctcattttcgttatgtttcatgtttgtaatgatgcctcatgtattatactcaagatattggagaaggtggcgttaagttcaggtgcacttttggcgttatgtgttattagatggtaattgatttgatcaagtaaaaaatgtattaggctattagccacggcagtatatatgcagactatatgaaggaagaatatcacatcggtggctaatagtgaaaatcaccttttaggttattctgcttgtttatacagagcaaaagcatgcctgctaatctgcttatacttgttggtggctttgaggcaaaacttagggaacaggtcagacttacaattagaggcacttgagtgtagtttattgagtctaagctgcactagtttgtggattgagtttaagctgcacagatttcccactttggttctgtttttagtctaattttcctcctgcttggtttctcgtttctcatgtgtgattctgttctgtttgattccttgtaggtgtggtcaagtcttcatcagcttgcctcgtgtttggttctgttcttttctcaaacttactaccactggctgtaagatttactatccaaatgtgctatttacaaatgttaagatttgttgttttatgcttaaaatgcttacgtctagatggtgtttgtgtcaataattggtatcgaattcagatatgcaagttctctctatgtataactgtataactccctctttttgttactgtttctagtggtttcattcttaagacacccacattaaaaaggatcaccaatagattatatttatagcaaagacacccattaaaggatgactaatgaggatcgcctaatgttacctttagaaaaccatcagagacataataaaatccttacacatcaactagttcataaaagagacaaatttagcatgtactcttgtcaaatacagactgattcaatcttagtagttcccatattttattttattttaagatttaaccaattcccataaaattattacctgaaaaagaaaaatcaacatagaagtacgaataaatgagagctgacaattaaagagcattacctactttttctgtcctcatctatctcctccattgattacgcttcttgattgaagcaccccacagagagagaaaaaaatagcatacatacattctgtagttccttctctcttcttcttcttcttctaccccgcacgaacgtttctggagtatctcttttctcttatctttcactccattacagagcaaagcttgactctttaagttcacatggtgtgttttaaagttccttcttttttactcaatttcgaagctttgtgtctggtttatcaaataatgatgagaaattgagaatgtgggtttttgtgactctttgattccgttgttaaagaattgggttttgggaattt

SEQ ID NO: 1441 - DNA, 642 bp, Arabidopsis thaliana landsberg
ccttcctacttgtaagttagctccccaatggtatcctcttgagctttgtatccaacccagagccccaggagttcttcatcatcagaatcaagaatcaagtgttcttcttcagcagaggggttggttggctgtctaggcactcctggagaatgagtcggaataggagtttcctcctcactcaacgacttgctctctaggcttctttcctctaagtgaactcctttgccatttattttttttttttcatctcatactagccatcttctgtaggatcctcagtctgagctagcctttctgttgctctcttgttgatggcaaaagtcctcttgagcttgctaagttgaaaaatatagctaactattggggggggtccagcttttgcttcttcatcaacatccatgttctgaatcccaaaactctgacctcctgtttttgatttccctgaagcttctctgaagccaaacttcatcttgatgcctttttcaaggttcagattaatttttccattcctgacatctatgactgctctagctgaagctaataatggtctgcctaggatcaggggatccttgccttcttcatatacgtccaataccatagaatctgtatgtatctcagcatttccaatcttgataggcagat

SEQ ID NO: 1442 - DNA, 1074 bp, Arabidopsis thaliana landsberg
  unsure (1)..(1074): unsure at all n locations
actggtggaaggcgagctggggaggttcgcgatgatcaggggacaggagccaacatagacctacaacaggctcaaaaccctggtcaacaaaatccgaagctatggaagcacaagatggacggatcatgacgtcgtccgactcatgctcaggtcatttacagtaattaaccctcatcttgtgaaccttattcgtgaaaaccccaggtacaccaagatgacccccgaggaaatcctcagaaaatttgtgagcgggcgcatgatggtgaaggaggcgcgatacgtggacgatgcgctaaatggtccactgcccatctacgagtcgcagctcgttgctcccaaagcaactagcagcaaggaggcactaccaagcaaggtagcacaagtggaggctgctgggctcaatgaagatgaaatggcacttatcatcaagcgcttcaagaccgcgctaaaaggacgcaaggagtaccccaacaagaataaaacaagggggaagcgctctgcttcaaatgcagtaagacttctagaaaagcaagaggacattttgtatgaggacatgacaagtttgttagtgttcaaaagtcccttgctttagaaattaaaagaaatgaaatgctattctctgagttgtctgcttgccatgaatctatctctagtttaaataatttaaatgatgaattaaatgctaaactagaggaagttaataaaactagttcatgtgtagagcatgttgttatttgtaatagatgtaaggattttgatgttgatgcctgtaatgaacatcttgcttctattaccaaattaaataatgaggtggaaagtcttaatgctcaattaagacttgcaaggttgattttgataaannnnnnnnnnnnnnnnnnnnnnncactgttggtagacacccttcaattaaggatggacttggttttcaaaaggaaaccaagaacttaacaagccaaaggactcccattcccaacaaggagaaagggaaggcccctatggcgagtagtcctcaaaggaaccatgcttttatttatgataagaaaattgtagccgctctcattatcataagagtta

SEQ ID NO: 1443 - DNA, 610 bp, Arabidopsis thaliana landsberg
gtgtgttataacaaaaaaaatctttaaaacttcatttctttttcgataatgattatcttggctccggacttcgtaaataaacaagataaacacttattgagcatcaatgtacgttcgcaattaatgtttgttcctgggttcatttttaactcaacaattattatcaataattttataatattataacatgtaatgatgattttgcattaattataacaagagtcacgtctaaactttttgggccattaaatgttgatctcacttcgtttttaataaaaaaaatctcccttctaactgtacagctgcactcctcaacgtgaaacaaaaatatctccaactaaaccggaacagtgtacctaactaaacctgactaactaaaccgtacattcaacagtttcagctgaaaagacaaaacgtgaaaaccacttttcactttgtcaatctctgaaaataaaacatggtcaaagggtgtcgtccgcaaattaccctttataataccatgtcaatgtgaacaaaagaagaagataatgtgttggtcatgagaagagatatgacaaatctatctatgttttgaatagcgcactaccattagacaaaatgaagctataga

SEQ ID NO: 1444 - DNA, 716 bp, Arabidopsis thaliana landsberg
taaaacgacccatttatgccaaatcagcaacaatgatgccaaaccaagatgcttcaatgttcatcatatcagtccaaacttctatattaggtgaagaaatcgaattcatttccaagaaactgatgtcacgaataaaaagacttttggctgttcacaaaaccccaaactttatggagttagttaaaatatcctacaaatagaaaacaaaaaaaaactctcacttgaaacataacctagtcagggttttagtttcgaaaccgaatacggaaatataattcgcacaaggcaaacaaagaatctgtaaatttgcatgcttttgaatttcgaaacaaacactgatggatcaaacgaatcaatcaacagatttcgagaataagaaacaaaacccagaaacgcgagagcacttgaaaagccaaagcaattatatctagaagaattggtaaaacatggtgtcatactgttatatatctcgattctacctgagagatagcgagatcaagcgccgagcttgtaaaggaaatcgaattggggaagcaaaaagggaaatttcggaatccaagctttctattctttggatcgaaaccagatgaaatctcttctcaacaaaaagttgacggcgcaactgaaattctcagttcaagagctctgactgtgaaagagaaaggcaacgattagagaagagagggaagggaggggaatattttacaggggaaaaa

SEQ ID NO: 1445 - DNA, 1862 bp, Arabidopsis thaliana landsberg
caccagccttttctctgttacatttaacttcacttttgagtttctttttctctgcttctaacttttccaacttgtctgggagttccttagttcgagaagtcagtacttctgagttctctatatgaacaacagcctcttctctgttacatttaacttcattctcgagctcatgtttctcggcttctaacttttccaacttctcttcaagttccttaatgcgagaagtcagtacttttatttcagaagctaacgagttctctgagggaacaacaacctcttctgtaactgattcaggtccactcttaccgttcccatctggcgtcacaggcaatgctacaagacgttccatctcaagaaaatcacccatgagatcaagttcaatggaagaggaagttccctgaaggcttctcttctcaatcaatgtggatgatgcccatgaatcagagcaactcacatccattcgttcccctccatcagaatgactatctgtagatcgatgatcgttaaacgaagctgatgacttagccaacatccgaaacttcctgcactcagcctcaagtttcgccactttctttatgctatctaactgctgcttgctggcggtttcagctgcttgggtactcaaatccctctcaatagttctgatctctggctcttcgcatcgcgcaagaagctcgtgtctaagcatcacgttttctttcgccacagattccgccatttggctaagctcctcagacttggttgcagtttcaaaaatctggttctcaaggctggttctagaagactgcaactcctgagttctctcgatcacagcatcttgaattctctgttcttgttcatctcttgcttgccttaactgtctcacacactcctttaaagctccatcaagatggcttactctatcttccaacactctattcttatcatcagcagcctcaagcttctcctttaactcaaccacttcattttcagctttctcccacccttcacaacaagagtagatatatcttcactaaaaagtcgcagaatcataaatcaaaaatgtagaaaaaaagattgataccagcgacagcttcttcagcgactttgacatgttgcttcactagatcatctttagcactcacattagcaagagcagctgaaagtttctcggctaaagtcttcatgctatctttcaactcttccttttctgtttctacttccaaagaaaccgttggtgattgtatctcgtcatcacgagactccattgtactctcaggcttgagcaaaaataaaaacagacattacaatgatcttttagatgcaaaggacacaagactaaaataacaaaaacaaaattcttgatcttacttgaatttcagaatccttctcagatagtgaagacacagactctgattcaccaaagcttctctcagatgattctctcttccttttctccatttatagtttccaagatcacaatcagcacataacagtctcaggatctgaataagagagaaaacacacacacacacacacatacattggattctttagaaatgctgaaacatacatatacatagtcaaagaagaaacaaactttaagatgaagtaaactgaaccaatcagcaaacatgcaagataagagaaaatcttgaataaaccaatcatttaacacaaagtattagaaatgatttaaaggaactgaatttgtctttatagtaacaaatgtggttccagatgtccgtttcataatcaaaaaccaccggttgagaaagctacaagacaaagaacaaaagcttgaaactttaaatttgaaactcgttgaggcataagggaaaatctgccaaaaccccacatccaagagaaggaaataaaagcta

SEQ ID NO: 1446 - DNA, 519 bp, Arabidopsis thaliana landsberg
cgagctaatagtgtcagagcaaaagaaaccctcttcttcggccttgaagaatttcttcttccgccgacaacaatggtaggtagtcatccttctttttggaattaccaccaacagaaagagcaggaatgtccacatcatgagaaacacgattcagccttgaagactttctcgttccagtgcttccttttgtagacatccttctcgatgccttcttcgcactcactagtgccttatccatagatgtaggtgtttcctgtgaatcatgggaaggtattttttgttctggctttttgcctattggatcaagggcagcacatatctcctgacggacaaagtgtttcatatcttcttgcatttgattcatttgggcttcctgcttcttgaaacacctcctcatttcaactaaacacctctcaaccaccgtctctccacgacaatcctcatcattttcttcattatcacattcaacaacagatttctattttttcatagcaggtgctttcgggcttgggcccgatg

SEQ ID NO: 1447 - DNA, 2412 bp, Arabidopsis thaliana landsberg
cttctcttttaataataaaagaatgaaacttgtgattttaaaatctactttaaattctcctgttattgaaaacattttaaagattggattattaatgactttaagtgatctaagtggattttagtggatttttttagttaaaatacagaattttaaatctcatggttttatgtggactttgagaggactttacaataaataaatcataacaacttccttaaattcacaaaaattcttcaaattcataaaaaaactcaaaataacttaaatcactcataaaaatttataatcaataaaattcataacaaattctcccccattatataaggaaaatataggaatatgactaaaattattgacatactctattatgaaaatttgtaaccctccaaattttatgaatatgacaatattattgacatacaagttacaactaacaaattgttatgaacacgaaaacaagactccaatataaattttttaaaacaacacaaaaagtagactcaggaccggtgtgtaccagtcattacaaagaaaagaaaagccatggacaatgaaaccgaacactttctaactgactctgaactttcacaattctcaagctgcaagcttccattaccattccttcaggtgaagttgaatcccccagaaggagccggagcttggttcacaccgaactgaaacccggcatgtgtctcgtcagcttcttctacacccaatatgtctccataacttttacagctttttcatagatctcactgttgtcatggtcctgaagttccatcatattttctagccctcctgcatcatcaatcaggtacgtgtaatagttcatgtcccctgtattacctaagttcttctctgcctctcccactttcaaaatgttttctaatcctttaaggcagataattatgatttttggatctgcacataacaaaagatcgcataacggtgttatgcatccttgctccacaaggtacttgacttgatcatgacaacctgaagttacattgtaaattgcccatgctgcttctttcttaatgtcaaattcagcatattgaagcagatgaaccaacggatcaatcaaattagcctctattaccatctggatctgttcttgtgttcctgcagtgatgtttgaaatcgtccaacaagcatccttcttaatatctttcttatagttgtgagttagaatgttgagaaaacaaggtaaagcaccactgtcgatcacacactgcgtttgtagatcatttccagtaactatatttccaacagtgagaagcgcaggaattagcacatgtatagaaggatggagcagaagttcaacgagtcttggtacaacaccagcctcgataacaatctggattttgtcatcggttcctttagatagatacttgagagcccaacaagctttttccaagacttgttcatcagtagaatgaattaatcgttcaagggcttgaaacgctgcgggattcgcctgtccaccacgacacaagtttgacaaagtccatgtgacttctctaagcgtagacaacttggtatgctaattaagctgattgagaagcggaacaagtgccccacatttaagaacatatgtacagaattgcggtgaatcaccagcaatgttacctaacgcccatacagctagttcacggacatcgtcgcttggggaagaagcaagaaggtggacaaagatcggaacagcattgagatctactacaacctttgtatgatttgaagttcctgatacaatgtttgttagagcccaagctgcctcatactgaatcttagggttatcttctttcttaagaaactctacaaaccgaggaacaacaccagaatctatcacttcgtcgattagaggatctctcgccctagatagaagggccctgatttgagtagtgtacttgagctgcaaggcaagatcatctgaccaaaccccagcgaccatatccgacaaactctccaacttcgtatcaaccaaacccgagaactcatcaagaacttcacgcctcttcttcatcagactctcctcgcgtttgattttacgaacctcaaccatgctctcttctctcctccgtcgtccctcctctgcatccaccgcaactttgtactgattccggcggacctccgctttggtattaggattcagcgacatgattagaatccaggaaaaaaaagttcgatgaagggattgtttggataatttgttactcgatcaatccacacagacacacgcaacaacgcaatgggttgtgtatatatagatgatgcagagaagaaaaaggaaaccctacaaagaaaatatgactaattaaaaaatagaattaaggaaataaattgtttttttctaattaaatttctcttataattaaattacaagacaaattaccaatttttattattatg

SEQ ID NO: 1448 - DNA, 736 bp, Arabidopsis thaliana landsberg
tactttaaaatatgcattctatttgtgaaaagaggttccacgatatcttacactttaaaactataacaataatattttatttttattttagtattgataaatactttaaaactagggtttcagaatcaagtcctaacaatataaatactcaagcaatatcatcaattctaaagcatcacttttctttctcatctatacacataatcaatgagtttaccttcaggtttaacgtatcttagtgatgtcaagcctttcaaaacgaattggcgtgtccgtgtcaagatccttcatctatggaggcaaacaaattgacgttagatgtcattatatgtgatgaaaatgtatgagagaatgctattgattaaatatatgaatctatatctatttctgtttgaaacatttaacatgttcgtatgtgtttttgtttatttggttttgatatagggatctaagatgcagattaccattagaaagcattatattggcaagtttaacatgtcactaaaggttggtgattggatgatcattgataccttcactttgagtccttcgtatggcaagtacaagatatcgagtttgagctatcgaatgggctttaaccacaacacagatgtgattaaatgtgatcctgtatcggatagggtttttctggatctagcatatttttgaaggggtttaaagacccgagagtttatgattgaaaaatgtttctaaattgggtaatggaatttttcct

SEQ ID NO: 1449 - DNA, 595 bp, Arabidopsis thaliana landsberg
tgggcagcggtttcccacaatatcagtagatagaaaaagttggaatagtggtgtttactatgagactacaacaatctgcatgtctagtgctaaggatacttcagaactggtggatttgatatcatactatggggcagtaaacaaaattatcttgttggactaaaatgtgttttatgtctgtttttcaagggacccgtacatattagcgtctctatcaaagcaagtgttttactctagggagacgagtcataaagctggcatgttgctatgagaggtccttctagaagattcagtcagaaagagttgatgctagagatgcagacatcagtcctttgcctgcaaatattgacatgagtgttgacttggatgaaacagacaatgaaagaactgattgcgaaggcatatatgtgtggttcttcttcattttcatgattagttagactttgtttgaatagatgtctgatagggaattgattagttagactctgtttgaatagatgtctaatacggaattgtttgcttcacatatattatatgttgcttagcttatagtctgatagtcgattgttcctctgtatatcatatatatattaac

SEQ ID NO: 1450 - DNA, 748 bp, Arabidopsis thaliana landsberg
gagaagctaaaacctgttgtatctgatacttttgaattggtattcatgagcaacagaaatgcaagcctcataaagggcatacataatatgtatactggggctcatcaagggtattgtatttgatatttctcccaaaatgtgaaagttaatcctactaacaccaatagagcgtaatcacatggagattcatggagttatgtcggcaatgcaccattgctgacttcaacaaatagtatagaatgtttatgttgagatatcctagtgcgaccaagtatattgaggataccattatgaaagaaaaatggtcaaggtgttgttttccagagaaagttacaacttagacacaagcaattgtgtggaatctttgaacagtgtgtttctcaacgcaaggaagtactcgttaataccaatgcttgatgaattaggcgctctcattagtaatattgatgatgaaactagaagaagaggtttggaattacctgatttggtttcaaaatattattgggcggagttttgggcattggcgtattatagaactatttatttagtgtcgaatagttcacagtgggaagtcccagatgaaatcaaagcgttgaagatagtgccactatctaaaaaacataagaatgaaaaaaaaatgctaaaagtttccatcaaccggggaaaagcgtccacaacgatgaaagacgcaaaacaaatggcgtccaaggcaatcgtgtcaatggttattatttggaaatacgagtat

SEQ ID NO: 1451 - DNA, 2448 bp, Arabidopsis thaliana landsberg
aaaaaatccaaaaaattttataaatctttgtggtgtataatataaaaaaaaattttgtgaaggggggtaaaaaaatgggttaaataattgttttaaagggataaatggcgaatttttgggtttgggttaaaacgttcaatatttttttggggttttcctttagtaaaggggtataatttacattttatataacgcttttaaaggctttggttttggtttgtgaacaaattttaatgaagtatatttttacagttaggctttagattaattattatttctaatttccaattatattcaaatttagattcagttaaatatgttactgctaattaagaatgtatttaaaatatataattctgcaaatattaaagtacacatgaaactagtattcgtgataaaaagatagtttttcattacacggtgtaaactgatattggattggttggttataaaaaacctgatacaaagtatgtttgcttatgaaaaagagcaatatatactttcttacacaatcataattgaatcagcttaattctacatatctaatattttaatatcgctaatgttaacaaaacaataaaatatttatttatctatcttatgacaccgtattaatgtcaattaaacctattttaccatataacctgagtcttgtaatatttttcaaaatatatcaataaatatattttcaactttttaagattttaaaatttattatatccttgttaattttggatgcttgttaagttaagctttattttcactcagatttgaattcaattggttttacttataatatgacactgatccattgtctaaacattttagtcgatgtaagaacatacattttttccctttataattgaacaatatatatccgcttttaaaattttgaatcacaacatatgctgatttttgttttattaaatctctattatatgatgattcaaataaattaaacaaaaattatagaaaaaaaataattttaaatctcaaccaaaatcttctaaatatctatattattaattatccaagataatatggatagtagataattttactttgatcactttttaatttattgcattaatattagggtatctaatgccaacttgccatcattttactttgaccattttttaatttattagtatataatatattttggggtagtagaaagagatcaacatgtttaattcattgtaaaaattttaattaccttttcctgaaatgtttcataagttttccaacggtttttcgtgtgcaaactgtccgttggagattcgtttttaacgaattatggcgcaaaaccatctaatcaattactccttgttttgttgcacgaattggcataatattgttttttgttcacaactatattcaattttaaaagcatcaaatttttagtatctgaatgaaattgtttttaaaacccgaatttgtttcataatttttcaagtttcttgtatttcaataaattttgtccatcaaataataaaaaaaattaatatgtaatgagtttttgtgcctaaaatctctttagaaaagtttttgcaacaacttttcgtgtcttaattataagtatattactacagttttttaatctgttatgaatttctttaacttttgatagattatttcttatgcaaacatataatttggaggaacaatatctttggatcttaacgaactgttgctgtcaatccatctattcaaacatttatttatgttgatttgaaattattttttttcattgaaatttttgatatcctctattcaaaatatgttttcagaaaattttaaattgttatatgattaggggataaatctttgagatttttaatttggataaaaaaactttctcaaaatctgtttcaagtcaagagtttaagtaatatttggaaatttgttaatcagcttttaatgtgttatagtattgtttagtttgtttcttcatcaatatttttatacctcctacaacggaaagcattaaaaaggaaactataagagcaaaaacaattaatgtggagaaatatgaggcaaagaagatactggataatgtattgaccaatcaacttacatggttatcttacaatgcttatatcttccttgcttaaccgataaatttcggtcagttttgaaataaaactttgcttcaaaatttggattgaattatcttttttttggactacaagaaatacaaggataataacgatccagtttgttgttaatttgtcataaatggggtttacattaatatagcaacaaaaatcaatttgtcgtagattgatttaaataaatctacattccaggtaaatatgatatattgttttcaaataattacatttatcgtttattcatcataatcgctaacaatcaatagtaaattattcgaacgaaataacaaatttggtcattaaaatgatgggaaattttactctaattttt

SEQ ID NO: 1452 - DNA, 374 bp, Arabidopsis thaliana landsberg
gatttctccatagcaaatgtactaatggggaaaccagagatgcagtttcttctcgattctctatttggggacctttttaaaatacccaaaaacaaggtaaccttctctggtaagcttgtccttggcctaatatgccgtcagttagtgacaaagaaggtgaatgtgatgtggattgtattcggcggccatccaatcagatttggattaagagaacttagtatcctaactgggctggaatgtgggatgtggaggatgttataagtgtgaaacctgagtgtaagagtgtttggacgactctgttcgatgagaggtctggggtcacagatccaacaattgctgatttggtgagttggatgaaggaggaggaaagcatg

SEQ ID NO: 1453 - DNA, 577 bp, Arabidopsis thaliana landsberg
cagaacatacatgggctagtataaaaaaaaactatacaactttgattttacagtaaatagtttaagcctaacatgaacccgaaagcaaactctaatgaagagttgatattaactcttcggttcttattgtaaacacgcataatggcataatagtgttttctaatgcgattatgcaaaaagtttgaaccaacatacatgggctagtataaacagaaaccatacaatattgattttacaagaaatagtttaagcccaacttgaacccgaaagcaaaccccaatgaagatgagttgacattaagtcttcggctctgattagtaacacgcataatagcataatggcgttttctaatgcgattatgtaagaaatttgtcaatcaagaaaatctgcataattgcatttgaaaacacaaaaaagtgggcatatagatgtttgtttgcataataattcgttattattctatacatactaaatattagcaattgtaaaagaaacaaatatcattgtttacacataaattatatcattaataatacagaaaacattctcacagccttttaaaaattctaataatctt

SEQ ID NO: 1454 - DNA, 1080 bp, Arabidopsis thaliana landsberg
  unsure (1)..(1080): unsure at all n locations
tcatgccgccaatgaaagcttcacaacagggactgccgctctgcagccgctggacccgaaccaggagaccctttctcttcgagaggcccgaagccagaagaggaaggccaccagtccaacacccaagaggatgagttggaccaagagatcaggaatatggagatgcttcatcagcaagtacaaaagaagaaggaaaaaatggctcggctagctgacctacaaaggcagattgacgaagccactgaagaagtacgtcatcttactcaagatgagcaaaaccgaagccccaacacagagagcttcaccaagagggcttcttcaatgaggatgattggtatgaaaatttccatcatggaaattttgcttttgacgatgcttctcctctgccagcagaactgcaggctacaccttggccctcgtcttacaagccacctcagctccccatgtatgacggacactcagatccgaagcagtttctgatgagctacaaagctaccatatcttcatatggtggcaatactacagtcatggcgaaatccttcgtcatggcagtaaaaaatgtcgcacaaaccttgtactcatatcatggcagaagctaaaagacatgctgatcaacagcttccaatggttttagacaaagccagtcactactcaggctttgttctagtgcacgcaagaccatgaagaataccttcaggcgtatgtccaaaggttcttgcgtctgagggcacaagcgcccacagtgcccaatgaaattgtcattgaggccatgatcaaagggcttgggccaggacctatggctcaatacttcgctaggaaaccccctcagactctggagaagctccttcatannnnnnnnnnnnnnnnnnnggctgataatgattttcgccaaagaaaggaagaagcctataggttttctgaaatgactaggggcttcaaaggaagaattcaccctagacatgttagatcaatccataactccagctagagtgatgacagaggaagccagctgcaaaggccacaacatagctcacaatcattcggacaatagcaaaactctntcaggctaccagccccaag

SEQ ID NO: 1455 - DNA, 711 bp, Arabidopsis thaliana landsberg
atgggagacaatacacacgtccactgttccctgtttagcactaagagtatcgcttgcagagccaccaccgagtcttcttgtagctttggcaacgtcccatgagattcctcttggaagttgttcacattttatattgggtttcggcttccatattttgtagcccaacaaagcaaagggtagtcgctaagtagtctcatttttgtcaccttctatattggttttgggcttcgatatttggtagcccaacaaaacaaagtgtagtagctaaatagtcgcatttttgtcacctttaataatgggtttgggcttcgttatttggaagcccaacaacttaaaatttagtcgccaagtagtagcataatggtcactttatacctttgaaattgaaataattctccgtaggaaattgatatgtctataatttgcttgatttaggcattcattcttcaccactttgtcattgtttcatccacatttgatctcattaatagccgttttagtgtgttttccatacttaggacggctttgcattaggattgcatgtgcattgcatatttggttgttttcaggtactttggatgcttttggaccttcaatacaacagaaagtcacaatgcccaatgacgcccttaggctaaagtacttccatcccagccctcggagccctgctagggccaaatcacttctattgccaccccccgagaaagctag

SEQ ID NO: 1456 - DNA, 703 bp, Arabidopsis thaliana landsberg
gctgtacctctctctgtatggctgatccggagaaaacgaagctccgatgggtacaattcggagacaaagacgacgacggtggtttcagagttcgacgaagaagggcatgaaggtaaattcgtagcgtttgatgaaggattcgagcttgagcttgaggatttgctgagagcatcggcttacgtgataggcaagagcagaagcgggattgtgtatagagtagtggcggcggaatcgtcctccaccgttgtcgccgttagaaggctcagcgacggcaatgacacgtggcgatttaaggattttgtgaatgaagttgagagcattggtaggatcaatcatcctaacattgtacggctaagagcttactactatgcataggacgagaagcttctcatcactgatttcattaacaatggcagcttgtactctgccttacatggtaaaacactaatctttttcctattttggtgctaattctgcataaatctaccactagttataacgtttttatgtgtacttgctctgactataaagtggagagctttttttttgtctttgtctgattgtgttggattgactaacatgttcgcttcttctcattggtttattgttcaaagctttactgtgtatacatgtgttgaaacttgaaacagttgaactcgatgaacagcatacagatttgcttctgtgtagcattatagtatgt

SEQ ID NO: 1457 - DNA, 682 bp, Arabidopsis thaliana landsberg
cttggatgtggatttggagcagtaatctttgattcagagtttttggaatgtgaatgtttcaatcctttcctacacttcttgtaaatagaatgttcaaagattactttttcatttggatccttttctactgttgttagtttgtgattttgagttgtggtgtcttgttattatgtagcacattatgaaagatcaaataaaagaccattttacctgcaagatgacgagatagtggatgcttttttttgttctttatgtttattgttttgacttctcagtttgagtggaatgaacaagttgagagtgaaacagagactagtctcgtcctctgtttctaagcaaccacatgtaccacaaggcaaagattccgtgcaacaaaaggtttgttttcttattcatttaataaaggctagtttccaacttcatcccatccctttgagcacatcccaagtgatgcatttgcagaaagaaaaaacatatcaaccacacttcttagttaactttactaaaccatttgattttgccaaaggatatgcttcaaagtatcaaccaatgatggcagaaatttctatcataagaaaagaaattcagaagcttaacgagctggtccgaggtagaaactgagcttaatcagctgttggtaacagatgtttaattcatttttacaggtacattgttttccccc

SEQ ID NO: 1458 - DNA, 755 bp, Arabidopsis thaliana landsberg
aattttttcagtaagtcaagttaacattggtacaaaatgtaaaagagaagatgcatacatgaaaccatttcctgtaaaatctatgccccaatctttctcatcatgcaatgtgggtacaatcagaagttgagcttttagctcctaagcattcaggttttcagccgatgcattaacttagagatagtttcacacttctaatgacagtttcactgatttttattccagttgatatatacgacagtataaagaatcatatttcaacatgaaagataccgacgcaacaaaaatatagaggaactaaccttttctagtaaaactgcaaaattagaagaacatgaatgtgcgaagcagcaataaggtttatgcttacatgtttgaatttgagcacccgaaatattccctgtttcactaaaatgaatctctatcaacttaccctgtcaaatttaaaatcggagacagattctgagttaaataaagacccagaacgattagaaagacacatagtaaaaataaaaagagtaagcaaaaggtattttggagtttggagagcttacaaaacgactggaatgatcgtttctcaatgtttttgcatttccaaatgcttccaagatgggattagtctttagtatttcatactcgatcccacttccacctccaagagcagccaagaattgcattacaaatgaaaataaatattttgataagaaaacacttcaaaataggctctcgtaagcttcacaactttttcttacaac

SEQ ID NO: 1459 - DNA, 733 bp, Arabidopsis thaliana landsberg
  unsure (1)..(733): unsure at all n locations
ttattacaaacgctctacactgcaatcactgttaatcatatcaattgaaagaagctgttaaaaaatttatttcttttaactgtaaaatagntaagaaaataaagcttgacttgttttctatcagaaattaaccatagactgattttttagaagagggacatttaccaaataatcatttctatattttttcagaattagagaacaataggtagcagagaaaatgtacgagggttgaggaggcattatttcactcaattttattgaatagcatgctatattgagaaattcgcacattattgcgaaaactcacctacttctgctggacctcatgaaactataccgccccatccctccaagatcccccgagatgttgcccgaacccccccatcctctctccacccaccccccacgacctaccccaatnnnnnnnnnnnnnnnnnnnnnnnnnnnnnnnnnnnnnnnnnnnnnnnnnnnnnnnnnnnnnnnnnnnnnnnnnnnnnnnnnnnnnnnnnnnnnnnnnnnnnnnnnnnnnnnnnnnnnnnnnnnnnnnnnnnnnnnnnnnnnnnnnnnnnnnnnnnnnnnnnnnnnnnnnnnnnnnnnnnnnnnnnnnnnnnnnnnnnnnnnnnnnnnnnnnnnnnnnnnnnnnnnnnnnnnnnnnnnnnnnnnnnnnnnnnnnnnnnnnnnnnnnnnnnnnnnnnnnnnnnnnnnnnnnnnnnnnnnnnnnnnnnnnnnn

SEQ ID NO: 1460 - DNA, 485 bp, Arabidopsis thaliana landsberg
ttggccaacaaaaacgctaatatctcttacagattctaattcaaccaggagtgtcttttatagacctgtaaagaagaaaacaaagtatgaacactaacataagaccttgacagaaaagtgagaacaaaaaacaaataaaagagctataagttgtataaccataagccctcaagatatagcacaaaagcaactaacttggaagcattcttctataaaaacttatgctccaatcattgtttctaacaaaaatccaaaccaacactagttaagagcagagattaatgttttagcctaagttttacaactaccaccatctctgaaattgaaagctctctgttggggatttagctaacgaacaaaacacccttgagccaccaaaacccaattcgaaatttcacaacttgatcacacaaacacagattaaaaacagagatcatgtacgagaaaattcaatgctcggaacaatttctaacccaaattgacag

SEQ ID NO: 1461 - DNA, 728 bp, Arabidopsis thaliana landsberg
aggtcgctataacgaaaatatcttcccctcaacaccctacttagaagagagttcgggaatcggattagtcgccatagttgcttagctagtaaggctagattaaattcttcaagtgttctaaaaccaagaccaccttcagagtgtggggtacaaaatttttctcatgctatccaacgaatgccattactattttcattagttttccaccagaaattagcaatggcactactcagcttggaacggatagcttttagaagtaaaaaatacgacataacatatgtcgaaagagctcgcgctacaaaatttatgaggatctctttgccaccttaagacaagaatttggctgaccatgtatttagccgtttttgaagtctatctcgtacaaatgagaacacttaagttttagaaccatgaattttctgaggtaaacccaagtaagtccccatacctgacagtattgtccacgtcatggccaaacattacagatgacttagcagcattgagctgttgttttgaagcctcgccataaatgctgagaatattgataatctcttgaccctgagatggatctaccttgtagaaaaagggactatcctctgcaaacagtaaatgggatgtagatggacttgcccgagatatttgaaggccttgaatccgcccattccactctgcatctttaaggtttgctactaaaactttcgttcataagataaataggaaaggggaaa

SEQ ID NO: 1462 - DNA, 580 bp, Arabidopsis thaliana landsberg
atgcaacaatccttattgaaacactctatgatttcatttcaagagaatgtcaagctaaattatcacttacactattagagacgaatgtttaaaaactagtcgatatataaaaatagtaacatcaccactcaaatgaagttgcatcaaaagagggaccagagagaaagagtttcgtgagcagccaacaaccaaagtggaagtcctcttagtcgtcgttactaaaaacaaataatttattagtttaattgaagattaatttgagtcattaatggctaaagttagaacgattcagcaacggcagccaatatctttaaaatgttccgattcttccgtttcaagtcaacgttcccttcgtttcctcccaccttcttcttcacagaaatctgagatttcatatgaatttgcccatatttttagatctccatttgatctgagtacgcattatcacaaagttatatctttttatttttcactcttaagtctagatctctcgattattgcccaccaagtgatcgatcttttgtctaactgaactgggttatgcttgagatttgatctaacagctgaaagtttctgactt

SEQ ID NO: 1463 - DNA, 299 bp, Arabidopsis thaliana landsberg
gtaccgctgtgcatccactaagaacgtcaagaagcctaaccccatggtatccttttcattttctgtgagtccctcatacatctccacttgcagtgtggaaagaaactcgattgtctcctccttatcagatgacacttctcgaacagatgctgcacgtcctccagtaaccccaactgggctaaagtctcatatcagggatacctcgttcccagaagtcattcatctcaaagaatctgatatactcctccactgtaacctcgtcggatttgttcagtagcttcgtctccttgcgccatgac

SEQ ID NO: 1464 - DNA, 465 bp, Arabidopsis thaliana landsberg
gcttttcacgcagacagacaaaaaaatattgtaaagataacatgttcattctcgaatagtcgaataatgtctctttcagttcattaatatcacaaaagagaagccaaaccacttgcgcggagaggattagaaaacaacaaaagcaaaacatgaaaaaatgttcgtaaaatgaaatttcatttttagttttaagtagtcattaagacaaagattcttcaactatagtttctaactttggtttcttagatttcgaaactgagatcctatgcataaactccgccgccgaaaactcttcgatgtcttctaggttcagctttgatcccgctgatatcaccttgacgtcatctccttccccgtccggcgaaacccttccgttattatgacagtgtttcacggcggcggaagaatgatcacttcccacgcggtggcggcgcctgttcttagcagctacgaataaccgagcca

SEQ ID NO: 1465 - DNA, 671 bp, Arabidopsis thaliana landsberg
  unsure (1)..(671): unsure at all n locations
tccctctttgactcagtctcaggctcaatagtctcatcctcagctgcaaagtggacatgcttcttttttgtttgcaagttgngaaccgaatccaacttagcattcacctctgccatctgattgcccgaaacagctccaacaatcttcttcctctcagagttagcattcttggtgttgttactgcaagcgagattctctatcagagcggtagcatcagctgaatatctcgtgttaaagttaccattgctcgatgcatttaaagccatctggtatctccaatcgacttctttgaagaaggtaccaagaagttgtacctcactgaagtcatgatgcgggcagtcccgttgatactccttgaagcaaactcagacttagcatcatcatagaaattgttcaagaaagctatcttgatgcttcttcaagtcttgagggaacctgctttaagttgtttcatccaagaagcggattcccagcaagtgaataagggaagagctggcacagtaggtagtcctctgagattccattagctttgatgctcggaacgaggtccctaaaacgctcgatatggcccattggctgctcatgaaacaagccatgggaaggatgcttgcctactaaagcaaattagccatgcttaagctcatagtcgttcccttggaagggtggggggt

SEQ ID NO: 1466 - DNA, 383 bp, Arabidopsis thaliana landsberg
aatctagctcggggactaaagataggaaaaatccaagctttttgcgattcccagctcgtcgcgaatcagttaacatggatccctcgaggagaaaatacatcggctgacgccctagctgctctagcctcgacatctgacccgagcctgagaagagtcatcccagtagaatttattgagaagccaagtatcgagctcggcgaagaaggacacgtcctcccgatacaaatcggcgcggatcaaaacaacccagattatctaggaggctgcctctcacaatggatatagccaaacaaaagctatatatctgacgggaaatggcctttgacagatggaaggctcggatactcagagctcaggctgcacgttttgctctagtaaatgaa

SEQ ID NO: 1467 - DNA, 6223 bp, Arabidopsis thaliana landsberg
gctgtctcaccaggtttgctaaacttttgaatgtgtttatccgtaagaaaaccttagccaggatattaacatttcctcttcttttctagatcatgctgcaaatccagtaaaacatccgccccccagcgataacggagatgatagtaaaagtccgggtgctgcaccggcaaatgaaactgctaaacccttacctgtcttcccacataaaggttagtttttaaggcatcaatcatataagttactgttgtttccggtgtaaagaagacaaggagactaaattcatgttattattacattgcagcttctcctccttcgattgctccctcagccccaaaatttaacagacactctcatcatacatctccatctactactccaccgccagattctactcctagtaatgtacaccaccatccttcatcaccatctcctcctcctctatcttcacaccatcaacatcatcaagaacgaaagaaaatcgcagatagtccagctccttcaccactgccaccgcatctcatatctccaaagaagtcaaaccgtaaaggtttccactttaccatagcctttgagatacttctattggccagccatcttaattctctgtttttcctatgttttgttattataggttcaatgactcctcctccacaatcgcaccatgctccttctcctcccattcctgattctttgatttctcctgctcacgctccagtctctttctctatgaaacgcatctccccggctctagcaccttctccaacccaaggtttgattccccgctcataatttgtccaataggcaaaatctgtttttaaaaaaaaaaactctttgcttgatgtgaaatcctaaattatgtttatttctcctgaagtgtttcctctcaggtcctcttcaagaccttcaaaatctcggaaattccctctaggtccacctcttcaagcatttcctcctcctccccctaattcaggtttgttgagattttttcagttgttttgggaacaaaactgtctttatgtggttcttgttttggtgtgaaaccaattgctgttattgtgtttctccagattgttcttcaactatttgtttggaaccgtacacaaacacacctccgggatctccatgtggctgtgtctggccaattcaagttgagctacgccttagcatggcgctctacgacttcttcccaatggtttcagaatttgctcgggaaatcagcgccggagttttcatgaaacagagccaagtccgtataatgggagctaacgcggccagcgaacaacctgagaaatccattgttctaatcgatttagtaccgcttggagataaattcgataacatgactgcaatgctgacttaccagagattctggagtaaaaaagtctatatagatgaaccaatctttggcggatacgacgtgatttacgtgcgttatcctggtttacccgcttccccgccaacttctggtatgaccattatagatcaaggtccgtactctggtaataataacggaggggcggtcaaaccgctcggagttgatgttccaaggaagccgcgcaagaaagagctcaatggtggaagtattgctgtgattgttttatccgcagctgcttttatcggtttatgtttttttatcgtttggttcttggttttccggcgacaaagagatcgacgacgtctttcgaaaagaacaccacttgctcgcccttcactgccttccctctcgaaaccatcaggtaaaaaatggttactagttactactactgttgctcttggaagaaacatgaaataacttatctgaatttgcaggctcggcgagatctttaactggaagccgatttagctcaacttcattgtcatttgaatccagcattgctccgtttactctctctgcaaagactttcaccgcaagtgaaataatgaaagctacaaataactttgatgaatcgagggttcttggtgaaggcggatttggacgagtttacgaaggtgttttcgatgacggaactaaagtagcagttaaggtattgaagagagatgaccagcaaggtagcagggagttcttagccgaagtggaaatgcttagtcgtcttcatcacagaaacctcgtgaatttaattggtatttgtatcgaagatcgtaaccgttccctggtttatgaactcataccaaatggcagcgttgaatctcacctccacggtatgttttccagaccttaaataccccaatctggtctttggttttcagacttcattgtagtttggttatttcgatcgatatggttttggtgctgtttagtttgcttatctttgaaatcaatctcttgttttctatctgtttcttatccagggattgataaagcatcttcgcctttagattgggatgctcggttgaagatagctcttggtgcggcccgtggtttagcgtatttacacgaagactcgagcccgcgagttatacacagagacttcaagtccagcaacatcttgctggaaaacgatttcacacctaaagtatctgactttggattggctcgtaacgcccttgatgatgaagataacagacatatatcgacacgcgttatgggaacgtttgggtaagataataaaaaccagaatcggtacaaactgcttcagactgttttttttcctgttccgattttaacttatataaatgttgctttctaataggtatgtggcaccggaatacgcaatgacagggcatcttttggtgaagagtgatgtgtatagttacggagttgtgcttctcgagctacttacagggcggaaaccagtggatatgtctcaaccgcccggacaagagaacttagtttcatggactcggccttttcttacgagtgcagaagggcttgcagctatcatagatcagtctttaggacccgagatctcattcgatagcatagctaaagtcgcggcaatagcttctatgtgcgttcaaccagaagtatcacaccgtcctttcatgggagaagtagtgcaagctttgaaacttgtcagcaacgaatgtgatgaagctaaagaactcaattctttaacttctatctctaaagacgattttagagatgacactcaagctgagagctcttgtggtgacagctcagcaaggatggctcggtatccattgctaccaaattacgactctgagcctgatacagagagaggattatctacatcggaaatgtacacggggtcagggaggttcgagagacagtctaactcgggtcccttgacctcgggtcgaggcaagagtttctggcaaaagatgaggagattatcgaccggaagcttgagtgagcatggaacaccaacggtcatgttacgatccggttctcgctaaacaatcttttgcctacagaacactgaagagtttttgattgcccgtttaagttaagagactgaaaggaaagaaggtgccttctcctacaagcaaaactctttgcctcatggaaaccggttaagataaaaccaggagtgatcatttcccggttcaaaatttttagttgaatagatctgtttatctgagaagaagaaacaagagattctgttaaatctaatttgaatgtacatatcacgttttaaagtaacaggcttaagcattaagtatcatcatccttcacaattccagttcgaatagagaagattggttttgagcatctctaagcaaacgaaaatgggctttaggcctataagccattcatatcctgattggttacgtttggaccaatgaatcataaaagttgtgtgcatcgatgaatataaattcaattgtgcttaaaaagagtaagtaattgggaagagagagagtcagcgtcgcatcgctgcaagagaaaaaactgtacagtgaccaaacagatggcacgtccctgtaaatttcaaaatcaattcgaaacccatttaagtcttttcacatcactatatttatgtttttttttgctatgagaaacattaaagaaaaatatccacccacttttggttttatgttttatcagggaaaagtctaaccagtgtattcaaaattactcaccgaccagcttcctaattttagtaactcctcattaactttcttaactttttccataccttttcctgtattttattttcttctttacagtatagaaaagaaaatccgattccatttgaaatggtaatgtaaattatttcgtcacaaattgtatatttgtattatatcagaagacactttttcctttgtcttttaattttcttggtgaaacttaactagaagaaatacaaaaaattatattattaaaacgtgtaacatattttcaacaaaaagacagctgataatttattgatttagactttataatttccatcattcggacccacttacagactcaattcactgtatttatagatattatcataaaaatgttataattttttatatgtaatatatctacacttaattctatatataaatgtgtgtaagaagaaaatcacaacaatattattgtacggtctctctctcatttttgttaattctttctcacttgatttgagagaaaatggaagaaatgaggaacaaagtagacgagaacggaaaagatacgaccgcgaaggaagtgacgaagaagacgacgatgctcgttgccggagagtatgacgagtatacaccggatgaaatcatgagtctcgttgagtcttcttcaccgacaatgacgacgacggagatcgaaggaactaacttttccggcgaggggagttttagagtgaggtttatcgacgacccgtacgctatgccggtggttgttcagtcgtcttccggttacatcacgatcaatgtcaacgaagaaagctgtggtccgtccttttcagacagcgactcttccgtcatggcaagcgtcgacgctagtggtctgttcggttgctgtttcgaatacggaaacgagaaaggcggcgcgtggagtacaaacgaggtgagagcgagtgagtatgagtggaacgacgatatgttggcgaggtttctaggcgaagactgtgtttgaccgttttgtcgtattttcgagaaagcatgatatttgagggtagtttggtcattaacttggaaggtaattatggtgaaaaaaggtgaaaatgatttacacgtttgttaataggaggaagaaaaatggaatatcagtaaatgttagtagtagagtaggtctagttagtagttaagtggtttaatgtgaccattttggtaatttcgtcacactgcggtactaatttctctaatatggttttattttagggtatattttttaaatatgaaaactactgaacccctaagtaaaatgaatgctctatttacaaatccatccttagatttttacatgtgttatcatcatcgactcatagtctaataatgtacatggattatttattgggcctacttgaaggcccaatagccataaagattagaagatcaaggcgtaaaaaggttccaacttcaagagatgattgaaacagttatttgcttgaacaaacgaaaatgttatggtaaatagaaacactcctttattctgtgaattttatttagccatagatgatgactagtagtaggatacagttatacatatacatgttgtataatttttgtaatcactgcacaaagccataaaagaaaaaaaattccagctctgtctctatcttcaaagcaaagccagagaaagatatagacaaacgaatcaaacagcttgcttctgtcctgaaaactcggaatcagaagaagcttttcatgttcttttaaccaaagagattccgttaggatcaccaccaaactcttcgaacacaactataaggttttgagacttaagccatgaacgaggtacatggtaccatctttgtgaagcttcaccacaattacataagcatttctttgcgtcgaaagttccagcgtagttacaacgtccacaagatccttgagctttatatgcaggccaatgacgtccaatatttctaccgtttatccaaacttgaccttttcccattgtgttcatgtctaaagccaatggttcatttcctgctggtgtagcaaacgtagactgcaacatatagaagaatgtttttttcagtttattcattgtgtctaagtttgtgtatagacattagtttaatccttgtgttttttcttaccttgtaccaggttaatggttgcttcttcgccacaaatgatccttgagtccatctcacaccggaactct

SEQ ID NO: 1468 - DNA, 488 bp, Arabidopsis thaliana landsberg
agtatcaaaaatgacccggtttaccacctaaccaggttaattcaagggtattaccttatcctttccccaaaggatccatttcctttgtaggacttttggccacttttattccagggggaggtccttaaaaatttccactactatcctaatctctatttttccttaacttcctttaattttttcctatctccttcctcttccatatattaattcatctctcctttttctgcctttaattccatcaattagattctcaaattatcatgaaaattttagaacaaacttgtaaatttaagaaatacatgatcgatataattttgtggtggagaaagataattggtagtggtgggtttttgttatgattcagtgccggtcgttacgggggtgattgtaataatggtgatgattatattatcaatggtggttagtgtaggaaaaaagaaggtaacgtgaatgaaatcatggattgagctttagagtcggagagt

SEQ ID NO: 1469 - DNA, 645 bp, Arabidopsis thaliana landsberg
  unsure (1)..(645): unsure at all n locations
tgattaccgagcttttgtttttgtttttttaggttttcatcttccattggtaggctttctcttacatgggttctcttgaaaaaaatatgcaaatcataagatttaaagaaaattcatagccatgaagaaaaatgttttcctgagattcagtgaaagaaacaaataaaaaagaaacataatggtgaagtttaatgaagctgcagagctctttttaccgcatggtgtagaggagtcccaacatgacgacctaaagagaaacacaaatgactccattagctcaataacactctaaaactaaagcatctaagatcacataacaaattcaaaatccaaaaccacaatcatggaacctctaacagaatcaacaatgtctcaaactacaaacacattccactaacttaaacttgacaagatgttagaggaaccagttcaaagacaattatcctaacaccgaagcaaaatttttaaccatctgaaatctgaaatcatcatcaaagtatactaaagaagcatacctgcaagaaaccatnccatgtatcatatcaaaacattggtttcaggaccaattttagacataagaagctacaggagaagaccgattgggatttgggtttatgggttgaaacttatggcttaatttcccat

SEQ ID NO: 1470 - DNA, 651 bp, Arabidopsis thaliana landsberg
tatgaatgctcaagatttatcaattatgttgatatgtggtcagagacgacttcttagcgttgttaatcttactattttcgcagacaaaagaagtccagagagagactttatccccatccttcttgtagttaacaaacaaagaatccatgagccctacacgttgccttggtgtgctcagtgagtcctcaagcatatgaggacttcttctctcctgcaaaaacaactccttgagacctcaaaccaaatatataaagatcttgagagagactttacctgatgagaccgggagtatttcaacatacgatcgcgcttgatcacaccttcttgcttcctcaaccatatggcttttatatcttccttcgtgagagcactactgtcccagccattgcacttcccctttgagttacacagcgaatggttcgatacctgaaactcctctttgaagtcagatttggtattggaccaatgctttctatctgtttgtctctggatgatgcttgatgttgaagctttgttggagtgtgaagactcaataaagcagaaaccttacaagtgcctttaccgcccacaacgctttcctggccaaataagccttgaatgcactctgaatcttgatagctttgaaaccagctctccttctccaatagactc

SEQ ID NO: 1471 - DNA, 747 bp, Arabidopsis thaliana landsberg
atcctttacattgccttaattgatgtgtaacttgctggaaaattttgtgtgagtctgttgatgtttgagttgataaagagacttgaataaggtaagctttcgtgatgaattggtaaatcattttctagattctgaaccttgacttatactgaaactcacgccataaaaagcacaaattcaacgtattaagtgaataaggtttgaactaataatccttgaacaatggctggtggagttgcactgagaggtaagataatatgagccgaggaaacaaccaaatgacgacagggaggattctgtaagtgtgtcatttttggttttatgattttttgaatttaagttattcgttctatgtttaagctgcttgttattaacaaatgttctttggttgaaatggaacttttgacaaaggatttcaagatgaaggattgcttcctcggctgcaaagacggtttgacgaccaccatttaatacaaggttagtactttatagtattgtgttttctcataattaagttgtgtggctatgtctatttgatgtaaacattgttcaggtttgaactggtgatcttttctttccaagactatttccttgggaaggtatttctaattaccagataaagtccatgtaagtcattcagtttaacccgacaataactaatttcctctctgataattctgctgaacaagcttcttttttgctttttcttggaggcgaagaatggaaatcttaggttcaaagtggggg

SEQ ID NO: 1472 - DNA, 370 bp, Arabidopsis thaliana landsberg
tctcccaaactctttctacaaagaagctcttctctttaaccttttaaatagcagatccgaatcatgagaagcttcttcgacccttgactctggatttctctccaattttgatttctcaacgaacacccggaggagaagaagaagaaaaaactaaaaaaaaaattgcgagttaggggtatcgaacccgagtaaggagaataagttagcctcgtgtgtagccactaggatacaataatattctcaactaataaatctaaacaacccctatataaactagatcatacggaattagaatttaacaccgctaaatgattctgtaacgcccgttaacgactggatttgattccaccaataacttatatctgagggt

SEQ ID NO: 1473 - DNA, 9380 bp, Arabidopsis thaliana landsberg
  unsure (1)..(9380): unsure at all n locations
acttttttatttcgtttctcagtctttccttcatatttattatataactttctagtaatttctcaagaattgtcatctaatctggtagctgacatgattagttttctgaatccggtcttcattactttaaaatttcagaaacataatttgccatttacatacaacttccatatgtatatggtacggacgatggaagatgagtttcatggcattgttggaattannnnnnnnnnnnnnnnnnnnnnnnnnnnnnnnnnnnctctttattcaactgttttcagaagatttcgtaagggagttacagaatgggactgatgaatgtttcttgatgaatcaacagctggccactttgggtttacgctatagtatgcatctgcataaatgttcatggtaacttatcggttcaataaatacaaactacattccatttctatctccacattaaagctttgtctttactaattcagtgatttccttgcaggcctgaatatgtacttttggatatcattcgttcctgccattgtaagtaaaagcaagattaagtaaaaagcttgaaattcataaggcagtactaacactcagagcatgtgtttgtatctgttttgttgtctaagcttgtcatgttggttggaaccaaacttgagcatgttgtctccaagcttgctctcgaggttaaggagcagcagacaggcacatctaatggggctcaagtcaaaccacgtgatgggctcttctggtttgggaaaccagaaattctgctacggttgatacaatttatcatttttcaggtaagcaaaaagacttttcctttctcaattcttcaagccatgatattactctattcacacagatgatccttatatatttcctgctaatgcagaatgcatttgaaatggcaacattcatctggttcttggtaaggccaccttataaaatgcatcaatacttaaatcagctatgcaaagtttttcagtttttgagaagatcatcaatttcatgtatcagtggggaatcaaggaaagatcttgcttcatgaagaaccatgtgatgatatcaagccggctaatttctgggtgcgtttcaaatacacaacaattcgcagcaacacactgtctcttaagattttttttttctttctggtgaatgcagggttctcgttcagttctggtgtagttatggcactgtgcctctcaatgtaatcgttactcaggttcgtcaaaacctttcatatatctacaattccacaatcttaagcctatccaagtctgtgactaaacatcgttcataaaaactctatggtttcacctgaatctgaacagatgggatctcggcataagaaagctgtgatagcagagagcgtaagagactcacttcacagttggtgcaagagagtgaaagagaggtctaagcacacgagatcagtgtgttcccttgacacagcaacaatagacgagagagacgagatgacagtggggacattgtctaggagctcatcgatgacttcactgaatcagattaccataaactccatagaccaagcagagtctatattcggagcagcagcttcatccagcagtcctcaagatggatacacgtcgagggtggaagaatatctgtctgaaacatacaataacatcggttcgataccgcctttaaacgatgagattgagattgagattgaaggtgaagaagataatggagggagaggaagtgggagtgatgagaataacggtgatgctggagaaacacttcttgagttgtttaggaggacttgatcttgtttctgcttttagaagcttggttcagttgtaattacttgacatccatacaagaataacaattaacaaagtaaatcttttgttggtccagtaaaaaaaagtattcaatgatcaaagtacatcttttgttggttcagaggtaaatttaaaatataatagcatggattggaacgagatattatggcattaggaaactttttgattatggcagtataaacaaagaccacaaattatggcagctatacatatattgatttcaaaacagagataaagacttgtcacctgtcatttgattatttatgaatttacctctgcagcattttccttcttctgtgcagtcacgcctaccgatggatttgattaatttcctgtcgattattactaagttgtatttctagtaaatacaacttaaaagtagttttgtactcggtcttaaaactagttttgtacatagtttttgagtaagatactttgttttttttgggacaaagagtaagttagtaatatcaaattttatcatagtgattgttaatttatgtcaactacgaaattaagaagttatcaaatctgatttgagttatgataacaatgtcattgatagactcggtcaattatggcattaagaaaatctaaggatttaagtaaccaggtatcaattattaccgccgttggtattgacttttaaataagacttgccagttgtcacacacatgtcataaacaattgattttttcttcttcttttcattcaaatgataaaattaaacttgcactatacagtttctatagaatcatccatcactagatctggtctggcgatcccccaaaagatcaagtcaaaaatgaataacagagaaatgaaacatggtaaaaaaaaagacgagaagatgccggttttagtgatgccaggtttcatagccggagcaacatttctggttatttggatcatacgacgtgagttccttttatcttacttttggtgtaacatagatttctctgcttctgtttatcttttgatgtaatccatatataggctatagaaagggctccaccaaaactaactcgccgccaccatccgcgcttccaaaggctcgagaatgtggtcctgtggcgtccactaaacctaacttaacacctgcgccgccgctaggtcagccacggctatacgctcaagaatctcaacagtacagtcttgtggcgtccaatgaacctgacttgacacctgcgctgctaggcccgccaccgctatacgctcaacagtctcaacagtttagtactattgtggtgtccagtgaaaccgacataccccagcttctggttcaatgttgtccgccagatggagaccgtggattaacaaatcaatactatgcgggacaagagttcgacttaggaggacacgacaaggacagcgattccgattaagagtagagtacttttttaaacaacttttgattatgaatttacctcatccaccatttttcttctctttatcttgtgtgcaccggcatctttagactataatatatgtcgtaagaagaagaagaagattataattggttgatttcagttattttattatcgaaaaggaaagagaggataatgtaatgttgtaatcttatatatatatatatatccgaatcagggcgtcatttcagtttactaaatcatttttatttatctaatttatgaaccatagatgcgttaaaacgtctacttaatcttttgtaaacttgagtgaattgatgaatggagtaaaatttcaagtttcatcgcattcgtttgtgttattaagttttgtgctgagagcaaatcttcttttagccaaacaatgggtgttgtggatttctagacttgattttattttctagcaaactaaataaagttttgggcccaatgggcctgactcattgaacaacaaactagccgttggtccgtgtttgtgcatagctcggagacgagaggttgtacgtgtacggaaagtaacagtacggagattagtcatgaaaaacaataaacatggtgcttttatgttttatatactccaaaaaggggtctgcgtgacagtgagatagacagagagagaagaaaaagaagcgagtgagcaaagtttctcaaaaatgacgaatctgtttctagggtttttggtgatttcgttttgcttacttgggaatttgattcacgcagctgacggctcgattcacgactacaacaacagcggaggcttcaccaaaatcgccaatgctcgctacttcgttggtggttctgaaggaatctatggttctgagtttctggatgttcatcatgcttcttctgatacacctctgctcaagggaaactccttcatcaggtacgcatttcgttttctcttgtgactctgttcatttcctactgagttagggttttatgtgcgattttatagtgtgagcttgtagatttgggttttaccgcttcttaggtactggatttagcactttggtgtaaagtttccaaggaaattttaagagatatatgtatatgagcttatagatttgtattactgtttcttattggattttactatttgcatttctatggggatttttggtttcttatggatgttcatcttttatgtttttgtaggtttgatgatatcactttcgtaagaaccaaggaatctgctagcaagcagaattctactctggcagctgcaggcttggtggaagcgatactgtttgaggtgaagcagcgagatagagttggtggatcttttttcaaatctgaggacatgtgctgtacgccaaaagttgcggatgctggttcctgcaatcttggagaggttatgattagtgcagatcctaatgatcctgaatggcctaagcggattcccacttttttcaaaaggggtgaggaagaagtgaagatgtctccggaagctgtcattatcaagaaaactggattgtacactgtttacttcatgacatgtgatccggaattggatggcgcaacaatcagaggaagaacagtttggaagaacagaggtggctatttacagggagagaaagctcctttgaagaagttctacgcctccatgcttttggcttacgtggttcttggcctagtttggtttccacaagttgctcagtattggaaagatggaatccagttgcatagtcatatcaactttgtaattgcatttaccatgggtgaattggccttcctctaccttgacttcgtttatctcgactcagctggtacaagtcctatggaggttacagtatgggcaataaccctttcttccatgaggaaggcactctcccggcttctactgttggtcatatcttcagggtttgggatagtgagacctaccctaggtggcataacattgaagatgcttcttattggtgtcttatgctttgttataagtgaatccctcgggttggctatgcaatttgggaacatctctgaaaatggaatgaattacttaatgctctcttgggctatactggaaacttgctttatccagtggattttcagatccttgtcgaaaacgcttaagaagctcaaggtaagagaaacatacaatcctccttttcttttgattattgatataacaggttaggcacactgattgctacatgtttctaacatatcacttgtaaatatatctttcttgttaattgttgaaagttgcagaatagccatttataaagatccatttcttcttagattattcatccctgctaatcccatatttttcttatgtagctgaataagaggaacattactaagctgcagctctacaagatgtttgcaactgtgcttgtaatcatggttgtgctcagttttgcctggatttatgtggaggtaacatctcaacagtctagtgataactctggggaatcacttgaaaaaagtcatatgattgtgtgactgaaattgttttctgaatcaggtatatctctacagctccttgagtcagttttggaaagtgaagtggattgttccaacactttggtacatcctttcttatgcaatgttggtactgatttgcctcttttggcctccatcggaaaaaccaatgaggtatggtatcaatctttctgtacttgccctttatcaatcgggtgcttatgtggcctgttttaagttccacactaagatcttgtgtgttttgtactaacatgtttgaactttgtatatctgatcttctctgctgctagttacacatttttctgatgtatatatactggtttgaaattgcaggtacctatacgtagctgacatggaggaagagactgaagaagaagatgatctctccactgcagaaaccggtatgaacgcaacaaaggctgaatacgagaggagtgaaaggaagaccctgctggaagcattcatcctattgcttgggaatataccaggggagaagtgaaactccccatcttacaaagttaccgtccttttagcttaagctgcctacttctcatcctttttcagcttaagctactcctaatcatccttttaaacctacggctttaagtttttttttaactcatataatcttctgcagtagacttgacttaatcggattttctgtttcatgaacttgttggtagtgtggaacaaatgggaaaatgaatatttttggaacaaattgattttctgtttcatattaagttaaatcattctgtttccactgaaataaattgttttccaaaaatcactccgtttattatgtttttgtttttaagaaataaaactgagaaaacagaataacgcgaaaatgtcgacatatttggctaagtatagacaagattgggaagctctgtttagttatgcgtcagtctctcatcagtgttcaactgccacggagcgaaccgattcctaattgcaacgtcccgagtccatagaatgtcgacactctttcactctttctccaagttgcctcctttgagtcctttctcatattttatagactcactttctgtttcttgatcccgaggaagaagaagaataaactcttgttcccatgatcttcgtcgatgttagtaccttgagattcgattcgtctctccgattctttataatcggaatttattggtttgtggaatctgattttgggttctcttctattgctcttataggttctttggaaattgtttcctctatactcgtttggatcaggaagagactctctctcaggtatttcatcgaacacttaccctacaatttagtgaaatttctgtgtgatgtagaattctctagattcttctaatcgagttttagctgagaaaattagtgaaatgaaatgagattttccattgattgctagattccaaaactttagcttgttgttctgaattgcacttatttgttgtgttgtatggaccatggaaacatccaaaagagtccattttgcagatcattcccgagacaatggcttcttctaccactaaaatcctctgtgatgctggcgaatcagacctctgtagagacgattctgctgcatttctccttaagtttgtagccattgcctccattctactagctggagctgctggtgtagccatacctctcattggcaggaaccgccggtttcttcaaaccgagggaaatctctttgtagctgctaaagcctttgcagctggtgtcatactcgccaccggctttgtccatatgcttgcaggtggcacagaagctctgagtaatccgtgtttaccggattttccgtggtctaagtttccctttcccgggttctttgcaatggttgctgctttagctactctgcttgttgatttcatggggacacagtactatgagaggaagcaagagaggaatcaggctgctactgaagccgctgctggtagtgaagagattgctgttgttcctgtggttggggaaagagtgaccgataataaagtgtttggtgaagaagacggtggcgggattcacattgtcggcattcgtgcacatgctgctcaccataggcatagtcactctaatagtcatggtacatgtgatggacatgctcatggacattcacacggacatatgcacgggaattcagatgttgaaaatggagctaggcatgttgttgtttctcaggtttaaatctcttatcccttgtcacaaactgtgatacatatatcaaagtagaagctagtgtgtgtgtgttgattacgcctacaaacactttagaacctcaaaagctagcttctttaagtcctttactagtcctcctcctttgcagtgtgggatttatacatcatcttatcgattatctcacccaatttattgattttgcagatattggagctcgggattgtgtcgcactcaatcatcatcggtttatccctgggggtatcacagtctccatgcacgatcaggcctcttattgcagctctgtcatttcaccagttctttgaaggatttgcgctcggaggctgcatctctcaggcacagttcaggaacaaatcagcgaccataatggcttgcttctttgcgctaaccacaccattagggatcgggattggaaccgcagtggcctcatctttcaactcgcatagccctggagctttggtcactgaggggatactggactcgctgtcagctggaatactggtgtacatggctctggtggacctcatcgcagctgattttctgagtaagaggatgagttgtaatttgaggcttcaagttgtgtcttatgtaatgttgttccttggagctggacttatgtctgctctcgccatttgggcttagctcttagattacatattatctactgtagaatcaaataatatactgctctcgcaacttcatatttttgccttgattcatatgaatataatagacaagggagcctattagaaataacgtgtggaaaataattgacattagatttcaaaaaaacaaccaaaatgaagaacaaaacattgaaatttgttattattgattgatcttataaaaggatgagccaaattagggcaacattagcgaagtaacaagagagatgacttaaacatcaagtaatttctcttttgatgaaattcatcaaaaagctttaaaattttacataatggcttcttctttgtgggtttcgatgacgacatcagaagtcggataagccacacaggtcaagacatagccctcactcatctgttcatcgtctaagaagctctggtccgactggtcaatagaaccagagacgactttcccggcgcaacttgagcaagaaccggcacggcatgagtagggcaagtcgagtccggcttcctcagcagcgtcgaggacgtagacatcttcttcgcattcgacctcttgttctccctcaggtgtgatgaacttgaccttgtaggtagccatggccgtgacgcggccgccgcgagcggtggaagatttgaggccgaagagagattgtgtgttggcaaacgggagggatctgaggctgattggtgtctgttgacggcggaggaaagaggtgcttacgattgcgctggagagagcagtggaagccattgttgaaagatgattctacagattttgtgagtgagttggtgtggctttgtgaaaatgtcgtagaaaccgtgagggagagaggattataaagaggtgaatctgccacgtg

SEQ ID NO: 1474 - DNA, 1200 bp, Arabidopsis thaliana landsberg
gccttcaaacttaaactctaaaacccaaaaaactagaatcgaacctgaaccggtacacgaacgccccggtctaataatttatatacaaatttataaaactttatcacattccccaattttcattaattgtataatgattcattatagatggatgtaaaactttagaatattccaaaaaaaaaagtcaatcgggattaattgtataatgattcagatcggataatttaaattttcgggttttcagatttacaggtataagtatttctagattttaggtttggatcggggttatgtcggatatttcgggtttgacaactaagtacccgaagttcccaaaaatcaaagttttattatcaaatatatccaaactacttgaaaatacagaaaatatctaacaaccttgaacattttttttatccaaatgtacccaaaaatagaataaatacataaaattaatttaaatatctgaaaatccaaatattttgacacttagattattacaaatataaatattaatacgaccaaccgattcttcaaccttttttgttaatctcctcatcacctttaatgacaagtcaagaaattgctcaatcttttgccagatgtttccatagttctcacatgtcatcacactgcgtagggtaccaccaaaaatctggtaaaccataatatcataagaggaaccatgagaatggtgacatttgtccatgcatctagcaaattaattccaaatactcatgtgcatcttcatgtgtctcatattcttgcatttctaagacccctagttaagcaatatatgataagttacaattataatttattttactatattaattttgaatccacacaatgtgtgggacaccccctagtaaactatcccagagtgctcaaagcggctcacgctaagttatataatacttatacctattctccagaatcctaaacctaggatctccgagaatctctcgatatggaatcttccttgtttccaagcctattcctttccttattcttcgatataatatctcctatattttctcgatgaatcttgtctttgacacctctccaagttaacttccatccttggctcttcacatcattcgccttagcttgccacgtttgctctcgcatccatgtctgcaaatcaagcgtctgatgaaacatgatgcagcgtcgtgaaatcgggcaacgttttgattg

SEQ ID NO: 1475 - DNA, 1201 bp, Arabidopsis thaliana landsberg
aaaccattcttaagccaatggcgaggatgcgactccagcatagccatttatcgagcgatgtcagaccttcgttcatcataggaccttagcatctcgcggtattccttatgcctagactcgacgcatgacaagaaaccctcggcttcacgtctttcctccgagctcgcctgacaagaactcgaagggtattaaagaacgacatccctcgttcaattacctcagcgttcgagaaagtcggaatagaaggaagaaagcgccgatgaaacaattgtcgatcaacagagaactatttataggggcaaatatagaaatcgaattgggaatttgcctaaatgcgatctggaaattctcattttccttttccaagacattaatgtttccattttctccaaaactgggaaaatgggaatttacttaattacgggttgacttcctccaatttctttttccaaaaaatgacaaagctcataaatggaaaaaagaactattctgcttcggaaacaggcaagatagaaaatcatcgaaaatagaagttaaaatcaaaaaccgccccgaaagtgggtccacggttaaataagagctttgagatcgccccgaaaattgggtccacgatcaatatttcaaaatagtccgccgaatcacttccgataacgaggtcgacatttgagccgtgctagtccgccactggagcaacttgggaggtttgccttgaaaaaccgagctgatctggggacatgttcagatcatcgtccccgagctcgataacgttcaaggcattaacttcgtcggccgcccttttggttaactccttaaggccgctgtgttcaaatgctgcaatcttcgcacctctctgcataaggatgcccactatctcctcagcgcctcttgcttgattctcagcatccacctttggcccgacgaggtcctcttgctccttgagttaagccttcgctctatcaagacgagcttgggctttctttgtagtacgggcgacattagcagcttggtcactccgcaacctgttgcactctctctccccgtgctcttttacagcaaccaatgcgacctgaagatcgctgatctctttctgaagatcagcttctcgactattgagcctcttgacctcgttattcaacgagctcatctccgccttatgaatctcggcagcatctctcaatgcagccatctccttcatgtcgtt

SEQ ID NO: 1476 - DNA, 434 bp, Arabidopsis thaliana landsberg
ttttttttaatgtgtgtatcaagtccattcaattggttgatcttctcagctctttgacctcctgttaaatggctacgttttatgtctgatttgaaccggcatgacaagcaacgtttcatcctctattcatctttggatttctatgacctgttctcactttatgttcctgtcttagatcagcacaatttacaaacacatcatagttcacatacaccaatggaagttcgcagactaataaatctcttgaaatccaaaggtttggtaaatagatcacctagttgatgttcaatactcacatgatcaataactattagtttcgccttaacaagttcacgaataaaatgatgttattctgggaatggattggttggatcattacagagtacatcttgactgccaccgtgggagagtttcttttgagcggctagagggga

SEQ ID NO: 1477 - DNA, 618 bp, Arabidopsis thaliana landsberg
tagcaaactcacagaatatggaatacagtcttgttgtttatgttttgccgccacagcctgcctactagagctagctaaatcagagtggcatgcttatgctggtcttagcagaataacatatttcgtcatgagaatcatattcagaataatcaaactgaaacaaataatcaattttcagaatttacaactaattcttttattctttttatcatactcctaaaatattatttaaatatataataactaataagggagttagaagtcaccaggaaaagcttttaaaactgaacgagtgtttacaacaattctactcacgctccaaatcaccatttaattcgcctaaattcaatcgttgatcagaaaagtaagtattatataccatctggaagctaatttcaatttcaatcttaatcaagtattagagttgacagaactggtttacaaccagctgaaccggtcccaattactaaccgcttaaaatcaaaactcaaccaattcaaaattagatttcaaaagattgttttataagccgaagaaccggcgtaaataaatcctgatttgactatgaatcgagaaaaacaaaatatttaccgatcaaatttcgatcaactccgactt

SEQ ID NO: 1478 - DNA, 2755 bp, Arabidopsis thaliana landsberg
tgacttcctgttcctttattccgttgcaactaggcagtaaagggcaatggagctaaggaagaagaagggtttacatttattaacttgaatcatagtcaagtctcttttttaagggatccgtatattgtagcttctcacgcaaaacaagtgttttacatgcgtgaagatgactcgtcaacttggcatgttgcaatgagaggtccgtcgagaagattcagagaggaagagagtgacgatgttactcttgacattgggccattgcccacaacagttgacatcgatgttgacttggaagtagctgagaatgagagaagtgattgtgaagggatttacattcgagtgatgattttttgcctgtctttgaagtgagagaagtgactttgttttaactttgagtgatgattgtgtgtctgtttgagtgttgattgtctgtcggtttgtgtgttcattatctgtctgttattgtgtttcacttattaatggaattaatgctctttttttcttttttctcagtgatttacagtgggacaacagaagaaaaagcgtggaagacaatctaaaaaagcttctcctaagaaatgcaatgacgatgaggtgaagtatgtgggtacaatagagccaacagatgtagaacaaactaatcaagttccagcagaaaacattgaggaagctgtcaacaatgtacagacagaaaaagaagctgaagttcaagcaacagtataacaaggagataaagaccctgatgtggaagaacctgaaggcgagcttgaattatctggagatgaagatgcagttcaacctaagaccaagaggcaacgtggaccaactaggatgaaagatattgctaaggatccaaatgcaagagtcagcgtggagtacaccatgatgggagagcctatcggtaaaggctcagttaagttagcatcatatgcaggcgcattggtccgagaacacgtccctatcacaattgatcgctggacaaaaataggtgaagatatcaggacacttctctggacacttcactctttttttgtaatatttgactatatgtccttatcactatatcaatctctttttttctgtaattgattgaaggcaaggtttgaactagatgaggagtatcaaaaggttccagtgcttaagcagatgggatgtttgtggaggtcctggaaatctaggcaagtaatcaagtttagagaagcaaagacaatccagcagaggatgaatctgcgacctaaaaatgtttctccatttgagtggagaaaattcgtgaaagagcaaaatgagccctgaatgtaaggtatgtttttagaaaaaaaactaagtttatttattatatagaaagttactaattaacaatcatttttaggttataagcgataactacaaggaaagaaggcgcaaccgaattcttcatacttgtagtcgcaaagggatggttagactagtagaagattgttatgttttttattgcttagagtttttattaaacttactactaatagtggcatgttgtgttgttcagaaaactggtagtgcggaccagctgaagtgacgaggctaaaggtctgggttaagtcacagaccaagaaagatggaacaccagtgaatacgaatgcggctgaaaaattgtgagtatgtgatggtttggaagttgtgacagtttgtgctggtttggaaattgtgatggcttgataaaatttggtttgtgatggttttgaaattgtgatggcttgaaaaattttggtttgtgatggttttgaaattgtgatggtttgtgatgtttgcaaaaaaggcagctgagattgttagcagtggtcctcaatcaaatgggaagaatgaagcacaagattcacttagccaactgttagggcctgacaatcctgggagactgagggcgatgggaagaaatatgaacaaaaccaaactagcttgtttccaagtaaaaaacaaatgtatggctgaaatgcaatagaagcaggaccctctccagtagaaggtcactgagttacaagaagtgattgacaaaataaagaaccaggtaaacacttatctatttatacataaagctgattagtcggttagtacatatatttgattttgtttttttttttggtatagagacaatcacttgaagttggtgaaaccttaactgcaagagtaagtcacttctatttgatacttttaatctcttgatacataattaggtgataataccctattgatttcttatagagagtgtgaacaaaagatcacaacctaattagtgtatcttgattccgcagttaacatggaaattatggagaaagttgttggtcaaatgatagcttggcctgttgctatgtgtgttaacctagaggaagagctcaatccagaagacattgcaccactggtaaaatgttatatatttagagtcataccaatatatttgtaaatgttaagttcacatactcatattattggttcaatgtgtttgacagggaccaagacccacctctggaaacaagtgcgaactactggatttgtcttcgaatgacgttgttgttgcagaaggacgttggtagacaaaagaccaaaacgcattagttaatgggcttcctgtcggacctgctgcaatgaaagtatttatggatgtaatacttcaccctgagacgtttatatggaggccaacgatgcaggtgacataccttgaggactgtttacagtcttttgtagcatggcctgtgtaatacccctgaccaggactaggactaag

SEQ ID NO: 1479 - DNA, 2879 bp, Arabidopsis thaliana landsberg
attggctttcttgttctagtgaaatcgaatctgtacttgttcccggttctgtgtaattatctaattatatctaaaacaagcacactctccagtgaaaatacagagtgtgcttctagcgggttgatgtcagcactctccccactttcctgtgctaggtactcctctatctcttctcctacttttccttcgattatttctttagaatcttcgaagtgtgcttcactggtaaacgagcattgaatttctcgaaagcttgtttcttctattgatcttgcaggaaaaggagagagtatcgatcgacacttgatgctacacagagccgatctgtttacatatccatccaagtcctgaactccacaaattcaagctatagactctaaacaagcgcttagtaggaggcaacccactggtatgattttttttttcttttttgaaaattcattttcccgctcgcttcgcatttgaatgcaactggggacagtgacgtttaagtctgggtgaggtggttactaattatgcttttcgttttgattcttattatttactaattactaccttttttgtttagtttagttaggaatcatgatctatatttctttagattattgctgcaggttggactcaatccgactattggaaaattcagatggcaaaccaacagatttgaggatatccttgttccaacacaatccattaagaacgaagttaatatcactgctcttccttttatatcatataaacggctagtgttcatataacttgattctttgttcatacctgatattgagaccaatgagaaaaagaaaagaattcctcttttcttattataaaaaataagagattgatatgattttcggtagtgtataggggtaggaatgtttcccatggcttcattattatatattattaggaatgatcaattacaaaggttggaaatatgctgaaggtgtttatccagtatgcgagtacatctttgtttactctttaaaaagaataagtttgggggagagaaagaataccaaaaagcaaaaagaaaaataaagaatggtcaatttatcatggtatagtacaggaatgggtctagaaggatcttcaatgttagcttgtttaatgagacccaacaatgaaagcctggtagatgtagttgtggaacttaggtatgaaatctaaaatggtgtgtaagcttgcagagaagtacatgttggtgaggatttgttagaactgctagacatatggatttggttagaatgatcaaggcagtagactagaaaatattgggaattcctttgttttcaaacctcttccacgggtccggctttttgtgttttgcttgagggcaagcaaaagctaagtctgcgagagttgatatatccctagttttactgtttttaactatgttttaggtataggtcttagagtccttttgttatttctagagtcttttctagtctttttcaggtctttacatgtttgggattcatttggagataatgaagcattctagagaaaaatagagaatttatgcagctgaagaaatctggagacgaaaatgcacgtaggtgtcgaacgacaccacccttggtgtcgagcgacaccaatacctgacggcattttcgagacgcaacttattgatgttttgaagatttctaaattcggcccagaactttctcctatgtttaatgaaggcccatcacgtgttttagacatataattaggtttttaagatcattgtttagacctaagcttggagaggctattctctatctcttttgtactttgggagcaaaaccatgtggaaacttcctttggatctttcttactctattctcttcttggtttattcattgatttctattctaatcatgttggttacttcattcatcatgcttgagtaatctccttgttaggtttagggtttcttattagggatttagatgatttagtagatcgcccccttgctatgttatctgttaggattcttcatctttaattgatcttaatgcttgatctaaattgatcacctagaacttgaatccagacaatagatatacccaccataggtatctgtagtcggatctattatttgatgagtctggtttataggtgtgtaataagaattggcctttctactaaggtgaacaattaaactcgtttagaatgcatgtttaggttaaagatctctcggcttctccggttattcttagctataggcatagggagtttcgcggaacaccaccggttattccataattagatctactaaccaatagtttcataagaataccctaagcctgacgtttttactttcttatcttaccacctcaaatcttctattgcttcctttagtttctttttattttcattattatcttacttagcttaattcaaaaccttggtctattgtgtgatccgagagctttgtggaattcgacccttaagtgctacaatcgatctcttatttgagagagtggtcttatggcaatttgacctatatcaaatttggcgccgttgccgaagttctctacgattcaccattaaattttgtctaagcttctatttttctttttctatttatttacttagtctttctcttttctttttcttgtgtgtttcaggtgtttgtctaatcacagaaccagaaactagagagaaacatgaacgagagtaagaaaaatattgtctcagaactgatgatagcactgaattgtcaacatgctaaggaaagtcgagttatagtactagtgtcgattgacaccaccactcgcttcgatcgacacacatcactggttgaagcagagtcgtctccgatagcaacttttcaagttgggatcactcctataagtccattcactattgtcacgtcacactgcacttgtcat

SEQ ID NO: 1480 - DNA, 850 bp, Arabidopsis thaliana landsberg
  unsure (1)..(850): unsure at all n locations
tcttcatcgtctttgtaaccaattttttccaagatctcaaccatagacgtcaggtcttttcccgagcaagcctcagcaaaaggagacggaggtgacgcaaaagtaccactttgaggcagacccattagaacatgagacagaacctctgtgtctttctggagagatatcagtgcagtgaccaaagattttatgtttggtcgctcacgagcttcatactgaagacaacaagatgtcaggcgtactaactccgtaccatcactgtctgaaaattgtccctccaagcaggaatcggttagagtctgaagatttctgtctcgaatcaaatcaagggcctaaaacacacagcaaaaggctgagataattaataaagagaattcaagaaacgattaaagtagctaccatgggcacttacatggctaggaggaatatgctttccggtgagaagatcaagcagaagagtgccaaaactgtaaatcacactctctgctgtgattctccctgtatcaacacacacttaagtctcaagttgtagaaattgttggaaataatatgacctacgaggagggtnnnnnnnnnnnnnnnnnnnncgtagatactcaggtggggtaaaagcaagatttgtgctataacttttcccatcccgactattcttcattaacccaaatgttgaaagtcttggattacattccttataaagattcataaacgcattagtgggggaatatagcataaaacaaaacatggtttcccggacaagagttgcgtttaagtaattacctcgtcaaataaaactctgtaagcattgagatcatgatatagcgtgtgtccattgctactacagnattcaaga

SEQ ID NO: 1481 - DNA, 2145 bp, Arabidopsis thaliana landsberg
  unsure (1)..(2145): unsure at all n locations
tatggaagtaacggcaatcaaggaggaagagtacataaagatgtacaaggactctgacattgaatggttggaacgtcaggattatgcatccaatatgtcaatcaaaatctctgagatcagccacaaaagtgttagtagaaatggcagagcacctaacggaattggagaagatgactaaacccgttcttgatgctctgagaagctaccaggatttgcctccggataaagctttggctacactagaattcgaagacaagaaaaggcaatacgaagcagcggagaagcgtctagaagaagtattacaatcagctcttgagtgattgttataaaacctaaaaatattatgttttgagtatactatgagcaaatgcattattctgtgtattgtggttttgctaccaaaatcacacataagaaatccaatttttttctttctttctatgaaatcgcatgatctcttttccaaattcaactaatttttcggcttaggagttttttttcattcaacacgaaagaagcatccacaaagatggatttacagtttagtagaatgagaatccatccacaaagatgatcccacccaaccaggagatacaagagctgacggtggttaccaaacaagagatctccgttctaaatactgttctaaatacgtcctcatcgtcatctcagttggtcccaaggtaaaaagtactattaacgtaatgactacagttgcaaaatacagcttacttaatttctctcaaaatctggctaagaatggtctaatgggagtccagaatgttgctatggatttactagaattatctcatctgtaccatgttagttgttgctgatttacaggaagcttcaccattgttgcaacagagtacataataacaatcacagcagcaacagatggtcccattgcaacaacaacaattgttcagttattttttctctaatttagtaggtaatttttagtgtatcccaaatattcatatccatatccattattcttgtttgtcccttttatccgaaatggaccgacctaaacctaaacatcgataaaaagaagagtcaaattgtttggtcgaaatgaatctggttcattcagctttcgaatggataaaagcaaaacgacacgtagttcaaacgtatttttctaaatttcattttttgtttgaaaagcaagttactgagggaaaacggagccacgtcgaacaatatcttgacacctcacaataaacgacacgacgtgtacactttcgtcaccatgtagattcctctttttgttttccccctcaaattctcactttactcaaaagattcctcggatcatcagaaaatggctatggctacgcgagcgattcgataccagttaccgtcaccgagatttagagctcctagatgcgaatcatcggaaccgattaagcagattcagatccagcaacgaccaagaggtggcgatttagccgagaacgggaagatnnnnnnnnnnnnnnnnnnnnnnnnnnnnngatcttatggatctgatatggtcatcgctaaaaaggacggcggagatggtggaggaggaggatctgatgttgagttagcgtctccgttttttgagacgcttacggattacatagagagttcgaagaagagtcaggatttcgaaaccatctccggtagactcgccatggtaattagacactaaaccttaaattagaaactcgatctcggttttagtcggtttaattcgtaaatttactgttttcagattgtatttgcggtgacggtgacggaggagattgttacggggaactcgttgtttaagaaactagatgtggaaggattgagtgaagctattggagctggtctcgccgcgatgggatgcgcggcgatgtttgcttggttaacgatttctcggaacagagtcggacggatctttacagtgagttgcaactcgttcattgactcgttggttgatcagatcgttgatggactgttctacgataccaagcctagtgattggtctgatgatctttaagttcataaatgataaataccactctcaaatgtattactattgtacactttcatctataatagaatagtatagttttgctcttcttcatggtgcttgaagatgataatgaaagtcatgtacctgaatcttta

SEQ ID NO: 1482 - DNA, 368 bp, Arabidopsis thaliana landsberg
cgtctgtatagaccagtctgcctcggaaccgatttcccgtcaaggtacaatgaaccaggtgacgtataacctattcacggattgccctggtgatcagctttcgaatgaatctaaccacctctcaatcagatacatctgcttagagttaaactataatccgtcggaatagtccagctcgcctaggggccgatttcccaacaaatcacagagaatctcatgaggagtaataaatcaacggatcgcccacagagtcatcttttcggaaaattcgacctcgccttaatctaagatatatgatgagatatataaacgtttatctcacgcaagtgcagtttgtcacaagatccaactctataaaaccagtcagc

SEQ ID NO: 1483 - DNA, 551 bp, Arabidopsis thaliana landsberg
tgaatagcttcaactagaggcatctcaacaatcagcttatcaatcatagccttgctgacatggttgcagctggaatttgcacattgtctgaacgagctcggtgtcgatcgacaggagctgggtgtcaatcaacaccatcgggaatagtttcctcctcctctgcaaaattatcgattccactcgacaaatgaaaacagagtcgtcaagagtaattggtgtcgatcgacaccctggtgtattgatcaacactgattcgttttctgcaattggaaatgatgaaggcagagctgatcgtttgcgctgaagtattgggttgacctgctttccgctgcgtagtgtgactacattgatagaagctgaagtaggtgagagattggagaattgggagcgtagagtgtcaatcttgctattgagatctatggagagagaatcatatttggtatcaagctttgtttggcctgcaagaatttgcgcaacgatagactacattctggtctctgatgagggtagaggggggggggcttggataggacgaaaattgttgaacagga

SEQ ID NO: 1484 - DNA, 637 bp, Arabidopsis thaliana landsberg
atttccttaataaagctagttggtaatcttttgaagtttcaacccaaatagttttggttgtttgaactgttttaatatgacatataccacaacaggaaaataaaaaacgcaaccaaagtcattgcaatttaatgaacggatgggattaattagaaaagaaaaattctaattttgtaattattaactcttgtggaaatgctaaaataactctcaaaaaagattgttcttcatttttgttgctcttcgatgccaccaaagcgtctcatatcaattggtctcattggatcgaacctgaatactgcagaaatttcaatttgagaaaacacattttatcttcataaagatttttgatgtaattttggtgaaatttgatgaactcgcaattagacgtaaattaggaaatttttgatgtaaaaaatcttaattgatttgattgatgcacagcttcatcgaggctagttgaaccgaagtctagactcttaaagacgttaattgcgagtcgagagaatgaatatgcataaaattaatatgaagtcgataaatagataagtaattatatatctatatatatatatatatatatatatatatatctaataatatatatttttaaaatgatttgttttaatgtaaattt

SEQ ID NO: 1485 - DNA, 3647 bp, Arabidopsis thaliana landsberg
aaataaggcttgactctttgtccatttactgaaaatttattgccatttttcccaataagaccgatagttctatatggttgaactgaacgaatgtagggacctgaccaacgagaagacaacttgccatgaaatatatttagtcaagaattataaagaagtacctggtcattaggtcgagggatcgagagatgatcttcctgtcattataggccttggtgcatctgcaacaaggtagttaactacgtcagcataccatggataatcgttttcaactactgtggcagcgcagttctttgtgaaaatccagtcgttcgtctgattagtcaggtgtcgatcgaccctttgaatggtatcggtcgacaccctcgagcatggtcgaatctcattctcaactgtaacggaggtgtcgattgacactttgaatgttttttatctatcgacaatgcagcttgattcatcaactcaacaattttgtagtcgtctttcttagttgtatcaatcatgtatatattttcttcaagcaagaagtcattgatgggaacatcatcttcaatcctaattcgtgacaaatgatctgcaacaccattctcaactcttttcttatctcgcacctcgatgccaaattcctgaagaagctaaatccatcttagtagccttggctgagcatccttcttttgcatcaaataattcatggctacatgatttgtatgcaaaatcaccttagatccaacaagataagatctgaatttttcaaaagcgataacaacagctaacagctccttctctgttgttgcataatttctctgcgcatcatcaagtgtcttactagcaagatagatagcatgaagtttcttatcctttgtctgccctagaactgtcgcaactgcaaagtcactagcatcacacattactttaaaaggtattgttgaactattggtgcgcttatcaaggcttgttatatctgacggtatgcatcatgacactctactgtaaactcaaacttgacatccttgtagagcaaagctgtcaacggtctggcgatttttctgaaatccttgataaatctcctttagaaaccagcatgaccaaggaaatttctcatggctttgacgttatcaggtggctgaaggcttgtcataaccttaatcttagctctgtcaacctctatgccatgtgttgaaatcctgtgaccaagaactattccatcttgcaccatgaagtgacatttctcccaattcaaaactagatgtttctcttcacatcttgccaacactttgtagagattctcttaacaaccctcaaacaatgatccataaactgaaaaattgtccataaagaccaccatgaagtcctcaataatgtctgtgaagatagacatcatacctctctgaaatgtcgcaggagcattacaaagaccgaaaggcattctctgtaagcaaatgtaccataggggcaggtgaaagtcgttttctcctggtcatttggatgattcgggatctgaaagaatcttgagtatccatcaaggaagcaatagtacttatgatttgctaacctctccaacatctgatcgataaatggttttgggaaatggtctttcctggtagcagcattcagctttctgtaatagatgcacatccgatgtcctgtgattgtccgagtaagaatcaactcctctttctcattcttgactactgtaacacctcccttcttaggaaccacatgaactggactaacccaactgctatctgaaatcggatagataatccctgcttccaacagtttcataatctctttcttaaccacttctttcatattcggattcagccttctctgatgttcaactgaagacttagactcatcctcaaggtggatcgtatgcatgcatacatctggagatatacctgcaatatcatcaagagaatagccaagagctttgcgatgatttcgcagcttgcttagcaataaggtgagctctgcgggattaagagaagcattcacaataacaggataagtagaattttcaccaagaaaagcgtaccttagccctgctggaagtggtttcaattcgattttaggagccttttgctggatcccaatctgaattagtagtcggcgttggagtcacagatggaaaagcttcttcaactgaagttgcatcacatgttcggtctcatctagcagcttagtatatgtagaagtttcaatgtccaaatctgcactatcctctatggaagagaccaaaactcgttctagtgggtcttctaattccatctctgaaatactatctgaagctgatgaagtgaaagaatttatcaagaaggttttcccttctataatcggtttcttgaccaaaatgttcatatcgaattgcatagtaagaacgccaacattcagccctatcctcccttgtcgaacatctatgattgctccagcagtgtgcaagaaggatctcccaaagattaatggatccttaggttccttctcataaggcaagactacgaagtctataggaatcatgctctttccaatcatcccgggaacatcaataagaattccatctggaatccgggtagaacgatctaccaacacaagagtgataaaggtagcaactgaacgaggcatcagattcacactagaaccgagatcacataaagttcttggaaaggatcgtgattgatggtgacactaagtacaaaagttccaggatcacgtagctttcttgggattcgttcctgaatgatgtcgctgccctgctctgaaatcatcatagcactgcattctttcgtcaaattcttagtgaccattggcttaacataccttctgattgtgggagatagatgaatagcttcaactagagccatctcaacaatcagtttatcaatcataactttgcatctgacatcatctaaggcttgtcttgacttattaggactcttggagaagggaattcgtcgatttgctgacttggttgcagctggaatttgcacattgtctgatcgaactaggtgttgatcgacagaagctgggtgtcgatcgacaccatcaagaatagtttcctcctcctccttaaaattgtcgattccactcgacaaaggaaaatacagagtcgtcaagagtaattggtgtcgatcgacaccctggtgtatcgatcaacactgtttcattttctgcaattggagaagatgaatgctgagccgattgttcacgctgaagtattgggttgagctgctttccgctgcgtagtgtaactgcattgatagaagctgatgtaggtgagagattagagaattgagagcgtagattgtcaaacttgctaatgagatttgtggagagagaatcatatttggtatggagatctgtggagagaaaatcatatttggtatggagatctgtggagagagaacatggactccattctggtttctgatgagggtggagggtgggctaggataggagcagaaattgccgaaacatgagtctctttgctcttggtagctttctcggctcaaattcttcgttctttgtcaattcctgcgttgaatgaccagttaaagcattggtgattaggattaatgcttcactagtggttcttgtcatgaagttacaggagcttgctgcatcatgttgaatctggtatggcttgtcta

SEQ ID NO: 1486 - DNA, 618 bp, Arabidopsis thaliana landsberg
ttaattttttataaataaaactattattataatgaacatgattttaatgtgtatttgtaaaaaatttataaataaattatgattttaatctctcttcaagtacttatcaaaaacaaaaataatcaaactattggccagcccagatggtcacatactacctcacagatcttattcgctttgcggtttgattccatttgaccccattttatttgaaaacattaattaaaggtcacaaaacggtcgctctttgcaacttattgcgaccaaattaaaatgagaagcaaactattggctgcaagtgtcacaaaacggtcgctcattgcaacttattttcgaccatagtgatataaagtcgcactatgcaacttggttacttacgtattaacaactcccaattggggaatttcaatatttttaagtgtttgtctatatatatggttttctgaaagtggagtaactttaatgtggatgaaattagagcgataaacagaaccaagctcttcaattctgaattttacaaaggtaactgtctaaactttctaattgatatgaagagtacatgtctttgattacatgattgaagtttaaaaagtccaaagtaaattatgagcaatgatt

SEQ ID NO: 1487 - DNA, 5424 bp, Arabidopsis thaliana landsberg
aatagctgctcaagtttgtctctcttcatggcgttctttgggatttgggtttattttttcaataaaacaaatacatggttttcttttaaatttctacagttattttttacgagttttcaatgttgcttaagacaagttacttttatgaatttaataagagtgtttcttgaataaggtgaatgtgaatgtgttaaggatatatgataagtaaggaatagattaatataggaaaagtggcacgccttctcagtagtttgggagaggggtgttacatcgagtaaaggatcgagcatcctcttgaagtgcgaaaatttgatccaacggtggagagcttctcattcttgtttactcgatcaaacggaccaaaataaatttcagaaagtcactcgatcaaaccgcgatgatgctcctctcatttggtcatccaaatcaatggctcaaaattctcctcctcattctacttgatcaacggttgagatttttcttgacttggtttaaatttactcgaccgttgactcccttagggtcactaaaacaaacctgaaacacttaaacaaaaacatcaaaaataacaagaaaaatagaaagttatatacatggatagacatgggacttcctcccaagtgagcttgttttaagtcactaagcttgactcttatagagcttagtcagaaaagaggttgaagagaggaacagagaagtcctcatcttcaatggttgaattttcagtgcttgaatcatactatgcatcctctcttgagatatggtaggatgagtactcattcgatttttcttaaaagtaggcttctttctgatcagcagagtagtcttcttcttctgaaccaggctcctttgaccaatcctcaatttcaaagctgggtagtccttgaccatttcttgaagttccagaatggtgctatttaactcttccatcttatgagttaactttccaattgtatcctcctgagctttatatccaatccaaagctctaggagttctttagcaacataatcaagaatcaagtgttcttcttcagcagaggagttggtggtcagtttaggcacttctggagaataagtcggaataggggtttcctcctcactcaacaatttgctctctaagcttcctttctctaagtgaactcctttctgatctgctggcgcaaatcattccgctgtgaaatctttgtccaccttgatagctagtgcagtttccatcttctttgggtcaataccatttgaaaatttattaactcttttttcaaacatccatagttgatctttcagcttcatcaaccttgaagataatccctctatgactctgctttgccatttaattttttttctcatctcatacaagtcatcttttgtaggatctttagtctgagctaccccttctattgctctcttcttgtggtcaaaggttctcttcagcttgctgagttgagaagtatatttgacttttggtgggattccagcttctgtttcttcatcaacatccatgtcctgaatcccaaagtctgacctcctgttgttgatttttctgaagcttttttgatgtcaaacttcatcttgatgcctttttcaaggttcagattaatttttccattcctgacatctatgattgctccagctgaagctaaaaatagtctgcctaggatcaggggatccttgccttcttcatctacgtccaataccacaaaatctgtaggtatttcaacatttccaatcttgacaggcagattttctattagaccatgaggatgtgcaacagaaccatcatctaagagtaaagctaagttgcaaaacttgaattccatgatccttagcctttgagctatagagagaggcataaggataacagatgctcccaaatcacaaaggcacctattgaatgtcaatggtcctaaagagcatggcagagtgaatgaaccgggatcatcaagcttttcttggatgactttcttcttgtatgtttcttgagtgctggcactgctaatcatctcttgattctgctctttcttgagtttttcaattttgaatctttttccagaatgttgagtattcagcaaaggtgtgtgctctatagtccagataaattgctgagtggcaggtgtagcaatttgagttgaatcccccccttcttgaatcatattgtccttagtattgagagtctgatgacttggtggagactcatcttcttggtggatggtgatagcattagcagtagcatagtccttaggattctggactgctttccctggaagttgttgaggatgcttcggagcagaggttgatgcaaattgactctccacatacttgatttttgagttcaaagcttcaaacttgacattcagatcgttgtatgaacaatcgatcttgttgtgtaattcagctatcttcttgtcaaaagccatagcgccagtagcttacccttggatggtctgttgaatgagttgcttaatttcaggatcttgagctcctagggcttgttgtggttgttgagtgaaccctggtggtggattctgctattggtagcctccattgaactgttgtttagggacataacctttgttgtactgaacaaaaggcttggacggattctgttgtggtggatacacttgatcttgggggttagctacattattgcttctataggagaggtttgggttgggcttgtagttgttgaagcccttgttgaaccctccttggttctgaatgtagcacagctcttcagtttgatcattcccccttcttgcatttggaagtgctcttcatcagtgatgaagtgtatctgcttctgctgagccagcaacagcttgtctaacttttcattcacagccttgatatccttgctctgtttatcctcattacctccagttcctctcattgagcgatcatagtcttcattgtagcacccatcagattgtgctagatttttgaccaactcccagccttctgctacatctttgttcaggaaatttccattggaggcggtatcaagcagcattctgatctttggtaaagctcctctgtagagtgtgctcaataatgaagcctttttgaaaccgtgatgggggcactgagtggtgtagcttttaaacctctcccaagcttcatagaaagtttcattgtttttctgattgaaaccggagatcctgttcctgaatctagctgtgcgagcgttagagaagaacttggcaagaaaagctttcttacaatcgtcccatgaggtgatggagtctggggtagagtcttctcccagtggtgtgccttgtctcccaaagagaagggaaatagccttgacaccattgatcttggtaaggccacaaagcctatcaaaactgtcaagatggtccaggggatcttccataggtaaaccatgaaacttgtttccttggatcatggagatgagaccactcttgatctcaaagttgttgttctgaactggtggaggcactatcccttatctttggtgatgattccttggggcatcaccagcaccaatgtttcttggttgatcaacattaggtgggtcttgaacataaactggtctgttctgttgatccatagcagctggtctgttctgatcacaggctgcctttgctttggtttctgataactcacgagctattttgtcaattctgtctctgaatggtaataggtgtgcaaaaccttcggatcgagtttgcatgcacaaagattagtacctataccacaaaaacaagcagacgaaaatatgagttagtaacttgataaatgtaaaagaacttgatcttaaaagtttttgatatcttgaatgtaacaatgcaacaatgaattggcaacggcgccaaattgatatacatgtttttatgcctacttatactaaatgtgtgtgattcagttcaattcccctaaaacacaaacatgtcgatgcagttatagggggtgtcaatccagtccattgtattgttagcaatcaagatgtgtatagagacgactaagtcaagtcagattataatgatggttggtttctagtaacaatcctaggtcaggattcgaacaagtaaaaatgagaacttaagagccctactcgatcattgggtcgagtagaaccaacatgtgacaaaattaagaactaaaatgcaatcaacaggggatacaaataggggatacaaataacaggtaaataaaagtgcaatcaacagggaatacaaataaatctaatagaagttctaaggatggattcattgataagggcaactctaggattcatcaaatggctaataggcgaaaggtagatacccatgacgatagattcaaaaaccgggtcaatccactctcgtgacagagacccccataactctaccacttcctaatctcaactctcgttgatgaaacatagcagagagggtttaagaaacaatctaccaaagccaataggcagaaaagccaatcccttggtcgagtctacaaagctctggaattcgtagatcacacatccatttgaacgtcttttggacgctggacgtgtatgatcgtcttttggactgctgcttcatctgaagctgccttgatcgagtaagagggtcgagtacactgcagcctcctctatagctgccaggatcgagtaaagaggtcgagtgaattgatgtctcttatgtagttgcctggatcgagtggatggatcgagtagagacctttttagctccttctgcacctgaaaacacaccaaaacatgcaatgcgtatgcaagatgatcatagatgcctaagtatgtaaaataagctaaaatggtgcaaaaagatatgatacaaaaaatgcacagctaaatgatgataaaaaaatgcctaaaatgagtaaaatacagtgttattagggagaggagtacttttcttttttacattggtcgaagtatcaggtatgaacaaggagtcaagtcctacgaacactaattgttttgaagaggtaaaaggaagagcagtgagattggctctagccttttggattatgttggaaaactggatgtccttaattttatcagtttgccttctggatttttcattagtcggactaaatcgaatttgtagtacttaatcaatccagacaataaactcgaaagaaagatcataatttcagacaaaagttttgactcaataaaacaactctctaataaaaacaacacaaccaactcttaagaaaagaaaaaatgaagttagtaactgactcaccagacttaaataacactgtccccggagctatcaagctagagaaatcaaaagaaaaatagtcaaaagtgaaaagttagagaaacgtaatttgccaccttgtttgtgaagcggtgtcgatcgacactctagtcgtttctattgtgctttgctaattcagctcggcattgcagagcttaggttagtattttcacatggatcctctagctgaact

SEQ ID NO: 1488 - DNA, 878 bp, Arabidopsis thaliana landsberg
cttagaaactgaaaatgagtgatggaaatcaaactgaaaatcaaactcggctaactcctttgatgggtttccatgccaagcttgagcatggctttgcgactcttcttctcacttctgctttgttttgacttacctcctgcctctccatctagtccttttttccaatcaccaatcatcagtgctttacgatttaataccactccatctccttttgctttgatgggagaatcagcaggtattttgatctcaaacagctcatgtaagagaatgggaaaaacaatagtgttattaactttctctttagactgtgtatttaaacaggtcacaccatttgtacaaactcaaataagggaaaaattaaatctacatgagaataattgttgcaagaactttacactattgacctctctgtttttgtttgctgtctttgcttgaatatttgaattaaactccattaaaaataatctaagaagtagagaagaagctttaaagaaacaccatggggggggtcatttggtcactcttttgttgagtaatcacaagattttcatctaaaataagaatgatccattaccccctcttacaacataatacaaaagggacaaaagttgttggataagcttaaaggaagagagaacatctttagcgtagaagaagctttttgctggtttgttaaacatcctgaaaaaattgtttgcatatgtcattggcttcacatctgggtgaggctgtataatcaagaatatcagaaaattataagacttttcaaatgaatccaaaacgaaccgggaatcaattttcaaaggagaaaccggagggggataaatattaccctgaaccacttgggttcaattgccctttgaaaaagaaacaaaact

SEQ ID NO: 1489 - DNA, 576 bp, Arabidopsis thaliana landsberg
  unsure (1)..(576): unsure at all n locations
caatttggatgcatgtgacataatcgtttaagcgattatctatttaagtaagggtatgtgattaatgaaatctgcccttgcgtcttcgttaagaaatccccttcgggatttctgagcattgctgtttatgttgatgacctaaatataattggaactccaaaggagattgatggtgcacgaactcatatgaaagaagagttcgaaaacgaaaaatcttgaaaagacaaaattttgtctcggactccaaattgagcattttgaatatggtatatttgtacattgataacactgtattttactcattttaggtgtatgtttatcatcatttagctgtgcatttgctcattgtatcatatcattttacaccattttagattattttgcatacttaggcatctaggatcatcttgcatacgcattgcatgtttggtgtgttttcaggtgcagaaggagctaaaaaggactctactcgatccattcactcgannnnnnnnnnnnnnnnnnnggctgcagtttactcgaccctctactcgatcaagcagcctcagagaacagtagattgattactcgccctct

SEQ ID NO: 1490 - DNA, 557 bp, Arabidopsis thaliana landsberg
  unsure (1)..(557): unsure at all n locations
aaccacctaaacaaaaaaaaatcgaaaatttcataaaaatataatatttaaaatataccacctaaacgtttgggtgttgaagtctctctttttttttttttctttttgggaactgatggttaaatggtaggtctatgccaattccaacacatgccaaattaattcgaaaatcaaacaaaaaccaaaccgatctaagttttggtttagagttcaaacaagaatattacgacaacggaatactgtatgtttgatatatttcacaaagagatacagagcttgtttatattgtacaagtagtaggcgtgagcctcaagattatgcaataagtataatttcctaaactagtgaattggaatattgaggaatgaatgagcatctaatcatatctctctagctcgacagaataaaccaaatacgtttatctaaataagtcatgtatatcttgtaataatgtagtcaaggttggaatccaatctttttggaaacatgtttttaatttggntgactaaatatattgtattccctacctaattattatgtaagataatgttaattcg

SEQ ID NO: 1491 - DNA, 476 bp, Arabidopsis thaliana landsberg
  unsure (1)..(476): unsure at all n locations
tggctattttcgacaaaaatgggggttgtgtggcnnnnnnnnnnnnnnnnnnnnnnnnnnnnnnncaccccacatatgtttccttgccatagatcacattcttggatttctggtggagaccatttcttggtcaaaaatccgtaggtgttagccttcgatattattgaaaatggtcgttcatggctattttcgacaaaaatgggggttgtgtggcnnnnnnnnnnnnnnnnnnnnnnnnnnnnnnncaccccacatatgtttccttgccatagattacattcttggatttnnnnnnnnnnnnnnnnnnggtctaaaatccgtaggtgttagcctctagtattattgaaaatggtcgctcatggctattttcataaaaaatgggggttgtgtggcnnnnnnnnnnnnnnnnnnnnnnnnnnnnnnncaccccacatatgtttccttgccatagattacattcttggatttctggtgga

SEQ ID NO: 1492 - DNA, 4413 bp, Arabidopsis thaliana landsberg
acatgcggctaactgttgaggcagaccctacagaaaaagacaacatcaaagagttttctgattggattcttaagctaggagatggaaagctttcagaacctaataatggcgaagaagctatagatatacccgaagacatgcttcttcttgactcacttcaccccattgactctattgctaattgcgtctatccaaatctacttcaaaatcttaatgatcaaactttcttcagggagcgtgcaatactttgtccaacaaacgatgatgttagtgaggtgaataatcacatcatggatcttcttcccggagaggttaaggaacggatgtgacatttcggaagggtgcaaggaacggatgtgacctttcggaaggtgcaaggaacggatgtgacctttcgggaagcatccattcgccccctatataagggaggacgcccaatcaactctcaatcatcacaaaaccatccacacaccacaaaacattcttaaaggagtcccaacacatcctaaagttgttggtcggaaagggggtgcagctcggcgagtataactcgaccgaactgatgcgcatactacctcccggcccaaggtttgatggagtgtagaggatggagagggtagaccattcgtcttagagaccaatcggatctggtagaccgatcgtcgaatctgatcgttcagaccaatcgtcggacggatcggatcatccagacggatcggatcggacagaccgatcgttggacgggtcggatgggacaggccgatcgtctgacggaacgggtcggacagaccgatcgtcggttgggatggatcgagaaaagtgtttgaggaagcacaaggataagtgcatccgaacacacccaagggtcaccatggatgcaatcttaccggtaaagggagaaagcaccaagaataggtaaggaacgttgttcactatatgggatcaatatcgcggctgccttcatgtatctatctcctcagccatggtgaaaccgatcggagatcggtaagaccaaaggatgactcgacggataaccaacgggaaagtccacggtgggaaccgatggacaaaacggatgttggacccgcaagcaaacctaaggccgacggaagaaagatttcatgggctagcctacgatgatccagtggatgaatccacggacccttgggtgtgataaggatatcgttcggaccgcatggatggatcattaaaccgaaagctttatcgaccaccatggaccggacgggtaaacggttagtaaaccgtgggcgattgtagtgttaaacaaccgaaacggaaacatggatggttcgataagccgagggctcaatcgtccaccatgttgccggaggggcgtacatttggagaacgaatggaccaataagccaagagcttgattcggccatcgtgaaccaagggaatcgtatgatccccaatctctatcgttgtacttagaccagtggggttggttggttgtatggctaagtaacgatagggattggttcatcaattcacgaccgatgacgagtcgttgaacgaatggagtaaggcgacaaacgggctaaggaatcaaatccgcatattggccaaggtatgtaacgatctagcttattagttaagatagatgtttggtaattgaccgtgaaagtaggataaaggaatatgcgattgtttggcttagaatggttagcgaacatatgcatgtcttgaccgagtaaaggatcgatctatgtctaagggacaaagacgataaaaccggtacaagagttggttagaattaaaccaaggttagaaagacttccgctgtgtaataagagagcgattatagaatttagcctcgtaaaggcaattctatgttgaatcgcgacaaattaagaggtttggccggggagaggcgcgaacttgagtacaacatcgccggacgccgagacgtccgggacggggtctcacaagttcttgtaacgcccgtgtcccaagttagaagtaagcaagatcttacacccgccgaattcgaggatgaattcagtttaaggggggtagacttgtaacgaccgcgtcccgcgttcataaaagaggccggtttgttttaggagaaaactagatcatggtcgaggaacggaccaaaatacttagtcggaagaacgagaaagttcaagctgaaccagctaggtgagctggacaagctagatgaactagctagctaagctaggtgagctaaaccagctggaagactagctagctcagctaggtgagctgaccgacagctcgactgagcttggtgagctgatcgtgtactgacccagctgggcggtccagtcaactgacccagctgggcggtccagtcagctgacactcgagctggtggactgtggtacctcactggtgaagaggtgtctcggccaaaaagtgtaaggtcgagcgggtaccaacaaacggttgcatcgcccaatagatgcaaggaacggatgtgaccgtttggaaggatgcaaggaacggatgtgacctttcggaagggtgcaaggaacggatgtgatgcttcgggaagcatccattcgccccctatataagggaggacgcccaaggcctttgggaatctcacatcatctcacaacatccaaaacaccataaaacattcttaaaggagtaccaacacatcctagagttattggtcggaaaggggtgcggctgggcgagtataactcgaccgaactgatgcgcatactacctcccggtccaacggtttgatggagtgtagaggatggagagggtagaccgttcgtcttagagacgaatcggatctggtaaaccgatcgtcggatcggatcagccagaccgatcgtcggacggatcggatcagccagacggatcggatcggacagatcgatcgtcggacgggtcggatgggacaggccgatcgtcggacggaacaggtcggacagaccgatcgtcggatgggatggatcgagaaaagtgttcgagaaagcacaaggataagtgcatccgaacacacccaagggtcgcccatggatgcaatcttaccggtaaagggagaaagcaccaaaaatgggtaaggaacgtgattcaccatataggatcaatatcgcggctgccttcatgtatctatctcctcagccatggtgaaaccgatcggagatcggtaagaccaaatggtgactcgatggataaccaacgggaaagtctacggtgggaaccgatggacaaaacggatgttggacacgcgagcaaacctaaggccgacggaagaaggatttcatgggctagcctacgatgatccggtggatgaatccacggacccttgggtgtgataaggatatcgttcggaccgcatggatggatcgttaagccgaaagctttacagaccaccatggaccggacgggtagacggttagtaaaccatgggcggtcgtagtgttaaacaaccggatcggaaacatggatggttcgataagctgagggctcaatcgtccaccatggcagcgaaggggcgtacgtttcgaggacggatggaccaatgagccaagagcttgattcggccatcgtgaaccaagggaatcgtatgatccctaatctctatcgtagtacttagactagtggggttggttggttgtatggctaagtaacgataggaattggttcatcaattcacgatcggatacgagtcgttgaacgaatggagtaaggcgacaaacgtgctaaggaatcaaatccgcatattggccaaggtatgtaacgatctagcttactagttaggatagacgtttgggaattgaccgtgaaaataggataaaggaatatgcgattgttaggcctagaatggttagcgaacaatatgcatgtcttgaccgagtaaatgattgatctaagtctaagggacaaagacgatgaaaccggtacaagagttggttagaattaaaccaaggttagaaagactttcgctgtgtaataagaaagcgattatagaatttagcctcgtaaaggcaattctatggttaatcgcgaaaaaattaagaggttcggccgggaagaggcgcgaacttgagtacacggtcgccggacgccgagacgtccgggactggctctcacattcagctcgttcccgagtgcctataattgcgttatagacagttggctggtccgtgaaagagaaatcgacgatttttgtaattccttcagctcggacaggtaattttatggtgccgaggttcatagtggtctcactagaaaaactgagtacaggcgttggagtcgatatgatttgtttcatatcgatcttcatgaaaaatgatatccagcgtacttcctttatagaccaaaactcgctcgacgtcgaaatccccgatagtcagtgtaatgaccaaggggtcgttgtgcgggcgatccaacccggtagtc

SEQ ID NO: 1493 - DNA, 503 bp, Arabidopsis thaliana landsberg
cacaactaaactggggggcgccacaaacaataatacatttgtcttattgtatctttctattgagttcatcttgggttatgacatattaaactcatttcactaaaaatgtatatactttgaatcttgttcttctttgtattcgaagttttcctcactatatatataggtctattatgtctgcagttcggttcgatttgcgagacagttgggtcttcgaaatgtatggatcaagttttcacgattcttatatcctaatagaaatttcgtcaaggttctaataaagtatatatatgactttgtgtagattaagtggatttgtccaactgctcctagacgccccgttactatcttaggtggaatggaaaccaatgcatgtaagaacagttgatttcaaatttcatttaatgcttctaatatattattaataatattgcatctacactcttctttgatgaatcaaggttcgatattgcaaaaatttctgaaaacatgcaagaagatga

SEQ ID NO: 1494 - DNA, 604 bp, Arabidopsis thaliana landsberg
gatggattagattagggtactctctaggtaagttaggtggttaagattaggttagaacccttctgggttcgcttggtccctatgcggttttcgttggctaatgtggagattcgatcatagacgtttagcgtccaaaagacgttcaaatggatgtcaaatctacaaattccagagatttgtagactcgaccaagacattggcttgtctgcttattggctttggtagattatttcttaattgcttctgtatacatcttgattgctagcaataacagtagacaggattgacagcccctatagctgcatcgacatgttagtggttaagggtaattgaactgaacacaccacacttcagcacataagtaggcctaaaaaaactacttataagagtataagaagcaaaaccgcaacctgatcttaaatgcctaggtagtgttttccttgttagcagatacaaagccaaagattcatacggactttggctacaccatcaatgctttgagaagcacgaagaagcttggttagtgttttggagtcaaaaatgatttgatgtcatgtggatgattgaatataaaactagaaccgcaacccgaattttaaagcct

SEQ ID NO: 1495 - DNA, 434 bp, Arabidopsis thaliana landsberg
gcatctgtaagctgcattttgattggttaaaagacggttcctcgcaatttcctagcaaggtttgctagggttttgcgaggatatatatgcttatatatactaaacctaattttttttcttcgattctcttcttctccgatctgttttcctcgtcgccggcttctcttcttctccgatctattttcttcgccgtcgcctctcttcttcttcgatctgattacgtccccgcctcttattctccagcagccgccgcaactcttcttctccaggttcagctgcgagtcgatctgtttcttctccaaggtaacctcttcttctccgatataacttcttctttccattccaacttccaccgtccgatctaacttcttcttcttctccgtcgcgtctcgtcttctcctgcagtcgtcgcgactcttttctccagcagccgt

SEQ ID NO: 1496 - DNA, 658 bp, Arabidopsis thaliana landsberg
  unsure (1)..(658): unsure at all n locations
atcggtgatggagaactgtaaatgtgttagcctaacatggtaacagatctactaagtcatataaatacatagtgagagtccttaaacccaacaggagaactactcagacatgattatcaaagaacaaaacatgattaaagtagaaataaatgtaagaaacaataagagaatagagtttagaaagattttcgatcaacacctacacggattttggtgtgcggattgcttctgtagcataagttgtctgtttgctcttaaatgctccataatctccaaatgcatcccaataaagacctaaaaaaactgtagaagactagaaataacaaaaatactctaaaatatatatctagatcggagctaaaagcaatgaaaattgaggtatatcatgactcatcttgatcattgtctttacttaccataatctcataaatgtatggcaaagactttgaataataatggtctttcatcatcggaatcaaaatatttctctttatgtgtctatcattcgtatattatttgttgtttcgttaaaaacatttcatgaaaaaacacaatgggataaaatcatgataatgggaaaatagtacaactatgcacataaccatatttctccccctaaaatcattatctntaagataccagtcatatatatatcatc

SEQ ID NO: 1497 - DNA, 543 bp, Arabidopsis thaliana landsberg
ttcgagatttcggcaaaattccgatgagactagaaataaacaaaaacaggatcatgagacataggagacaactgttggggtcggatttgacccaggatagcgagccgacctatgagtcaccgcctcgggagccatcgatgaattatcccgaaccagactaaaacacctcggagttctcgtcaagaacccataccgaggtgatgtcgagaacgcttcggggcagtctcataaagtaatccccgatccgacctaggacgcctcggggataagacttggaaaatcatcccgaggcgggctccaaaacacctcgggagcttgccttcaagtaccgcagaccaagcatcccgatcatgacccgaggccagcttaatcttcgaagatatcaccggatacaaaaatcccagaatcttcggaggataaagacaaatctctttcaacgagataaagataaagagggattttccgagaatatcgcaagaggtgatattctcggaccctataaaaaagcacctcagagaacaaacaaaggggtaggcacaaaaa

SEQ ID NO: 1498 - DNA, 1009 bp, Arabidopsis thaliana landsberg
  unsure (1)..(1009): unsure at all n locations
gattgaaaacataaacaaagaaaatccgaaaattcaaaacactcaaaagcccaaatcttaaaaggcccaaatgctaggacacgacccgacccgacttatgtgaagcaatagatcaacgatctccatatcaagagctctgatcaacaatggccgccacaacatccttggactccttcagaagcttgatactgttcttaagcttctccctcttgctcgccaccgacggatactcctccagcatcttctcaactactcctccactacttgaattcaccaattccgccacgatctcctcatgtaattgaatgttcacaagatgccgacaatgtcaccatcaatcaaacttagcagtggatgagtcctgaagagtaaatcttcctgcaccctagcttcttcatatgtctcttctcctatacggtttctaacacagatgtaacctagtccgatactcacatcatctgcagttactttctgcaggagaccttcaggagccatgtcagcctttgtcacaacagccagagtccgttcaccagttttgtcaacttgtcttgacatgcgaatggattcgcatgtggtgaagtcgaccgtagctgacagaacattgaggattattgattcttgaggctcgatgtacttcatgatcatcctagaaatctgttcgtaaatattctccggttgtccattcactggaactcgagttataccgggaagatcgaccatcgtaagatctgggacattgttcttcttaacactgagggtcaggggaagtgtctgaaacnnnnnnnnnnnnnnnnnnnnnnnaaggagaccaaactggtgtagtatcaaacacaccacactctaaagttccatcatatagcaaagtaggggtagcagcattaaaaatattcgatgagttaagacacgctaggagatcacgaacatttaacacttttagacacttgtattcaggtatatatacacatctaactaatgacttctatggaggtaataacagtaagagtttcat

SEQ ID NO: 1499 - DNA, 717 bp, Arabidopsis thaliana landsberg
tttgggatttttgtttttgtttacaactaaacactgtacatctattcactcctaactaagttatgtgtacgcactctacatcgttacaaagttaaagggcattttcgtatgaatttgccttaatggctaaacattggaaggtccagcccactctgccaatacctgaaagaaaaactcaggacgatgatcacggtgaaaataactttttttaatactattaatcacgattatctagctttatttatttatttttattttattttttttttttttttttttacctaattggtttgttcaatatcttaccactaaccactaatctctttcaaactttgaaaataatagatagatgctatagaaaaataatcaaaaaaaaaagactagcaggccgacaatgggaaataataatcaacgaagtttctaaattaaaaattataaacatttcgatcaagctttttatctgtacatgtatatggaagagggagagtaaggagagaagaatatcacaactacccaaaaattgacttagtagtaaccatgaattcaaatccagtcggtgaatttcgtgagggagagatcgatggaaaacaatttctcatattcactttgctatcttcttccggtgaagcagccattgattccggtggtggggacgatctctctcttgagcctctttccctctgtcctactttacgtatcaaagttctaaggttgaaa

SEQ ID NO: 1500 - DNA, 656 bp, Arabidopsis thaliana landsberg
  unsure (1)..(656): unsure at all n locations
gttgatgttataatgcattgcgaccctaatgaacctaattctaatgcgaatttgactaggaaattacaaatgtttgtttagtagttaagtagtcaaatttagtgattaatgttttgagagataattagtctaaacttgtgttcaagttcgagaacaattctttatgctggattccttgtttattatttccattaatcattgatcttcgaaataccctatgacccaatgctttttatcatataagtttaatcgtttattttcttgcattttaatttacaattcgaaaaccaatcaaacatcctttccgctttggtccttgtggatcgaccttgtatatactaccttgcggttaagtgtattgagtaattactcgatcaatcaagttggcgccgttgtcggggaccaattgcattatctaaggatttaggacttagtccttctaagctcttaaaaaggnnnnaaattttttttnttnnntttttttttaaaaaatttttttttttttttaaaaaaccccttttgggggggggggggntttttaaaaaattttttttttggggggaaaatttttttttttaaatttttttcccccccttttttttttttttttccccccggggggtgggggtttttttttttttttttctttttttccc

SEQ ID NO: 1501 - DNA, 755 bp, Arabidopsis thaliana landsberg
ccctccaccgaggaggacacaagggaaggttgatgcttatgctaaaggagataaacagatgcagaagaaggatccagaagttgatcatgatcctcagcttcaagaatttcttcatcaggagcataagttgaaattctggtccaatgacatgtgtattcatccttccaatggtgctgatgaccctaacaaagccaaaagatcattcttagattctaaaaagactagaaagagtaaagttggtgatgatgtttctgatatggaatacttcaagagtcggataaagaaaaatctggacagtgattgtgaaaccgatagtcgtgaagatgcaatcaatgtttttcctattgatggagaagttaaagctgacagagtcgacaaagatgatgatggccatgcaatggaggtagaagccgatggcagtgatgatgttcttgacgctggtcgccttttcgtccatggcctgccttactctaccacgtaatggatcttttttcttcttcttctttcctgattatccttgtgtcttatacatcttcatttgttctctcatgaaatagagaagaagagcttatggaacatttcagcaaattccgtgatatatcaaaagtccatcttgttcttgacaaggataccagaagttgcaggggaatggccttcgtcctttacctgataccggaatctgcaaaaatgtatcttaatcataccaattaagaagttctaagtgcatgcttttcaataagtagcacttatgttca

SEQ ID NO: 1502 - DNA, 575 bp, Arabidopsis thaliana landsberg
aaatacgtcttgaaccctcccccaaacttaaattacacagccccttgtgtaatcaaaatttgtgaaagaattcaagataaacatagaaacaaaaacaaaagcggtatttacaaatggttttggtgtgttacctcagtagaatgtcctggagatgtagtcatccatatctgcttgagtgtactcagcatgcacgaccggttcttgatgtggctctgccatctcctcgtcattgtgctcgatcgcaaccctaggaggttgtggagcatgacgctcatgtgttctctggggttgcgatagagtgatttgggcaattccactaggagaccactccatcagaccacttccaggttgcgatcgagtagtttgacattgtcgttgagaaagatgttgtcccaaaaccactagatcgcactcccgagcttttactctcatcttgcgatccagtgattcatcaaaaaactgaatttttttatttgaacactcgattgcatccctgctgttgctccatcttttattcattcctgaaaacagaaacaaaccaaaacaaatacatggtactaaaaaaaatagggtat

SEQ ID NO: 1503 - DNA, 585 bp, Arabidopsis thaliana landsberg
ccgccggaatactaccgccgccgtcgccggaatcaccatcgccgccgtcgccggaaccaccaccgttatcttcgctggaaccaccaccaccaccaccttagatcattttacctaccccttaagttacttacttaataattacatatatagtgctatattaaaacaaaaacgaaaatccagttaacgtgagaacaaactttttttaaaataataattttgaacaaaatttagataaagaagaatcttcttcacatatttcgtttttgattttaaaaatattaaagaaaaacaatttaattttgatattgcatattataaattgacttgttttagcttaccaataatattttaacatgtatcaattcacaaataattgatttgatggtaggaatagaagaagaaaaaaaacggttatgaaaacccttggagaatttatcatgactaataaaattcattaaaattcaaatatgacaatattatgtaaaaatctgccgatattaataaaagtctgtcgtgacgttatgacaatatctttttaaaaaaaaaaaaaaatctaagcaaaccggattaacatacaatcagacc

SEQ ID NO: 1504 - DNA, 310 bp, Arabidopsis thaliana landsberg
gaaagtcatctggactatggaaggcgtacctctaatggacactcagcattttgtgaagaatttcttaatggaaaagatttagaaagatcagaatccaatgatgtttagccgtgtcatcgcttaagaaaaagataagaagaaagtccttttagaaaagctagatgacattggttcattcactctaccatgctttctaggaccattgaccttcgaagcatctattaggcttatgcccctctttacagctaaaaggctattggtcgtcgagtaccagttttgcaacctatctttggtcttggcttatagggct

SEQ ID NO: 1505 - DNA, 397 bp, Arabidopsis thaliana landsberg
tctaagtcacatctggcatctaagaaacttgcaacttagtatccgtcttgtctgaatcagctgatacaaggagatggagattagctctgagttcgtacaaacaaggcttgtaccacaaacaaagaaaacccttaaatcaaggaaactgaaactgcgtagtcttgtgtaccagaaggaggattatcatacacccaaagcagagacacaataatcgaccacaaacacaatcaatccttttgcaaacagattaagatgacaaatcacccaaaagctgaagaacacttcttcaacaagcttacttgaatgcagaaaacggactgtacatatgaagatgagaacttgatgttcacattttctagtatacaaggtaaaggcaacgataactatagcctctgca

SEQ ID NO: 1506 - DNA, 542 bp, Arabidopsis thaliana landsberg
ttgcattgttcgtctatgaagagtcgttcttatcaactagtgattaccttgcagcagagacagaaatactgtgataactctttgtcgaattcgacgttaaggtgtaggttggtctttctagaaagctgagcctcggggcttcgaattgatatgcagatcgccatgaaaattcttttggattgctagaaatttgctttctaatttggttgatcgtgcagtgaggatctgcgtttcgctggttgcatttttcggggcattcggtggataggttacacgccacgcagttcgtcggaatcttcctggaaattgatttcatagtcgactggttttgtaacttttgatcagtgtttcgtcttgctgtatctgctggagagaagcgcatgtaactttcggcacagcttcgattggaacaatattggactatagggagagctgtttgtctgggcaatctgtggatatgttcccgtctcttggttcgtcgacaatgtcggaaaattgctccgaagttggtcgtttcaagtggtgtcaactgaattgcttgg

SEQ ID NO: 1507 - DNA, 4612 bp, Arabidopsis thaliana landsberg
aaattcgagtttgcaaagtagaatatacaattgaagaccgctactacattgccttttttaatgaatcaggtatgagctgaatgagaagagagtattcgtgaatggttatgctcgccttcataagtacacaaataaagcatccgaagttttcttctacacatcgctcaacatgcttcctcgctggacaaccgcgcacactgctacatttatagtatcccctgcaaacaacaaaaataagaaccaaattataatccaaacatgagaacaagtccattgttttactattcttgtaatgttattttacctaggatgaggagaaccctttatcggcttttgtccgtatttcctccatgaatattcatccggaggtatatccgcaatcttgttactgattgccggtactttaatcgttcgtttcacccttaatttcctgtaaaaaaacaccaaaacattgaaataaacaaactcttagaacacttttttctcaaggaagaacaaaaccaaccttttcttggaacaatggcatttgcttttacttccacattttaaactaccagagcaactagtcctcctagaatgttgcgatatatgatcggaaccttgaggtaatccaatcaaatgaaaagactttctatcgtaatccgtcacactaccatccatactaagagatgaaacaaacgatcttgacccatttgatatacttggtgaataacaactagcaccaatagacccatcaaactttagattcaaaccacttttgctccttgagtacactccttgctgatgggtatgaataaactgataaggttttggatcaacagctcgtgaagagggtggcttcagctcgagaaacgacttatcaagacacattttctggttaaacaacatcaatggaggaggaccagctggtacaatctgaagaggctttggtgctagaattggaatacaaccacttatagcattattactgcaaacaggactctcaaaaaacatgtgttgtggcaacaaagaagagctaaacttgtagttgttgttgttgagtttctttatcttcctttgacctaaccctctagacaaaagagaggagactctcttgaacttgcaaacagcttctcttgtttcaaccattattgatttggaatcattggtttgttgtgataagagatttaatactccatgacaactttccactgctgctttgtttgcagcttcaacttcttccattttcttcttcacaaaggatacttttaaaaaaacgaaaaacctcaaaactcaaacgctaaaatacctatttcaaaagaaaagaataatcatcatgagctagctcaaacatggaaaccataaaaagcaaaatagtagttcatgaacaagggttaaaagcagaaaattattctgtcactgtaagaagaagaaacaaatattcttctctcagtataaagcaaagcttcgagattggtgagagaagggagagtgaagatggtcgtcactcatcacggtaacagaggaaaggagagaaaaacagagttctccgtaaaagattttcgtggtgggttccattactggacctactttgcatctactttttcttttcttttttctttggaaataataatacttttagtgacaaccaaataatgttctgcataaatattagttttgtgataatgtgtcttaattatttcttatttatgtacactagctaactctttatatattaactagattttgattcgcggtataccgcatgattattttatttttttaagaataaaaatttaatttgtttttttattaaaaatatatatgatttaatgttttgtattttttaaatatattttctgaatgtataactcttataactatatattattaagtatataattactatatttgatttttactattaaaaatgtaggaacaataacgtacaattcattaaattaaaatctagattataactaaataatttaaatttaaattatatttattttattaatattatttgttttgtttaatatttaagataatataattgtattttgattgttttatttaggatttcacccgtggtataccgtctcgtattactatcgctcaaacccgtcctaccatctaatttcgtccgacccaaattcagtttgataaaattaaacattattttttcttttttgttcaaataacatttttattaaaagatttataattcaaattaatttaaaagttttcttttcaaatgattatttgattttatagatttcatatattatatatattataaacgttttttttaaaatattctaaacattttataaactttaaataaatacaatatttatttttaatgaagtataatattaataaagtcataagatttctcctttttaaaagtaattagaattgatataaatatattaaataagcaaatgctaataattaaaaatataataattaatgtcaatggtattccttgtaaataagttcaacttgaggatttatttgctaaaatggctccaaaaatgtatatgtagattgagaaatattttaagaaaaatagatttttatctttatgtgttactaacgaaaataacattagttaataggatattcttaattcatttaaataattatctaaatgatatttttaactcatttaaataattatctatctttattaaaatatctagagataatgtcattagtttgatatagacatatctcaattctcaaacaaataattaagcaactcaatttggtaattggtaaaaaagttcctccgcgagtgcgccaaatgggacgacgttggtcggagattcctagttttctacatggacggcggcggcggtatcggcgagcttgttcctactaaagattccgacgatgttcttgaggaagtcactttggtcaatgacgttgacctcgccgataactcttccaacggattcgttatcgaccgccaccgaaaccgtcttctcctcgctgtcggcgatttgcttggaaatcgttatagtgctttagttgcctatgatttgtccacgtggagtcatctcttcctcacagtgcttagcagccatagtaagctctctctaatcatttgttgattaagcaaacaaatgatttatgttctctgtttttgccaaatttgagcaacgtaagtaaagagataacatacgcagacgatgtagctgttgatacacaagggaatgcttatgtatctgatgcaaaaggaggtaaaatatggattgttgatgttaatggaaagcttgtgtacactattagaagccctctcttcacttcacctggttggtataataactttgtctctcttaacggcattgtttatcatccggacggattccttatcgtcatccacactttctccggtttcttatacaaaatcgatgcgaatggggatattagtagtaaagtcactatcattgacgtttctggtggcaatttgaggtttggtgatgggcttgagttcttgtctcccaccaaaatttccaaatcgaaaactcaatatggattgttgagagaattagggatttcgatttgggaattttgatttgtttcgttagtacataacgacgctgttttcaactttaacagaactcattaacgtctgttaatgggtcttttaatgcgagttaacgtttcgggattttggcaaggtcaatgttttgtttttgttaaaatggctagttaacgtttttatatgtttaatttggccgaccttagagttcacgtattgattgaccactttttgaaagttcacgtataaaacaacatttttccccaatataaaccctaaacattcttcaataaactcaaatcgacatctattttttccccctaaccattctattataaacccaaaccgacatataattttgttaaattttaaaatctaaatcctacatataattaaccttgtttaatcaaaagtatacatattttgttcctttaattattgtattgcatggtataatgattgatttaaactaaaaaaggtgggttcacccctaaagatgaacccaaatatttttcaattctttcttgtcatcttagatttattatttattgcaaattatgagaactgttacaaaagttttgcagcgccaactagacgcaatgtggcagagagtaggcacgtgggcgggtcccacgggacgggttgttcctgtgacccttattagatccacaacagacgataccttcttttcattttccatgctcttgatggacatcttcaatgatcttctctgtatagaatcctggcgaacagctataattgtacatctggttaagaaatcgcaatatctaggattcaaaccccagacctcttggtgtaaaagcattaatgaacccttggtcaaccaatggaccaaaggacatatatatatatatatatatatatatatatataattagattatttatatattacaaccttaactttaacatcttcatgttcgtgtttatcagataattttgttcttttttggattatttattcttaatatctagttgataaagaaaagttgagaaaaacacatctaaaacaaaaaagcatacataataaaaggggttgggtgtgggggtggggtatggggtt

SEQ ID NO: 1508 - DNA, 518 bp, Arabidopsis thaliana landsberg
tgatctcatgtatagagcagctaaagacttttcatggttgtgcgtcaatacacaagcaacactggtgaaacacttgaagttgtgttacatcagttatatacagtttctaatcatgatacacatgttaacatctacaatactaatattctgtttctttaatgcacggcaaaaagatccattgtaccgtgaggaaaagtttggtgagcaagtaagctaacatgctaaccgttgaaaattgggttttcgtcgagaactatgccagtggaggttttcgccccacgtcccatctctacaagatgttctttatcaatggaacttcagtaattccaagtccctcaaagtcagattccaactatctgattttagccagttttcaaaagatccaaagtggggagcttaatcccaccatgtcggttggtaagtttcgttgtataacaccaataactgtattttgtataaatatgatcctgtgtgtggatctttttttatgtagatgtagtcggtcagattgtaatgat

SEQ ID NO: 1509 - DNA, 499 bp, Arabidopsis thaliana landsberg
gagaggttccctgctctctgcttactgtaaaagccccaggaaatcccgcaatcttctgtaaacttgataaagtctctgtaagactctgcagcttctgttggtcgtgtaaaatgatgatttaaaattttttcatgttttaaaaacatcactcaaactcgaccaatgtactcgatctctaggccatcaatagagtaaaagctttgaatttttagtctaccttcatgttactctctttttttttttctgagaaccacaaacacaactaaaacaaatcaaaaataacaagaaagtaaaaattatttacaaggataatcatgggacttcctcccaagtgagcttttattctactcctcccaaactgcaacttgatatgctttccaaggttgagacttatttcccttccctgacatctatcactgctcccactgaagctaagaaggggcttcacaggattaagggatcttatgctctactttcatatccagcaccacgaagtctg

SEQ ID NO: 1510 - DNA, 555 bp, Arabidopsis thaliana landsberg
tgaacccttccgaggggccggccttcgaacctctgaccagtagtgggtgtagggcccacgtgatctgaggcggctgtcgaacccttccgaggggccagccttcgaacctctgatcagtagggaggctcggagcctggttccttcacggggagaaagagggaaaaaggaaaaggatacgaaatcgaacgacgcgacgtaccttttctgacgcggtcattatggcgaaggcggaaggtgatgagtgaggtatccgtatcccggaggcgtaggagtccctcggctcggtcggccttgccgcttacgcgcactcttacccgtccatgggtgtcggcgtttcgagaccggggggtcccaagccgacgagtgaatgtcgccgcgtgccccagcccagatgggtcgagcgcatgggcgagcgcgaaggggggaagtgaggtggctggagatgggcgtgagagaggtggaaatccgcggccttcgtgttcgtccgcgccctagtcgggtgcgcttgcaatagggggttacaagcgtcacgcaggagagggacgaggggtacga

SEQ ID NO: 1511 - DNA, 696 bp, Arabidopsis thaliana landsberg
attgaaatcattaaaaaaccattactataatttgtctacaataaaaactaaacctcaaggtagatcacacttaaacttgtctccttattaatactcttaattaggctatggtttcgaaatagaacttaaaaaagaacttgattatttcactaatatcaagatgaacatctcttgttaatcttaaccttaaagccatgcttcattttaagaattaaactagtatctggctcaaacttctgcccgttggcaaccttgatgtcatagttttgtaatatctccaccgccacaatcttcatttgaaccatagctctttgtttaccatggcatattctcgaccggcattgaatgctaactctccggtctcggaaatccatctctctggcttgaattctaatgcatcttctccccatacagctctcatcctacccaccaccccataaataaagaccaaaatcttgtttaagtacatctttgtttaagtactccattggatcacaagatggtctctcttggccactacaacttcttggtagattcatgtcaatctcttggcgaatcttggtcaccactagaaggtttttcggacaaaaaccaaaagaaaccaagtgagagccgaggcagtggtatctctcccagctagaagtaaagcaaagacattgtctcttaagactttatcattgataggatccaagagct

SEQ ID NO: 1512 - DNA, 547 bp, Arabidopsis thaliana landsberg
  unsure (1)..(547): unsure at all n locations
tcatgtgctctaaagaccggagtaccgatcattgcgaattgaagtagcagaggagtaaaccgttcggaaaaattaatttgggctatcggtattcggttcgggtcagttcggttatcagactccgatcgggttaacctaaaccgagtattagaagccctatataaggttaatgtttcaccaaccctattttctctacttctctccgcctctctcgcatctnactacaatcgaagtcgctctctgcctctcttcgtctacgtctccgtctccatctctgtctccggtgagtattcataaatctgatctcagacaacattagatttcgattgtaagttctttaggtctgtagattntgagtaatgggtttgacaacattagatttatattgcccactctcacttgtttgtgttgattactgtaatgttgaatttgggtttcatctactaactaagatgaaatcaatttgagaagactagtggataatagtgaacacgtttacatgacttttgacttgatagtttgctattcttgttgtatctgtgtgaat

SEQ ID NO: 1513 - DNA, 577 bp, Arabidopsis thaliana landsberg
tgcaaatctaaaattgcaaacctaaacgaagaggtagccatagcaggccttcgtaacggcctttagttctcctctaggttccgtgaggactcactgttaggcaaccagtctctttagacgatgcccttcacaaagctctccacttcgccaaagccgaagaggagctcagtgtgctggccttacgattcaaagaatctaaaacgcaaaacgctccccttgcaattaagaagcccttcaaaaggaaaaccaaacgcaggggtagcataccttattcgcaatagacgaggcagctgaggacgagagtccagaacttgacctcggaaaatattgcaagtaccacaagataagaggatattccaccgaggagtgtcgcgccgttaaaaaattaatcgcagctgggggaaagactaaaaaaggttcaaaagaaacgggaacgaacaccggagggaagtgactctcccccaccttctagaggagaacgcatagacctagtctttgcagaactcgatctaggtggtcagtcacacacctcccccgccccgcataagaaaacatgaggtttcattacgctcttgaa

SEQ ID NO: 1514 - DNA, 688 bp, Arabidopsis thaliana landsberg
gctctcgtttcttattagagaatcaaagaacagagttatggttatgttcttagatatggtaaaagatcaaatttcaccttttcgggtgaatgtggcagtgttcacacctatggtatggccataagaatcaagcaatggccctccagaattgcctatatcaacatagcgagaaagattgattttcataaaactgaatgggatgacaaaaactgattaatatgtttgtgaattaccttgtaatttctcccctattatatggtcttgtaattatccgttttctattggaataatgttattatttaacatatttgcaaggtgagagaaacctaatcctaaactaaagatcaatacttcagaaacctattcatgaagacatctctacggcaataaagagaggtaaaccgataaacctcctaatgattctattatgtgattaacctagatgtttaaagatcttagggttcatgtaaaattaacttacatacctgagttaatatcagcatcggtttgtatagcttctgaaatactcttcccattaggtgaaggtatctctcttcccaacccacttactacctacaaatcctcatgataacaaatccatttcaagtgaaaatgtttagacttcaacgtatatatgaacacaaaactcaggatctaactactcttacccctattgtcaaggtgtttt

SEQ ID NO: 1515 - DNA, 569 bp, Arabidopsis thaliana landsberg
aagctcttgcacacaggtgcactctttctttttctttgctttcttctgtatttgccgccgcttctctgctctccagctccggtcaatccgtacaggtacgttctggttacattcaaaacggcacttcaccataaatgaaaacataggagaatttcataaaagaagttgtgaaattcatctcttttaattatagatgcagctcgattttggatctctcttgatgttcctgcatctctctagattgtatcaatacccaaatgttgaaatttaacggcataattgaaattgaatcctcatttgtagttactcgagactcttatgtcaattgttggttctttcatagtttattagtcagaagttgatgtatctgcatttctctgatttgtataaagtagtataatgtgaatgttctctgatggtttgtctgaatttgggcaggtaagtcaaaaagttgtgaaagatgggtcgtgttcgtaccaaaacggttaagaagtcttcacgtcaggtgattgagaagtactactcacggatgacactagacttccacaccaacaagaagatcttggaag

SEQ ID NO: 1516 - DNA, 581 bp, Arabidopsis thaliana landsberg
  unsure (1)..(581): unsure at all n locations
gcccgtcgacacagtgtncagcacctcccccaactcccatttgcctagggttgaatccagatctccaccaccaccatacagtcccaacggtcccccacctcccgcagactactctccttctcctaagatcgactataaggctacaccaccgccatatgtttacagactgtcacccacctccaacatattatttctccttcaccaagggtagactataagtctccaccaccaccatacgtatacaacctacttccacctccatatgtatacaactcaccaccacctccaccgtactattctccatctccaacggtaaactacaaatctccaccaccaccatacgtatacaactcaccaccacctccaccttactactctcattttcctaaggtagagtacgaatctccaccgccaccatacatctataactccccaccacctccaccatactattctccttctccgaagataacctacaaatctccaccaccaccatacatctacaagacaccttattattgattcttgaatggctttgtaaacatgtaacatgattgcaatcatggatttcccttatttgt

SEQ ID NO: 1517 - DNA, 614 bp, Arabidopsis thaliana landsberg
cccagttttaaacctgattgtgggaatattcccgctatacaacagtatctcaatattttccgtagaaggaattttagatttgtctttcatggtgaaagagaaagataattgttaatatatccatatgaatccatccacaacataactgtattaattcgtttgtctgattgaataattcactatgacttttagacatttatattaagttttaacgtatttgtaaacataattagctcgaatgatttacaaaagcaacaatagttcaaaatactcaaaattatttatttctcttgaaaaaatggggttatggatggaacaaacaaataatatgatacaaaccactacaacattcaacagcaatatagagataagattattttgtgggaatggggaatggaagaaacttaaaaaaatcgtgggtctttagtaactgtatataattatacctaacactggagagctaaccataattatcttctcataataaacgtgataattaaaaaaaaaaaaaaagaataatgctctaactataaattgtgctctaaccataatgtccccgaattatgctcgaaccataataatccaagtttaaacctgatggtgggaatattccc

SEQ ID NO: 1518 - DNA, 5581 bp, Arabidopsis thaliana landsberg
ggatttcatttctttgtagtaacatgatcaacgaccaaattatttgaccaatgatagttatttttcactttattatttagataatattattcctgtttataaattaaattggaaaactttggacaaagggaagtggaaggttttgtactataaagcactaaattgcatatagaggacgatgatggcctttgatgagccacaaaagtcgtatgaacttatctttatgtcatttatggttctaaatagtcaggttatattcccttttttcctttatatatttattgaattgatcccatatttatcttgaaatattcttcatgaatttggaattggatcacattataagtttttgaaaatggtgttgacagaagatattattatcacatcatagagttttaagggtccccagtttcttgtcatgatgatataccaaaaaactttatagagtacagccaacctgacaaacccatgatacacaacacaaccttatctatgtacatatatgtagtcacacacgcacacacaaatatattgatttccttatacatccatacatgtgtctttgtgtgattgtgtttgtgcaattataattgtcaaaacctattttgttatatctttttcccacttcgacattgtgtgacatcaaacttttaagaacactactaagctccaacaagtacacgtttgataaattatcaaatccatcatccaaaagtaaaccatccatcatttcaaggattagtcgactatgaatttgagtatatgtcttctgagcatgatctgattttaatattgttatctaaattttttgaattaatatactttttgccttggtacagaaaacattccatatttattcttaggagtaaacagaatcacaacccaatatgtatagaagtactggtctctagataacttatataattaaccttccattatgttgattgttgaagtgttaaaatttgatcaaactcaaactttccgtaaaccatatcaagacaaggcgtctttaggataatgcacctatatacattaaaaaaaatggcacagaaataagatgtacgtttatatgtacaacaacctattacatcataaaccatatatattttagtggtgaagcatggaacaacaaacttagtaacttggacattatttgagtgttgtcgaagactcgaagccatttataaaggttttaaatgattaaaaataaaagagcaaaaaaaaaaaaaaaaagagcatcaagatgttacatcgtcggggaaaagaacatcaatttctaagtaaactcgtaaaattaaggttgaaatgcagacatcgataatgtaggattggaaatatattttttcaaaaaataagcaatttataatcatttcatatatatatgagaagctgagcaacaagaaaaaaagacgtgagaaagaccattaaaataatcaactggataaaactattcagttattagatgactgatatgaataataagttcttcgtaaatttggagttctaatagtagaaattaagtgacgtatacgactgttgcccaaaaaaaggaaaaaaactagtatatatatatatgacttttatcctcttacatttcgcaccatatagtggcttcaagtattttcctttttctgaagtttttcccaccaagctaaaacatcattttctgaagttacaatattgaacaagggacgtaatgagggctcgtgtcatgaacccgtaacaagaccctctcgagcctcaccagtgacattggtgacacgaagcacagcctgtgcactaagaggtgagaggtttgattggcagaagattggccaagtggctgcctctggattctcctcctcgggttcgacaggagtagttttcttatacactgtctcaagttccaggaagactgtccgtgcagcctcctgagattctgggagttggtctcaattccatattctctcatgccttcaatgccctgatgataaccatagccaaagaaaggtgatgttggtgggaacatacactggatccaaatggttgtcatgttgatgacatgacaaatccaaaacaaaagaacaagactggttttatgataacgagtgaagtttgatttaccagtcggggaacacatctggagaagcacgcagatgcttttgcgcggatccggggactcttattcttgagacaaggtcgaagctttggcaacagcaaggcaggagaaacatgtgtagtcattgctactaatgctctttccgctacttcacaaacaaatcgcttgtcttgggaagatttaaggaggagttgagtaagctgtaagaaaggatttcggaatttctattatagtaaacacaaatatctgctatttgaggagaattccaagagtagctgcaaaagatgatttaccaggggatccaattgatcgaatatatggtcattatatagctgaagatgtcttcagatgtcatacatgcggttttacttacagcacttcttgggttcttcaatgatttcacgacaaacaggatcactttctccctgttaagtctgacagcgtgagactagaaaattctctcgacgtgtaactcaatctactttaactggtcattctcacgagcacagaaaaaacgacttacagcaaatgcagcatttcttccttgtggaaaatggaaagacgacgaacggtcaagtgactggaatattaaacaaagaatttccaaaatggtattaggtaatgtccaaactccaaacagatgaatataactgcaaatttgcaaggcagcattacaaatgagaagtcacagtaaagcatagtataataccaggaaagaacaattgataccttgagaactgcatcaacttcagctacattgttcaagtctttggatttgatatactcaagttctacgataactctttctgcctcaggtttctctatctcatcgcctgtaggatgattgtgatccaaggggacagagttttgtggtggtctgtcttcagcttttccattcattttgccagcacaaggattttttttacagtcaatattcctctcagagacaggaagattcttcaaatcttttaaagccttaacagccatgcgtagaagagttatctgcctgaaaaacaacaaagaagacaccaagaaaaacatcacttgtgccatcagttacaagtttagattggaaatcaactataaaacaaacaaaaaggcagaatctgatcagaatagagagaaaaagcattggcaaaattggtgtatctgcgattacaaggcgttatatgcctgaaaagcaacagagagacaccattataagtacaaacaacatttgtgctatcagataaaactttagtacggaaatcaactacaaaataacagaatactagagacaaaattaggtaggtaatttcaagcataggtattacagagtactagaaacgagaacctttgtctgtgactgcacgaggatcttcatagatacagcaataatagcaacatgtccacatatatctacattcagtcggagggcgggcatgagacacaaactcccccacctcccactaaatcgattgtcaaagaaacgaaagattcaataacgacagatgatccggttagatcaatgtagacatatctcggcagaaacaaagcaaatgctcaaagtccaaaagagaatagaaaaaccttcaatagaaagaaatatttggccactaaactcaatccgtacatcaatgtaaaagttcaagagagaccagtaaaaaccgaagtggttattacaacaaaatcagacatagaagcagtgatatacaactatatcaagaatccacatgggggaacgaaactgaaagaaggggttcgggatggggatggggatggggatggggatggggaaggcgatggcgatggcgttctcgttgtttttcttcaaaatgatcagcagccaagcagttggttttgatgatacacatgacaaccatgaagaaacagaggctaccagaaagggacatccaagaatccttcgctacacaacccagaatagcagacatcgtccctagaaatagtatgaatgtggttcggctggaatttaaatcctcggcaggagaatgaagttgaacgattgtaaccgctcctattatagacataatcaccagaaatgacacttccatcatcacatcaaagtcctcgatgctgtaggatatgcaataaatgacaaccattgtagctaggtagatcccaaaccgtccctcagctcctagccgataactcgggactggaacatcgttgcacaagcaaatgaatagcaaaccaatgtatggaatggttgcagcagacaagaagacatacctatagtcatgaacacatacacacacattatcaatacatatatataaacaaacaataaaatcaatgagactaaatcgataaactcgaaaatttccttacagtaacttgtgcaaggtgccaacgttgcgggtgtcaaaccatagaacaaagatggacccaacgagaatggagatgacaactgtggtagcgaataagtaaaaggtgatccgagagtaattactggtcacttcagcagttacattcttccaattttgctgagctcgcgagttcatgtcttcccctgaagggctcacgagtttttccatcacgccttcgcctagttccaaatccatcactccttcggctagtttcaaatcgctaatttagttataaaaaaaaattattcgcatacagattcacataatcagttctaatctctaagaaaatagtcagtgttaaaaagtgttctgcgtctacggaatcattggactctccacaatatctccaaaagaggacaagagtaaagaacaagaaaacgaaatagcttaaaattaacgtcaaatccacattcatatacatatactaaagaaggaaatcggatcaatggagtacctaaatggaacacggcgacgggagacagtgacggtggcagagacgccgagagaacacggaaaattcagaatcagcggtggaacacggcgacgggagacggtgacggtggcagagacgacgagagaacacggaaaattcagaatcagcggtggattaaggcgaattcgacgacgagatccagatcggcgacggagataagactacggagagtcggcactcggcaacacagatcggtgaaagaaaaaggcgaagaagagaagcggaacttttataacctaaggacggcacgaattcttattctttcgatcttggaacaaaaggtagttatggaatgcttgaatgacgataatacccttcgtttagataattatctttgtcaatcgggctaacccaatccgactgagtccgaaatccgtaaaatcgaaagatagagaaagctaaatccttcacctaccttctgcaactacggtgcaaatgttcttctttcgtggtttttcagtggaactggaatcgaaagcgactagaagaaatttatggtgtcgaatttggcgggaaagcggattggcggcaaccggcggcgcgtgtattaacgttctttgagaccaggcgtgcaatgtttcaatgtttggtctataaaatatcaaggcccattaaatctcatat

SEQ ID NO: 1519 - DNA, 409 bp, Arabidopsis thaliana landsberg
gtgataatctgtaggagaatctcatatatagtttgttacgagcaccaatctattttgtcaccgaaactggaaaaaacttctgacgggccactagttattcagagtgccacccaaggatgtgtaattacccttagctccttaatgaataattgtggagaagaaatgatttagtaaaaaaagaaattatttagtaaaaaagaaaaccgatgtcttcgcgggactcttttctccgatacgtgattttctccgatttcgtcgtcggcgacttgagcttcgatttattgatttgagaaatctagaattgacgaactggaacaaatggtaaaactgagacataatagtacagggggtacaaatgttttattgagataaaatatgacaggtgggataaatgatattaatgagatat

SEQ ID NO: 1520 - DNA, 570 bp, Arabidopsis thaliana landsberg
ctttctccgttataagttcattttctgattaaaatgctcctcaggttcaagctgctcctctgcttcaagctcttccgcggctacaagcacttgatcaaattccatgtcctttgtgctttccatgatcacatcaatctgggttagcatttagatgtcatgtgtatgattgaatataaaactagaacctcaacgagatcccgaagagtaaagtagtgcttccttgttatacgattcaaaaccaaaaactgttacactacaacaaatatcgacattgtcaacacgagagaaacgctatgaatagtgatacatagcgttttcatgaacgctatcttatgcccctgttatggtaggtgccttacatactatagcgttaaatacatatgctatgttagagagttctacaatagcagtatcgaaaagctttggtaataaggatttcttattttttaaaattatttaatcatccattatccatgctatgttaagcgctctgatattttcttggtgcttcaaattgcgctatattatagcatgttatagcgtttagttatttatttaaaactatttaaa

SEQ ID NO: 1521 - DNA, 540 bp, Arabidopsis thaliana landsberg
  unsure (1)..(540): unsure at all n locations
aattgccttccctggaagtcccgtaactttgggagcagaggttgatgctatattgtccttctaagtatctgactggtggaatgcaacgcctccacttttgcattcaagtcattgaagttgcagtccagcttgtggtgcaattcggataacttcttagcaatttccatggagctagatgctgagctgcaaacccagatggtgatggcagctggtagtttccctggaattgctgcttaggaacgaaaccttgattgtagggaacaaaaggtttgttctgaccttgttgttgctgtggaggatacacctgatcctgaggattagcaacgttggtgctgcggtaggagaggctgnggttgtttggtttgaagttgttataccctttgtagccactctggttgttgttgatgtagctgacttcttcaactggttaccctccccatcttggacttgatactgctcgtcatcaacagggaagtgcatatgcttctgctggctaagaagaatcctgtccagcttgtcattcagcgctttgatctcttc

SEQ ID NO: 1522 - DNA, 642 bp, Arabidopsis thaliana landsberg
  unsure (1)..(642): unsure at all n locations
gactgtccggaataccgtagattattccggacaggataagctttttggaaaaaacacctatgcgcggaccatccgggcccttgcggcggaccatccacgacactagggtgagcctcggacatgaactctgcaaaaacatacgtcaacactacggtccgtccaaaggagaagcgagcaccgtccgagatggtgacgggttcggtaaaatgcatttttagcgtcctcgcggaccgtctggggtgcacgaccggaccgtccgcgactgctttatctgacatctgacgacgcattaaatgcactatagccgttgatatagccgtnnnnnnnnnnnnnnnnnnnnnnnnnnattaatgtgcaggggcggaccgtctggaccaggagcgcggaccgtccgcggtcggcagaattgaagcaacgactaagaagtggttggaggctataaatacaaccccaaccacctccattcaaatcatccaagcattccaacttcctcattcaatactagagcaaaagaatagactccaaagacacaatcaaaggatcaaatccgtctcaagctccaaaatcaagtcaagtgatcaaatgtgcttagtgacttgagagaggatgatttgtgtttattttgttgctcttgttgcttgg

SEQ ID NO: 1523 - DNA, 548 bp, Arabidopsis thaliana landsberg
gaacgtgcatatctcccactggctctgaagatggcggtaattgaacttgaggttctgtttaacattctttagagacatcaactaactcagatccagcagtttcaacgtgactttgatccttatcctcaatattcttttgcacagctgaaatagacagtgagggctcaatatcagctaattggtgtaaagacacatcaggatttttgaattcttcagtatccatttgatcaaccaaaatggatggcccgggctggatatcagctaattggtgtaaagacacatcagcactctcggtaccaggttctttggatttttcagtatccatttgatcaaccaaaatggatggcccgggctggatatcagctaattggtgtaaagacacatcagcactctcggtaccaggttctttggatttttcagtatccatttgatcaaccaaaatggatggcccgggctggatatcagctaattggtgtaaagacacatcagcactctcggtaccaggttctttggattcttcaatatccatttgatcaaccaaattggat

SEQ ID NO: 1524 - DNA, 461 bp, Arabidopsis thaliana landsberg
  unsure (1)..(461): unsure at all n locations
ggaaatcaacaacaggaggttagagttttgggatttagaacttggatgttgatgaagaagcagaagggggagcgcctaccaagagttaactatacttctgagactgaggatcctacagaagatgactggtatgagatgagaaaaaaatttaaatggcaaannnnnnnnnnnnnnnnnnnnnnnnnnnnnnnnnnnnagctgaaagatcaactatggatgtttgaaaaaagagttaaaaattttcaaatggtattgatccatagaagatggaaactgcactagctatcaaggaggacgaaaatttcacaacataatggttttcaccagaagattagaaaggagttcacttagaggaaagaagcctagagagcaagtcgttgagtgaggaggaaactcctattccgattcattcttcaggagtgcctagacagcaaaccaacccctctgctgaagaagaacac

SEQ ID NO: 1525 - DNA, 653 bp, Arabidopsis thaliana landsberg
ggatagttttttttagagattagggagatagacacttttttgtttttttgtgagatagaggatatgtctaatagactaaaaaacaaaatacatatcaaatactaaaataccctttatcttgagagctaataaaaataatatgagagaccatttgtactttattttgtttgtctttattttttttatttttttattttagttttcttaaatatttttttaaataatatattctttttaaaaaacattacattaacttttagagtaattatatgtcatcaatctaatgcacaaacatttcaaacatagttttgtacactaaccattattcgttggtgtacaagtgtgtatactgatatttcataaatgatggtgtacatgatggtgtacataattaaagtatttttgatgatgtacaaaatgattgaaactattatgacgattgatggatagaatgatgtatacaacttttaaatgatagcatacaagattattagacaaagtgtacaaaacttggtgtacacttctaggaaatgtataaatcattatttcaattagtggtgtacattatctcgtacaccaatgttagtacactgtctcatagatctttaaagctgtacgatcatgtacaccatattttccatcatctctttaca

SEQ ID NO: 1526 - DNA, 1690 bp, Arabidopsis thaliana landsberg
  unsure (1)..(1690): unsure at all n locations
aaatgacatcgatagacaacactgatcaattcgcaatcgtatagtatcagtcttcaaggaataaaatcggagaaacgtaaccctaaccctatggagaaacaattctagtaattaacaaaatttggaggactttattatttaaaaagatgattatgatatttatttatttacttaatatttttgtttccagaaaataggatgaattaaaatctccttctcaaatgaaaattatccactgctcttgatccgaaacttctaataatcacctctccacgcatttgtcaagttagtttaatcctcatcatcatatatccactgctcttgatccgaaaattcatcctgtaaaatgaatcatatacacttttttatatacacggttcaagaatcaatatgaggaatcacatttaaaaaaaaaagtcatattggcacatgaagacgacccaaaccctcaaaacaatctctgatggtcttatccaataaatcatcatcatcaaagcattgatgtcatatcttatcaatgctagtatgcaactcatgcaaggagccttcttggacacccaagaattttagttaatttgttgccattaacacatattaaaaacaaatatatcaaaatatattttccacagtaattatttataatctaaagatttattttacgtataaagtagggtttttgatgacaaaaaaaaaagtataaagtagggttttagggccctgactggtttaaacgcagcgggtgcggttgcggttgcgggagtttgcgaaaacgggtggttgcggtttcaagcgttatcaagcgttttaaacgactggttgaacgtttgataatgggtgcgtttgcgggagttttatgactggtaaaccagcgggtgcgatagttattaaataaaaataacaaaaataaatataatatattactattaaatgaaataaaaaaatacaatatactataataaattgataatattagaaaaattgattttctgaccaaacaaaaatacaatatatcatctcgtccggccaaataattttttaattgagaaaacaaatcgaaaaatgtatacaatcaaaaaactcaaaagaatacaaaataaaatataaacaacgatgctatgaaatagttaaagaattacactagctaatgaatgaataaaaggatagatgatacttatgtttgattcttgattttgattttcatcggatgccataattgagacaatagaattacaatatattgattaaggttttctaataaaaataagatatataaaagattagattattttaattatagtaattagagtttgggtggaagccacaattatttaatttaattaaaaaatgattattttttttaacctaaccgctaccgctcgcaaccgcaaacgattgcggaaaagagtttttgaaaaacgggcgatttcgagcggtccaaaacgatatctagcgatttctatgattggtgtcaatcgctaacaagcgtttgcaggtggtaaagggagaatcaatcaagccctaagtctaatacattatttttaactntgagtgttttcgagcagcctctctattttcaattttccattttttgaatatccaggcgctacatgtatcggaaatgctcccattcgatcaaagccaatcgctttaacctttgaattctattgcacaaaccttcacaaactcatac

SEQ ID NO: 1527 - DNA, 2666 bp, Arabidopsis thaliana landsberg
  unsure (1)..(2666): unsure at all n locations
gctgccaagagaagttaatgaaggaaatggggaaggtcgtaatgttcaaagtgtgtcggagactcaacagacgttgaggatgattcagaccttgatgagtcatataattcaacaatagcaacacgaacaacatattcaggaaagcctgcgtgctaaatctccttcggccaagttcttaaagctggttatgatgatgaaggatttaggtgtccggaagtttaaaggagagcagaatactgctttagcggataagtggtggtgtataagcttgtatttaggtgcttataatacccttcggcgcttaatgtgtcatctcgacaccaaaaccatccctaacctttgatcaacatataagtctgtattttgcatgctttgagcatccatttgtcatcattttagcatcatatcatcactgttttatacaatttctcatcatttgtcatcaccttgcatgtttaggatagttttgcatgcatgttgcatatttgtgttgatttcaagtgatttggagcttttgacgagctaattggaagaagcgtacctgatcatgtcaagccactcgagnnnnnnnnnnnnnnnnnnnnnnnnnnnttcaacagaccactcgaccccttggtcgagtagaagacctcagcatttcacgtcaccactcgaccccctagttgagtaccgccaagagagtcactcgttcacatcactcgatcccctggtcgagtatcatcacctccaccacctgaccatcactcgatctctgtactcgaccccgaggacgagtgtcttcaccttcaccacctcaccttcactcgatcacatcactctaccagcaagtcgagtaccatcatcatccaccactcgactacatactcgatgtcgagctttagagtcttctccattccgcactcaaccagacactcgagcacaagaaagaaaagaagactttggcttatcactcgaccactcgctcgaccacctgggtcgagtacagttcttaacccgtcccaatattgtgtcgtttgaagtattagggtttcagaatattttgctataagtagcatgtactttacattaccgagaagaagtttttatctagttttattccatagacactgtgttctagaccttttataatccggatttctctttatctattaagtatttagtattcagtatttgttcttgattttcgtttactaagttgttcaccatgttatcatcttgctattactctgttgctatcatgttttcattctcttcatcgtttatgttctctgcaatgatgtctgagtagtgactaggtttctgaggatgggttaaagtagtttagaattctcagtatgctaggtggttgagtttgatttgtagatccttctggattagttgttcttaatgcttattgctttttgatcaagtggaatttgtgcctagacatttccgcgcccaaaaggtgttcgacaaaatgtctgaacccctaattctagagatcgtggttctgtaccaaggtattggttacagggagcgttttggctttaacttgttgattcgtaatgcatgttaggttagctctcgtcaatggtgattgagtctgggcctggtttaacttgagggtctctgaaacggagcacttagatttggttatcgaactagttgtctagggatagtttattgagcatgtcaatcacctatagattgaggaaatttagctgataagtgtgtattttgcttgttttcagcattcatttgtcatcattttagcatcatatcatcactgttttataccatttcacatcatttgtcatcactttgcatgttcaggatagttttgcatgcatgttgcatatttgtgttgttttcaggtgatttggagctgtcgacgagctaactggaagaagtggacctgatcatgacaaaccactcatcctagaggtcgagtttgagcttcaagatctcaagagaccactcgactggctaggggagtagaagacaccaccactctatcacatcactcgacccccaggtcgagtgtcttcatttccatctcttgacaaccactcgatcacatcactcgacccccaggtttagtgacttcatctccatcttctgaccatcactcgatcacatcactcgacccccaggtcgagtgacttcatcccattgccagacctctactcgacctcatcactctacctggaagtcgagtatcaccatcacaccactcgactgcatactcgatgacaagcttcagagccttcttcattccgcattcactcgacctcccattcgaccacatgggtcgagtacagttcttaatccgtctcaatacttcatcgttttgagtattagggtttcagaatatttggctataagtagcatgtacttcacattttcgccgagaataggtttttattctagttttaattccgcagacctggtgttctagacttttgtaatccggatttctctttatctattcagtattcagctttggttctagatttcgttgattgttgttcattctgttatcattctactgttacactgttgttatcatgttttcaacttgttcaacgtttatgctttctgttatgatatctgagtagtaaataaatttctgaggatgggttagagtagtgtagaattctcagtatgctaggtgagtgagtaacgat

SEQ ID NO: 1528 - DNA, 2806 bp, Arabidopsis thaliana landsberg
ctatcactcggcgggtggcaatggttatagttctttattcagttgagctagttcaagcattcatacaagaatttgcaaagaatgaaatacctatggtcaagtactaggtggcgttccggacatacaagcattaagattaaactcaaatagaaagaatagtgtaatcgatcaaacaaaaccatagaggcggccaacctagactttcgatctattagtccccatgaattcccctttgaaaccccctcaaacccaactagagatctactcgctcatggcaaaggagtgataaggttcaaattaccctagaactactctctcaaataaaagatcaattgcagtattttagaatcgaattcacaaagttcttttgttcaaacaatgagttgaatgtcgagattaagctagcaaatgatgattgaaatagtaagaaaacaaagtaagaaaacagcaggttgattgtgttgtaaacgattaggacaagagctaggaacagggtattctcaagaaactattggttagtagatctaatgaaagataaggttgttatcgaaccattcttaaactcaaactctaattatagaataaccgatgggtgtgccgcgaaactccctatatgtatagctaataataaccagagaagccgagaaactatcaaccttaatatgcattctcaacgagttcaattgttcatcttagtaaataggccgattcttattacacacttataaacataactcatcaaataatagatctaactatagatacctatggctggaatatctattgtctggattcaagatctagttaattactctagatctagcattaagcataattaaagatgaagaattctatagataacctagcaaaggacaatctactaaaccatatgaatccctaatgagaaactctattcctaacaaacagactactcagacatattggatgaaacaaacaacatgattaagtgtgaaagcataaacacagtaaatagagaaggggaaagaagggatctcttcattgtattaaaaattggaatgaatctctcaagaacaatggatgaatagcttatgtctctcacaatagagtttgcaaagaacttgataaaagacttgataaaagaaacttaagtctaaaaacaatatgtatagaccctaaaaacgtccagtgacgaataatgcatatagggaagtcttctggggcaaacttgagattctgtaaactcgaaagcgtctagggtttttgctgggcctaaactggtgtcgatcaacaccaacagtgtgtcgatcgacactcctcgctgattcctgaaccaaaattatccttagcttgcttttccttagcttttgctccaaatgtctccttatctccattgttgccccattgcatagaatacctgaataaacataaaaaacacttgaaaaataacataaagactcaaaatcttatacctaaaacatagataaaatcagtgataatagggatatatcagctatcaacatccaacaagaagatgagtctccaacaagttatcagactcccaatattgaggacaatatggttcaagaaagaaggaaaggatcccctgatcctaggcagactattcttagcctcagctagagcaatcatagatgttaggaatggaaaaattgatctaaaccttgaaaaaggtatcaagatgaaatttgacatcagcaaagcttcaaggaaatcaacattagaaggtcaaaatttcgggattcaggacatggatgttgatgtagaaacagaagctgaaaacccaccaagatttaactatacttctcaacttagcaagctgaagagaacttttgaccactagaagagagcaacagcatggttagcttagactgaagaacctagagaagatgactggtatgagatgagaaaaaaatttaaatggcaaagcagagtcatagaggggttatcttcaagagtgatgaagcttaaaggtcaactttggattattgaaaaaagagttaataattattcaatgggtattgatcgagagaagatggaaactgctctagctatcaatgaggaaaatgagtttgcaacagaatggtttgcatgagaatatcagaaaggagttcatttagaggaaagtatctcagagagtaagttgttgagtgaggaggaaatccttattccggcttattctccacgagtgcctaaacagcccaccaacccctctagtgaagaagaacacttgatttttgattctgttgctgaagaactcttggagctctagattggatatcaagctcaggaggatgcaattgtaaatttaactcataagatggaaaagttaaacagcaccattctggaacttcaagaaatgattaaaggctaccccagttttgaaattaaggattggtcaaaggaacctggttcagaagatgaagactactttgctgatcaaaaagaagcttattttgaagaaaaatcaaatgattactcatcctaccatatgtcaagggagaatgcagagaatgattcaggcactgaaaattcaaccactgaagatgaggacttctatgttcctctctttaactttttttctgactaagctctgtaagagtcaagcttaatgacttaaaacaagctcacttgggaagaaatcccatgtctatccatgtatataactttctatctttctagttatttttgatgtttttgtttaattgtttcaggtttatttcattaaccctgaggaaaacaacgatcgagtaaattcaaaccaagtcaagaaagatctcaactgttgatcgagtagaatgaggaaaag

SEQ ID NO: 1529 - DNA, 613 bp, Arabidopsis thaliana landsberg
gtatatgattcattttcgaggtggatcctatgagtacataaagtacgtgaaattcctttaatatcagctaatgaatacccaattgcttttctatactttctaagctcatttaacaattgatgcacttgttcatcacttaatccattgttgataatgacagggtaggtatcatttggaccaagaaacgcgtaccttggaccttttggaagaggcttacggtcaacctttggagccttggttaaagcacttgccaagtaatctttctccgtaagctcttccagtaatacgtcgaccaatctatccaattctttgatccaaacgacttgtccattaattattggtttcttcatagctttgttgatattgaaggtcatcttcatctcctttccgaggtttaggttcgatctttccctgtgtgacatcgataatagctcctgcagttgccagtaatcgtcttcttatgtttaatgggtccttcggctcctcatccatctccagtattatgaaaagtgtggggatctctattgatccgactttgacacgtaggtcttgcaggactacatggtggattctgactaatctatcggctaatatcagttggatgctgcatgac

SEQ ID NO: 1530 - DNA, 4170 bp, Arabidopsis thaliana landsberg
ggattcacttaaggaaggaacgattcccagccgaaagacgtagcaaattgatgccgagaatcgactttccgttcaccattacaaaaaggatcaatgataactcttatcaaattgatgttcgaggtaagtataatataagttggagcttaaatgtttctgatttatctccttttcttgtagatgaaacggatttgggggcaaatctttttcaagagggagggcatgatatgaccatcgccggacaagacttggaacttgaaccaatggagcagcttgtagctgataacactgtattttactcattttaggcatgtgtttatcatcatttaccttagtgatcactcattttttcatattattttgcatcacatttagcttattttgcacacttaggcattaaggatcatcttgcatacatattgcatgttttggtgtgttttaaggtgcagaaggagcttacaaggaatctactcgaccctctactctatcaaaccagcagcagcagagcattctgctcgaccagtttactcgatccagacagctacagaggaggcattagattctactagactagttcactcgatccaggcagctacagaggaggcagcaatatactcgatcagtgcactcgatccacgcagccacagaggaagcagtagatcggtctactcgcccctcctacttgatcctgtactcgacaagttactcgatcaaggaaaacctattctacaagacttgtgaatcgttcaaagcgtcttcttattctcctcattccccactcaaccagacatttgagcatataaattggagatgaagaagcaactacgcttacatacgaacactgctatcttgtttatagcagaacgcactataaggtcatttctaatctcaatccccaagatctagcattcatctaaaccgcttcaagtctcttgtcttctagtgaatctagggtttttgagattttcgtatatataggtcactttgggatttgtccaaaggaccaagcttttatctcttagtttttctttgtgttcttgaatcttaaaaaccttaattactcttaatctatttcgtttttgcatttagttctttgaacaaagttgtttagcttgtttagatctacattgtgacatgatttcagtaatttctgggtttgtgttcttacttatgttgcttgagtagtgattagggttcttgaggatgaattagattagggtaatctctcggttagtcaggtggttaagattaggttagatcccttctagattcgttggcccctatgcggttttcgctggctaatgtggaaattcgaccataggtatccagcatccaaaagatgttcaaatggatgcctgatctacgaattcgagagatttgtagactctagcccaagagattggatagactgcttattgactttggtagattattgcttaaaccttgttcagctatgtttcatcaacgagagttgagattaagaagtggtagagttgtgggggtctctgtcacaagagtggattgacctggtttttgaatctatcgtctagggtatctgcctttcgcctgttagccacctgatgaaccctagagttgcccttatcaatgaatccatccctagaacttctattattcttagatttatttgtattcactccttgattgcacttttatttacctgttatttgtgtcacctgttgattgcaatttagttcttaatattgtcactgattggttctactcgacccaatgatcgagtagggctcttaagttctcatttttacctgtatgaatcctgacctaggattgttgctagaaacccactatcagtataatctggcttgacttaggtgcttctgtacacatcttgattgctagcaataacagtggactggattgacaccccctatagctgcatcggcatttttgtgttttaggagaattgaactcaacctcacacattcagcacataagtaggcctaaaaaacctacttatcaatttggcgcgattgcgaattcattgttgcattgtttcattcaagatatcagaaaaagttaaaatcaagttcttttacaattataaagttactaactcatatttttgtctgcttgtttttgtggtataggtactaatctttgtgcatgcaaactcgattccaaaggttctgcacacctactaccattcacagacagaatcgatagaatacctcgtgagttacaagaaaccaaagcaaaggcagcctgtgatcagcaaagaccagctgctatggatcaatagaacaaaccagttgatgttcaagacccacctaatgttgatcaaccaagaaacattggcgcaggtgatgccccaaggaatcatcaccaaagacaagggatagtgcttccattagttcagaacaacaactttgagatcaagagtggtctcatctccatgaaccaaggaaacaagtttcatggcttacctatggaagaccccctggaccatcttgacagctttgatagactctgtggcgttaccaagatcaacgtgatctcaggcttcacacagaaaaacaatgaaagtttctgtgaagcttgggagaggtttaaaagctacaccactcagtgccccattacgatttcaagaaagcttcattattgagcacactctatagaggagctttaccaaagatcagaatgctgcttgataccgcctccaatggaaatttccggaacaaagatgtagcagaaggctgggagttggtcaaaaatctagcacaatctgatgggtgctacaatgaagactatgatcgctcaatgagaggaactggaggaactgaggataaacagagcaaggatatcaaggctctgaatgaaaagttagacaagctgttgttggctcagtagaagcagatatactacatcactaatgaagagcacttccaaatgcaagaaggggggaatgatcaaactgaagagctttgctacattcagaactaaggagggttcaacaagggctacaacaactacaagcccaacccgaacctctcctacagaagcactaatgtagctaacccccaagatcaagtgtatccacctcaacagaatcagtccaagcctttttgatatgtctataatttacatgttttcagtgttcattcatcatcattttgagtctagtttcatatcactcatcattgttttatatcatttctcatcattcttgcacactttgcatgattagaatagctttgcatacatattgcattcctgagttgttttcaggtgatttggagctgttgacgagcaaagtggaagaagagagccggaatcagaggacatactcgacttccaggccatgtacatcgagcaccatactcgaccccctggtcgagtaactttggagccattcttcccatctactcgaccccgtggtcgagtaacctcagctcaggccactcgatgacgccactcgacccccaggtcgagtatcacttcgccatccacctgaccacactcgaccgtccactctaccatattactcgacccccaggtcgagtatcatcactcaccaccagtaccatcactcgaccaagcactcgatcacatctttggagtctactcaaatccacactcaaccagacaagctgagcacaaggaagagaagaggagaagaagaagtgtttggaagcagcctggagctccattagatcacgacgcccatctcggtccattatcactctatgggccgggcgattaggttactagcccgtctactatcattttattttgttttgtataaataggtgtccgagggttttgtcctggtacatctagtcgacattgagtttttgcttcagttttattttctgttttactctggctgcgccgcttttgcttctgcaacctgtaattcgagatttttccaagttattcagattccgcatttgatttcatctatcatcttgtttctctactctttatctctttgcttatgcaatatcatcatttatctgcgtttatgtctttgagcatgttgtttgagtagtgacatagagttcttaaggatgggatagaatagttgtggaatccttagtctgtagaatggttaagttttagaattgattgaatcccttcacgactagttgtgtttactgcctatttctttctaatcaactgaaattccatcta

SEQ ID NO: 1531 - DNA, 544 bp, Arabidopsis thaliana landsberg
tttgattttatgggagataattttatcgactttgtcattgtggtacccacaaatttactattgtttttcgcttatcttcgctgcattaatgagtatagctcttccaaaaataagatactttaatatgtatatgaatttctgtttcacaatttcttacggagagctatcactctccctatttttttgcaaacactcgttttatctgtttcattctttcttacggcatctctttccatcctcttatgattttgtctaagcaatatgtgccataccttctaaacttttcagatgctccatattttttcttcgaaaatctcttccttctcttgttagtataagtatttttcaagctcgtcaagatgtactctgtcttgttttctgttattctaagaaaatgttttagcttctaaattggtatttaactatatcacttctctcttttgatgcagtttagatcctcttcaccttcgcgcttcccagactgaaagacctcaacttatatctttgagaacttgattcaaattgataccatcaaaaacactgt

SEQ ID NO: 1532 - DNA, 1202 bp, Arabidopsis thaliana landsberg
ttttgcccccgaggccgaactgggtgtcagtccaggcatccaggaagtctgccaagacctgggattttatggccttccgaggagcgaatgatagcgtcttgcccatgagttccaccgcccactttgctatcctacccgaggcctcacgacactagatgatctcccccagggggaaggatgacaccatagtcaccggatgagactcgaagtagtatcgcaactttcgtcgtgtcagaatcactgcgtagagcagcttcttcttcatgccccgctgggcggatgcctcgggagcatctttcttcgattctttctgaggctgcttgtcctttcggaagatggcttcgaccgcctcctgacacaaggcgaacttggtggcgatgtccatcagcttgctcgcatgagtgggggtcttgcgacccagctggctcaccaggtcgcggtaggtggtgccggcgaggaacgcgccgatgacatccgaatcggtgacgttgggcagctcggtgcgctgcttcgagaatcgccggatgtagtcccggagagactctcctggctgctggcggcagcttcggagatcccaggagtttccagggcgcacgtacgtgccctggaaattgtcggcaaaggcttggaccaggtcgtcccaattggagatctgtcccggaggcagatgctctagccaggcccgagcggtattggagaggaacaggggaaggttgcggatgatgagattgtcgtcgtccgttcctcccagctggcatgccagccggtagtccgcgagccacaactccagccttgtttcccccgagtacttggtgatggtagtcggggttcggaaccgagtcgggaacggtgcccgtcgtatggcccggctaaagacctgcagacctggtggttcgggcaaggggctccgatcctcctcactgtagtagcgtcctccgcgcgtggggtggtagcctcggcgcaccttctccttgaggcgggctagacggttgcggcggtgttgctcgtcgcctaggcgatcccgggcggcaggtgtcctgtatcctgtgtgctcggtgtggacagaggcatcgcacatgagtagggaggaggataagtgatgctccaaggggcctcctcgaatttgggaggcagagctctgggctggtcggacagcggtcaatttccacaaaggtccattgagttcgccctagatatgtaaa

SEQ ID NO: 1533 - DNA, 922 bp, Arabidopsis thaliana landsberg
ctccgagatgatttgttgtttaaaatagagtttttccattttagtttcgcaactcacattctcaacatcatgggtcagggtgggtttaacgggattggtgatacattacaaaatattagagagagtatcaagtacgttaaaggataagaacattggtattgatctgaaagctggtttattgttggatgtggcaactaggtggaattcaacattcaagatgcttgatagggctctgaagtatcgagctgcatttggtaatctcaaagtcattgatgccaaaactacaaatttcatcctacagatgctgaatggcatcgactacagcaaatgagtgactttttagagccgtttgatcaaataaccaatcttatatcaggttcgacatatccaactttgaatttgtattttatgcaagtttggaagatccaaaactggttaacagtgaatgaatctagccaagatgaagttatcagaaacatgatggtcctaatgaaagagaggtttgataagtattgggcagaagtaagtgatatctttgcaatcgctacggtatttgatccgaggttgaagctaacacttgcagaatattgttttgcaaaactagatatcagtactcgtgagaaaagaatgaaacatttgcgtgctcaactacgtaaactttttgaagtttatgagaacaagtccagtgcggtatcacctacaactgagtctcgtgaagatgttacacatgatgatgaaactgcaaaagggaattttagcaattacgatgtaagtttcttatgttttgttttgtttaagattgttattagtaaaattgcagttttttgttagttaatatgcagtttttttatgaaaaacagcaagtcattagtttttatgttatgttattttgatttcttatctttgttataggatttctttg

SEQ ID NO: 1534 - DNA, 628 bp, Arabidopsis thaliana landsberg
  unsure (1)..(628): unsure at all n locations
ttttattagtgaggtgacgaggatctgaagaaggagcctggtacctagaatctcaagtcctaggcaagttgtacccttgatcactttttattaatcgtaaagatctatataggttaattttgatgggacctaataggttaccccagtttgactatctttataccttgattaccactgaactttttgggtagtacttgctattgctttatgtggttttgagtatcgagatacattattcatgagcacacttttattatcagcttgtatttactgttcatgataagatcattatgttaattggaacgtggagcgaccacctgtgaaaacgtcgctaccagaagggtggaatgggacgcccttggctgactaattaagaaagctagtggaggtctaccttacccgaaaggggcaagggcagtatgggagttggcggtgtagggaggtactcagcttgattttgctacgatggcgggcagacgggggattcttgcatttgcgcttcctagaaactgtagcgggttttctgaagctagaggaactttttgaaggtctcgnagggaaaccctacctcatctcctcgatagagatgaatgggacttttaaaccccttggcacctggagacatgac

SEQ ID NO: 1535 - DNA, 5522 bp, Arabidopsis thaliana landsberg
  unsure (1)..(5522): unsure at all n locations
ttctttgtgagactctcaaaatctcaatccaagaaattcatagttgttctctttgggatttgtttttcttgttcttgtcttttaagttgtgataaagagagttttccttagatactgcagcatggacagtgaagcacaacagatctctttacttattggaaaagaagatagatacggccgtgttgaagtaaacctgatggaagctgaacccatgaatgctgaagattttaatgcaaagcttgacgtttcatttaaggcatggaaggatcaggtcttaaagatttaatcctttgcaatgttcctttgatatggttttctttgagcatgagtttctagtgtcagtgaatgacttttgtggacatggacttccaggggaaaaaaggaatttggataaagcttccttgtgagctttcgagtcttgttgacattgcaatgaaggtaattaagaagatgttatgtttgtgatttggtagttttgttttttgattgattcttgttcagctttagtgatcgaatcggattctattttggtgattttacagaaagggtttacgtaccaccatgccgagaatgaatatgcggtgcttacttcttggatctccgacttgcctaacactattcctgccaatgcttctcatcgtattggcatcggtgctcttgtcctaaacaagaacagagaggtaacaatacattactactacttcatatttctcctggcttagctgtttggtgtatcagtattgattttcactacgttatgtttatatattgctgagtcttgctttattctctggtacaacaagacctgaaccatacgttagattgaaccttgatgaacaaatttccatttgcaggtgcttgttgttcaggagatcgatggtgttttcaaagataccggactgtggaaggtgcctaccggtgttattaaagaggtgagtttgttggatcgtgtcacatttttgtatatgatctttatctttaaagccctaaagtaatatttacaatcacaagaagagttaattataagaatcaatgaaccaaattttgtataagttaagagccaagggttgaccagataatcaaagaaaccaatgtgttaatacttgtcccagctaactccctatatctacaatacttgtctacaaatatgttagtaaactctgaatattgtcgattaggtcattgctatttcctgtagtatacaagttaatggatgctaaacttcacagagatttggctatttgagcatgtcagcttgataaagagatatagtcacacattgattccaataatgaggcttgatggtatcaactacaagttattacttattagcacttaacaactactacaagagtccttgatttggatatgtttttgcacttccctttgatatcttggctaactgaatatatcaaatccacagggtgaaagtatctgggctggagcagttagggaagtgaaagaagagactgatgtacgtatccgatttcaaacaccgacaaacatttatatctcttgggttttatattgatactgtaatctcaactccgtgttttctttttgtcttttgctccagattgatgcagagtttgtagaagtcttgtctttcatgtaacaaaacatctcttcatcctttctttataagttacccattgatcgatttcatcttgacatcatatggttggtgtctcgcagggaaagtcccctagcagtctggcaaagaaaaacggatatatttttcgtctgcgagttggaagcaagaacttttgaaatccagaaacaagattctgagatccatgctgctaaggtaaaacatgttacatatcttgtgatgaatctcaattagtttactgaagatcttttaccagcctagctctcttgttgtgggtttctcagtggatgccggttgaggaatacgtaaaccaactttttattccagaacagagagaacttcaggttcatggcgaacatctgcttgaagagattgcaggagatggaatacatgggtttctccaaagtccttactacgacttcatctggtaaggagagctatctttactgcaacaccgatcacgccaacctcctcaacgcaacgcgtggcctagcctccacctctggttgaaaaacccttcttcagaacgtgtttatgtttcgttgtttcatgtccattgttcaataaaagcaccagtctcgtgtgtacaacgattggagacttctttatgtaatttaccatcatttcctcactacaacttcatatataatatatttctttggctaccaaaaagaggtatcctttttattctagtttcaataagagtgtgaacccatagatgctgagacatttgccaaaactctgagtgattcacttaaggcatggaaggatcaggtattaacagaacaccttagattcaaagccttccaatgtttctttaatgtggtcgtgtttgaatgtcaagtttgatcctaaatgagaatctcaagctagctgttctggagtcaaaggttattggttttggttttctccattggtttctagttccagtgactgactttgggacatggatttgcagggaaaaaggggaattcggataaagcttcctctcaagctttcaaatcttgttgacactgtaatggccgttttatacctcaacaaaaagttgacttctaatttaacctataagttatcgttgatccagccaaatcgactcaccgttaacacttcttaacagcgcccattatataaaggggaatggttgttgatgaatgtatagctctctatgtgattatcctttattattacttcaagacatcattctaggttctacatatcttatttgttacattgattggtaacaaaactataacaaaaattataccactaacctcatatatataatgaaataataacacttgtaaaattggagagagtcgcgcgagtgagatctacgcgctggcgatttctctctcaactcttcttcttctgatcacaaactcttgctctgtcgatgtgtttcttcgttgattccggcgatgaagagaccccgtggttcatggcgcttcaattgtgatccgctacatattctcggcaaatcaatccattcaaaataaagagagtagcgaaggggagaagattccacgagacaccgctggtaagagctatattggcggtgtagcttcgcggagaggaagggtaagactttacggtgaagaaaaagggttgacgggagttagattggaagactagagattcaggaggtttcattggatcgctgcttggctaaggaggtcgactccggtccggtgaggctataccaccgtcgatggtcctcagatctactccctactggcatcaactctcggattgcttcttcctcctcaaaactgctttacggtggcgggatggcaacgatcttggatcaccatcttcgttcggcgcgcgtcgtccaggctcaccggaggttttctgttccggcgagattgtgcaattcttggatggcggctcagatcgtgttttacgatctgagattagggtttcaagattccggtgtagattggtttggtaaaacctagtcggttttgtaatagatggtttagactggttaaatgtaagtggattgggcctaaagaaaaaatgtatgggcctaaatccggaaatagcccattggcgcttatttataacattgaataccctttaacaaaaaaaaccttgtatatatgaaagttggctaatactctccatatgagtgacacatcatcacacaagaaaatgacaagtgtaattctacattaattaaattaaaaaactagcaaaactaattgagaaaaaaacaaaagtcttttgttgtgttaaattctccattaatctcactcttaaatgaattttctaaaaacattcaataaataaaaattataataatgtaccaagcacaactttcattctattctatttatttaattttaaaaaatttcatctaggtggtcgctaaataatcgcagaggagtctctacgatactcgttattcatgtgattcaatcgtaactcagtcgtcatattttacgagtacaatatgactaatgttatgacagcgggtattagtcgtatcgtagtcgtcatttagcgattaaagttacgactattttgtttagcgactctggattaacgactaaggctattactcgtaatatagtcgtaacttctactttaacgactatattgctactaatgttgtagtttgaaaacccgtgttttcttgtagtagagcgggtgattatctagtatttcattaaaaatgaaaacaatttaggttacaatagaaaaattataaacctgtacaatggttacatggcaaaaggtaaaaagcatttaagcataatactataataatttagagaatatatttatttggaattggagttttggactttctataataataaaaaataatataaacaagtattgtatatttttttagaaaaactttttttttttctcttttctcatggcttatagttgatcttacatacagtaattgctacttgattttatccttttttctttaaaattcaatttaaatatatttatgtttacctaatacttgaatttatctaaatttgaatatatttatctaagttcacaatatcaattggagtttccgactttctataatagaaaaatcttttgccaacaatagtaatacaaaaagaaatatgttataacttaaaactaaaaatttatttgagtagacaatatgttataacttaaaactaataacaaatgaaatcttgcgccaacaatagtaatactgatgtgtgtgtatatatagataccataagaacaaaaaacaaattaataaaaccaaaaatcaaatcatctaccaaaaagtaaaaaaaaaatgaaacaattgttagtctttctatttgtttttagcatttgcatgctagaccatgtatcaggcggcggaatcaggatctcgaacgaactcaaaaacaagaaacttctttggatgcggtgttattccaaagatgacgtattaggtccaaagataataccaatcggacaacattatgaaaatctttttgatattaacttttggcatacaacgcgttttatgtgtactttgagacaaggtcctaactttagacactatcagaactttacagcattcaagcttttcgctatggcagatgaaggaggtctatgggattggagagcaagagaaaatgggatctatttaaagaaagaagctggcgagaaagttttaaacccaatttggatgcataaagagtatgcttggatttattaaaattattgacaaactatctaaaaataaaaaagaagagttttcttatgatttaaaaacaaaagaaattatacatgtatgagaaaaaatcttctcaaattatattatgatttaaacgtaagaaaaatatatatattgataaatttgtatcttgatctcaagtattatcatttggcaaaganaaacataaaaattgtcaattggtgatgagccttggataga

SEQ ID NO: 1536 - DNA, 1075 bp, Arabidopsis thaliana landsberg
attgatcttctaacaaagattcaatacttaggtttttaagatccggttatggttctagttgtcatactcactcatacacatgacatctagtaatatttgactccaaaacactaaccaagcttcttcttgcttctcaaggctttgatggtatagctaaagtccatatgaggctttgcctttgtatcttataacaaggaaacactacttaggcttttaagatccggttgcggttgaatttcttatactcaatcatacacatcacatcaagtcatattcgactctgataagtgtgtattttgcatgttttgagaatccatttgtcatcactttaacatcatatcatcactgttttataccatttctcatcatttgtcatcactttacatgtttaggataggtttgcatgcatgttgcatatttgtgttgatttcaggtgatttggagctgttgacgagctaactggaagaagcggacctgatcatgacaaaccactcgacccaaaggtcgggtaggagcttcaagatctcaagagatcactcgacccccaggtcgagtagatggcatcaccacttcacctcaccactcgaccacgaggtcgagcgtcttcatctccatcacctgaccatcactcgatcacatcactcgaccctgaggtcgagtgtcttcagcaccattacctgatcatcactcaaccatatcactctacctggaagtcgagtatcaccttcaccaccactcgactacaccctcgatagcaagcttcagagtcttcttcattccgcactcaaccagacactcgagcacaaggaagaaaagaagactccagctattcactcgacctcccactcgaccacctgggtcgagtacagttcttaatccgtcccaataaagtattagggtttcagaatatttggctataagtagcatgtacttcatattttcgcaaacaagtttttatctagttttattccgcagaccttgtgttctagaccttttgtaatccggatttctctttatctattcagtattcagtattcagtttctgttcttgatttcgtttactgttgttcattct

SEQ ID NO: 1537 - DNA, 654 bp, Arabidopsis thaliana landsberg
gagctaaaaagttacctgttagtattgtaatatcagaagtaattataaaaaaagaccaaaaaaaaactcttacacattgtatccacaattaaaaaaaaaatgtattgttttgttagtatggagtgtaacacaaattatatataaaatatatattcgatcagtatgtcatgtttatttaggaacaaaatttacctcatttagaattaataattgtattactttattcaagttattagcggaagaatggacgctccagagccttagagcacccttaatgggggtttctaaaaaagttttttaataaataataaaaaatatatatgatttaaatattacatgaatctcttaaatttgatgaaatataggccaattgaaaatattatttatttatacttacactttattttattttaagagacttatgcttagaaattaccattaaggatgctcttaaagtatgaatgtttaaaaacttacaacccatcatgtggtattaaaaatgaagtaaataattcacaataaattaaattcgcacgattataacttaactaacctcattataatctagacgtttaaaaaacccttcaaaaattcccaatcagaataacgtatttacccattctaaacaatatattcatttaagaaaataaatac

SEQ ID NO: 1538 - DNA, 325 bp, Arabidopsis thaliana landsberg
gtttccgagacagacaaaaagaacagagtaaggtttggtttcgctgctctgcgtcggaggagtcgtcgccattgaagatgatgcaaagcacctaagcgaatgagaaattctgggttttgctcggatgatagaaacgagattcgggtttttatcagatgatcggaaatgagaaggaagaaattgtctagtgtagtggcaaaatggtaaatatgaagggattgttagagaagccgtgagcttgggacagtacatcattcccctgaaaagttggagattttgggatatacgagttttctttcttctgctctttcacaaccttttccgt

SEQ ID NO: 1539 - DNA, 1390 bp, Arabidopsis thaliana landsberg
ttttcagttttcactcggctctgtaaagatggaaatgtcataaggataattgaattcaaatagaagtactaattgaattcaaatagaagtaaagtagacgagactatccagttctagacttgattttttacctttgaaaacttgagtgtcctcttgcaaaccagcggtagaacaaaaccctccataccacataagaaagaaaggtgaaccatttgtaacagattctccatatccgacgtttctttaagaatcatcagccactgaattttaacacgacatgcagtatgttaaagcacttacaagtaaataaggtagctagtgactcgagatgataccttgtagaaagaaaacaatcttctccatctttctccattacaagtgcaaaatgataaagatttgtcttcaattagtgtctcctccgtccagaaagtgaatagattaacatcctaccaaaaacaatccagagaaaaatcaaatttgaaccggaaatgttaataggaatgatattgaatctaaagttctacatataatatgatcaaatgaacgtatccaataaggaaaaagggcactaaatatcaaaaccaggaaaaagggatgcagagaagcggaactcatctctttgataatcttctcttagagtagagagatcacagatgattagaccttccaaattaacaaaaccacaaaaatttcaaaataacttctgactttgggaattcaatttaccaaaagaaaactcgaatcacaaagagcgaagagaaaccgtcttcttcttcttctttcaggcgaagagacttaaacgatctgttacatcaaaaaaaaaagtaatccaaaagaatcagaacaagaacaagagcaatatgtagaccaaaaacagagccacaaaacccactttgttacgattaccagccacgaccaccgcttcctccgtaacttcatccctcacggctctccaccgccctccgtatctaccgccatcctccaccgtcggtgatgctacgaccatccaaacaaaatcccctcaatcgtaaagtctcgcgatcgttaatgatctttcaaaacctaattaaaagtttttaaaaaaaaaatcacaaatcagaagtatccatcagatgaaatacaaaatcaatcaacctctggactcataaaagcagatggattaacgtcacgattcggaaaaacgaagtaacagagagacatcgtaatagtactcgaatcaaattaatagaaagaaacacaaaattagaaacaaaaccatcttaattagggaatcgattgtctgatcgtcgaatagtcgccggagaaaacaatcgtcggtgatcataaacttcttcagatgtttgcccaaaataaaaatttagggattcgaaataacgagagaaatcagaga

SEQ ID NO: 1540 - DNA, 592 bp, Arabidopsis thaliana landsberg
ctttcacttgcatttccttggatgcataaatgattgggcatgtatggagaatatatgtctatagctagtggtgcatctttctcctactgacatttataacttgtttttgaataaactataagctcaatcatttcattattttctcaccacttcatttcgtgttgagactcggatatgtttcgtttatctagcgaggagacaagaactcataattaccaatatgattgacactataagctacactttccactgacattccttgtatgcccaaacgattagacatgtagatgaattcttttattatatgtagtgcttagtcttactcattctaacactaataaataccttttcattaatatataaaaccaaacatatatctcgattcattcaccatttcaagatttgacaaaaagaggttctttcacactaataattactttgcttccaaaggcccaagcggactgccactaatttgcctcaccgataagttggtgcttttgagagtacacaatcttgataaatcatttacccctgaccgaaataaattaaattatctacaaaaactagacatttcaagctcaattttcattta

SEQ ID NO: 1541 - DNA, 623 bp, Arabidopsis thaliana landsberg
agcttggactgaagtaacctcggccatcctcctggcaaaatacataggatggcaatatcgcatcgtttccaagtttgcccagtctccaagtgattcatcagagtctgagacatagttatcctcgtcatctccatcttctagaacagcaacccattcctggagtcaagaacacagtatattgtgaagcatgctaagcataagacaggttttttccatgtgaagttcctcaataagaccacgaaagcttttcaaacctcgtcatctttgtcttctccttcatcctcatcgcccttgttttcatcctcaacttcactttcaccatcttcgatttcttcaatcccaaaaccaataccagatggactgctcagctccatgtccttgatcatctccatcgtatcaaaacctactattacttgctgcattgcaaatgtcacttatcacagttatatctccatacaagtgaatatagaaaagaacaaaagcaactgtaaagaaaacaccatgcagcagaatcatttaaactaaagaaaaacatatagacatatacacaaggatataaaataaagcagtggcaccaacctatatgactactattggagcatgcttatgcacgtttagattca

SEQ ID NO: 1542 - DNA, 1014 bp, Arabidopsis thaliana landsberg
  unsure (1)..(1014): unsure at all n locations
tggctctcagatcgacggttatgtggggctggagtctattacggtacctcgagctacgaggattatgctttttatgcactattcatgtctacaaagcatttaagaccattgcattcatgtctgatatacgtactagattcacatgatcatttacacatctgaagaatcaaaactttcttggttttgccaccttttaaacacttgacaatgatcactaatcaagtgctgcttaaactccgttgtttctgcgttttggtttggttagtttgtgaacaaagctgcaaaaacaaatcattggggtgtttagagtgctatcatcatcattgataatagttgtattaagtaaaaaaagttgtttctaatattacagaatttatcaattcatcgccacacaagcttcatggagttgcagatcatgtactcaacctttgctgtgtttatgacatttcaactccatatacaccctcctgattttagcctgttggattgctagcacctcatatctggcaaaatactttctatataccaaatactcaaacaaaattttggcataaaaagtacttactttgctgcaagctccctcacaagctccctcacaagctagaaatatatgctccaaaactgatgttcgtttaaaatttgcgggcataattttagtctcaactatgatagttcatgtaacaccgtctcagctttcttcaccatctctctcactttcttatttcccggatcccacaaaaaaaacattaaaacccaacaaaaaaatgcaaatcgtagaaggaacaaagatctcagagcatcattaatggtagtttcttagcataatcttcacatagttcttatgaatatttttataattgattctgaaaattttgaagttaagaatttagtttagagattgaaattttggcactatgtaatggtggactcttaacttggagtttttaaaaaacaaaatttgaaaaaaaaatagaaacattatanatttaaaaaacttaataaaatattacactc

SEQ ID NO: 1543 - DNA, 2866 bp, Arabidopsis thaliana landsberg
ttcagtcatgcgactcatgtcaaacacctcaccttcttcatgatcaacagaggatcttcttgcccgagacgtactcttccttcttgaatccatggtggtgagtttcaacaaagcaattaaaaacaactctctaaggggtatcaaggggtaagggaatcagtttctttcgtgatgaaaattttgagcttgaaaccgattgaaagcttgaggatgaacttcgaagtgatcgactaactttggtgaagtattggtgaagaggaacggattcttaaagagtgatagggagcgattttaggggaagagtttggaatgaagactttcaaagctttgtgagggggttgcgaaaacgagatgatgaaagagagagtttcaaggagggtttatcgaaatcaatgggtcgaggagaatggtgtttggtttctttgggaagggatagaaaagttgattgaaaatggtgagggacatgggtaatcgctttgtccattgagtaaaagagtgttgggggagcaagtggggtcacaaagttatgccatggtcttcaaatagtgagagctcgagtaaaggatcgagcatcctcttgaagtgcgaaaaatttgttccatcggtggagagcttctcatttttgtttactcgatcaaacgaaccaaaataaatttcaaaaagtcactcgatcaaacggcggtgatgctcctctcatttggtcatccaaatcaatggctcaaaatgctccttctcattctactcgatcaacggttgagatttttcttgacttggtttaaatttactcgaccgttgactcccttagggtcactaaaacaaacctgaaacacttaaacaaaaatatcaaaaataacaagaaaaatagaaagttatatacatggatagacatgggacttcctcccaagtgagcatgttttaagtcactaagcttgactcttacagagcttagtcagaaaagaggttgaagagaggaaaagagaagtcctcatcttcagtggttgaattttcagtgcttgaatcatattctgcatcctctcttgatatatggtaggatgagtattcatttcgattcttcttcaaagtaagcttctttcttatcagcatggttcagtccttccatcttgtaagttagctccccaatggtatcctcttgagctttgtattatatcctgagtttcagaagtttttcagtaacagaatcaagtgtaaagtgttcttctggggaataagtcggaatagagatttccccctcactcaacaacttgctctctaggcttctttcctctaagtgaactccttttttatcttctggtgcaagccattatgttgtgaaatgttcgtcctccttgatagatagtgcagtttccatcttctctggatcaataccatttgaaatttttttaactcttttttcaaacatccatagttgatctttcagcttcatcacccttgaagataatccctctatgactctgctttgccacttaaatcttttcctcatcttctgtaggatcttcagtctaagctagcctttgtgttgctctcttcttgtggtcaaaagtccttttcagcttgctgagttgagaagtatagttgacttttggtgaggtttcagattctatttcttcatcaacttccatgtcctgaatcccaaaattctgaactcctgttgttgatttccctgaagcttctctgatttcaaacttcatcttgatgcctttttcaaggttcggattaatttttccatttctgacatctatgactgctccagctgaagctaagaatggtctacctaggatcaggggatccttgcctttttcatctacgtctaataccacaaaatttgtaggtatctcaacattttcaatcttgacaggcagattttctattaaaccatgaggatgtgctacagaaccgtcagctaagagtaaagctaagttgcagaacttgtattccataatccctagccttttagctgtagagagaggcataagactaacagatgctcccaaatcacaaaggcacctattgaatgtcaatggtcctagagagcatggcagagtgaatgaaccgggatcatcaagcttttcttggatgattttcttcttgtatgtttcttgggtagaggcactgctgatcatctcttgattctgatccttcttgagtttttcaattttgaacttttttccaggatggtgagtattcagcaaaggtgtgtgctttatagtccagatgaattgctgggtggcaggtgcagcaatttgagttgaatccccccccccccccttcttgaatcatattttcctcagtatggggagtctgacgacttggtggagactcatcttcttggtggatgttgatagcattaccagtagcatagtccttacgattctgaactactttccctagaagttgttgaggatgcttcggagcagaggttgatgcaaattgactctccacatacttgatttttgaattcagagcttcgaacttgacgtttagaccgttgtaagaacaatcgatcttgttgtgtaattcagctattttcttgtcaaaaaccatagctccagtagcttttccttgaatgatttgttgaatgagttgcttaatttaaggatcttgagctgctggggcttgttgtggttattgaataaaccctgatggccgattctgctgttggtagcctccattaaactcttttttagggatataaccttggttgtactgaacaaaaggcttagattgattctgttgtggtggatacacttgatcttccgggtcagctacattagtgcttctgtaggagtggtatgggttgggcttgtagttgttgtagcccttgttgaaccgtccttggttttaaatg

SEQ ID NO: 1544 - DNA, 941 bp, Arabidopsis thaliana landsberg
agatcatgttcaaggtgatcaatctaaaactagcattaagaacaattttatatgaagaactctaataatttgcctaaggacttgatcaacatgatgtaagtgcaggaattagcacctccgacaatactagtctaaaccaaaggaattaagaattaaagtaagaattcagtcaaaccggggtactttggtttagtctgttaatgggcaagagtaaagagatcagttgccgacatcaagccaaaataaggagattgcctggctgatattcgttcctcaaagaaaacaaaaatagtttgacctagtcaaacgcaaacctttggggaataagccttgaagcaacctctcacgaagtaaacgttattccgacctatcgcccactaaaatataaacgtcataagctaggcaccgagagtgccaaagctgtgaacgatgaggtcgaccgactactaaaaattggatcaataagggaagtaaaatatcccgattggctcgctaaccccatcgtagtcaaaaagaaaaacaggaagtggagagcatgtcctaaggacagtttcccactcccacacatagaccgactggtcgaagccaccacaggtcattaactactgtccttcatggatgcattctgtgggtataaccaaatactcatgcgtccagatgaccacaaaaaatggctttcatcaccgatcaaggcacttacttctacaaagtaatgcgtttcggtttgaaaaatgatggtgctacctaccaacgcttagtgaacagaatgttcgccgaccaactcggaaaaacagtggaagtttacatcgacgatatgctggttaagtctgcccatgaaaagaaccatgtctcgcaactaagagaatgtttcaaaatcctaaacaaatttgaaatgaaactaaatcccgagaaatgatctctcttggtccccgcaggagaat

SEQ ID NO: 1545 - DNA, 864 bp, Arabidopsis thaliana landsberg
  unsure (1)..(864): unsure at all n locations
aatttcctttttacattttaatttgattactaactatgtgttttcttgttgtcttcttgatctaagtacacctctactgtatgcaaactcgatcaaccggcaaccaaaacctcctttttaacgataacattaactacatagctcgcgaaatcagagaaaggagaaacacagtcaaccttgtaccccagcaaccactcgaaatggctgacgaacaaaatcaagagaatggccctgctatccaaaacaacaacttcgagatttagagtggtcnnnnnnnnnnnnnnnnnnnnnnnnnnnnnnnnnnnnnnnnnnnnnnnctgccaatggaggatccactcgatcacttggatgaatttgatagactctgcaacctaacaaaaatcaatggtgtcagtgaagacgcattcaagctccggttgtttccattctccttaggcgacaaagcacacatttgggaaaagaatctgccccatgactcaatcaccacttgggacgattgcaagaaggcctttttggcaaagttcttctagataccgccagcaatgggaatttccagaacaaagatgttgaagaaggctgggaactggttgagaacctagctcagtcagatggaaattacaacgaggactgcgataggaccaccaaaggaccaactgactcggatgacaaacacaagaaagagatcaaagcgctgaatgacaagctggacaaaattcttcttagccagcagaagcatgtgcatttccttgttgatgacgagcagtatcaagtccaagatggggaggggaaccagtaaaaagaagttagctacatcaacaaccaaggtggctagaaagggtataacaacttcaagacgaacaaccc

SEQ ID NO: 1546 - DNA, 529 bp, Arabidopsis thaliana landsberg
ttttgcaaattgtatctatctataatatatttttagttttatagtttacaattgttattaagtaacgtcctgccaaacccgtcccgccaaacccgtcccgtaaaaaaaccatttatttatattaatgctgatcttatttatgatatgtttataaatcattgtctatatatttttgtcgatgcgggacgttgaacccacacattttttgtcaattggctaatatatgttcatttttaaaattttgaatcataaaatatgacggaaaaaattaagatttttttaaactctatatattatataatgatgttaaaaattgtgatatatcaaaaaatttataagtttaaatattcataatgttttataaattctaaatatatcaatcataatatttaaaaaattaatatgtttgcttataaggcaaaaaactttgttttaagatattgttaacatatatgtttatgctaattttaagggattgatttgaagtttggtgggattaaatttgattgataatgtcgatgacaattta

SEQ ID NO: 1547 - DNA, 812 bp, Arabidopsis thaliana landsberg
ggaatcggagaagctcgactttggagaagagaccgttggctatatgatcgaggagttctccgggtaattcagaccacacggtggcttcactcatctctctttgtttgttgaaaccctaagattcgaataatctgaaaaatctatggacaaatcgaaataaggtatgtatatatattataaatctgacaaggaaaataaatctcttgtagaaaatataggaacttaccttttccttggtcaacaataatatatcaataccctttatataggaaagtattgttaacaattaattttcacttcttgacttgactaagattagtttattggtgaatatttttatttattgtctagtccaaatttctatatagaccaaaaaagtgtcaataagtggaaaagaaattaaatgttaagatgcactttttgaagtttataatttattttccttcttaataaaagtctcttttataccaatgacattatatatattaatatttatataaagttttcttaatttagttcggccaatttttgttaataaattataaatgacattaaatgaaataaaagattttgctacaatgagagccttgtcttccaaggaactaacctcaacccaatttgccaaatcctcttccatcttataaacgggctcgatataagcttcctttgcgcaaagttgattaataatgcatagatctccacacattcacaatactccacgaatctcttgtctttgcaactatcatattcgtagtagtagtcccattggagttgaaggtgtgaattcaacgaggcttagctgtgataaacta

SEQ ID NO: 1548 - DNA, 656 bp, Arabidopsis thaliana landsberg
  unsure (1)..(656): unsure at all n locations
ggctaagatgcgattgcaatcctaagaccttcttctccaccaccgtgtccaatgtccatcattagaatgcacaagcttccgatgatcttcttcgatgatcttcttcttcatcgcttatcgatcttaaccagttacctactgattctgagacatcttcagttgctatcttcttcatgcttcatcgccgctgattccaaatttccaagacgaaaacactacaaaaccctagttctgaaatttgttcttcttcactcgtactctttgattacaagatggctgggtccgagaagacacagacgaaagagccagtaaaccctaatttcccatgttctatgtctttgtgcctaacagagaacacaagccgcaagagacgtgatgtggaacagaggaagcgtacggttaaatcaagaaagcaaaggttgctcctttttcacaaacgccgagtggcttgtcaaggtgatgagagacatgaaaaaagcccaagataataaattgatctttgagaagactctgatcgtactgatgtaaacccatcaacggtcggagaaagagtgagaataatgatttctcanagaaggctgattttgtatatatagaaaagaaacaaatattgatcaccacggtaaaaaaaaaaaaaaaaaaaaggaaacgtaggg

SEQ ID NO: 1549 - DNA, 754 bp, Arabidopsis thaliana landsberg
ggttcctctctcacagcctcctgttccaacatcacatatcatttcattgttcatgcggattactttaaggatgtcctcaaacattatattccccaaagcacactgcatatataaacaagcattttaagtaccagtttctgtagaaaagtaaaatatgggaataaatgaaacatacctctaggtctctgattgaatctgcagccataacaattccataagaactttgctctggataatttggcttccttctgcattttctacaactcattctttcatattcctccaatgtaaaaaggcgagttaccaagctttcactttctggacttttccagcaatgacaaaactcgaggatcgcaacaagtacctcagcagcattacttgactgaaatgagtttaacaaaaaaatcgaatgacattaaagacaacattcaagcctattcaggataataataatagtactcagaagcttatctatacacaaaccagggaatgaagttcttctagggaagcaagtaagttgctcagtaggtgaccatagagttcctcttcttttatcttctccgagacaaaagcagaaaagaaatctcgtagtgcacaaggaacttggttgtcagaaaatggtttccgattgttcaccaaatcctctttaagaaccttaatgttacagagggactgcagtagcaaaaaaatattcaaagaagtaaggaagtaaagagatacatgaaaactgagaatatgttgaatcagaaaaaga

SEQ ID NO: 1550 - DNA, 505 bp, Arabidopsis thaliana landsberg
aattcatttcttaaatgattttatctcaaaataaaaaatttataaaattatttatttaaataaatcaattactacttttattttactttattatttcatactttttaaaaaaaattaatggtcaatggtcatcactctataatgactaaatagttatttgtgttgtagtttagttgtttgctacctaatattagtttaattattttaccttgatttttttattattattacgttatagttcatatcttatcatatgaaattctgtctttttatttttgtatcttatggtaagttcgtaacattgacattcaatattttcaagtacgtaatagacttttgagacgttagacataccacgaaattcaaaacaaattcatttgtcttatatctaaaaagtgttactaaaataactctttaatttttgcttcttttttttcatatgaaaactcttgaaataaaaatatcttatattcttgggggggggtatggatgatgataaacagtg

SEQ ID NO: 1551 - DNA, 488 bp, Arabidopsis thaliana landsberg
aatcacgatgcactttttgctaataaagaattcttattttttttggttttttggcagccgcagcttttacaaagggcagatggcaacaagacaacagatatactaaatcttctgctttatctcttccatctgctacaacttagtcacatcatggaatcggccagaagaaagggaatggacacattcattgatgataatatggagaggggtaagtcgatcggtcctgagctcaaagaagctatcgatggatcaaagatcgcgatcgtcttgctctcaaagaactatgcttcttcgtcatggggtcttgatgagtcggccgagatcatgaaatgcaagcaaatggtgggccagattgacatgaccattttctatgagtggatccaactgacataaagaaacagaccggtgaatttggaaaagccttcacccagacatgtcgaggtaaaccaaagagcatgttgagatttggcgaaaagctttgggcgatg

SEQ ID NO: 1552 - DNA, 3115 bp, Arabidopsis thaliana landsberg
  unsure (1)..(3115): unsure at all n locations
atgttcctgttaaggttggtaactctgttatcccttctgattttgtggtcctggactacgagaaggaacccaaagatcctcttatccttggaagagcattcctagctataactggtgcgaggtttgatgtcaagagagggagaatctctctcaaggtttgtgatttggagatggagtttggcatggatggttcagagcttactaaacctatcaattgcattgcttccagcacagacatacctcctcagacagatcataatcccaccacaaagccacacacaatgctccaacacgttcaactcgccaatgagagttacagaggaccggtgtcgaccgacaccactacccctgtcgatcgacaccctcgggtttcacagacagatcattctacacactctctccagcccacaccacttgaggacctatgtgataagttctcttctatctcttcttctattttatctttgattacttctttggattaatcgaagactgcttcacaagataacaaacctagagttcctcgaaagcttgtttctcctgttgtttttgtaggtgacgagaagagtgtcgatcgacagaagcggctccaaccagatccatttacgcaccgccttggaaggcgaggaggcagcatcaatcctccaccaccactccacccacatcctgaactccgccaagttaagctattgactcaaaacaagcgcttagtgggaggcaacccgttggttagatttttcttttccttttcttttcttttcttttcttttatttttgattttattttcccgctttctctggatttgaatgccactggggacactatcgtttaagtctgggggaggttcgtactaatgatgcttttatttttgtttcttattttgcagttattttggttatttcttttattttctttcaaaaaaaaaaaaaaaaaaaaaccgttttctttagtttagttaggaatcatgatctatatttctcttgtttattgcctgattgatgagtgttgtaggttcgagtcaatctgactaatggaaaatctagatggcaaaccaacaaacttgaggatatcctagtttctaactcaaccactaaggctggagctaatctcactgctcttccttttacctcttcaaacagttagtattcatagatcttgactccttgttcataccggatattgagaccaatgtgataaaaagaatatgttcctctcctgttataaaaagaaaaaaaaaaatataatgagagattgaaacaacttgcagatagtgtataggggtaggaatgtttcctatgaccccattattatatattatttggaatgatcaattacaaaggtatgaaaatgccgagggtgtcgatccagtatgcgagttcccctttgtttactctctaaaaagaataagtctgggagagaaagaacaacgaaaaagaaaaaaaaaaaatatatatatatatatatatatatatatatatatatatatatatataaagaatggtcaatttatcatggtatagtacaggaatgagtatagaaggatcttgaatgctggcttgtttgatgagacccaacgatgaaagcctggtgagtatagttgtggaacttaggtatggaatctagaatattgtgtaagctttcagagaagtacattttggttaggatttggttagacttgttacgcatatggacttagtttgaatgatcatggcaataggctagagaatgttgggagttcctttgttttcaaaaccttttccacgggttcggcttttgtgttttgcttgagggcaagcaaaagctaagtctgggggagttgatataacccgattttcaatgattttatctatgttttaggtataagattttgagtctttttgttatttctcgagtctttttagtgtcttttcaggtattttatgcaatgggacaacaatcgagataatgagacattttggagcaaaagctaaggaaaaggaaggtaaggacgatttttgtttaggaatcagcgaggagtgtcgattgacacactcttggtgtagatcgacaccagttttggcccaacaaaaaccctaggcgctttcaagtttacagaagttcaaatttgcccgaggagacttccctatttgcattattagtctgtggacgtttttagggtctatatagattgtttttagacctaagtttcttttatcaagttctttgcaaaaccctattgtaagagacataggctattcatccattatactgctattactttgttcgcttttattttcactactaccctgctagtttaatctcgatatttaactcattgtttgaacaaaagaactccgtgaattcgatccttaaatactgcaattgatctcgtatttgagagagtagttctaggtaatttgaaccatatcacagatgtctggtcaatgaatggagaggagtgagtcgatgaatttctcaccagtttatgaaaactggagtcatcatttcggtgcggaagactgggtatcgtatgttggaggagaaggcgatgagggatactattatcccaatatgtaaggagcgcctgattgggatgtttctggaactacactggaatactccttaccaaggtctgtgcactatagcacatctgaagggtcacactcaggaacaagaccacatgttcctgtgtatcaacccactacacacccaaatccgtcgctgccaagagaagttaatgaaggaaatgggaaaagtcataatgttcaaagtgtgctggagactcaacatacgttgggaatgattgagaccttgttgactcaaatgattcaacaacatcaacatcaacaatagatgcaggaaagccagcgtgctgaatctccttcggctaagttcttaaagttggttatgatgaagaaggatctgaagtttaaaggagagcaaaatattgttttagcggataagtggttaaggaacctggaaatgaattttgaaacttcaaggtgcccggaagactttaagggccacatagtggtacacttnttagatgagtatggtcgagtttggtgggatagtgttgtttcacgatatcacgaccagcctatcacatgggaaatgtttaagcaagagtttgag

SEQ ID NO: 1553 - DNA, 1179 bp, Arabidopsis thaliana landsberg
ctcgtaacccatgggaccacaatcccattcaagaatgaagtgattcgcggaaagactcacaccttctagtctgaccttcatgtaaaacatatctccagaacgaatatttcaaagtcaggagaataggaaagtttccatgaattaaaatgggtcggagcccagagcaagttcaaaagaaaaaatacatcgaaagaacaaagagaactagcgagttcgagggacatttatgagagagggtcaggaacaggctccttcatcgccggttcaaggttcgaggtggatgcttcatttgtgatccgcctcgaagtcattcttgacacgcttcctgggttgttgtcctcctcctcgtcatcatccttttcgctgccggatgggaccacttcgacaggagcgtttacaggactaggaacttcacctcgagcacggaggtacatgtagagcatagtcggatctcgggtacgcagtcgaagttcctccactcccattggaagggatcactctccatggccctcactttcttttctacacgagcgatgcgggcctcgagcggttgccttttgaggcctaaatgctgtctctcattgcacaagcggcgtgaggaaagagaacgccggctggtttgaaaccatcgccggacaagaacaatgggctgccgggatcgagaggacaaactgtggcgactccatcgttttccattcttgtaatgttaccaagtaaatttctgaaatcatactaggaaattttggtggcagattggactcttatttatagagggttaggttttatcttgaaaccaaaaactcagtaattatggcgtgtctgaatggtttaaaccatttttggaaatcgagaaaagacaattgttgcctcttagacgtgaagctttttcttgtttctcgaggaatggaaagggaaaggcaaccgacgcattaaacacgaaaggcccattaaatacaaagtaaaataatcgaggcctaagcccaatagttaagccgaattgattaaacacgagatgggaaattcacgttttaaacgagcttaattctcgcgttctaagagtaacgtctgatcagcctcaaaatcttgaaacttagccatatggtcaaaacatatttaaagacggactttgcaaatccgcgttctaccttagcaaaacccccttaggattataattttaaa

SEQ ID NO: 1554 - DNA, 608 bp, Arabidopsis thaliana landsberg
tcccttgttttccagagattcatacagttcttaatacattagaagagatcccttcttttcccttctctatttactgtgtttatgctttcatactcaaagatgttgtttgcttcaatcaatatgtctgagtagtctgcttgttaggaatagggtttctcattagggattcatatggtttagtagattgccccctttgctaggttatctgtaaaattattcatctttaactgtgtttaatgctagatctagaatagctaactagatcttgaatccagacaatagatatgcccgccataggtatctgtagttggatatattatttgatgagtctggtttgtaggtgtgtaataagaatcgacctatctaccaaggtgaacaatcgaactcgttaacaatgcatatttaggttaataatttctcggcttctccggttattcttagctatagatatatgaagtttcgcggaaccgcaccggttattccataattagagtttgagtttaagaatggtttgataacaacctagctttcattagatctactaaccaatagtttatttaatcgtttacacacaatcaacctgctgttttctactttgtttcttacaa

SEQ ID NO: 1555 - DNA, 1848 bp, Arabidopsis thaliana landsberg
cattggaagaatttaatttagctcttttagctaaacaactgtggcgtattatccgttttccaaactctcttttgagtagagtcttgaggggaagatactttcgttatagtgatccattacatattggtgcctcaactcgtccctcttttggatggagaagtatcatggccgccaaacctcttcttgtctcgggacttaggaggaccattggttccggaatgttgactcgtgtatgggaagattcatggattcccactactcatgcgcggacggcgaatagccttcttgacataagagaccccctactctatgtcaatgatttaatcgatcaaaacacaaagatgtggaatttggatcgtcttcaagcattgattgatcccgttgatattccactcattttagggattcgcccaagccgtacctacttgagtgatggttatagttggtctcatactaaatccggtaattatactgctaagtcagggtattgggctgcaagagatctgtctcgtcctacttgtgacccccctttgcgtggcaatgtatctcaggttgtcttgccacttgccaaagattgacatatcgtcacatgggaacagataaaggatgtccccgttgcggagaaccagaagagacaattaatcatcttctttttcattgtcctccttcaagacaaatttgggcattatcgccaattccttcttcagggaatgtcttccctagaaattccctcttctataatttcgattttcttttttggcgtggccgagaatttggaataggagaggaggtgttagaaatctttccatggatactttggtacatctggaaaagtagaaaccgttttgtttttgagaacataagggaacctccccttgaaaccttaggttgggcacttcaagaggcagctgcttggaaacaagcatccctaaaagatgatgatttcattcggccaagtccgttcgtaggttcttctcaaatcccgccctctttgcttcctgaatgtcaactcgacgcttcttggcatgtagatgacaccttgagtgggcatggctgggctcttgttagacaagactcggtcattcaccttggccttaagagtactcgtcgaaactaatcatcgcttcatgcagagtttgattccttgctatgggcaatggaatgcatgatctctattggcgatacttctggcgcttttgcttccgactgttcagacctgatttctatcattgacaaccaagacgattggccgacattcgcagcggaattggcatcctatcgctccttagtttgtttttttccttcttttcgtattagatttcttcctcgtagttctaatactcgagcagattgtttagctaagaaagctcgggctcgtaatagtcttttctcccatgtaagcacatcggttcgtaaatggctctctctagcggaaagtttctttccgataacttaatataaatggtgtttgaggaaaaaaaaaaaaaaaaatcacaccctcaatctgtgtgctttaatgggtggggtgacatcagctgcatgatttcagagctaaagatctctacaatgtgatgtgacaacaaactattttactttatttttcataaccaatttatgcattataaaatcaatcatattatttcaatatcaacgtcaagtcatcgatttaccctgtaaaaaatagacctgtagtttacgagttggagttaagtggtttcaaatttctttttctcgtcagtggttacaaacttacaatttaaaaatcttatcttaagctctcctctcttctctctccaaaatctttcaaagaggagagcttgctaatcgtctcgtctccggcttgatccc

SEQ ID NO: 1556 - DNA, 1472 bp, Arabidopsis thaliana landsberg
tctataaggtgctaaaaagccttgtttatttggatacccaaaatcaactacataatacttgtgtctaggaggcaaaggaaattcataatcattatcttgtgccatcgttagaactactctatcgtgacacgatccatgtgctctatttcaaacatatgaaaacaacatatttatatcacatacggccatgatattaaatgatgttctatcgtgtcaattccaatatattctttgtagtttaggcttcaccttaacacacatgaactccatctatagccccagcaaatcactaaaatatgaccaatatcttcgatccatttgtactttttcatgaattcaacgtagttcttgtgttgttggcgtcttgatacaatcacaagcaagtaactttgtcactctaaggccttcaaaaaatcgtaacccaacatctctttgaacttcattgtgtccacatatccgtaaaaacatggcaacactctcttcaatgctaacattcaatgtaggaattaatccataacttgtttccattatgtcacataatgatctaaaacaatccagagacattcgtagtaactgaagataagcagccttatcttcttgtattcgacgccaagtatttttccatcccatcccgccatctgtttgaattggtcctctttcaaaggttcgattgtagcaactcaatgacggttgaattattaactgttcaatttgctcattttccaaatttcataattcaattctctcttcataatttagattatgtacaccttgtgattgcaattggcatatacggaatgatgccatatctacaattttaaaataatataagtaatattaaaacaaataatagtatactaaatgatgtgttgtatgacgataaaaaatgtaatgtaaatattacacatttttgtgagttattccaacaaatttagatgcatacgtgttccttctataccaaattaagtagatactcacattaagttaaacttttatgttaactagatttgacaactcattcaagagatatgacaacacatgtcacattttgtttcttacaaaattcattaatttttgcaagtaaccataaaaagcactataacttcttattgagattccaaattcgattgacaagatttgtatggcatataatttttgtaataacttttaattctttttggtaaaagttatatacactaaatatttaaaattatacacgtacacatatcctaacccattaacggaaaaaaaggtaacctcatctcttctttatatccattatacttaccttcttcatctttctttgaacccattaaccgtaaaaaaaaaaaaaaacatgtcgagagatgatagaggtggttactacaaatgaatctcatacctctctcaaatttcgccaaaaaacaaagagtggaaggtgtttgttaagacttaagatactaagttttttgcctcactgcctcatgagggat

SEQ ID NO: 1557 - DNA, 1768 bp, Arabidopsis thaliana landsberg
cgcggcgactttctttccgttctcctttgaggccggagaacggaaagaacgacttgcctttccctggtctccttcttcctcgcgatccgtgtccattccttcgtcggggaagtagacagcggagtcttccgggtcagcgagcttccagctccagccttcccggagataatctttttccgaagagctggaggtagcgtctttccagcattttcggagtttgttggaagagacttcttttccggcagatctgctgtcacatccggtttttagaaggcaaaccgaatgcgaaccatgtacgtgccaggatcagttattcacgtacacagcagttacataatatggacatcatcacacagtgctcaaaataatattaaaaggggaaataatagtcgattacatcatacgtctgagacgtccatatagtccttacaatataaatcaaagtgcggaaaagaaacgtagataaccgcggccttcacaggcagccgactgggggttgccgctaacccacacctagaactcgtcgtagtcttggaactcctggaagtctccttccacagcttcatcttcttttgagcagtggttgcaacgcggacaacctggggggtttggtgtgtaaagcaagggtgagtacacatcaacatactcagcaaaatgtctcgtttggctgtagtggactagctttatgtggagttaagtcaagcagttgcttttagttggtcaggttattactcactagtagaaagccatgttttagaattaacccaagttattaacccaatgtagcctttccaaatggaaagaataccacttaccattaccagagtcaataccaaaaccatcattctcattgccacctgtaatccgaacatctctgatcaagtgccactaatcaatggagctcccttggccgctcataaccgcgagcacgactgatatatcagttttataacactctgcagaggttgcgcactttacccacaagccgtgattccctttctgcccggagatcatgactctccattgatcactaccaaggtgacccaccagggtatcactacgtagcctttacaaagattccccggggctgtagcgcccgttaggtttcctaaatgcaccacactcctccccaaggggcgaaccaacttggcagagcgagccgcatacaccgagccccattaacggcatgacagcgacgtagctacccctcggttcctctaattattcagctaagggcgtcccattccaccctcatggttgcactattttcctgggtggtcatccaacgaacaggtccttacagagaggcactcgagaaaccactcgagtccccttaaatgccacaagtaaatcatcataataaagaagggaaacaacgtatcattgataaatctcatcatgttcattgattaaggtgaagcactaccattaagctaaaccagaataaccccacctagataggtaagcaaggacatggataacaaaagctagtcaatccttaggtataaactgtgtaaatgcggaaagtgaattaaggaatgtataggatataagtgggtcaagggacactgctcagggtcttctcttgcaagttctacggattcctcaaccagactgctatctatgcgagtgcaacatacatccatctctttgaattaggagataaacagtacaccatacaagagagcagatgaattgaatatgcataatatatgacatacgatttgcatttgcaattactagaagaggaaatgaaaggtctatagtg

SEQ ID NO: 1558 - DNA, 567 bp, Arabidopsis thaliana landsberg
tgcaggtcgactctagaggatcccctgaaagaatgtgaattgagcaatgtatttctagccaacgaaagttgaagttaggaaccctgtgaactatatgaacttgttaagaacgaatctcgctttagctaagaacgaatcttgaaaatccttaaagtatctttggttcttgtgaatcgacctcgcatatactaccttgcggttaagtgtatcgagcaattactcaagcaatcactcatataagttgtaattctcagcaaactcgtcatcacttaattgtagcatcatcatcactttgatcattatcactgccagttgcaggtcctgttgttgacgctgatgtagaccatgttgtagaccctgatgcagactctgttgcagaagctgaagcagactcgaatgttatctacgccataaaattcatcagatcttcttctttatctgaattagtttcagtatcactagtgacaacattcatagccttcttcttatacttgtgtagattggcacattcagaacaaacatgtccatatcctttgcattcaaaacattgcacattctttaaagact

SEQ ID NO: 1559 - DNA, 1733 bp, Arabidopsis thaliana landsberg
ggtttttaattcgttaataagcaaacgagcattctggatgattttggctccagtataagtaactaccccagccatttccatggagtaccatcttgcgcccctgtaatcaggtttcaggtcaaccaaaatacaaaaagattatgtaaattccaggctctttgcaagaaatcagagggctcactttcgcatgacatatccataaaaggaattaagtatacacttatgagctagctgcaaggaatcgtaaaccactaccatgtcctgttgcacaagtttgatgtcagataaccatcagtcaaaaataggttccaaggttataagatataacttacatgtgcttcctggatcttgattgaattgccacttgccttggcctctgacaactttcctttccagaccttgttaaatgttttgtattcatacctcctatctcgaaagctataattacatgcatatacaccaataaaaattttgaaaaaaataaaacagcaatatgaaaaatgtaattacgacttggctaaagtttccaccattattacttgtatactccctcaaaagagacgaaacgtagtgtcaatcaagaataagattggtaataagtaataacaaaagccacacacctgcgcacagtgtccacatagaacggattttctctcatgcatatcccagcctcgcgaacttcagtgaatggcttgtcaagtactcggctatatgcctgccaaaagcagaatgatttaccgttatacgttgacactgtacggaaaatattattatgaaagggagagagaagagtaccttttgacagtattttttcagtcgttcttttaatttggattgttgttccacctttggcagatcaagaaaaggttttgaagactgcatatttgctccagcatcaacagattcagactcaatctgcttcttcagatggtaatattcactgtcaaaccatttgaaaacaaatttaagatcttaagactatatcaacaaggtttaaatccatacttagctggaatataatataagctaaaccttttatttcccttgaacgtcaccccacgccaaacccattcaagttttctaagacaggtcttttccgggccgttgaaatcacatgctgtgcaaacctcatccgtaactattgatggtggctgacaattaagaagaaacctaccacttaacataatatatctgcgggctttgtaatcttaaaagtaatgattgtgattcttttgtacatggaacacaatcatttaagtgatatttgatgtacttgaagcctgtttgttaagataatatttggatacatcgccgcgacatcaaggtgataaataagaggcccctcttcacgtataggatcatcccgtaacttctcgagctgcagagatcaataatgaaacctagaaggttctatggtgtgctttacaatatcaaatcatgcagatgtatagttcgtgacaactactgtagatgaaggacacttgataaacacatttcttctggaggcccaaacaatactattctaaggacttactaggttcttagagtgtataggcaaactctcccacattgaaatgcgcatgcattgtcacccattcaaagagacaagagaaacaagggaacgagcattaaatctctatcctaattcagaagaggaattcattaccttttccctgattacttcctttacttcatcaaaattggaaagcgtatccagtatgccttttctcgtt

SEQ ID NO: 1560 - DNA, 1275 bp, Arabidopsis thaliana landsberg
aaacctgatgataggacctaaactgcataatcttaagagagaagatcactcctttctggtaatcctgatgctaacccagggaagagctgcaatgccatcttgatcagagaaggagatgatatgtgggaggaattggacactgaagacgagtcagagctcgcagttgcaaagatcgtgtcgaccgacaccctcctgtgtcgatcgacaccatatgggacgctctttttagagacgacccaatacgacgctgtcgatcgatacccctctagtgtcgatcgacactggattcggacatcaccctgcgaggtgcaaatacctatgcagcccgagtttgtctaccctcttcttgtcccttaatccgaggaggcgtcgttctaagcaggagattcatgctgccaagtgcacaaccataatggagaagatcctccatactcttcctaaggcgaggaggcagcagcaatcctccaccaccactccacccacatcctaaactccgccaagtcaagctattgactcaaaacaagcgcttagtgggaggcaacccactggtttgatttttcttttgcctttcttttattttcttttaagtttgatttattttccccgctttctctggatttgaatgccactggggacagtgtcgtttaagtctggtggaggttcatactaatattgcctttatttttgttttgcagttcatttggttatttcttttattttcttctctaaaaaaaacttttaaaaaaaaaaaaaaacttttctttagtttagttaggaatcatgatctatatttctcttgtttattgcctcattgatgagtgttgcaggttcgagtcaatccgactattagaaaatctagatggcaaaccaacaaacttgaagatatccttgttttcaactcaatccattaaggttgtagctaatctcactgctcttccttttacctcatcaaaacggttagtatttatagaaccactcgtgaaaaacactcgaggcaaagattcgtaaaaaggattcacgctcaaaggcttatttccagctaaacaggatcatttccgggatattcggagagatagaggagaatcttgaagataaaggaaattagaatattcaagtcgtaagtaagaggaagttgagcttatctctaaactgtcttaatctaggataaatagaggggtttgtcctctattttataaggaagacaattttatacccaaagaaaactataaatggcttgatcccttacagagtacgtaggcaatccagaacggatgc

SEQ ID NO: 1561 - DNA, 1460 bp, Arabidopsis thaliana landsberg
ggactgaatgcaataaatcgacaaggtggaagaagttatttcagtctattgaccattggatcgttttcctctatcaagatattataatgtagtttgcttataagctagagagtttgattagtcttttctctacatgagtgaggctctggctttctcagtctctctccttcctcaacctatgtccccttttttggattatgaattagtagggctgggcacaagtactattactcgtcctatactagctatttggtacgcgttgttaacaaggcaagtaagagcatgtccattgcagggaccttgcaagtttttaaagaaaatccttatgaataaaagcaaaaaattaaatcagaatagtgaaataaaccaaggtgtgaaccttgtttaaggtatttttgggtatattaggtgcgctgacgtggctgtatcttattggatgacaataaaacaagttttgtttcttttcccgtattttttttctttgcctattcccaaactatttttttctttctctctctcgtatatctctaagtggttttagctgagataacttgtatgtctgttgtctttactttaagttcaatatgacttgtatgtctgttgtcttaatctttagtttaagtattctatgttttcttatttgtgaatgttcagtcttcagtgtgagtgtgttgtgtttcaatagtgttcgtaagaagttccaccttctctaaatcactctagtgctgacattactagtattaaaaagagaccacatgttttaagtcaccataagtttgtactttggtttgaatgcttgtacaccacaaaataatattccgaaaacactagttcttattgtgtattctatgacatcacttgtatgctaaacaataattttgttttcattgttctaaattttgaagtctctgtatatgcataccaaaacactcttcttttatccactgttattgctttaagtatccactcttcttgttctctacaacaaacccaataaacattcttctttcaccaaataaacactcttctttaacctaatacacactcttccttttacccaattaacactctttttcacaaactaataaaaatttctcacttaaggattccacttaaggattccaccattggacactaaaaattataaagattcaaccaaaaactctaaactctcatttacttaaaatttactattaaaaaattgtaaggagtccttaattaggactccccaatggggatgctctaagtcttggtatcttcataatcttaagcttttgaaggtttgtatcatctttatgttcctctttttttccaacttagaacccttcaatttttgttccaaaagaaaggaatagtctgatacagatgtactttgttcattcaaataatggtctacaaaaagtaatttaaagaatacaagttttgaagagttgttcatttcctctttctctgtttcaagc

SEQ ID NO: 1562 - DNA, 906 bp, Arabidopsis thaliana landsberg
taggcgaacacccttcatcccacaaatcgcaggtttgagaataagagattctcggaagctcaacctagaaccttataacggtttagaatatcctaaaagctatctcgcagcttttctgatcgccgctggacgagttgacttggatgaagctgaggaggacgcgagatattgcaaactcttttctgagaatctttgtggacaagcattgatgtggctcacccagatagagccaggttcaatcattaacttcaaagaattatcagttgtgtttttgaaacaatactccattcttatggataaaagcatttcggacaccgatctttggaatctgtcccaagggccgaatgaatcacttcggatttttatcaccaagttcaagggtgtactttcaaaactcccaagagattctgcaacagtcagctttatctgccctacgaaaaggtttgtggcacgattcaagatttaaagaggatctaatacttcacaagccggacacaattcaagatgcacttttccgagcaaacaattcaacatagacgatttcgtgaagaaataccacgaagctagggataactccaaagttcgaaggggaagatcaacgtgatccttggaggttccaaactttgccgagattctattagtggtattaaaaagcacaggcgaaatgttctaattaaatcaagcttgagcgaagaaattaattaccaaggcgcttcaatatcattcgacgaggaagaaacgcggcaccttgaaagaccttatgatgacgctctagtcattacgctggacgtagccaacttcaaagtgtcaagaattctcgtcggtacgagcagttcggttgatttaatcattctaggtactttggaaagaatgggaattagtctggcagacatagtgggaccttca

SEQ ID NO: 1563 - DNA, 722 bp, Arabidopsis thaliana landsberg
catgtttacagtttcggggtggtcttggtggagctcataaccggagaaaaaccactgtcaaggaagaggattgtcatctgatttccttgaggccatgaaagagaacagagtgattgacacaattgatattcggatcaaaggagaaagcaagctgtgccaagtgatggcagtcgcaaaactcgctcgaaagtgtcttagcaggaaagggagaaagcggccaaacatgagagaggtttcatttgagctggagaggatccgttcttcatcacctgaagatttagaggtccatgttagaaatgttgatgcagaggaacaaatcatggaaatcaacagagaacgattttgagggtatgtacatgagtgacaagatccattctttatgttaaactagaagttgcccacaaatatgcctttaattgctttcaaaatacgaattaaatacgatgataacttgtagttaaagtctcaacttgatatgtttatagataataaaattttagtgtattaaaatctttcaacaaagtttaaatctaagaccaatgaaagaaggaaacaaagttgaagaaacacgagaaactatgtagatcaaagatttgtcctccattccatgcatgaactttaaggctgataccatacggcatatctttactatgatcgagtatattactctggatttctctcctacacctgtggccatcttgttgagcatagaaaccaaaatt

SEQ ID NO: 1564 - DNA, 2207 bp, Arabidopsis thaliana landsberg
gataatttattgagcatgtcaatcacctataaactgaggaaacgaaactactcaattaccccatcctcgggaattttgcatccaattgatttctttgttaactctgctattgtttactgcatcttgttacttgttgcttagtttttgtatttttctccttttactcgaccttatactcgaccacccagttgtctggcaacagactgtgcagtcgagtatctctgttacattttctgtctgttactccacctgtcactcgaccacacccagtgattggcaacaagctgtgttggtcgagtgtttttactgttctgcttaaacttctgttttctgaatgttcacttagggctgctagaacacacccaaacctattattggttggcttgactctgtgaactctgattgcatcttgattattagcatcacactcatttggattgacaacctaaaatactacaacgacatgattggtgttttaggataattgactaaaaacctattatcactgtgctacattcagaaccaaggagggttcaacaagggctacaacaactacaagcccaacccaaacctctcctacagaaacactaatgtaggtaacccccaagatcaagtgtatccaccacaacaaaatcaggctaagccatttgttcagtacaaccaaggttatgtccctaaacaacagtttaatggaggctaccgatagcaaaatccaccaccagggttcactcaacaaccacaacaagcaccagcagctcaagatcctgaaattaagatacttattcaatagatcattcaaggataagctactggagctatggcttttgaaaagaatatagctgaattacacaacaagatcgattgttcttacaacgatctaaatgtcaagttcaaagctctgaattccaaagtcaagtatgtggagagtcaatttgcatcaacctctgctccgaagcatcctcagcaacttccagggaaagtagttcagaatcctaaggactatgctactgcaaatgctatcaacatccaccaagaagatgagtctccaccaagtcatcagactcccactactgaggacaatatgattcaagaagggggggattcaactcaaattgatgcacctgtcatccaacaattcatctggactatagagcacacacctttactgaatactcatcactctgaaaaacatttcaaaagagaaaaactcaagaaggatcagaatcaagagatgattagtagagtcatcactcaagaagcttacaagaagaaagtcatccaagaaaagcttggtgatcccggttcattcactctgacatgctctctaggatcattgacattcaataggtgtctttgtgatttaggagcatttgttagccttatgcccctctctaaagctaaaaggctaggggtaatggaatacaagttctgcaacctagctctgctcttaactgatggttctgttgcacatcctcatggactaaaagaaaatctgcctgccaagattagaaatgttgagatacctacagattttgttgtattagacatagatgaagagggaaaggatcccctaatcctaggcagaccattcttagcttcagttggagcagtcatagatgtcaagaatggaaacattgatctaaaccttgaaaaatgtatcaagatggaatttgacatcagcaatgcttcaggaaagccaagaatgaagaccctacagaagatgactggtatgagatgagaaaaaacttaattgtcttcaagagtgatgaagctgaaagatcaactttgggattttaaaagagaagctactcagtattcaattggtattgatccagatgagatgcactagctatcaaagaagaaaacgatttcacaacataatggtttgcaccagaatatcagaaaggagtttatttagaggaaagaagcttagagtgtaagttgttgagtgaggaagaaatctctattgcgacttaattctccaggagttcctaaacagcccatgaacctctcttctaaggaagaacacttgaattttgattctgttgctgaagaactcttggagcactggacaggataccaagctcaggaggataccattgggaagttgactcacaagatgaaagagttcaacagcaccatcttggaacttcaagaaatgattaaaagctaccccaattttgaaattgaggattggtcaaaggaac

SEQ ID NO: 1565 - DNA, 1812 bp, Arabidopsis thaliana landsberg
cttagtacaacaatataataaaactagtcttactgtaatttttaatttactaaactacattaaattagaatgcttctttcgtgcatctcacgtatattgaacatatccagcttactgacagataaccaaatcataaactcttttgttaaaatattccaaacctgttataaacagataaaatgatacaaagcatgtgacggttttagaccaataatatacgattaatcatctaaatgataaaaatatagcaaaaggatttttactctgttaaggtcttcataaggattaagcaagttctcaagaaaaataccaaaaaaagaagtaaacttgttattgttacaaagaactaagacatgacagaatctcaaactcagtttcagactaactaaggagaaggataaataactctgttcaaacacagagaagatagaagaacattatgagacagtgtatcaactacgcttacactgttcttccatcctgtaacagagtttattacaaggtttcaagaacctgtttaatgtttgagatgttggctatatgttggagagtgcaacttacattgtcggtatcaacttcggatataacttctttgatgctagcttcatctcccattccatattctttcattgcactttccaactcatctctagttatgtgcctgttgtataaccaacatattaacattggtgcctcaaaatagttacacacatttgaatcttgattctcttgacacaagaaatgatcgatggagcgtgattcgtaaactgcaaatggaagaaacttacccgctgttgtctttatcaaagtgttggaatgctttctcgatctaatttgtatctatgcattgtcgcagagataaatcgtagtagtcgattgttccattacaatccaggtcagcctgaaaagttatcagcatgtgtttcaagctttgtctttttcaaaaccttaactgtggaaagtgaagccaagatgctgaagataacttacggcttccatgagttgcttaacttcagtctcagagagtttagagccatgtctattcagccccattttgagttcttcataagtgattgacccgcttttgtccatatccatattctcaaacatggttttaagacctttgatctcctcttccgatagaccctccgcaataaccttcaaaccaaacgcacaaatcacaatccaaagttgaggataataatcttgaagctactattttaccttaagagctagcttcttaagcttgttcattgctcggaattgcttcatacgtgataagacaacattatcaataggcttatctggagcttcgcttttcatccatggatgttctacaaaccacaaggattttttagttagacacaaccataaactcgcactaacatttcagactgtaacatttaagacttcaagattcacatagtgtcactctaaggcctaaacaatacactagaagcttcatttggtaaacactaacaatcatgttttcaatttaaatgtttcaaaaatcagttagggcttaccaagaacatctgcagcagagattcgttccttcgggtttttggtgagcatcttcccgataaggtgcttcgctttaaaagatatcaaaggccatggttggctctcaaaatcaagcctgcattctttaatctcagcatctacaatacaaagagtagacacaattacagattcaattcctcaagaagaacacatctcaaagtatttagcttaaggttttaccagtttgaaatggcggtacgccgctcagtaggatgtataaaataacaccagcactccaaatgtcgattt

SEQ ID NO: 1566 - DNA, 903 bp, Arabidopsis thaliana landsberg
  unsure (1)..(903): unsure at all n locations
caaacaaatattgagaataaaccaatgaaaacaacagtacgtagctttttatatgtaaccatagaaaagcatagtactagatcagttgagaaaacaatcggactttgtagttcattgtcaacactaggaacacttgcaaatgagtaatcaatcctccatgctactaacagcaacaatccttctagtttattgtcaacaatacaaagaagaacgaagtaaaacagaaacaaacctcgcaagtttccgtcgccaagtgagaaaagcttgtttttcattagcatcaagtttctccacattcattttaggtgtccaatgaggtctacgaggaacttgaagactactagcatgtaaagcctcttctctcatcctttgctctttccattctttagctgttatgccactcgaactcgaacctgtatccctatttacataacataatcacaaaccaaaaaatgattcaatacaagcaaatctccaatttcacaagaatgattgaatcgagaagctcacatattgataggaacaggagttgcggaatcgtgatgaatcgcgaaaagacgttcagcttcttcggcttgttcgatgatggcatcgatgtcgctgacttcggtcacggattctagaaccttcttgtgttgatctttgtaggatttgcctttttccttggtttcctggatcatatggttatggtgcttcactaaggctcgacctagagatgttttctcgttcttccccattttcttctccggtgaaacctttgagttttccgattcagcagatatatatcgtgaggagacgattgagcacttttgtgttcttcttgtcgtgattntgattttgattttgatttcagcaaaactcngaaatgcagagagactctcgtgcgaacanataaaatagaaa

SEQ ID NO: 1567 - DNA, 627 bp, Arabidopsis thaliana landsberg
caaatggaaccttttaacggaaatgtaacaatttttttgagaacttcaaattgaattccagtaatatgtaaccgattttaataaatgttttggtttcactatttgtgttttaataataataatgaagtagcaagccacacaactgatgaaactaaaatttgggctttttttttcctggaatatttcatcctctgctttgaaactctcgtttaatccaatcatatattttattccaatttgttagtttttattcaatccatttgtttccttttccatttcggaaagctcaatgattttcagtaacaatgaaacaaaaaaaaaaaaaaatggaaaacagagcaagcaagaaacagagtatataagggggattcaactgaattaagcttcccaaccacgcaactgggtggctcgagcgactcggttaactccaagagtgaaagctcccatacggaggttgcaagaatgagtatggcacattgtcttgatgttgtgaaaggctcgagtcatgtatttttgcagctccaagttcactttttcctcttcccacatgaatccttgaatgttctgacccactcgaagtaactcactgtcactcctcctgcgtttgcgtagatatgtggaagtata

SEQ ID NO: 1568 - DNA, 2823 bp, Arabidopsis thaliana landsberg
agacatattccccgaggagattcaacccggactgccacctattcatggcataaaacatcagatggattttgtaccagactctgctttacctaacaagcccgcctacaggatgaatccggagtctaaggagcttgagaagcaagtgcgtgacctaatggagaaagggtacatcatagagagcctcaacccgtgtgcagtatctgtcctattggtcccaaagaaggatggtacatggaggatgtgtgtagactgctgtgcaatcaacaatatcaccatcaagtaccgacaccccattccgagactagacgacatgttggatgagcttagtggtgccatcatattttctaaagttgacttgaggagtggctatcaccaggtccgaatgagagaaggagacgagtggaagacaaccttcaagaccaagcaaggtctctacgagtggcttgtcatgccgttcgggctaaccaacgcgccaagcaccttcatgcgcctaatgaaccaggtcctaaggtcttttattggtaaatttgttgttgtttactttgacgacatactacagtaagagttattctgatcacattcaacatttagagttaattctcaaaacacttcggaaggaaggcctttatgttaacctcaagaagtgcacattttgttccgataagtatgtgttcttaggttttgtagtgagtaaacagggactacaagtatatgaggagaagatcaaggcaatccgtgaatggcctactcaaatatctattgcatacgtccgtagcttctatggactagcaagtttctacagaaggttcgttagagactttagtatagtggttgcgccactgaactgatgtaataaaaaagaacgtgcctttctcctggggagaagctcaaaataagtctttcaacacgttgaataagaggctcacgcaagcaccagtcacgttgatggtaagtctttcaaaaaccttaccagattttgaagtaatgttcgaagtagagtgtgatgcttcaggtttgggaattgaagctttactacatcagagaattggagatctatgctttggttcgagctcttgagacttggcaacattacttgttgtccaaggaattcatcattcataccgatcacgagactctcaagcatcttaagggtcagacttcgcttaagaggagacatgccaagtggttggagtttgtagagactttcccatatgtgattaagtacaagaaaggaaaggagaacgtggtagcagacgctttgtctaggagacatgcccttatagctactatgaaggctaaagtgatgggttttgagcatatcaaagagttgtacaaagacgaccctgagttaggagaatgctaccgagagcatggtaaaggactttacaagacattctacttgcaagatgggtttctattcaaagacaagcggttgtgcatccctcaaggtttaatgcgagagttgatacttactgaagcgcatggtggaggtttgatgggacactttgatgtagacaagactttggccaaggtaatggagcatttcttttggccccacctcaagaaagatgttgagaggttttgtgcccgttgcattgtttgccacaaagccaaatcaaggtcacatcctcatggtctctatttaccattacctattcctaacgccccttgggtagatgtttctatggactttgttttaggattgccaaagattaaacacaaggattcaatctttgttgttgtggaccggttctctaagatgacacacttcatcccgtgtgacaagacaaatgacgcgtctcaaaccgcggagttgttcttcaaggaagtggtacgcctccatggaattccaaggaccatcgtttctgatcgtgacaccaagttcttgagtcacttttggaggactctttggagaaagttaggtaccaagcttctattctcaacaacttgtcatcctcaaacggatggacaaaccgaagtggtaaaccgaactctctcaactttacttagggttactcttggtaaaaatatgagcacatggcttgattgcattccttttatcgagtttgcttataatcgtgctgttcactccggtacaaaactgtctccttttgagatagtctacggaattaaccccttgtctccattggatttagtacctttgcctgagaaagaacaggtttgccaagatggtttgagacgtggagaaatcatcaagaaaatacatgacaaggcgaaagcgaacttagaaaataaggccgccgaaaacaaacgtaaagctgatcggggaaggaaggaaatattatttgaaccatgatagtaggattttactcaattaatccctaaaacactatcttgtcgttgtagtattttaggatgtcaatccaatccggtgtgatgcaaacagatgagatatgatcagaaagctctaagtcaagccaagcagatagttggttggttctaacagtcctagtatgcaataacagaaatgaagtgaaattaaaagcaggaatggcaatagcaggcaagtgaatgacaaagcagaaatgataacaggcaatcaaatggataaacgattcctaaggatggggtaatcgaatagtgtggtctacttaatctattcaggcggttgacaaaacttcacagaagctatccctagacaacaagttcaacaacagattaattcactcccgtgatagaaatgctgaagcaaagctagacactgacctaaatccctttagcgatctctaactaagcaggcattatcgaatcaacatgttaaaggcaataccctctctacagccaatcccttggggtagagtc

SEQ ID NO: 1569 - DNA, 1732 bp, Arabidopsis thaliana landsberg
gcgatggggacatcggagatgagcatacaaacggaaaacgggcaaatgggaatgccgagtaacgtttgctgtgtcgtggttgagtattgccccggcggcgctctcaagtcattcctcatcaaaactcgccgccgcaaactcgccttcaaagtcgttatccaactctcccttgatcttgctcgcgggtacattatttgattcatcaactacttccggtttaacccggtttaccattttattaaatcttgattacttatgtatatgttttaggttgagttacttgcactctcagaagattgtgcatagagacgtgaaaacggagaacatgcttttagataagtcacgcaccttaaagattgcagattttggtgtggctcgtctagaggcttcaaaccctaacgacatgaccggtgagaccggaaccttgggctatatggctcctgaggtgctaaacgggagtccctacaacagaaagtgcgatgtgtatagctttgggatatgtctttgggagatttactgttgcgacatgccttatcctgacctcagcttctccgaagtaacctccgccgtcgtccgccaggtctttcaaaacgacctttttaactacccttttcgtaattgattttgtggattaccacctataaagagtatatctatcaatctcttctttgaatgatatatagaatttgagaccagagatacctagatgttgtccaagctcgctggcgaacgtgatgaagaggtgttgggatgcgaatccggagaagcggccggagatggaggaagttgtggctatgttggaggctattgatacttccaaaggcggaggaatgattcctcctgaccaacaacaaggctgtttctgtttccgccgacaccgaggcccatgaagtacacacacatgcactacgttcccattattattataattaactcttactattttggaagaagagagattatttttaaaagttaattgtggggtaattaaaatgttttaattagtttggtgtttgatttataggatgaatgtcgtacctatttcaaacgatcatctcatacgttatacataacacacaacaaaacctaattcttgatcttcgcttgttttataattttccaatgatttatttgtttaatgcattcaacatttctgataaatataaagcattccatcatgaaaattcaaacatttcataattatatactatatttgtaggaaaaagacatgcacctttaatatactctcacaaaattaaaataaacagagtattaattacgaaccaagaaaaggaaaaagataagaggagttaaccggcgattttgtaactcgggttagcgaggttctctaaaccggagacaacttgaatggattcgataacatcaccaactttaagatcagctagaaaatcttcgttatcagtaacgtaaccaaagacagcgtaacgaccatccaagatgttggaattgcttggtgtcagctcactctcttttagcagccaaaacacttggcttgatcctgagtcattctcaaactcctgtttatatgttactcaataagtatatgtttcataagacataataatataaactatgaaaaagaagaagaagaagaagaaaggactcacttctcttgccattgccattgtcccaaaagcgttgaaaggaatcacaacctgagccttgtaaagaccaagttcctgttcaccaacacccaaaaaccaaacaaagc

SEQ ID NO: 1570 - DNA, 2104 bp, Arabidopsis thaliana landsberg
gcttctccttccacgcaggtcatcaagggtccggataatcgccacttgtaaagattttcatccgcgacaaagttcttagttccttcaactttgagtttacgagccttccatttgtccgagggcaacttcccttcggatatatagcttatgatcggttccatccattctgagctgcattcgtctgagtcatcttgatccgcgctgatttgtatcgggaggacgtgctcttcttcgccgagctcaatacttggcttttcaatgaattccactgggatgactcttctcaggctcgggtcggaggttgaggctagagcagctagggcatcggcagatgtattttctcctcatggaatccttgttaactcgaattcgtcaaaattcttttctagcttttgaacatgaaccaggtaggcttccatttttttgtcccgagctgtatattctccgttgaattgattcgcgacgagctgggaatcgcaaaaagcgcagattttttctatctttagcccccgagctatattaagtccggcaacgagtgcttcgtactcggccacattattggtagcttcgaagtttaacctgaatgactgctcgaggatttctcccgttggcgaggcgaggcggatgcctacaatggctctccattacgggtttggcgaggatgggtggtgttgctaggtacttcttgagttcctgaaaagcttcttcacatcggatcgtccactcgaactttttgtttccccgaagcacatagtaaaaggctaagcatttgtctgtcgatcgagagatgaaacggttaagggccgcaactcttccggttaggcgctgcacttctcgcttgttctgaggcgatgccattcccaacaatgcctcgatttgctttggatttgcctcgatgccacgatatgtgaccaggtacccgaggaactcgccggatcttactctgaagcgacacttcgcaggattgagtttgacgttgtataggtttagttgtttgaaacattcgcgcaggtgggttacgtgatctttctcttccatggatttcaccaacatgtcgtcaaagtagacctccattgtctttccgatctgtaaggcgaaaattttgttgacgaagcgttgataggtcgccccggcgttcttgagtccgaagggcatcactcggtagcaaaaaattccttgctctgtgtaaaaagcggatttttcttgatcttcggggttcatcatgatctagttgtaaccagcgaaagcatccataaacgacagtagcttgtttccagaagttgattccacgaggcgatcgatgtgtggtaatgggaagctgtcctttgggcaaactttgtttaagtctgtgaaatctacgcaaactctccattttccgtttttcttttttactacgactgggtttgcgatccagtcggggtatttcacctcggtgatggatccgatcttcaataatttttctacctcggcttttacggcttctgctcgttcccgacctaattttctcctcttctgcttgatgggtttaaaagttggatcgatgttgagctcgtgtgatacgatgttaacacttactccgggcaaatcctctagggaccaggcgaaagtattgacgttttctttgaggaaagtggtgagttcagctgttagttcttcttctagatctccgtcgatttctacgcatcgctcgggctttgcgtcgtcaaggcaaattgagatgaccggatcgggagttggtatcgtagattcccgagcttcttcgatctttagttgctacaactgctcggagatcgacttttcttcggctcggccaagtttggccttcttatgattcgcgttggccgtcgattcagtgacggggttcctgagcttgtacgctgccatgaagcagatgcgagcatttttctggtttctccacatggttttcacgccgtcgtgtgtgggaaattttaggcataggtgatatgtcgaggcgacagctcggaactgatttagccatagggtgccgataatcgcgttatacacggtcggttggtcggtaacagaaaaatcgacgatttttgttattcctttggctcggactggtagtttgatggttccgaga

SEQ ID NO: 1571 - DNA, 566 bp, Arabidopsis thaliana landsberg
cataatatgcaggtggtcgcctattgtaatgctctttgttgtaattttctttgttgtacgaactaagtatccttctaggactcatcactactctaatttaagtaagtttacctaagtttataagactattatgcaatataattacataatcacaaccacatggatacctatatcatctgtttaaaattgatatttattggaataaaagtacaacttttcgaattttttattgtaaaggtttaacagcatatgtcaaataataattgagcttacattggttaatgtgttttgtgggaaacaaattaaaattagccgtttaaatagttgattgattgatatgtcattaggtggtgtaagcggctgcatggaacgattctcaataacaatttacacacgcccctaacgctataggctatgaaggtcctatatatagatctaattaacttttcctgcaaaattcatcatgacgtttttttaaaaaaaattccaacaattcggtttaactccatgtggtcaggcggtggtttgaatatccctatcgcatattctttctatatgatttataa

SEQ ID NO: 1572 - DNA, 779 bp, Arabidopsis thaliana landsberg
cttttgtatcagaccgttttattagtttcatgcttggtgttcggccttacgtttcttcaccgctgttattattttccttatctgataaatgttttatagacttaacatttatttccgtcactcgcatccttttgtttgtcaattaacattactacttagaatgttcaataaacattcgttcttggaatctttaactgggacgacaacgattaataaatatgacattatattttaacattcctacttgaaaggtggatggattccgataattttacgtatatacatttaaaatttatgatcgcttaaggtttcttatttattcacatcgccatggtattccttgtttatcctggcagcatccatcactttcttcgtcaaaaaacgtccttgaaccttttttctacggtccctgcattcaaaatggataatttaaatatcccataatatacatattaactgataatgtttgacttaatagtattggtccattgcaggttgccctgttatgatccaatgacttgcatcgtgagcatctttttctggaggctctctacaaatggaagcgaaggttacatccttatagtcttaccatataaatattttattagtttttatctcacattaggtccatattttaccttgaattctctttttgaaaataatctttgtttccttggtcgctcaggcggtcgacgcacataaaatggagccagttttccaccctctatatcatttggtgaaggagtcagcatttccgtgtcgggtactggcattatcag

SEQ ID NO: 1573 - DNA, 652 bp, Arabidopsis thaliana landsberg
agggaaagctgctacgcctgcaggtaccggtccggaattcccgggtcgtcccatctcgtccgcttgtcttgtttgccgtctctgctaaatctcctactcgagcttgagctggacaacgaaaatagcgacgatagctacaaactttgaaggtatgaaaacagtagatgaagctgacgtgggcatctcctgttttatctcccagctccctggcttccgtggaatcctcaaacaaagatacgcagactttattgttaatgaagtagatatggatggtaatgtggttcatttgacatccttggacttgcctcctgagatggctgtgaaggaggaggataaagcgaaaagttgtgataatgtaccccaaaattatacttctgcagttgagtctttcaaatctatttccagtgttactgatgcagagcgtttggaaatattgatcaatcaagtcacctcaggaactgatggtgaagtcttaccagttgttcttgatccaagttctgacaaatccaagagaacggctatccacaactttgttaaagagaattcaagttcctagtgactgacactgtcgacggtcctgattctacttcaaaatgcatccgtgtgcgagtgaattaggagccaatacaacagggtaatagatcaaaaaacg

SEQ ID NO: 1574 - DNA, 727 bp, Arabidopsis thaliana landsberg
tcgatgataatcgatactccatgaagattttcttcgagattaggaagcagaagtatctcgaggccttggataggtaacttgtgtctctcaacaacaacaagaatcaaatgttttcatattgccaatcaatcacacctgctgcttcttctatctaggcatgatcgtcccaaggctgtcgatattttagtcaaagatttgaaagtgttttccacttttaatgaggagcttttcaaggaaatcactcagctcttgaccttagaaaacttcagggagaacgagcagttatccaagtatggggacacaaagtccgccagagctatcatgttggtggaactcaagaagttgattgaagctaatcctttattccgtgataaattgcagtttcctacccttagaacttcacgcctcaggactctgattaatcagaggtattctttgtcctttcttgttcacttcaacaaattttcttcttgtcagctactttaactccttgtttctatgtggctacataaacctgcagcttaaattggcaacaccagctttgtaagaacccaaggcctaatcctgatattaagactctctttgtcgatcattcctgccgcctaccaaatgatgcacgagcaccatcccctgtcaacaatccgcttcttggatcattaccaaaagccgagggatttcctcctctaggcgcacacggggtaggtcaatttccacctgatttttcgta

SEQ ID NO: 1575 - DNA, 2417 bp, Arabidopsis thaliana landsberg
  unsure (1)..(2417): unsure at all n locations
tgaccctcggatcggggttgagcggctcggatcacgatagccgaatgatgcattcccgaggtatctcgagacccgcctcttgatgattttccgggttggcatctgaggcacttcgagaccgggtcggggaacccttctgcgatgatgctccgaggcattctcgaggtcacctcgggatggttcttcgacatgatctccgaggtgtttaaaggccagttcgggatggttcttcgacgtgatctccgaggcattgatcatggtcagctcggttacctaggtgaaatccgaccccaatagtttgccccccagctcattgacttggcacgagagacgatgagcttcatgaaatggattcccgagccgacttttcatcttcttaagtctgaatttgtcgcttcatcttcccggacggtcaaacttccgttgcgtaccgccgactattttttgagaagcggaaatgtttctcgcttattcccaaggatcacgcgagtgtccctttttgccgggctcacgcgcttcaacgcgttttatctacttgctgcggacccgacgcacctccaaaaactctatatatggctagccactcctttaagaagttctcatttgaagttttcgaagaaaagaaacaaggtttgtttccttctctctgatcttgatattcatattgtttttctcttttttcgctgaagctccgccgtttctttgttatttttgatttttctggtttagaaatttcttgttttttggtcgtttctcatctcgttgagcatctccgaaccgagaatgagttctagtaagttttttttatcctgagcacctctctcgcctattccaccgactcgaatcatttacaaacggagagcggtttggacgtcctctaaagatgatgttgtatcttctttgagtgcccccgagcagatgacctctttcatggctcgggaagataccaacatcgatattgctcgagaattggatctgctcgatgatcccgagccgcctctcgttcggagatcccttgctcctatggttgatgaagccgggacatccaattggcgagatgtgcccgagcctttaatgtcgacgataaagaatgaggactttctttatttcggctccaatgagacagaagacattatgcgtctcaacgagcagagggctttcgagaaagccgagaaaaagaagaggaagaagaataaaaaggcgataatgccggatcctcctggctccacattatgcaccgagcagtctcttttggatctcaaggcccgatttggccttggtgcagtgaccttacgtgtgccaagccctgatgagcgagccgacgatccccctgcgtgtttctacattttgtacgaggggttctattatggctgcttcttgtggctgtcagtcccgaggctggttttggaatacgtgacgtcgtaccagatcgccctctcccagatcacgatgcgatccttgagacatttgctcgggattctggttcggagttatgaatctgagaccgacatcacgcttgctcatatgagaaatgtccttgagatccggcaggttcttaaatccaaagtgtatcggtacttgacgggtaggaaggttattgacgggttcccgagcaaggatgagccgtataccgatcactttttctttctggcccttgaagatgatgttcacgacgatctccttgggacagttttgacgagatgggggacttgggtagttatagctaaaattctgtttgtgcccgacgcgatttcatgattttttctgactgttgttttccttggttgcagaacgcaccctcaaattcctcgagccgattccagacgattttctttcggcgttgcgtctacttcacggtgtttcttgtccttccagcttggagtcctcggatcatcgtacccaattcttcgtagacatgcagtcgaccaagcttactttgagggaggtttacgcgaagaagaaggaggacaaggagaggcgcctgatggaggagaagcatcttaccgaggcggggttgatctcaccgcaagcttctcccgacgcgactttgcccgctgatgcnnnnnnnnnnnnnnnnnnnnnnnnnnnngagttggcgtctactgaggctcaggtggccgatctgcccgctgatgcgcctgtatccgaggcggttgttgtgttgccgacgactgataaggcagcagggaagcgtgttcggacggatgactcctcgtccaagaagaagaagagcaaaaggaagaagctctcaaacgacgaggcggagaaggagctcccgatctttgaagatcggatcgcctttgcaaaccgtcacggggcctgtgcgggtcctctactccctccgccaaaaactctcttagagtcgcggaagtatgccgagacggcatctcacttctgcaggtacgtgtaaccctttt

SEQ ID NO: 1576 - DNA, 490 bp, Arabidopsis thaliana landsberg
agaagaagattaataagaagaaccaagtcgctgtcgaatctgatgaggacgaggatgttcattctcgtgatttggatggtcagggagaacagcagtcgctcgtggatatggtgtccaacttgatctctcccttaaactcaaggtttgacaccgtcgatactagcataaaagaaatgtccttccgtctggatgtgaaggaaggtttggatcgattgacaacgatgtcaaacagattaaagagtagctgaaggccatatctgactcaaaatcaagcagttatattagagatatgtttttagccaaaacacagccccaaacgcagcaagacaattctaaggcccaaactcaacagacaccagacgttccaaagaaacctacaaataaccaatctgctacttttagtcctcctccggtaaacttttagttagttatgaccgagttatctgaatattattccgctgcgctataacttttagttagttatcgctga

SEQ ID NO: 1577 - DNA, 662 bp, Arabidopsis thaliana landsberg
  unsure (1)..(662): unsure at all n locations
gcatgattgggatattagttatacactggcccatataaattgcactgtgagtcgactttccaataagatgatgtagtgggggatgtaatgatcaaataaacactagtagtgatcaaatctttactttacaaaaagtaggaggaaaatgtttgggctagaatttttaaaaagtttcaactgctttttgtttgtcatttccacttttttactctttttttgggggtaatcccgtagatgcttctcgttagtaacacaacacatggaaagcgtatataaacacaatatcaaaatcttccaattaagacatactttatacaaattgtcaaaaaaaaacattttttatataataattgacaaggacagtctaaatggcatacacttcaattgcttttgatataagtaattatatatatgaaagttggacaactctctccatatgagagtgacacatcatcattaaaaaataataaaacttagtgataaaaatttaaaagtttcacattgcattaaatcatccattaatctttactcttaacaaaatatcttcatttaaaagaaaaaaatacanaaaatcatgttaatgtattaaacactancttcattntactnttctttatttgtattttataatagncattacttgataatgnactagaaatttc

SEQ ID NO: 1578 - DNA, 753 bp, Arabidopsis thaliana landsberg
tgcaaaaacacaaattcacgctcaatcacaacaaaattctaaaacacaaattcacgctcaaacgaaatttaaacacacaaaaacataacacaaacacacttccaaacgcatgcatattcaaaagaataaaaaagaaaacacaattcacgctcaatcacagaaaaattctaactcaaacagtaaaactccacaataggaacaaaaaacttcacattccacgaattaatgtgtaacttgcagggaagagtcctcttctgattcccaggtacttgtttattctggttatctccataatgtttaagactttttaaatttgatgacctttgaatcggttttgattattaaatggttatagtttatggaggaaccatggacggtagattggatgacatggtcttgtgatgctcgaaactcgattgttctcgaactagtcagtaatattaaacattgacatttgatgggttctttctcgtttgttctcagctcttcggttccctttgttttgattattgattacatattaactctgcccttatgtgtataatgcatcttccatggtagatcattctaccgagcttttcttcacacaagtcaaataagaccaattctgcaaaaagcttaacctctgtcaagaagtgacggcccttgcttcagactgtcaccaaactcaaggatcttgagacaaaggtttgcaccttcctccactatcacaaactttaattttgaattcgcaattgagatattgctgttaaa

SEQ ID NO: 1579 - DNA, 429 bp, Arabidopsis thaliana landsberg
gtttggtatgcatttggagattatggagcatgctggagatcaacagacaacttaagctgcagaaacattccgtttaccaaaatgcacgtaggtgtcgaacgacaccattcctggtgtcgagcgacgccaatacctgacggcaatttcgagacgcaacttattgatgttttgaagatttccaaattcggcccataactttttcctatgtttaattaaggcccaacacgttttaagacataaatatagtttttaggtcattgttttagaccctaagctttgggaggctattccctggatctcttttgtactttggcagcaaaaccctttgggaggctcatataagggatctgctttagatactaggtgaactaatcagacttgataataatgcatgtctaagttaaaagatcttcggcttctcctgttatt

SEQ ID NO: 1580 - DNA, 1589 bp, Arabidopsis thaliana landsberg
  unsure (1)..(1589): unsure at all n locations
aatcaaaattttcaacctttttttcttcagattttgtttcggatttgttctctttatcacttgaactctccccagtgagatgagccggactcaaaatttcatcatctttctgattttcttctgacactggtcctggactttgacctggctttcccttgacctgaatgaacattgcaagaaaaatatctgtcacgccttattaatgagagtggttcaataaaaacaaggattaagtcagcgaaaagcaaatttaacctttgggcgagctttcctttgagcgtcccttgctttaataccagaatccggggttatataatccaacaggtctgatacactgttattgggaagaaagctcattggttatatcactcaggacaagatttacgcaagatagaaatttgtactactggtctaggcaaatggtctgcatttaaattttcatttttggtagtcagttctattaatatcttttggcactcatttccattttgtaaacagtgctataagatggaatgcaagagtataaaatcatatatttaaaagacaaatgttttaagggtaatattagaaactaactatagaattgaaaagaattgagtaactaaccattgtcatttttctatggataaataattatatgacggcataagacagttcaaaactatccttgcaagttgaaccaaaagtaagtttatgcagatatatttgatgttttttagtaaatcgcatgaaacatgttaaaatgacacgatatttataaaaaaatgacattttttataacatacattttacacaaatagcatgttatataaacaaaatatcatttcatttgaaaagttgaaccaggagcaaacttatacgaagataaaataatagatttgagaaagttttaacatttaaatcatgtttttagaagaaataatagatttgagggtgtactctgacaccatagctattttgttaattcttttacaatccatagtcatctagtgcatattctcatgttttaatacctgagatggcctttgctggaaatagaggcgtctggcttgggagtaccatttcgtgcagcttcttgctgttccagagctttggactcgaaatattcaagccacgcagccgcatcctaacatagttttagagcgtaagaaatacattttaactgaaactccctgtaaatcataactaattaagcacctgtgtccgaagatcctcagggcctagttttgcttgtagaatctgtagagtggtctgctcatgttgaacgctcaaggagtatgcgtccatcagagaaagagcaatagcaatggcatggtagcttgcagcagtctgaaaagaaacataacagtagtgaattcatgttttagcgtatcatttagcttccatggtaaattttacttattaagcntaagccttcatagaatgggaattcactgtcaaaaccgatatccataaccttcatatggtttgactttcaaccaactatttttactatttagtcttctttttccgtggttaggatattgcaaaagataaaatttaagtttatgganntatcggtttganaagaggccataaaattgcaatca

SEQ ID NO: 1581 - DNA, 1461 bp, Arabidopsis thaliana landsberg
taggtgtttaataagaatcggcttatctactaaggtgaacttatcgaactcgtttagcatgcgtgttaaggtataggatttcacggcacaacaccgggaattttagctctaggcatagtgagtttcacggaacatcaccagttattctgatattagaatttgagtttaagaacggtttgataacaacctagctatatctagatctactaatcaattgtttaatgagaataccctaaacccaagcattttattagcttgatttacaaccaaccaatcctactatttgcttatttactatgtttttattttcttacactcatctagcttaatctcaatacttaggctcattgtgtgaacaaaagaattttgtgaaattctatccttaagtacaattgacgatctcttatttgagagagtggtcttaggactaatttgacccatatcaaatttggcgccgttggcgaagttctctacgattcactattagattaggattagaatttggtttaagcttttatttttctttttctttttatttacttagtctttctcttttcttttcttgtgtttttcaggtgtttgtctaatcacagaaccaggagcaagcgagaaacatgagagagagtaagattggtgggatcatggctaagcttaatgtggtcacaataaacttgtggaggatgtcgattatgttcgtagcagaggttttccgaatcagagatttgatcaccaacaaggctatagaggttcctatgggaatggtccaactagctacactcagaattctcagttccaacaaccgcttcagaatagcaatagtttcagcttcacaaagaactatgatcttgcttcttaccaacccccaccctccacccgcacctagaagcaagatataatcattgctggaacagattctggatggtcaacagtggatcttagagagacctacccctagatggaatgagagcagcctcagcacttcttgggatgctgtttcaatggaaagtgagtatgagttagaaaagattgaggggagtgacgatttttgagttgcagaggcagtgtcgaacgataccaacccttggtgtcgatcgacaccagtgcatatatatgagccattaggctgtgacgaagcaaaatcgagcaggctcgacactgatctctagagtcgctcgacacacattgatagtgttgaccgacaccacctgggtgtcgatccacaacaataccaacctgaggaagtgtcgacgtttgacggagcagaatcgaccgagattgacagagcatgattgataccagactcccgatttgaatgccactaaggacagtgacgtttaagtctgggagaggcagttactaactacgtttttctttttgagtcttattcaaactcttatatttcttattttttagtcgttttattgagtcacattttgttaggaattatgatctcttttcttt

SEQ ID NO: 1582 - DNA, 673 bp, Arabidopsis thaliana landsberg
  unsure (1)..(673): unsure at all n locations
ccgaagacggctcttggaagagaggactcactgtcaaatgtgttgaaattcgtcccaaaaactaaggcgtgatgcctgtacttgtgtatgaattatgcatacttcgttattatcaaatatcaactgatcacctatttcaatgatattaaacattataaaaccttttttggcatttgtaatccacatgatctataaaaataaggttgccgcattattcccccatgtacatgttactttcttaacttttcaagtctttatttatcgccaccgcgcgtctatgatccgaatatcattagaaaaagcccagaaaaaaagtcatttatttttaatttgatcgtttaatacttgtagttttaaatttagaaacaaaatacttcacttattttttgttatctcttaaaaccatcgtcttttaaatttcggtaatttcgaacctaccatttaacatgcgttaatgaccgtaacagaaccatttaaattaaattttaaccctacgtatacaatgagtttgttgtcttggtctggtggtaatactaaggcagggtaacccttaattctccggttcgaactcgcctctatcccaaataaataaaaaaattttgctttttttttttgtttttcaacttcatncttcttcaccattcctgcaaattgaaattttttcttttatcac

SEQ ID NO: 1583 - DNA, 2269 bp, Arabidopsis thaliana landsberg
ctaatcaaccgccaaatgaacaatctcttcatgtcttggatttcttgttatagatgataaatgtctagtgtgcttgctttttcttattttctatatgttcctacgttcttgtcttcttgatgtttcttaatctctctatatatgttcctgatttcattgttcttgttcattaccaccttatgtttttaatttttagtaagtactaaagaaaatacgacaagggctcttgacgactttgcttgaaaattgctcaatcagggtttccaactatgaaaaaataactcaagaactgaatagatggaaaatataaagtgaaatgtcgacataggaaagttccagaaaaacaactactttttatttatttagagcatattgtttcatagactagagataaatactgtgaccaatgtaataggtttccctgaaccgagaagattatgatctattaattaattacagcatcaacaagattatttagtatagataataatattcggatgctgcgggatgctccttgtagctagatgatgaaccggaagtcgtgcacgttccagtcatcattaaatctcgccctgtacctctcaaagaacctcacttgcatggtgcgtctcacaaccaatgctgtcgtacatcttgttccatagtgttcgttttcaatctgaatcaaaaaggtaaaaaagaagaagagagattataataatataacgcaggctaggtgatgatcataaaaaaggtggctcaattataatgttttgagtttcttaccaaagtgtcgacgacaaagatagagctcagtgggtctccgtttatagcttcgactgtatcatacataacctcctcagcaagccccgagattggttctggtagttctctgttaatccgctcagaaaaatagcgtttcagacgtaagtcctgcatgagaccaaaaaaaaaaagggggcttttaagctatacatttccatatgaaaagatttgcaaataaatactctgttacaagattcttgtactaaattaccctgtgtccaacttcggaatcgagtccagctgaagatagggtatgaacaccaggaccaacaggctctgtatagaccatgccatcttcagacaaagacggtttgtagatataaaacattgagtttgaaactatgtcggccacaattagatgataggctatccccgtgttacgtccggaatctaaagccaatgaatctgcaaagtcctctggactcaagttgctctgtaatcaacgcaatcccgtgagaatccagatagtttaaccaaaaaatcaacaaaaagaaatcattaatcgaacctttaagaaatcaagagtacgacactcggcgccgatgattctgtctctgttaacgggccctgcctccacaagaaaagcgactcggcctcgaatagaaatacctaaccacgtcccatcggtctctgcgcaacgaccactcaatacctggctttcatcccattcccaagccgcctttcctattgacctattaatcacccatacaaaatacaggttcatcaacaatgtctgatgcacaaattataacctaaaacgtcgaaagaattttaaacttgccttgattgccagttctctctattctgcagcagcgtcagtatgttttctccctctccccattggaatgctacgatccccattttcttgagagaattttgtcaaagttttttgctattgaatctcttgctctgtgttgttcttgttgtcattttgagttgtaaccccctctctgtttttatagccgagagatgattcactgtgctctgctttttcctttgcttgtcagcttcttccaacataagtattccaacgcgtttaagagcttctttatccaaatttggatattatagcttttgctgttttctgtcaccatcatacatactctctcctccattcactaaccaccagaagccgtgtctacgtgtatctatttacttttacggattcatgcatgtaaaaccttttgctgattgagtaaggagtaaagaggactcttgtctatgtggaaccattcagaattgtttttactatactaagaaaatacaacaagtggtttactagtagcacacaagtttataactcaaatccaactactctttggtcttaattagctttggtagtccgattctattggctctagctagtgttgattgagtaaggttgagtcatttgtatatggaaccagttagaaagtacttttactaatccgagtaaaattgaaatgtagacgttaaagaaaacacg

SEQ ID NO: 1584 - DNA, 1177 bp, Arabidopsis thaliana landsberg
gaaccaagaggaggatccaaggacgatttcgaaactgttctcaaggaatactatgattcgataagcggaaagaacagattgattggaagaaatagcagcgttaagaaagcagggtctgttataactgaggctcaagatgattccaagagaggatctgcatttcttgcagtatgtagaggaaaggttttttttttttttttttgtcttagtttctattattgatgtttatttaaagggaccttatgagcatcagagcatgacatgatttgagtttaaactctacatgtttctctcaggtttcagaagggatggatttttctgatgacaacgccagggcagtggtatcctttttttaagtcctctgctgctatagaaactttaggatatttttgatttatactactcaaattggtttatgaatggaactgttaaaccttgatgattacttacagataattgttggcattccacttccaaacttgtaagaatctttcagcttcgttcgaaatcgtctttggagggtaacagtttttctaaggaatcactttcttgccaggggcgatattctagtcgagctaaagagaaaatataatgataccaacaaatcatctaaaaaccttcttggagggagtgagtggtattgccaacaggcgtatcgtgctttaaatcaagcagcaggacgatgtatccgtcataggtttgattatggtgccatcatattcttaggtaattttataagacttcaatatctatcgaaacgttttgttttaaattcagttattgtagctctgaggttaccgacaaccaaggaacatgagcgtactatttcaaagcggctaaggcatctatcaaagtgtatgataaatttcgaaagcttcatatgagaaaggagctaagcatatgttttctcaacgctgtgacgggaggaaaccatgcgcctcctttagtggccactatattacatacagaaccattaatattctttgagaatttaatgcacgagagagttgacagcatgatgtacgagtctcatgagcagaacttgatctttgaaaaccacagaaatgaattcttaagaaaggagaatcagactcagaacatatctagtgctgtggaaccaaagcaaacaattcctgctcacacattcattcatgttaaaagggaagctgaatgctgc

SEQ ID NO: 1585 - DNA, 689 bp, Arabidopsis thaliana landsberg
atggcttatacacattatcttataggcaaagatgtgtttgttttgtttcttgtgttggttatcaatcgaatcatgtgtgtgtgttttattttgtttgctaaacggctgaagtaacttgccgttttttcgtttttaattactgtaatagtattcatgttgcgactaacatatagctttatttggctgatttatttaggcaaattttcatgtttgtttggtggcttacttgtcactttatcaattaaaaaaatgatgtcggatgcaacagtccatgtcatcatcatcaaaggaaatacgaaacgttttttttttcaactcgtcttcttcacatgagtttttcacatcatcggaatttccaattcatcaccgtcttcctcattcttctttcatccttctctcgatacgattgggtaaaaaatttgtatttaacaccgtcgataaatgatgtagagttgtgcaaatagatacggaaataacgcacgacaagcttgtgaagtcggtgttcgatgactacggattgagtgagttgagctatcagttaaagctaccaagataccgcttctcagagagaccatcatatctagctttttatttttattttgaaagagaacaaaaatctcctttcatcaataaacttttgatgattttttcatacgaagaatgcctttgaataagctacaaactcttaa

SEQ ID NO: 1586 - DNA, 444 bp, Arabidopsis thaliana landsberg
agactcaggtggatactcggtagaagcgtcttttccacaaagaatgatttctcgacatgccaaatggattgaattcatcagtacataatccgagataaacgttagggggttcttcggcaaacatgggatgtagctcttggaaatatctccactccgacgcatatgaaggatgattcatttctccttcttttgtttggtgctcggcatgctaacgcattgcagctgctgtcatgtggctctgatacatgctcttcaatcgggcaccaataggtcgataccacatacgactatatgggactgtggttcttggacgcgcgtcatacataggcttccatctttgagcactacaaaaccgacatttatctgccttttcgacttctatctagaaaagcataccattgttaatacaaacatcgattgtataataaggaaggcctaaattgc

SEQ ID NO: 1587 - DNA, 784 bp, Arabidopsis thaliana landsberg
tgctttctttctccaactcctaggttcaagctgctccttagctccatgatccaagcttcccattatcacatcatcctctcccacttgaaaaggatttgacctcaaatctgttttatcttgcaaatccagagagtaggcattgtcgttgatcctcttgagaactttaaaaggtccatccatctgcggataagtttagactttctctcgttaggaaaacgttcttttcggaggtgaatccaaaccaagtctccttcgttgaagataagttccttcctgcttttatttgcatgcttagcatattgtttggtcttctcttcaatgttcttttgcgcctgctcatgaatctgctgcactaaatctgctttcttctttccatccatgctcactctttcactcaaaggtaaaggcatcaaattcaaaggagtaatgggattgaacccataaacaatttgaaaaggcgagaatagtagcagaatgcacagaatgattatatgcaaactcaacatgaggtaaacaatcctcccaagtctttaaattcttttttatcaatgcacgcaggagtgtagacaaagtcctattaactacctcagtttgtccatcagtttgcgggtgacaagtagtagagaataacaacttagttcctaacttagaccaaaacgttttccaaaagtaactaaggaacttagtgtctctatctgatactgtggttttaggcattccatgtaagcgaacaacttccataaagaacagattggctatatgcatggcatcatcagttttatga

SEQ ID NO: 1588 - DNA, 1437 bp, Arabidopsis thaliana landsberg
  unsure (1)..(1437): unsure at all n locations
agcgcaataagccagtggacttgagtgacatggtcgtcgagcatgtgtagcagaatagtaggaagaggaaaatgcatgacaaggaagagaagaaaaagaaagatttcaacttctgaggtgcgttatggaagagacaaaaaaaaaaaagattttggattctggacatgagacatagaaagagattcatgttccagaattattagtcttgagtaagagatctgangtttttagtcttaatgcttattaaaaaaaaaaaaaaaatgttagaccaccaatgatgtaaatttttaaataggtgattgcatcattgtgtaaacctaatatttacattttgaaggatttggtctttctgcagtatgtaagttaattcaatccccttattattctgacttgtaaggggattcaaaccccatcaatggtttctaaacttaagtttcttattttagagagataagttttattataaaaagatgtgtgggttttttgattaatgaagaaaccatctccaaaataccttatataagaaattttggagagaatttctaaatatttaagaaacccatataattaaataatattatttttgttgttttaatgttaaaaaacttatatttagaaaccaccaatgaaattcctctaaacattaacattgcatatagtcataaaaaaaatatctattttctttttggttctctttttaatatagctttcttggtcaacacttattcttaaatatcttagaaattaataaattatttcgtaactcgttgaaagataactggccacactttttgtgtatgactcagacatagtttttgtccactcggtcccatcatgcaagtagataaacactgaatcaccaaatcttgtttgagatttagaaaaaaaggaagctccaagagatggcaagagttgttaaaatcgattctgcagagtcatggaatttctatgtgagtcaagccaagaatcagaattgtcccgtaagtctctcttcctcttatcactttcgttttctagtagccaaaatgaaatctgatttagatccaagacctatgaaagaatcaagatcttaggattagagttttatggagaatttgatttacaattggttaaatccaaattgtgttactctttaagatatgaagttagtgagaatgaaccatgaatattaatgttcaggattgtgaatgaatggctctgtcttgtttgtttatatgaattaccaagaacggttgttcctttatggttttttgcagattgtggctcatttcacggcattatggggtattccttctgtggttatgaactccttcttcgaagagcttgcgtttaactataaggatgctctgtttctaatagttggtgttgatgaagttaaaggaaaactacttatgtgtctctctacttgatatggctttctactttggcttctttgtt

SEQ ID NO: 1589 - DNA, 842 bp, Arabidopsis thaliana landsberg
gattcttacacgtaagtctatctcatctctcgaataattattcccatatgaaatttaataaaaatcaatttggtttcaaattactaatgatatcaatatctcgatattaggcatgagataagtgagtatacctagagctaagtcccaagtacaatatcataactgctcgacctaagatgattgccaaggtgtttattgtatggtcgcatcagtaaaatctatagacttataatgtcagagttcactgatttcattacattaaaacagaaaaagtcttaatctaaaactagctgaaaccccccattactttgcacaacaacaagatattgtaagaataagctcacttgtgttcttgaaaaaattatttgcaaagattcacaatgtcaatgcttaaatgcttagagacttagaaaactgaaaattattttatgcctttgggtgacagtttttatctttttgtttaataattttggatttatgtatatgaaactttcaatttgttttataaatagtaatggttattaaaaattattgcggtacttttacctttaatatatattcttttcgaaacaactcaacaataatcactatattcaaattttgttttttgggtcaaccatattcaaattctttcataaatataataggaaaaacattatttaccataaattaaacatatccatccaatatatatgtacatgtatgtttatatccatatgcttggtaagttttcaattttgatttcatatgcaaaaacaaaaaggaaagaaatcttagatcaatggttcagattcgttagagaaagtcggatcgccaactttgcttgattatttccattttct

SEQ ID NO: 1590 - DNA, 637 bp, Arabidopsis thaliana landsberg
tgatgatgagtcatgagacctacttgtagaaccaaattaccaaagaaacaaagaaactggagcgtctacgtcttgaaaaccgagaaactcagcttacacattttatgtttgattgtgttgagggtaagataagtgagcatcagtatggtgcaagggaccttcaagatttaagttttcatattgatcactatatcaatcagcttaattccagggtcaagatccttacaaacaatggtgagtcttcttcttccgttcctcctctacttcatacttcagttgcgggtgcgggtgcagctcctcttcctgttgcgggtgccgatcttccgatggatcagaatcagcatgagccgattcagctctatatccctattggtcttagttatcatattcaataccaacatgaaatctatgataatttcagtctggatccaaatcatcagtatgcgtttgaacatgatccactcatgaatatgtcgatggaatatccttatcaacaagtgggatatgttggagagcatgcgcacatcctttacatgaacggaaactactacaactaccaccaaacaccaaccgatggtcttactaccaccggtcacatgcctttgaacaacagcaccagccacaccaccgatgtgtg

SEQ ID NO: 1591 - DNA, 499 bp, Arabidopsis thaliana landsberg
  unsure (1)..(499): unsure at all n locations
tcgaagtttcgatcaactcaactcaacgcttctcatgaaccctaatgagttgaaatttttgactcaaatgagttgatgggtcaaatgagttattgggtcaattggtttgatgaataaaatgagttgggttgtaatggttaatggtttcaatggtttacccaattaacccatcaacccataactcatttaaccctaaactcatttgattataagttgagttgagttgggtaacccattttgacaccccatataaccaaaggaataaaaaaaaaaagataagttggaaagtaggcagtttttgctaaaataatttgagaagtagatattttttttagaaataggaggcatagngtagttttatctctcctctctaatagaactccccctctaatacaacttttagtaaagtaccattttacccttctgttgttttgatgaaataaaatgggcctcattaaaagcagcccaatatcatcttcaatttcgaattgttcatggg

SEQ ID NO: 1592 - DNA, 447 bp, Arabidopsis thaliana landsberg
ggttctctatatacttgcccagagtaagcatcaaaggggaaggggatgagctcaacgtcgtcccaacgtttaaacatgttaagcagaagaggagaaaattgggttgggaggcctgcccaaagaaaacgggaactggagagtgtgcgtagacttgattgacctgaacaaagcctgcccaaaggacagctttccattgctgcatatcgatcgcctcggggaatctacctctggagacaaactgctatcattcatggacgctttcgttgggtacaaccaaatcatgatgaacccgtatgatcaagacaaaaccgttgtttacacggaacaagaaatgttttgctaatgagatgatgccggttccacttaagaacgccagggtaacttatcaacgcttcgacaacaagatcttctcattgcagaccgggctatcaatggaagtatacatcg

SEQ ID NO: 1593 - DNA, 669 bp, Arabidopsis thaliana landsberg
atgcagtagcatcacccgttcatcctgtcttttcaattggaccaactttacccgagcgggctccctagtcaggttcacatccatgagacggacgagtaaggaaacaaggcttcatcgacgtggactgaacacacggcgaaataagagctgtgagatcatttggcagataaagtaaccatggctttaatcctcgaagactataagaaacatatccaaatgtcgaccttgagcttttataatttctcctgtcaaagaagtgacaagaacagctttacattttgggatgttcgatatattgacaggagtttcctgtctttgtgtgcaggatgagatggtccatgacgcgttggtagtatccaccttgatcgcaaaaaaactcgaatttgaatcccgagtctctcatatctgctttggataagtgatcatggtagtaccaagtgacgatatgaaagataccgagccaagtggtgaaagacggtttctttttgcggaaacagcttcgttagttcggtttggaaagttggattaaaccataaagatggaacaaagttaacattggagtcaacaatcaaccatgggacgctgccgattaaattttgatccttttggtcggaaaacatcttatcactatcccttgaatcatgggggagatgcatatatagaagtgac

SEQ ID NO: 1594 - DNA, 930 bp, Arabidopsis thaliana landsberg
aacctgaaagcgagtagaggtgctcttgatgaagatagccgccgaggttgatgttgtaatggaaagatgagaacaaacagctgtttatgttgttagatgagaaagaaggaaatgaagactctaatgttgaggatgctagtgagaaagttgatgtctttcaagaaacagggtcgaatgttcttcagactatatattgtggagctatcagctattgaggctctttccttctagttttgagttgaggaagcgtttcctggagattgtgacaccaagcttgagtcaatacaagaggtcaaatcacaactctttttccttaacattgcaggttcttagctcttcctcgtcctagtcttattcgatacaaagattgcattgaaacagagagcaaccttgcaccactaggcgataaagactgtctcactaatgtccgaaagttatatgattctgctgttgcaagttactactcaatggagaacaaggtaagtttttgtttcacagaactcaaatttaggcttaccctgaagccactctgcatacaaatgttttgtggtgtttattgccgcgccagaaagactctaaaggaagcagcaggtttcattcttcgatctgatttgttagtcttatgatggaaacacaatgttattgcccccacacttttgttatataaaacagactatagtagatttgatattaattttgttaaggtttatatatacatattcagtagacaatttgattgtgaatacaaactattcaatgttaaaagcaagactcgttctaaggaggcaacaacaagtgaaccataatttatacttttgaggatttagagatttaactgattctaattggttgaaaaaaaaagccacaggagaatccaacaactacgaactggtcattggtcaagagtctcttcctattggtcaaacattt

SEQ ID NO: 1595 - DNA, 561 bp, Arabidopsis thaliana landsberg
aagcacacgcggtcatgtgttttatctcaacgaatgtcctattacatggtgttctcaaaaacagcaagttgtgtcactttcttcttgcgaagcagagttcatggctgccaccgaagctgctaaacaggctattttgttacaagatctctttgccgaagtcacaggaactgaatgtgagagagtggtgatattagttgacaataagtctgccattgcactcactaagaatccagtatttcacgggaggatcaagcatatacatcgaaggtaccatttcattagagaatgtgttgagaatggtcttgtcggagttgagcaaaaggttgacattttaactaaggcacttggaagagtcaagttcatagagatgagggagctcattggagttcaagaagaaccaaaggaggatttcaagcttaagagggagaatgttggataagcttgaaatgacttgaggaataagtcattaaataatacaaaagattatgttaaatcttaaggagttatcttaagatataagttaggagttatctaatattaatcctcgcatgattagattta

SEQ ID NO: 1596 - DNA, 777 bp, Arabidopsis thaliana landsberg
gataaacggaacttaggtctaaacaatgacctctaaaactatatataagacctataatacgtccagagactaataatgcaaattggaaagtcttctggggcaaatacctgaaaagacacaaaaagactcaagaaataacataaagactcaaaatcatatacctaaaacatagataaattcagtaaaaatagagatatatcaaaatcctacactcctggtgtcgatcgacacttccctctgaacccggaatcctaaatcgtccttagcttccttttccttagtttttgctccaaaatgtctcctaatctccattgttgtctcaatgaataaaatacctgaaaagacactaaaaagactcgagaaataacataaagactcaaaatcttatacctaaaacatagataaaatcagtaaaaatagggatatatcaaaggtgaagagaatctaaacttcaacatcaaatgagagaagtgatagagttaaaaaccaatttagaagttaaaaccttttatgagaataatagaaaacaatatagagattcaaaagaaaagtttattgacttgacgtagctacctctcgacgaggtggacaaaaaaaatttactaacaaggaaaggaatgaatttcgaaagaaaaagatatgaaaccatggttaaaatttttgggaaggttattgacaacattactggaataggaccaaaaaattcatttaagaatgaatggaaaaaggagaaaccaccgttttggaaaggtaaccaaaaaaccaaaagaaaaaacc

SEQ ID NO: 1597 - DNA, 759 bp, Arabidopsis thaliana landsberg
cctcacaaaagccttcccaaccatttcctaaagcgagagttccatctagcgacaacatatatcccggccattcgactccgttttcacccaaaagagttatcttcccaagtttgttgttgatgccattagccttcatgaacttacttggaagaatctgcaaaagatttcaacaaacacatctctcattaccatttataattcaacaacagaaacaagaaatagtttgaccaagttaccagtttacaggctgtaacatcttctggtgtaagtgctaatgtcacgaatctgtttacgattgttggggaggatgaatctctactttttggttctaaaaaaatggactcttccttgttagatttagaactgctaaactttgtacgtaacaaactgagcacaggatttgtgtcttcccatattaactccatcgtaaaggagtcgcctgactttaagtcttttgtatcagcaaactctttccaaccctttcccaaactcattgttcctttcttgtcccgtttaaccgttgtcagccacttcctaccatctgtatccaatagatatatcgttccaggctggttaatattgttctcccttgcaaattgcgctgaaagaatctagaaaacaaattgatactcttattatgtgataaaaccagtaagagtaaaatagagaaaaaaactaattctctgaaacaagagttgtttgataaactgaccagcctattttttccgacacaggttggtgtaattgtaaatgttacaa

SEQ ID NO: 1598 - DNA, 667 bp, Arabidopsis thaliana landsberg
cctctactacgaaaacgctcaaccattggaggaggatattcttatagaagaagctactgaggatgggatgggtgaagacagagaagtcgagtttgacactagcatgtatcattttagtgagcatgtacctccagcgagggaaagcaagagtttgagtgaagctcacatgaacaacaacaagctgtacaagtggtgcaagaaacatgataagttactcgccaagtgctacaagactatcaagtttctgacaaataagctgagctgctcctcttgcactacagctattccacagggacatccagctttggacatgccatcgaggagatttgatgagcctaagccaggtcagtacaggcctgagcctagtgagcagagagtctgacatgtccctgttagacattcatcattcgagtccagggaacacaagaggagaaagaaggctacactctttcgctctagcagaagatcacgttttattcactcgaggagatcactcgaccgcagtggtggctgcagcaaaaggagagaggtccgagtatcctctaagcgtgtgttgtgtgatttaaaatttggggggagggctcacgaaagtgcgtgttgcattgaatatactcttgaggtctacatttatctaaggcattgaaaaaccaaaaaaaaaaaaaaaaaa

SEQ ID NO: 1599 - DNA, 766 bp, Arabidopsis thaliana landsberg
caactctacctttccattgccaaaggtcccattctttttttttgcaaatagtgcactggctaaagacctatgaaagtatctaaccaccagactacttatctcgttgctcttagtcctagaggatgaaaacccatgttaagacccaagcgtggcccataatgactgaagctctctcttgtcaaaacaatgactcgtgtcttttctgctttgaaatccatacatcagctcgagatgctcgattggaagccgatactctatgtcatacacacagaaatccaagtatcccaaacttccgtctggcctgattccatcgtcttctgactctccatataagaacaattccacggatgaaagaaactggatggtctcttcctcatacccctccattgcgcttcagcagcttgtaatactcgtttcgagttgcacacttctctgattccaaatcatcaccacctcctctctctgtttgatcagcttcctctggtgaagccatttcttcctcaaagtcttcatctaccagttccaacctcctccccacgggcttctttcctcgtgtgctgtctaccttgttccttgagaattcccttgcaaaggacttactcgaccttcaggatcgagtatttccagcgggagagctggaagtttcttcttcttgcatcacttcctcctcttggcttgattcgctgtgatcgatctcgaaacttgcttgttctctcctactcgaccccttgggtgatggttcagaaagttctcgagctactgcatg

SEQ ID NO: 1600 - DNA, 540 bp, Arabidopsis thaliana landsberg
agcttattttagaaggtgaatcgaagatgacgtggcatgagagaagagtctgtacgactgtacctacttttaatagtaagagagagtagagaaaaatatatcttgagtgatcattgttgtgtaaagaggattaaagcttcatgtaactccaagcttatcaatttaggactttgattcatttgcaattggattaacggataagaaagacaaaggattatgtttccgttcttatccattattattccaagaagaacagattttgtgatacattttgtaaagattcatggccttaataatgcttataatcgaccggaaaaaagttcatagatgaactaaatcatataggcaaattagatggaagcaaatcataacaacgttctttgaagaactaagtcatcaattattattaaacacaaatatcaatagctaaatgaagaccaaagacctaagtcttcatcagttcaagaaactcactctctccaaaacagcttttgcaccaaatgcctttaacttttctacgatcttctctccttcttactt

SEQ ID NO: 1601 - DNA, 734 bp, Arabidopsis thaliana landsberg
taataaaaactgtttataactctagttttgtcatcatagcttttatgactactacaaagattaatatgatcttcataatatgcatatgtaaaacagtttatgaatgatgtgatcaatagttgtgcaaagattgtacaattgttcttaccgatgcatattagttgtgacgtagaatacataattttatatgtatatatatcaaatctttaaatagagactcaactgcctctcataatattctttaaacacaaaaccattattagagaagatctccaaataccgccgtccaccgccaccaacacctagtcctcttcatccttgatttggagacattcattgtaggcaccgcttactccataaccccatggttgggactactatagccaccttgataaccaccggattggcatgattccttgaaagctaccgatgtttccatgattgacttagggagctgctttgactatcgtcatctccggcgatgaagctgctcaatgattttttttacaacctatatctgaccagttcaaccggttagcagatcaatggcgaattttcccagtttgaagttaccggtttctagtactaaacccaaaccgaaaaaaagttcggattatgggttaaccagtaagtctaggtcaggcgtgaaacactggtaagaactcatattagtaatgtttgagacaagacaatgacattggtttttttgatgtctcacaaattttaagggaaaa

SEQ ID NO: 1602 - DNA, 639 bp, Arabidopsis thaliana landsberg
  unsure (1)..(639): unsure at all n locations
aatggaacagttagctgcgccattaatagaccaacagtttggttgtaacttgtaacaacattaaaacatttgtgtctgttccactgtgtttgtctcttgaaccggacgggttttgtttctctttgttgtactcagctgaataaacggcagagcaagttgaagtttctagacgacttggaatcgataatggatgcagaagagaaagtgatggagggtgtaaaggaatcaatcatccaagagagggttagcgttaacgttgggatcatacgtacgtgaaatgatcttcgntttctttttttcttttttttttttttgatactcatggggtagagttgttttctccttccttatggatttgttatgttgacttttgagcaaatacatacttattgaagaattcgtttaaagttggatccttttatatacagcttgtaatcattntgcaaacaaaagatcatactaaagtatattttcttaagagtgaaatagttgtccagaagaattaagaagatgctcggggtatcgatgttcaagacttcatttggggcgagacatatttctctggtttacctaaagaacagagctgactaacatggaaaaaccagttctcccccatggtatctggtggttcttttattt

SEQ ID NO: 1603 - DNA, 1941 bp, Arabidopsis thaliana landsberg
gacgaagcagaggaaacaagttcttatttaggcactcaaacagtttttcattctcaaggggacacacattttttttccatcgagatgggtgtaaaaggatacacactactttacatagaacggtgaagacactaccaaatctgaaatatatataagttgagtgcatttatatactctactgcggatttgggggacgactattagcagcagagactctagagccccactccaaaagttccttgcttgtatcgtctttgtgcactatcacttcaatgaaacaaaagctctctttttcctcattggttgccgtgttgattgctttcactaactcctcctcgcatctcaccttggcagtccagcattttccttctccattgtgtatggcctcaacaaaagctgtgtagttccagttctttatgacattgtaaggaccatcgtgaatttccacctcaatggtgtagcctccgttgttgatgaggaagattatggtcttttgcccacaccgtatcatcgtagatacatcctgtgcggttacctggaaactaccatctccaatacaagcaatgacacgcctgtttggcatggcttgagcatagcctagagtagcacccactgaccagccaattgatccgtactgcatttggaattcgtaaccgcatccttcagggagcttcagcttctgacagttgaaccaggaatctcctgtctcagcaagcacagcagactcagaagagagcatattctgaatgtgttggaacagtacattaaccctcaaagactcattcgggttatctctcaaaggctttccttctgggacatagatcctgtgataattctcataagaagtgttgttgtgcttaattcgtttagccaactcgcttagaaaatccttcataaaaacacatccaaacgcaggtccgttaccgatagtaacccgatcaggctgaacgatgattgccttctccttcttgagaagcagagaatacccaacagaactgtaatcgttgaaaatcggacctgcaaacagataagcatccgcagattcaacgatttcagcacaaaaagctgtactcacagctccccaatacgtccctataaaatgcttgtgatgctcaggtacttgtcctttagcagaaggcatcacagcaagaccatagccagaagcatcagcaagctcaacaaaagcatccgcggctttcgcaacccgcattttcggcccaccaacaagaactggcttcacagctttgttcaagaactcagcagctgcctccaccgccgcatctaaaccaatctgattgctaaccttcatcggaagcatgaacggaacaggatgacgactaaacgtcggaagaggaatcgccggtaaattacagctgatactgatataaacaggtttgctttctttcaaagcagttgaaatcgcagtatcgataagttcatgagcctcttctaagttattaatcacagcttgaaaacaagtaacagcttgaaaacacctaagctcttgagtgaaatcaggtaaaccaattgtatgatgaagaatccgattggtaccgtaatcgttggagtttggaccaccgacgatgcaaatcaggggcagattctcactgtaagcaccggcgatcgcattcagaacactcaatccaccgacggtgaacgtaacgacgcacgcaccaacaccgcgagatctagcgtaaccgtcagcagcgtatccggcgttaagctcgttgcagcaaccgatcagcttgaggtttggttcggcgattaggtgatcgagaagcgtcaggttgaaatccccaggaacggagaagacatcggtgacgccgatttcgactaaccgtcctggtaagtaacggcccagagtcgcgttgcaagggcctcgcgtggtggaaagaaatgggcttgtgttttgaacggtggagactcccccgtttggaagac

SEQ ID NO: 1604 - DNA, 646 bp, Arabidopsis thaliana landsberg
acgtggcataaggcctttaagcattcaaacccgaaccgatgaagaagagcaaagagagaacctacttcattcgcgatacattgtcaatgagaaagtttgtagcttgatcatcgatggaggaagctgtacgaatgtggcgagtgaaacaatggtccaaaaactcgatttgaagccgcaaaaacatcctaagccgtacaagttacaatggcttaacgatgatggagaaatgagtgtcaagaatcaagtggttgttcctttagcaattggaagctaccatgatcaaattctttgggatgtgctgccgatggacgctggacatatccttttaggccgaccatggctgtcggatcggagagtgattcatgatggcttcacaaatcggtactcattcttgttcataggcaagaaaacgactctgattccatgaacaccacaagaggtatatgagaatcaaattcaactatcggccaaggaaaccaaagactataaggatgtgtttcccgaagacagcctaacggcctaccacctatccgagaaatcgaacatcaaatagactttgtctcgcaacacttaccaaccgtccagcttatcgtaccaatccggtggaaaccaaagagttgcaacgacaagtcgacaaactcatggc

SEQ ID NO: 1605 - DNA, 2416 bp, Arabidopsis thaliana landsberg
tttctgtgataggtactctctatctcttctcctgctataccttcgattatttctgtagattctttgaagtgcgcttcaccggtaaacgagcctcgagtttcttgaaagcttgtttcttctgtggatcttgcaggaaacgaagagagtatcaagatgttgcacagagcggatctgtttacataccgccttggaaggcgagaatgcagcacaagtcctccacccctccgtccacgtcttgaacttcacaattcaagcttttgactctaaataagcgcttggtgggaggcaacccactcgtatgatttttctttttcttttaatttctttgattgtttatttatttttcccgctctcttcggatttgaatgccattggggacagtgtcgtttaagtctgggagaggcgcttacttttatttttgattcttattattttttgtttttatgtttattgagtcattttacttttctagaacaattaaaaaaaaaggtttttgtttagtttagttaggaatcatgatctatatttctctagattattgcatggttgatggatgctgcaggttcgactcaatttgaaaatccagattgcaaactaacagacttgaggacattctggtttccaagacaatccactaaggctggagctaatctcactgctcttccttttacctcatcaaacggttagtgttcatagaacttgaccccttgttcatacttgatattgagaccaatgtgaaaaagaaaagtatttctttccccttataaaaaaaaaagaaaacaagagattgatattattttcagtagtgtataggggtagaaatgtgtctcatgaccccgatattatacattattaggaaagatcaactacaaaggttagaaaaatgtatagggagttgaaccaatattggagaaagactctctttacttggagcaaagaaaacacatggggagaaaaggataccaaagagactaattactgtgagaaatgtccgttgtattggaaactaaaaccacaatgattcgaaatcccaccgttcacatgattattatgacacctattcccaaagaattctcggaaatcaaatctttgggagagatatgatatctctcggttctgacacacgcgtactatttaacatatatctcacttgaaatttgataagcggataggggtttataggtcattattttgatacagaaactatacaaatagtgtataatcctttcagttaaatatcgagtcatgtatggtcatcgagtgtagattccaaatatccaattatagattaatttttttttaagatacgtgatacaactcaaattaccctaagaactactctctcaaataagagatcagttgcagtatttaaggatcgaattccacaaaattcttttgttcacacaatgagttaagtgtcaagattaaactagaagaatatgataaaaataagaagaaaacaaagtaagcaaatagtagattggttggttgtgaaacaagatatttaaaagtcagatttagagtattctaaggaaacaaatgactaattgatctaaggatagctaagttgttatcgaaccattcttaaactcaaactctaatattagaataaccggtggggttctgcgaaactcactttacctagagctaagattgccagtggtgttctgtgaaaccctatcctaaaaatgcatgctaaacgagttcgataagttcaccttagtaaataggccgattcttattacacacctatagaccaggctcatcaaataatagttctgataacaaatacctatggcggtatatctattgtctggattcaagttctagttaattactctagaattagcattaagaacaattaaagatgaacaattctacaaataaccaatcaaatggggcgatatactaaaccatatgaatccgtagtgagaaaccctaaccctaacaagcagactactcagacatggaggttgaaacaaacaacatatttgagtaagaaagcataaacggagcaatagagaaaagagttagaaaatatctcttcaccgttattgaaatctcttaatcaaaatctgaaagcaaaggatgaatagcttatgtctctcaaagaacccgatacaaaacttgcatcaaaactttttaggtctaaccaatgacctctaaaactatatatatgacctaaaaaacattcagcgactaatgatgaaaatagggaagtcttttggggcaaatttccaattcttcagacttaaaagcgtcatgaacttctcttggccgcaactggtgtcaattggcactcttgactgaatctaaaagtgaatttgtcctttaaaatcaaaaccctaggttttgcttgccctcatgcaaaacataaaagccgaactcaggaataggtttataaaaacataggaac

SEQ ID NO: 1606 - DNA, 740 bp, Arabidopsis thaliana landsberg
tctaaacttaatagttttattttgattattatatctaggattaatgattgatataactacaggttaggattataattttagccaatcattttgatcatttttacagtatgactctgaaacattgccagatttttaagcaatgtgagaccttgtacacatattttgtttttttcatcgattgagtaatatatgtcagttttttgaaatttgaattacatcatatgcagaaaaaatcctaacatttattaactatatgtatttatacataaaatcaaaatcaattagaaataagaacaaataaaaaagtgaaagaagaatttatatatttatatttactgtaggtaaagagagtttagacaattagcaattaattgaatatagtgcaataaagatgaaatttaattaaagatataaatttaagataatatctccatggaatagattttgtaaggtctataaactaaatagtatttacttttaggacaaaaattttgttgaaagatattttatgcaataactcaattgtaattattcacaaatataaataagtgtttaatgttgattgatgatttgtaagttttgtactttagaaaatttttgttagatatttttgtaaggactttgaaagttaataatattttttaaaaagaattttacacaaaaatttaccaaaaatgtataaatagataatgtacatcgaatgaaacacattacattccatatttccatttaaatggatg

SEQ ID NO: 1607 - DNA, 5969 bp, Arabidopsis thaliana landsberg
aacaaaaataaaagcaatattagtatgaacctcccccagacttaaacgacactgtccccagtggcattcaaatccacagaaagtgggaaaaataaatcaaaaataaaagaaaataaaagaaaggggaaagaaaaatcaaactagtgggttgcctcccactaagcgttgttttgagtcaatagcttgacttggcggagttcaagatgtgggtggagtggtggaggattgctgctgcctcctcgcctttcaaggcggtgtgtaaatggatctggttggagcagctgcgggcgtcgatcgacaatcagggatgtgtcgatcgacactcgtctcgctacctgcaagaacaacaggagaaacaagctttcgagggactctaggcttcttatcttgtgaagcattcttcgaataatctaaagaattaatcaaaggtaaagcaggagaggagatagaagagaacttatcacataggtcttcgagtgatgtgggctgaagagtatatgcagaatcctctgtctgtgaaacccgagggtgtcgatcgacaggggtagtggtgtcgatcgacactgttgctttacaactctcattggcgagttgagcgggttggagcattttgtgtggctctatggtgggattctgatcagtctgaggaggtgtgtctatgctggaagcaattcaactgataggcttagtaagctctgaaccatccatgccgaactccatctccaaattacaaaccttgagagagattctctctctcttcacatcaaacctagcaccaattgtagctaggaatgctcttccaaggataagaggatccttgggttccttctcatagtccaggactacgaaatcatcagggattatggagttaccaaccttaacaggaacatcttcaaggattcgttcagggattcgtttagaccgatccgcgaagaggtgagtgattctattcagcctgtaagtagtcatgcctaatctttcaacaacagacttaggcatgaggttgatactcgatcccatatcacataaagagcggctgaacctgcttgtggagattgagcaatcaagaacaaagctacctggatatgggagcttctcagtggtctgatcaggagtgattgtgcggatgtattcatcaatgtccactctctttgacttctctttcttggtcttaggcagcatgattgcacttatgtcccgtgtcagcagtttagcttcatcagagctaatgccattgtcaacaagtcgcttgacatacctattgagtgaagcaaaagatgtctcagaagcatccttaggaggagaagtgaggatcttttccatgatggttgtgcacttagtagcatgaatctcccgtttagagcaacacttccttagataagggacaggaggagtgcaagcaaactcgggcttcatcgggattctcacctcataaggtgcagtccggatccagtgtcgatcgacactggtagatgtcggtcgacaccaactttgtagcaacgagctccaactcgtctctagtgtccaattcttcccacatatcatttccatctttgatcaagacggcattacagctatttattgggttagcatcaacattttcaggaagaaagccctcttgtctcttaatggattgtgcagtttgagctacctgtacatctaacttcttcaagtgagagctcatattgtcgatcttcccattaagaactgtgtagacaacatcaaactttccattaaactccacaacaaattttgtttggttctccagaatctgctcaagcatcgattccattcttatctctgctgacggtggagggggggcttggtaagttgaattaccatagttcctctgaaagctgctttgaggaaaggtcttctggaaagcaggctttgaagtgtagttggaggaaccctggttccctgtaaacatgttgccactaaagttgtcatgtggctgcctaaacttcctgtatccctgaccatctatgtagaagaatccttcttctgactaaggctcatgctcaatagtttcttcttcagctgcaaagtagacatgcttcttctctgtgagcaagttacgaactgaatccagcttagcattcacctctaccatctgatttcataaaatagctccagcaatcttcttcctctcaaaatcagcattcttggtactattgctgcaagcgaggttctctatctgggctgtagcatcaactgggtaacgcgtattgaagttaccattgctcgctgcatctagagccatctggtatctcaaatcaactcctcagaagaagctacctaaaagttgtacctcactgaaaccatgttgtgtgcaatctcgttggtactccttgaaacgaacccaagcagccctgaaagctttagctggaccttgtgtgaaggtagacagcttgtttctcaactcctcaaagttagcatcatcgtaaaaattattcaagaaggctatcttgatgcttctccaagtcttaagggaaccttctttaagttgtttcatccaagaagctgcttccgcagcaagtgaaagggaagagcttgcacactaggtagtcctctgagactccattagccttgatgcttagatcaaggtcctctaatcgctcgatatgatccattggctgctcatgagataagccatggaaaggatgctcgccaactaaagcaaagtaaccaggcttcagctcatagtcgttcctctggatgggtgggggtacgatcgctgatcaattagcataaaacaagtcagacctgttgaaatccccaagagtacgacgttgttccgcaccttgctgattagctgcgtctaggatctgtggatgttcctctattagatcctcacgtggatgagtccatgataatccagtctcattataggcttacccgtcgtcatccctcaaaactccttgtttatcagctctgatcttgccttcgagcattgctaatttctgagttttgcggttggtgagttctagtttatctaaatcaagtgtagacaagttgatcaggtcttttttctttgaggttctggtttgcctaggcatacactgaaacacagaagagaagaaaaacaagaaacgcgtaagtatcaaaagaaaaataaagtctagacaaaatatctaaactaaacctaatggtgattcccaagaactttgaaaacggagccaaatttgatatagtggtctaattaacccttaactactctctcaaattaagaggtcagttgcagcacttagggatcgaattcacaaagctctttcgtgcacataatagatttaagtatcgagatttaagttaaacaagtaatgagaaaaatacatataagaaaacgagcaaaaagcagattagatggatgtaaagtttaaaagataaaaacgttaggcttagggtaatctcaggaaaaggctgattaatagatataattatgactaggatgttatcgaaccgttcttgaactcaaatcactatcatagagtaaccggtagcgtgtctgcattactcactatgtttaatactaaagattctgaatgtcggtccacaaatccctaatcctaaacatgcatgctaatagagtttaataacttcacctaagtaaatagaccgattcttattaaacatttaaaaacccggctcgtcacatagtagttctggtaatagacagtcgtcaggaatttacctattacttggaatcaaattctagttagctactctagaactagcattaagaacaaccaaagatgaagaatcctaacaggtgggcgatctactaaatcatctacaaccctaatgagaaacccaaaccctaacaagactactcagacacgatcatcgaaacatataacatgtttgaataagaaagcataaagtaaatcaaaagtagaaaagagtttagaaaagatctcttcactgtaaggtattgaaatctttaacgagactctgataaaaaggattttcaatgtatgacttgcttagtctccaaagattaggtctaaacagtaaccttgaaaactatatttgttctatacgtgcatggaccgataatgttaatagagaaatcttttggggcaaacttccaattcttcaaacgctaaaccttcttggacattttatgggccgcaactggtgtcgatcgacaccgtcttggattttttatgggccgcaattggtgtcgatcgacaccaagagtgtgtagatcgacactctcaacttgattttgaattgaattcgtccttcagcttcgtttcttcagcttttgttctaaaatgtctctttatctccattgttgtcccattgcatagtatacctgaaacaacactaaaaagactcaagaaataacataaagactcaaaatcctatacctaaaacatagataaaatcagtgaaaagaagtcaagatctatgaatactaaccgtttgaagaggtgaaaggaagagcagtgagattagctccaaccttagtggttgagttggaaactaggatatcctcaagtctgttggtttgccatctagattttccaatagtcggattgactcgaacctgcaacactcatcaatcaggcaataatcaagagaaatatagatcatgattcctaactaaactaaacaaaacgttttttttaataaaagaaataaccaaatgaaatgcaaaacgaaaaataataagaaacaaaaataaaagcaatattagtatgaacctcccccagacttaaacgacactgtccccagtggcattcaaatccagagaaagagagaaaaataaatcaaaaagaaaagaaaataaaagaaagggaaagaaaaatcaaaccagtgggttgcctcccactaagtgcttgttttgagtcaatagcttgacttggcggagttcaggatgtgggtggagtggtggaggattgctgctgcctcttatccttccaaggcggtgtgtaaactgatctggatggggcagctgcaggtgtcgatcgacactcactgttgtgtcgatcgacactcttctcatcacctgcaagaacaacacgagaaacaagctttcgaggaactctaggcttgttaacatgtgaagcagacttcaaagaatctaaagaattaatcgaaggtaaagcgggagaaaagatagaagagaacttatcacataaggcctcaagaagtgtgggctgaagagattgtgcaaaaccctctatctgtgaatcttgagggtgtcgatcgacaagagttgtggtgtcgatcgacaccgttgatttgcaactctcattggcgagtgttgtgtgtggctctgtttggggattctgagcagtatgaggaggtatgtttgtactagaggcaatactactgatagtcttagtgaactcttaaccatccatgccaaactacatctccaaatcacaaatgttgagagagtcctacctttcttcacagcaatcctagcaccagctgtagctaggaatactcttccatagataagaggatccttgggttcgttattgtagtcccatatgataataggatttttacttaattaatcctaaaaccctatccggtcgttgttgtattttaggttgttaatccaatccggtgtgatgcaaacatatgagatatgattagaaagctttaagtcaagccaagcagagagttggttggttctcacagtcctagtatgcaataatagaaatgaaatgaaactaaaagcataaatggcaataacaggcaggtgagtaacaaagcagagatgataataggcagttaaatggataagcgattcttaaagatggggtaatcgaatattgtggtctccttaatctattcagtcggttgacaaaacttcacagaagctatccctagacaacaagttcaataacagattaattcactcccgtgaaagaaatcctcaagcaaagctagacagtgacctaattcccatttgcgatctctaagtgagcaggaattgtcgaatcaacttg

SEQ ID NO: 1608 - DNA, 584 bp, Arabidopsis thaliana landsberg
agttcaagacggactctaactcaaatcggaaacaagaatagtttgatgaagttaccagtttacaggctttgagattttcatgtgtgagtgttaatgtcaccaatcggtgttctgaggaaatggattcttccttgttagagtttaaactgctaaactttgtacgtaacacacttccgcgtttttggcttgatggagttaagtcggacattttttatccaaactatccgaaataccaaaacaattttaatgaatttggttttattttgcaaaatatgttttatttttgacaaatataaccaacaacatttagatatgttatttttttaaaagtattttgattatttcgagtataaacataactaatattggtgggttaattattataattttggattcattgttattatttcgagtgtttcggattcggatatccattcgatttttggatatttcagatattcattcggcataatatagtttcgtaaaaattttgaggatatactcgtgtattttaaaattttggttcgatttagtttgaatttttgtggttatgtttgactttttgttataacctatctagccct

SEQ ID NO: 1609 - DNA, 1548 bp, Arabidopsis thaliana landsberg
gagtccccaaacgatttactgatatcaacaacgtattgatgatgtattgttttagaaacacatatatgtattttttttttcttgattagagtgatatcaacaacttgagacatggtcaggtaacaggttgatccacaattctatctttacgtcataataataacaaaaaattcgtaaaaagatgagttttgttaattacttctcttattataatcaaagttttgatttttattttccaataagtcgccgggaaaagtaaaataaaaagccgtcacgtctccgataaataatagagtatcgttagataggtagcttcaacgtaaggaatctaaattggttcagctcaaaaaacgaaaacgatgggttccatcgaagaagaagcaagacctctcatcgaagaaggtttaattttacaggtttgttcaatttcaattaatcacttaggttagcgaattttgattttcctcaattccaaaatcttgactttggattgatcttatgcattttctttctgggtttattgagatcttttctgggcaatcactgttttatctaattgatgattccaatgtttgaattttgcaagtagatatagatcaaactttcgagctttgatacagttataatttagttagctaatcaaaaatgttttgtgaatttgttttaagtaggaagtgaaattgtatgctgaagatggttcagtggactttaatggaaacccaccattgaaggagaaaacaggaaactggaaagcttgtccttttattcttggtaatgaatgttgtgagaggctagcttactatggtattgctgggaatttaatcacttacctcaccactaagcttcaccaaggaaatgtttctgctgctacaaacgttaccacatggcaagggacttgttatctcactcctctcattggagctgttctggctgatgcttactggggacgttactggaccatcgcttgtttctccgggatttatttcatcgtaagcattgcttctctgtgtaatgtttggtttggtttgtttgctcctgattactgataggtttttgtatttgtttaggggatgtctgcgttaactctttcagcttcagttccggcattgaagccagcggaatgtattggtgacttttgtccatctgcaacgccagctcagtatgcgatgttctttggtgggctttacctgatcgctcttggaactggaggtatcaaaccgtgtgtctcatccttcggtgccgatcagtttgatgacacggactctcgggaacgagttagaaaagcttcgttctttaactggttttacttctccatcaatattggagcacttgtgtcatctagtcttctagtttggattcaagagaatcgggggtggggtttagggtttgggataccaacagtgttcatgggactagccattgcaagtttcttctttggcacacctctttataggtttcagaaacctggaggaagccctataactcggatttcccaagtcgtggttgcttcgttccggaaatcgtctgtcaaagtccctaaagcgccac

SEQ ID NO: 1610 - DNA, 540 bp, Arabidopsis thaliana landsberg
  unsure (1)..(540): unsure at all n locations
caggtcaaatcgatcaccctcgcagcggatttcttattcttaggcttctctttgtgctttccactggccctcgaatcaattaagctttgataccatgttggaatattgtgataaaaagaaaacagagcaagagacacttgtctcttctcttgtaaagaagacaagaacaaaaataactctttattgaactgaaacgatacaatgagtttaaatagaaaacaaatagacacaacacatgaagagttgtgtcacttcctatttgtgtcttttcagtgaaacaacacaacttatctaacaagtaacggttataacatctcgcgtgttgctctatntactcataatctaattaaatgcatgaccaaactcaattatagactacactgctcggaagacgctgtagctgcggcggaagacgctgtggattggtgtgttccagtgggtgtagatggttacagcaatcctgttttggactgtgatggctatgcggaaccggttgctgaggggttgctgagctacacccttcactagccgcattttttt

SEQ ID NO: 1611 - DNA, 709 bp, Arabidopsis thaliana landsberg
aaagggggatttcttgtgaaaaaggaagacaaaagggtcgggtttttttttgttcttcaagtcattggcaacttagatgtttctgaggtgactagtcatttgcacaaggaaacttcatcagacgatgtcaatgggtttctaattcttccttcacaagtaacaagttctcaaagattcaaactcttttatagatatgagtgttatactttattcatcattttttataacttcaggtggaatctgcgaaacgtatattcgaaagacactcagacatggcactggagttccgagcaaagaaccaatatgtgaggacatcatgtatgaatgtactcctcagcctaatcgatacactgtgccagtcactgcaagatttttccattgatgacctcggccaagcagagagagcactaacatacctgaaagattcagactttaaggtggattggttggagcgtaaactggaagaactaaaggaaaagaagatagaagagcagattggtaagactgggatgcaagaattagaggaagacctgaaggtcctcaaagcagaagtgctctggcatagaagctttgctggagaaagagaatcaaaagtgctcaaacattaaagccgtgctgggaaaagagaagaacaaagtgttggctgctgccagaactcctcctctaacatttggatgaaggtggcttgatgacttaagctcccctaggt

SEQ ID NO: 1612 - DNA, 528 bp, Arabidopsis thaliana landsberg
  unsure (1)..(528): unsure at all n locations
cctttacttccagaaagcattggctaacgttctctacgcaagggagaagacaggactggtcaacaatggctagatagagctgctggacattgccctaaaggatcttctagtctacacaaagaacaaagtgcctatgaagggtgacacaaacgatgcctcaccatcaatgcgtttattgaatcatctttgtggtttcagaaaatgggcactagcgaataagcacaagagaaccatttctataaagggggggggtgataacacctataatagtggcttgtggagtgccacttcagtcgactccctttgccccaagatggatcgacattcctcacctganatgggctttgttgatcgagcatcagagtcatgccaggcttcttctacccagccaagagctcacaaccatcatagtgagaggtaacatcgattttaacccgcctaatgaaagaattttcttcatggattaggggcacccccgacaagaataggctcccgacaatgaaagaaggggctgagagtgaaaaaatg

SEQ ID NO: 1613 - DNA, 3430 bp, Arabidopsis thaliana landsberg
ctgcaggtcgactctagaggatccccctgactcataagaaaataaaagatgaagttagtaactgactcccccagacttaaataacattggccccagatttattaagccataggaatcgaaaggaaaataatcaaaagataaaagttagaaaaacgtgagttgccacttgagagtggtgtcgatcgataccatgttggtgtctatcgacactctggtcgttttgcttagctttgcgaattcagctcatttttctagagccttggttagtgttttcacatggactctccagttagactgttaaatcactaaaacacacatcaataggtccaacaaagcataggaaaataagtgcaacaaatttcaaaacaaataacaaatagtctgaaataaagcaagaacaaagtcagaaaacaaagcaagataaggagggtggctagtcctcatgctctgagtcggaggtgggtgcgagagagcgacgacgacgacgagtgggagcacacaaccgcatcgagagagagtagctatggcgttccagacgctcttgaagttgtcgacgatgtattgttgaaagacatatggctccatcgggataggaggaggagaaggcagctcatatggtagagctaaagaagaagatccaactctcggaccccagtagggttaatgaactcatcctcagtctgagtcggtgcggatcctgaacctgaacgtctttgtgtcctggagcatggtgcggaatgcagacgagaaggatcatgatgaaaaccaatctcctcatgctctcctgtaatctctgtaagtgcagggcaaggtaactgaatcatatggtgtcgtgtctcatctctgaaacaccaaaggaagttgcctttcagcctgtgaaagttcttaagataactttcatccattgtgaatctcgtggtgttgacctcttctccttcaaagttgatgcgaaattgctcaaatataggagtgagaagactgccaactctcttagatttcttccctttacatgtaaagggcttggtcttgagtgagaccaagtgatgagcaaacacaacgccaaagttgacatcgcggtcaacttcctcaactccaaagctgttaggaaagaaatcatgaacaacatgatagagcaacaacagcatagaaagtctcatcttgccaggcttcatcttgcacaacagtgtgctactaatcagcctaaccaaatatcccagaaacagggtgacgaatctctgagtgaactgcatccttggaatcataaattccattgccaaacctgctccaaaaaatctaagcatctttaaactgtccaagcaacgaaccttcagtgagatcattgtcaaagccataaatgtcgcacaatactctgagtggtagactgtatctgacaccgaggatgaagaagataagagctccttcctgagcattgcgtttcctgtcattcaaatagtagaccctaacaaaagccatgcattgtctaactagctcatgatacaaatcgtactgcctacaaatcgaagaatttagagagatttgagtgaaaacggcggtttggaagaaaaatgaaatgaagaagatgaagtttaggttatgtcgacttacatggaaaataatggtgtcgatcgacactcgaatggtgtcgatcgataccatcgcgtttggttgacacccttttttatttttctttttaatctgaataaaattctataaaaacaaaaatcctaagttaaactcaaatgaatgaaataatgaaaaagaggaatacttactagtgggttgccttccactaagcgcttgtttatagtcaatagcttgactttgcagttgcttaatcaacaggtgggtcttgaagatccaaaggcttttctactggaatctcgccttcagcccagtagagtttgactctctgtccattcacatcaaatgatcttccattgttatctgtaaaaacgatggttccatatggcctaaccgaatggactatgtagggacctgaccaacgagaagacaattttccatgaaacaatgtcaatctagaatcataaagaagtacctggtcattaggctcaaaggttcgagtgaggatcttcttgtcgtggtaagcctttgtgcattccttgtagagctttgagttgtcatatgcatgaattcgtatctcatcaagctcattcaactgtatatgtctcctttctccagctgatttgatgtcgaaattcatcatcttgactacccaagctgctttgtgctctaattccactggaagatgacaagctttaccgtagagaagatgaaaatgtgtggtcccaagtggagttttgaaagctgttctgtaagcccatagtgcatcatctaacttataggaccactcttttttcgattttcccactatcttctcaagaatctctttaatctgcctgttggaaacctcaacctgtccgctcgtttgtggatggtagggagtagcaacttgatgctgaactccatactgaataagcaatttcgcaagaatcttgttaattaaatgcttacccctgttactggtaacaatgcctgacactcgaagacgagggaagatgatagacttaaaaagtttcatgacaactgttaaatcattctttgggctagctatagcctctactcacttggagacataatcgacagctactaggatgtagagattcttgttggaaggtgggaagggtcccgtgaaatctataccccaacaatcgaagacttccacttcgaggataaatttctaaggcatctcagtacgcttgctgatctttccccttttctgaaaaggatcacactgcgatatgaacttctgagcatcccaaaacattataggccatcaaaagcctgcttgaagaactttggatactgtattgaaggttgcaaaatgtcgtccatagctagagctgtgacaatgcgatagtatatcaggaacctctgttgcagcaatgcatctcctataaactccatcagaacaatgcttataaagataaggttcatcccaataatatcgccaaatctctcttaggaatctcttcttgttgtaatctttaaaattatccggctccacatctgcagctaggtaattaacaatgtcaccataccatgggtagtccttctcgaccgttgtggtggcgcaattctcagttggtgaccaatttcttgtatgatcaagagggtgtcgatcgacaatttcagtagtgccgatcgacaccatcgcgcaactacgaataacaacttcctctgaaaagtgagtgtcaatcgacatagaaagggtgtcgatcgacactgaagctcgattctgcaacttatcacatttgtagtaatcttctacaactatatcaatcatgtatatgtcacatcaagcaagaaacattaatatgacatcatcatcgatcgtatgcgtgccaaatga

SEQ ID NO: 1614 - DNA, 1679 bp, Arabidopsis thaliana landsberg
  unsure (1)..(1679): unsure at all n locations
tcactatgatattcaccatgtatatgcattctatcacttgcatgctttgatgttaggtagtttgatgatattgatatttgtgtgatttcagtgatttgagctgtgacgagctaattgaagaagcgacctgatcatgtcaaaccactgacccccaggtcgagtagaggcttcacgacatcaannnnnnnnnnnnnnnnnnnnnnnnnnnnnnnnnnnnnnnnnttcacttcaccactcgaccacctggccgagtatcaccatgagagtcactcgatcacttcactcaaccacgtggtcaagtatcatcacctccaccacctgaccatcactcgatcacaccactctaccacgaagtcgagtatcaccatcaccatcactcgcccacatactcaattgcgagcttcagagtcttcttcattctgcactcaaccagacactcgagcacaaggaagaaaagaagactccggctattcactcgatcattcactagaccacctgggtcgagtaccgttcttaatccgtcccaatactgcgtcgttttgagtattagggttccggaaatatttcgctataagtagcatgtactttacatttttgtttatctaagttttattccgcagacactgtgttcttgacattttgttttccagatttctcttaatctattcagtattcaacattttgcttttgatttcgtttactaagttgttcatcatgttatcatcttgctattacactgttgttatcaagttttcattctgttcaacgtttatgttctctacaatgacgtctgagtagtgaataggtttctaaggatgggttagagtagtgtagaattctcagtatgctaggtcattgagtattggttgatagatcccttctggattagttgttcttaatgcctattgctttctgatcaactgcatgtcaatcacctttaaaatgaggaaacgaaactactcaattatcccatcctcggaaattctttatctaattaatttttttgtttactctactgttgtttactgcatcttgtcacatgttgcttagtttctgcaattttttcttgttactcgacttgatactcgaccaccccgttgtctggcaacagactgtgcagtcgagtatctttgtttcatttactgcctattactcgacctgtcactcgaccacactcagtgctctgcaacgagctgtgttggtcgagtgttttagtgtttttgcttgattttctgttttctgcatgttcacttaggactgctagaacacgccaaaacctgttattgcttggcttgagttagtgacttctgatcacatcatgattgttagcatcacacccatttggattgacaacctttagtactacaacgacatgataatggtttaggattaattgatcttaaaaacctattatcaatttggcgccgttgccaattgggtgtttgtttgttacatttgagattttagacttgcttagataaagttctttttcaattttcaattcggttgctaactgtgtgttttttctttatgtcttcctgatccaggtacacctctgctgtatgcaaactcctttccaacgacaacatcgaccgcatagctcgcgaactcaaagagaggagaaacacaaccaacctaataccacatcaaccactcgaaatggctgacaagcagaatca

SEQ ID NO: 1615 - DNA, 595 bp, Arabidopsis thaliana landsberg
ttttatataataagtaattttagatttcaaattcatttcattattttcaaattatctatatataacaaatccaatttattattacatatataaacatgaacaataatacttggacttcgcataaagtatatatttctaattaaaaattacgttacatttgtaactaaattttctttcaacagctacattttaaaatatcgtatatatagtcaatcaaattgctgtttttcttttctggtcaacgatcaacaacccaaactttttatggtatatactgacaagcgagaagtttattatctatgtaacggttgcatgactagtgactagtacaaacttagccaataaactctgttttcttctaaaactctgtttttttaacatttgtgcatacgatcgaaactgcaaagacttatagaagatcaagaatcagtttacatgacataaatcattacaattaaatttaccatctacatgacaagatctctcatcttgaatcttgatcgctacttagtgtgttgagaacagtttgaaacaaaccattcaccaaagatccctctgtagttttattacgcatgattgtctttgacagccaagt

SEQ ID NO: 1616 - DNA, 622 bp, Arabidopsis thaliana landsberg
attattatagaaaagtataaataatataaaattacaaatgtaccttcggcttgaaagaaggcgaaagtacaagcgtgacgcaaaagcaaatgccaagtcagcgtgacagatacgggggtactgttcacctatttataggcacgggacatagcccatataaaattacatccatgccctttacatttggtagtaattctatagtaatccaccgaggtctgaatagccttttcatctttaagtcggtttccttttctgctaccacgccgaagctttcctgctcacatcttcggcgctgtatcaaccttcgtattatttgggcttctcctactgtgatatcgactcgagtccgaagatacctgttcacacattatactccagaaacactgttaaatcttgtttttgaggaccttcggaagccgaacgccccaacagaagtcctcttggctatctaagagttcatccttctcatgaatagcactaattaattcatccttcccattcttgacacatgtgggcatcgctgcccttcttcttgtagtacttcttcttttctttcctccttcccttcttgtcgtcgcccatgtcactatcacttgataatggacatttagcaataaaatga

SEQ ID NO: 1617 - DNA, 1773 bp, Arabidopsis thaliana landsberg
caacactcagaccagcttcatctgtagacagtttggcagtaacactcatgggagttttcgaggtcttagctgtctgcattccaaatctctgaatcaaccccttgacataagtagactgagagatatgaactccttcatcaagtctgtttgatctgtagaccaagaaagtagttcatctctccaaccatactcatctcaaactttttggtcatggattccacaaagtccgtgacaagcttctgttttgtgcttccaaacacaatatcatccacataaatttgcacaatgaggatgtctttttcatctacaaagatgaacaaagttttgtccacacttccacgtttgaaacccttttctattaggaacagagtgagacgctcataccaatgccctaggtgcttgcttcgaaccataaagagcctttttaagcttgtaaacatgatctggaaaagcagaatcttcaaatcctttaggttgagacacaaacacttcttgctaaataactgcattcagaaaagcactcttgacatccatctgaaacaatttaattttcagcaagcacgagattccaagaagtaggcggatagattcctgttttggaattcctctgacaacttcagcattcacaatcttgactaagctctgagtattcatgtgtccaagtcgttgatgccacagatctagcttggatgtgattggagacaaacagatttcataatctttccacatatagcagttgttgcctgaacgaactccagatagaacattggttccaggaatatcaagtgcaacacatacagtctttgtaaacgtaacagttaagtcatcatcacacacttgactgatgcttatcagattagcagtgggtccctcaacaaaatacacatttgacacgtgcggttgatcatctatctcgatcttccctttcactttaatgcttccttttccaccatctccaaaggtgaccttcccattggtgatgacagtaaaataatttagaacaaattgttcactagtcatgtgacgagaacacccgatgtcgaagtaccatgcgttgttgtcttgagaaacaggtgaagtataagccaccttagcttgtggagtgcaatcatccaactcaacaagattccagttgcaaaccagatttgccacgtcttgcatttctttgttgacgtagttgcagcaactagagtaatgcttttcctcttcttcgtacatcctttataacttgtgattgtacctttcagctttcatatcaccatacatatctttcttcttaatccacacagtacagaatcttgatggctcaatgtagcactttgctaaattccacaacgttctgactttctctttgaatttgtaacactgttctctcatatgatatctcttaccacagtgatcacatcaaatcacacccaccatccttgttctcacaagagattcttttttttcctcaacattctgccttacttgttttttttgttctgtatagctttgtctcaccacgggttcgcttgttgtaccaccactaacaaagttgatgattcttccttcttccttgttgatctttcctgtataaccttgataacctaaacccctctattgccaagatcttgtctagactttctaaccatttgtttagcattctgatctgtttgtgtttgtcattcaactctctttccacaagtttagctctatttctttccatgtgacactcttcctgaagacgctcaagtttcttttgatagtagtccggtgaagttccaacaacag

SEQ ID NO: 1618 - DNA, 1883 bp, Arabidopsis thaliana landsberg
gagtgatccatcgcatcaatgatttgtaatgttaaccaaattataatatttagacttagaagttgtaatttattggtttattttggtcatcatagaagaattatttacatattttatatttttatttatacattgttgctagtttttttggaactatcaaattttacattttttttttttctccaagaagttactgatttgaagaaacctatatctttgtaatgttacatgtactggagactggaagtaacttacatatatgactttgaccaacatttctattcggattaaacaaagtataatcctaggttcatcagttccaaatttgtttttaccaattcagaagtgcttcttcttatggttgcataccttgagaagagaaagggaatgttgtgagtaaagcatcttcttaaggtattttgtagtttccaggtccgcaagtgagtaaagctcctggtttaatccatgtatgagctgcatctccccacttgagctcttcgaaagctaccctcagcgaatggtgttgaaattgtgtttagatgtaacaggctccaactttgctataatatgattaacatcgtctaaaactgcaggaccatacatatcagagctcgcagaagcagcagtaggtgacgcattaggaagctattaagaggcaatcaaaacgacaagagagcaataacagtttgtgaggcatttggaacctattaagagacaacaaaaatgataagagagaacaataacagttttgtcttggccaaagtccactgagtgcatgtaaccgaactaaggggaatgttaaaggccgttgcagcaacctttgtatgcatatccttaacccatttcaacacctccatgtgtcaccaaaacagtcccattggtgcaaacatgaacaagagcaccggaagtatcttaaaatccagattctagatttgcaagcaacggtagtgcaatgctgagatttccaaagaagctttatcttattcttttaactttaaagtgaatcctttttctagcaaaatgaggacaaacttttaccaattttcacatttttagaaaaatattcaactcactttgatttcttcaggggctcagctgaatctatagttttcaatgtctgcagaacaaaatgaaaataaaaattttagtatctcaaaatctagtttctattttttttttgtgacagtaatcaatgatttcaaaataaccaaaaacctcgtaataagactcaattgaatcttaaaactacacaactttcagaactaaagaatgacgaaaaacgaaataatagaagagaagtggaggagctactacacaactattttcatttttctaaccaatcagagcgcaccggactacgcccactcgcaccaacttcgcgtcacgcgctccggaccacgcccactcgcaccaacctcgcgttgagcgcgtgtcgtcgatttctgtaggggtaaacccacaaaatcatgcctattttacatctactcgctttgtttccaaaacagcctcgagtgactttttcttttgttttttttttctcaaaaccgtactattctaatacaaaccgaaccaaaattaattttcatttcacaaccatctaaaccaaacagaaatcacttgtaatttcaaaacctatgtacgccgaaccgaaatctattgtcatttcatcaaaaccatgtaaaaagcttcttcgattgttttaacatgcaactgaaaataacaatcctaatttatcaacagagaaatatagagataccaacgaaactatggggatgacaagttatcatcttatccccctctctgtccagtgtgagtttcacgatcgataaaataataggtaacaaggaccagaagctgcggcagcaaccaaaggtggtcttgtc

SEQ ID NO: 1619 - DNA, 537 bp, Arabidopsis thaliana landsberg
  unsure (1)..(537): unsure at all n locations
tgaagaactgagaggtaagagacattaccttgtttggttagaaaccgacgatgggaagaagacacggcggagatcgccaactcgccggagaagagaaaagactcgattagggtttactagaacaagacggcgaagaagaacggagaagacagcagaggagaagaagaacagcagacggagaagaggaggtccgctggagaagaagacatggcgccggagacgcgagagaaaacgagagagaaattttttttagggtttgtctagaggcggcttggtttgagctttgctcaaactagaaataaatagcctcgcaaatccgtcgcaacgattgcaagtaaattgcgaggaaccgactcacataccaataggatcgcttcattcttgcgacagaagtgtgaggacctcgcaaagtcctcgcgaaaatagaattagggttttatggattaatatgcgagggaattgtgaggatctcgcaaatgcctcgcaaaattagggttaccaattagggttcgcggctnnnnnnnnnnnnnnnnnnnn

SEQ ID NO: 1620 - DNA, 5825 bp, Arabidopsis thaliana landsberg
cgtctgttcttgcctctcgtcgatggtctctagctaatcgaatagcatggcacaatctgctcctgcgtataatgactctgatattcgacgaaaacctggcacattgagctcggctggaacaactgccatgctaatgtataccaaagagaacggtggttctgcgcactatcacctaataaaagtgccatatgcccataaaaccggttgaagttcatcataccaacctcctttttaatgacttagacgtttcttaagattgcttagaattgtcttgttcgcggcttcagcttaagcgttcccttgtggatattatagagtggaataaactaactttgatcccccaatccgagcaaaaagcttcaaacttgtgcgaaatgaattgtggtccattgtcaataactatctcgtatgggacgccatgacgacatataatattcttccaaatgaaagttttcaccgccaaatccttgatattaacatatgcttcagcttcaatctactttgagaagtaatccgtcagaacgaaaaggtactgcacacctcgttatgatctatgcaatgttccaatgatatccatcgaccacctcataaacgggaacagggcggagatggaagaaaacaattccgaaggttgatggattaaaggtgcctgaagttgacagcgcttacacctttgggcaaacttcacacaatctgtaatcatggtagccaataatatcctaatctttttatcttgaaatccacagctcttcccgacgaatgacttccacatagcccctcgtgaacttcgctcatgatgatttcgacttcggatccgaaaatgcaaagaaggtaaaggtcactgaaacctcgcctatataacgagttcttagctagacaaaatttcgcgcaaaggattctcatggggcttaagaacttactagccaaattttggtctactgcgtgaaatatatgcggttcaggttcgagatgttcatggggcttaagaacttcttcttcgaaaggatgatccgcttttaacccctcctctggaattacttcttcaaccgagataataggctctgcaaataagtcgctagcctttttttgggtactaatttgctttgaatttctcctgaatcatttttggattcagacgcgtttgaattccttgattttcgtttcttgataggtagcaattacacttcagattcaccccgggcaagcgccgccgcagaccttgtaacaaaaagggttttcccttatttgatgcttcgttccacgatgcattctaccgggaagattcttttcaattcagggtccgaggttgatgccaatgctgcaagtacatctgcggttgtatgctctcctctaggtattcacaccaactcgaatttactcgaatttcttgaaattcttagataaagccttgacaactttaagatatgcttccatccttgaatctttgatttcatagtatccattgaactggttaactactagttgtgagtcataataagcgattacttcctcagctccgattccttgtgccagtcaaagtccggtaatcaaggcctcattctccgcttcattattagaggcagtgaagagtaggtggaatgactgttcgaggatctccgatgtgggcgattccaatttaatcctattccagatccttgctttgacaaggatccatccacatgtaacttccaagtttgattctcccattgttttggcgcgtcgagcatcggtaacccggtcaagaaatcagctaatacttgtgccttcatgcttacccgacttttgagttctatatcatattcactgagctctacggcccacttcgctaatcacccagactggttgggactgtgaagtatcgctcgaagtggctggttggtcaatactttaatcagatgagattggaaatatggacgcaaattttgtgctgtagtaaccactactagtacaagtttttccatcattgcttatgtaacaatgtttttgtccacctcgggcttagatactaccggcggggtggtcgagtatgcattaactttagccgcgagcaaaatctggccatcccgtggaaccaagttgaccgcccgaaatagcgccgtttgacctgagaggtgccctttgaccgccatgtggacacctcactcttggtgccgtgcggctaaagttactagtcttgaagccgaggtcggctgagtcttggagccaaagctgatggggcgttggagtgacacccgtcgtcacttgtcaccatgccgtcccccgtgacatatgtcgcccgtgtgtgcggcagctgtccagacatggggcggtagtcggtgctgcatgggccaacttaggcggactataaatagtcttcatttttcgcccattttcatttttgaggcgagagagaaccgaaaggctgtcgactgatagaaaatagtcttaaaccaagaaaactttacccgaatcgagagaaacttgaccgtggtcgagggatctcgtccgtaagagggaaaatcatcgaccgtgagcaagataactcgtccgtgagtgttcgaccggctgactatgacaaaggatcttgctcgtgactcagaaatcttctcaaataccgaatctgtgagttgtggttgaattgtgtgtttgtttacatgttttctagagctagtctttagatcatatgcatgcttactcacttaggtttaactaatcagattttggttaagattgaacttgaaacttaaaatgatatgggcattttgacaacttgataacgttaaggaatgaaatgaactagtgtatggctaggttaagtgaatgaggacataactatgtttacttgatgaattatgattgattcgggggcgtaacaatcgggccctaattaaaactttgagaaaacttgtaagttcttgagtgttttgtctattgcatgctacgttctcttcgtatctctgattgtttgttcgcatatttatcttattgcatgttgcatgtggggttatgggtggggttagactaacgtttcttgggaatcccaaactcattgagtaattctagattactcatgattctatttgttttgcaggaaaccttagaggaaactagagggagtggtgaacgctaggaaacccgaaatttcattgtccttgtagtgtatgcaagaatgaaaaacacatcatctagaagagttaatagtcatttgtttagtcaaggatttatgcctgattattatgtttggtataagcatggagaagaagtgaatatggatataggaacgagtacttacacggatatgacgtattttagttcgaatcatgaagaagtgagtaatgttgtagaagatccatatgtggatatggtgaacgatgcatttaattttaacgtggggtatgatgataactatcatcatgatgatagttatcagaatgtggaagaaccggtccataaccattcaaataagttctacgacttgttagaaggtacaaataatccattgttcgatggttgtcgtgaagggcagtcgtagttatccttagcatctcgactcttgcaaatcaaggcggagtataatatgagtgaaaagttggtggactccgtttgcgaaatgtttacagattttttaccagaaggaaaccaggctacaacttcacattaccagaccgagaagttgatgcgtaatttaggacttccatatcatacgattgatgtttgtcagaacaattgtatgctattttggaaagaagacgaaaaagaagatcaatgtcgattttgtggcgcacaaagatggaagcctaaggacgaccgtcgaagaaccaaagtaccatatagtcgtatgtggtatctacctattggagaccggttgaagagaatgtatcagagccataagacagctgcggtaatgcgatggcatgttgagcaccaatcaaaggagggagaaatgaataatcctttagatgcagtggagtggagatatttccaagagttacatccctggtttgccgaagaaccccgtaacgtttatctcgggttgtgtactgatgggttcaatccatttggcatgtctcgtaatcattcgttgtggcctgtgatcctgaatccatataatttaccccctggtatgtgcatgaatacagagtacttatttcttaccattctgaattctggaccaaatcatcctcgagctagtcttgatgtgttcctccaacctcttattgaggagttaaaagagttgttgtctactggagttgatgcttacagtttttcattaagttagaattttaatctaaaagttgtactactgtggacgattagcgactttccggcgtatagcatgttatcaggatggactactcatgataaattgtcttgtccagtttgcatggaaagtacaaagtctttttatctacccaatggacggaagacatgctggtttgattgtcaccgtagattttttcttcatggtcatccatcccgtaggaacagaaaagactttttgaaaggaagagatgcgtctagcgagtatccacccgagtctttgacaagggagcaagtttattacgagcggttggctagtgtaaatccaccaaaacaaggatgttggtggaaacggtcatgaaaagaagatgcgtggctatgggaaggaacataattggcacaaggaaagcatcttgttatcatgtcaagattggatattgagaaattttgttctcggccaggcttacatattgatagtaaaggtaaagctccattttcagcgtattcattgatagatgaagtcaaacaaagtttatttcaatgtgtgaaacatgatgttagatttccatatggttattctagcgatttggctagttgtgtagatctggagaatggaaagttttcaggcatgaagagtcatgattgtcatgtttttatggagcgactactttcatttatctttgctgaactccttgaccggaatatccaccttgccttatcaggtacaatacttactattttatttgccatcatttttttatctaattatttaacttgcacatatatttcaggaattggagcatttttccgggacctatgttcgagaactttacagacaagtcgcattcaaattctcaaacagaacatagttttaatcatttgtaacttggaaaagatttttccaccatcattttttgatgttatggaacacttacctatctatctcccatacgaagctgaattgggtggccctatccaatataggtggatgtacccatttgagaggtttttcaaaaagttgaaaagcaaagaacaaaagatatactgtaggctcaatttttgagtcatatatcaatgacgagattgcttacttttcagagcactactttaccgatcatatacaaaccaaatcaaggtaaatacatttatttatttaactattttctatacttcgatcttcattcaattacatgaatcaggttaacaagattcgatgaaggtgaagttcctatatatcatgtccctggagtacctaacatatttatgcacgtcggccgtccaagtggtgaaatgcatgtagaatggctttcagagaaagactaccaaagcgcacatgcatatgttttaagaaattgtgactatttaaaccatttgagaggtatttttaatcactattcgtttgtaaattttcactaagatcactttgatttatttttctttgtttgtaaatattgtatgttcgaggattgtctttctgtgaaatattcatgcttgccagaaaaagaactctacgcgagaagagctgaagaatatcaaaaatgagttcaagcatatgtaagtctacatcgatttcttgcattcggaaa

SEQ ID NO: 1621 - DNA, 616 bp, Arabidopsis thaliana landsberg
gtacctgagataacggtgcagtctgtccccgacgcgacttcgtcaccgtccatcgatcaagaggtaccatctgttttccaccctgtgcctttcagattcagcttcgatccgccaagcgaccccgcttcggcgagcgctttcgtaaaggcataccctaaccttccgggggtaccacatgtggtcaacctgggaccgaccgactgacggccgtctcgacctacaggaccccgggttctgaggaagaagacgagcccgactctggttgggatttctccgggctcggtaatcccggtgccatgcgagacttcatgaccgcatgtgactacttcctcggacgacgacaacctcatcatccgcaacctcccccctgttcctctccgacgccgcccgagcctggctgaacggacgacgacaacctcatcatctgcaacctcccgctgttcctctccgacgccggccgagcctggctggagcatctgcttcctgcgcagatctccaactgggacgacctggtcaaagccttcgctggaaacttcagggcacgtacgtggccctaggaactcatgggatctcgaagctgccgcagcaccaggggagtcctggggagtacatccgg

SEQ ID NO: 1622 - DNA, 2602 bp, Arabidopsis thaliana landsberg
ctctgcctccgtctccattcgctccgtcgctctccgcctccgtctctctccgcctccgtctctctctgtctctctccgcctccgtctctctccgcgtccgtatctctccgcctccgtctctctccgcctctgtctctctccgtctccgtctctcgccgcctccgtctccctccgcctctgtctctctccacctccgtctccctccgcctccgtctctctctctgtctctgtagcttcgaacccagctgatctcatacacctgaaaggtataaaacatccagttaatgtatttgagttcttgactatttactagtatttgatttttgaccgttttaaacattgatcacatatcacagccggatcttctgcctgcatcttctgcctgtttgcatcagaacacagaggctagttttcacaatgaaatttgtatttgattgatttgtttaagatttgactgatgaattggttgtttgctatttggttttaatgaactgttgctgtgaatgtgaaaatatgaatatatatgtttgtttgatttttgtttggtgttcttatgggtctgttttgttttctttatgggtaagcacaaataatggtcgacaagatatgggttcatcttaacaggtatgtgaaaacatgttatagtcatgtatatagtggtttaattgatatgttaaattttgtaaatggttttttgctttcatcttacttctatgcagaaccgatcctggttatgagagtggtgcttgggattttgtgaggtctgtggctgcaggtttaggagaacatgcgatgattatttgcccgtgtattgtttgtcgcaacgttgatcgtcacttagctgttgatgttgttgatcatcttgtaacaaggggaatggattggagttataagttggggacgactggtatcatcatggagaagtgaaatcagtatctgattgtagaaagaacgcaagtcagtggaaccaagagattttagggttgttcaaagctgctgagtttatagatgaaaagctggttagtcaaggtgatgttgatgaggctgatgataaggaagaagttgagttttcagcaaagctagctgatgcagaaacacctctctatccaggttgcacaaatcacagtaagctctctgcgattgtttcactctttagcctaaagactcaaggtggttggtctgatagaagttttgatctgcaactcgagtccttgtcaaatatgctacccaagggtaatgtcttgcacacatccttgtacgaggtgaagaagtttcttaaaacttttgatatgggttatgaaaagatacatgcttgtgtaaatgactgctgtttattcagaaatcagtttgagaagctcgacagttgtcctaaatgcaattcttcacgatggaagattaacacgcgaactggtgaggtgaagaaaggtaatccacagaaagtacttaggtactttccgatcattccacgtctcaagaggatgttcagatcagaggacatggcgaaagacttacggtggcatttcagtaacaagagcaccgatggaaaaatgcgtcatccggtagattctgtgacatgggatcaaatgaatcagaagtatccatcatttgctgcagaagaaaggaatgttaggcttggaatctccacagatgggtttaaccctttcaacatgaagaatgttaactatagtgcatggcctgttttgctagtcaactacaacatgccacctgacaagtgtatgaaagaggagaacataatgttgacattgctgattcctggtccaactcaacctggaaacaatatagatgtgtatctagaaccgctaatagatgatctcaaccatctgtgggaaaagggagagttaacttatgatgcattcagtcacacaacattcacgttaaaagcaatgcttctgtggaccatccaggattttcctgcatatggaaatctagcaggctgcaaagtaaaaggcaaaatgggttgtccaatatgcgggaagcacacagatagcttgtggttgagtaattgcagaaagcacgtgtatatgtctcatcggaagtctccgtcacccacacatctttataggcgaaagaaagcatggtttgatggtaaagctgagaatggaagaagaggtaggattctgactggtcataacatatatcaactctgattttggaaatgtaaaagtaaaaggaagaaagaggaagatgaacgattgtactggatcagcttttggtactgatgatgaatccattgcatcagaagaagaggaagaacaattagatgaagatgagctttcaagatggaagaagcgctcaatcttattcaagttagagtattggaaggtatgatttattatcaaagttattcaagttcagattatttggagtaagttttgaaaaataaatgtcgtagccattaaagttattatctgttactattttgtctaggaaatgccggttagacataacttagacgtgatgcacgtggaaagaaatgttgctgctagccttgtctctacaatgctgcattgtgggaagtcagagggatggtattaaagctcgaaaagatctgcaactgcttggtattaggaaggatttacat

SEQ ID NO: 1623 - DNA, 392 bp, Arabidopsis thaliana landsberg
tgcctaacacaaataattggactaactagtttacccaagtgtatagattatacaggtgtaaaaggttcactctcagccaataaaaagaccaagagttggattcaacaaaagagcaaagggccaaccgaaggcacctgctggtcatggcgcaccggactgtccggtgtgccaccggacagtgatccgtgctaccaccggacactgtccgtgcaccagacggactcctaacagaaactcgccaccttcgggaatttcctgaggcgaccccgctataattcaccggactgtccggtgtactgagagcacctagagggggggggtgtcaataggtgatcctgtatatcttaaaaacttaagccctaaactttgattaagtgttagcacagttaatg

SEQ ID NO: 1624 - DNA, 565 bp, Arabidopsis thaliana landsberg
tgttcagccaccagattgggatttaccttttgaggtaatgtgtgatgcgagtgattttgcagttggagctgttctaggaaagagaaaggataagaaacttcatgccatctactatgcaagtagaactcttgatgatgatcaaaggaattatgcaactgagttgttagctattgtgtttgctttcgagaaattcagatcttatcttgttggatccaaggttattgttcacacagatcatgctgccatgaaatatttgatgcaaaagaaggatgctaagccaagatttttgagatgtattttgcttcttcaggaatttgaatcgacaagaaattggtcaccaactgagaattgcgccgtcacagtagtcgagaaggattcccatggtatgctgatattgttaattacctagctgcagatgtggaacgaataatttcacagattacaacaagaaaagattcctaagagagattaggcgatattattgggatgaaccttatctctataagcattgttgtgatggagtttataggagatgcattgctgcaacagagggtcctgatatact

SEQ ID NO: 1625 - DNA, 464 bp, Arabidopsis thaliana landsberg
atgctttcaatattgttatacttccgcttgctgcttgttattttgggttttgggttgggaaattattgtctgttagtgggagctaggacttgctcggcgattagcgctcattccccccctctcttttgtaggtaaccttagttagaaacctttagattgagctttgtttttatacccaaaacctatatttgtatttggtaatgtatatcaatacattacatatgaatcagaatcggttttcttaaaactctcgtgtatcctctcattcgtctagtccggactaatcccaactcgcggtcgcggtacgggttgcaaagctctaagtcccatggtcgcgaggggcggtcttcatgcggtcatgcctggccttgggtgatctttggtcagattcgtctgcgggcggtcgcaaccatacttgacgcttccggattcgttcgttggtcttaggacggttcggatgtgtt

SEQ ID NO: 1626 - DNA, 572 bp, Arabidopsis thaliana landsberg
tgcaataagatttcgtgttttggccgagttatgagataccatatgttattatgatatatcaaaccagccaccaaattgttggttatattagtagcgtgaagatgtgcaatttgaaaacagaaaataatttttagtttcagcaagtgtcgattgagaaaacatgggcctgtcaaaacttctaggaagtatgttgttggatatagtatgatgttggacaaagtaggctgttggataaagtttataggatatgatcgactttcacggttccactagttggaatgtggttatgatatggtaattacgtgattttcacaactgttggcactttcagggtttggccgagttataacaaagtaatggctgagaaattcctttattgtggctgagttatgttagacagttctcagaaaatattctccgctacgtcagatacgacgtcggtttgttacagagtctccgttattgaccagatacgtcgtcgatgtgacgaaaaccacatgaacatggacacacttatcaaccccaaaacgaaccctaagttataaaattccaatttctgatttcagatccgg

SEQ ID NO: 1627 - DNA, 602 bp, Arabidopsis thaliana landsberg
  unsure (1)..(602): unsure at all n locations
gtcctgtctccgagcaatgctgggtgccgtgactcattcgcncaagtgcctctttccccaatgagagcattcgtcccgacttcccgacgatttcttcatatcgtcgagttggtcgaacttccttttcttttcattcttcggattaccacccttcgggcggatcctttcctcctcatcgagattcgcctcgatcaatgccgccctttcaaccagttccgannnnnnnnnnnnnnnnnnnnnnnnncaaagagtcctcaactcaacccgaaggcctctgaggaatcgacggacttgcaccgcttcgtcctcgagttctctccnnnnnnnnnnnnnnnnnnnnnnnnnctcctcctcgtactcacggacggtacgacgaccctggacaagatccaggaagttactctcaagtcggtcccatgcctcggacggaaagtacatcctgttgaactcgtcctcaaagtccttgaaggtctcgacacgctcacccttgcgtttatcaaccgcaagccaccagttatgcgcatcgccctccaagaggtggatcgctatgtcctttttgtagtcctccgggaaacttgacgtcacatcaactcacacaactc

SEQ ID NO: 1628 - DNA, 1388 bp, Arabidopsis thaliana landsberg
agactttgtgatgatggagcagatccgagcttgggcgtttagaaggtaaacggctgtatctcgctatatgggcaaaatattcaataagcatgtgtagatgactccataatgcaaaatatgtagactagctccaaagttcaagtaccttgtcattaagcatttgatcaaagctaaaagtataacccgtaattctgttggtcttcaggtcagcataccttgaaagaaaattaaacaaaagtcatttatcacatttgtgcagcctcattgcaaaagtcattgaaaaccagaagatactaaatagaattcactatcaccagcagtagaatagagagatatgaatacttacttcagggcaccatatccaactgcctcagctatttggtccagctcctcgggtgaccattctttgtccttacctaaacagagaaacaacatatacggggatgaataagaccaaataataactgaacaatgaatagttcagcaattgagagagtgctgacacaaagttggataccataccgcgctcaataagggcagctttactgcgatccttggcctcatctagcaaatcagctaggcggactacctctgctgcccgagttctaaatcgcttgttatcatctccaaggacaagaccaaaaccaacatggctaactctagggtaagttttatcatcgtctggaagccatcctgcttttctggcagcctacaggaaaaacaacagttacgactgagtttcaactaagacaacatttcacaagacgtgaaaaacaatgaaaatatttatcaaaacctactttgaagaacatatcaaaatgctgctgctggccaacgtcggtcacatatataatccactcagctttctttttattaagccgatacctgggccaagccaataatatatgagatgcatttgccaaagattgctactaaactccagattaacataaagataacccaccaaagagcagttagatcagttgaggcatagttaaaaccaccatcactctttacaacaatgagtgggattttaaagccttcaatgaatatcacacgagcacctttactttcttcaactaaccccttgctgctcaattcctcaattacgttagcgatataagggttgtaaaagctttctccctgtcataaaacaatgtagtttccattacccattcatgtatatctcaaataatttagtatacgtcccagttattcctttaccttttcttcaagctcgattcgaaggcgtttgtaaaccttggcaaactcgtttcggctgatttcgcaaatcttagcccatgcctggcggtaaacaggatctccaccctgtaccgaagaaaaaaatagacaagtaggtgcatattgagacactgtgaaacagaaga

SEQ ID NO: 1629 - DNA, 524 bp, Arabidopsis thaliana landsberg
tgcgtgctcaaaaactcctggtaagttgccattgctggggggtcgctgatgctggcctccaccatgctgctgagggtggggctggcgctgcaagagctgtcgcagaatctcattctgttgggccatcagctcctgcactgtgggagctggaggaggtggcgggaaaaacctgctcgtaatgcccgcaacgctgcctagctgccatctgaaaacagagattgtcgccattgttatcccaactcacagttcgaacgacaagatatcattggcaccattggcaccaggggctggtcctagctcctcgatagcctcttctccctcgcttcctgcttcattggcctccatctccaggtggtgcatgtccaagtggtcattcgcttcctcgagttccctctgcacatcgtgaagctgattctccaagacatcaatagtgttgtctcggatctccacctgctgctccaaggtggtgatgcgctggctcagcatctctacctgcagatccttctccaccaactcggtggata

SEQ ID NO: 1630 - DNA, 1280 bp, Arabidopsis thaliana landsberg
ttgagttggtcccaacatcactgcattgtacttgatttgcaatttaacctaactttcatctaatccaagcttcgagcaaatcctaccttctaacatgcagagagttattttccctcctggtgtattcatcatcaagttgtacgctcgatctttccatcaaaaatatatgatcaccttctccaccattgtatcctacaacaacaatacaaaaactctgtcagatatactagttatactacaattctgggtaacacaagtataactagtcatactacacatatctgtataatacatgtataattaataatactacatgaaaatgggtaatactattgtaccaaagaaatactacatgtacatgattaatactagtgcaactaagtcatactagtgaataatgtgcagttctactcagttctaccagatgtatttcctgacaagaactcaaatcgaatggtttcgggttcaaaactacaattcactatgattcaattgttgtaatccatttcttactcatttacagatctattcaacccaggcagtatgcataaacttccaatgtgcataccaaacacaatttgcttaatctcaaatctaattgacaaaatcttttagttctaatcttcaattttaagctctgttcagctcgagaaacatacattttctttctatgtcgacgaagctcgccagagataaggatatgtgatgtaaatcgcattccggcacgagagcgatgagtgagctcaagcttcagaggagagagagagaggagaggagagagagttttgggttttctgttttttttttggttcaatttttttttcttttctaaaagtatttaattttaaaatgaatattagagaaagaaggaggaggggtaaattggtctctacacatctcattaacagagaaagggatatagagataataagaggagttgagagatttattgtttgcagaaagggagttatgagatcatttctctttttaaattaattagtttcagaaaaaaaaaaactgaaaacgggaaagaaaaaaaaaacgctctctctcgtctctctctgtcgtctctctctctctctctctctcagctcgagcgctctcctctcatcgtcggactctctctctttcagtcgccattgtagctgtaacctctctccggcgagctgggtcaagatagaaagtaaaggcatgttgctcgagctgcatagagcttaaaattgaagttttggatttctaattagatttgagattaagcaaattgtgtttggatatgcaca

SEQ ID NO: 1631 - DNA, 619 bp, Arabidopsis thaliana landsberg
attgactcagacctttatggactaaaaggtcattctatctttaagtcggtttgcaataccgaagcttcacaaagaggaaccttcggccattttatacaaacagcttccgccgaagactgcttcttcctgtaagaccttcggcgacgaagcataggcccaacaagatacaatttgataaaccttttctgctattgcattttcataagcgttacatgagcattcatggttatatatgatatatatagaaaacgaagaagaagtagaagttgaagaaagaagagctacaccaccacctgaagacccacctgccgggaactgcttttatttcgatatttgtggagcagagccaactctcctataacacaaggcaagccccggcgcatttgccacctccttgctattttcaaatctttctcacttgcttgatgcattaggtggtaggagttgtttgctaaacaattgatgcatttctcactctgccaggtaccaaactttggggtttgaaatgataaagctgagaccgagcgggtgacttgcacgagaagagacctcggtgtagtgctcagtctgagtcgataaggaccgctcgatgtagcttgatgacgaggccttttagatg

SEQ ID NO: 1632 - DNA, 2019 bp, Arabidopsis thaliana landsberg
aaaaataaatagaaatgagagattgccaagattttcatatagtggataggggtaggaatgtttcctatgaccccattattatacattattaggaatgaacaattgcaaatgttggaaatatgccgaggatgtcaatcaagtaatgcgagtactcctttgtttactcttcaaaaaaaataagtctagggagagaaagaataccaaaaagaataatgaatggttcatttatcatggtatagtacatgaatgagtctagaatgttcttgaatattagcttgcttaatgagatccagcgatgaaagcctggtggatatagttgtggaacttaggtatggaatctagaaggttgtgtaagcttgcggagaagtacatgttggttaggatttgattatacttgcgaggcatatggattgggttagaatgatcaaggcaatagactagagaatactgggagttcctgcgttttcaaacctcttccacgagtttggtttttgtgtttttcttgaggacaagcaaaagctaagtctggggaagttgatatattcctatttttactgtcttttaactatgttttaggtataggttttagagtctatttgttatttctagagtcttttctagtctttttcaggtctttacatgtttgggattcatttggagataatggagcattctggaggaaatcagagaatttatgctactgatgaaatccggagacgaaaatgcacgtaggtgtcgagcgacaccaatacctgacggcaattttgagacgcaacttatgtatgttttgaagatttccaaatttggcccagaactttttcctatgtttaatgaaggcccatcacgtgagaagattcttcttaactctattcttctcttgttttattcattgatttcttattcaatcatgttttgttcttctatgatcatgcttgagtagttttcttgttaggtttagggtttctcattagggatttagaatatttagtagattgtccaccttgctagcttttctgttaggattcttcatctttaattgttcttaatgctagttcttgagtagctaactagaacttgaatccagacaataggtatgcccaccataggtatctgtagttcgatctattatttgataagtcttgtttataggtgtgtaataagaatcggcctatctactaaggtgaacaattgaactcgtttagaatgcatgtttaggttaaagctctcttggcttctccgttttttattttctatagacatagggagtttcggggaacaccaccggttattccataattagagtttgagtttaagaatggttcgataacaacctagctttcattagatctactaaccaatagttttctgagaataccctgttcctacctctttatttaatcgtttacaaccaatgaatctgctgttttcttactttgttttcttataatttcaatcataccctgctagcttaatcttgacattgaattcattgtgtgaacaaatgaactttgtggaaatcgatccttaaatactgcaattgatctcttatttgagagagtagttcttatggtaatttgaaccttatcagatttggcgccgttgccaaagttcttgggaatcaccattgagtttaatttacagatttcgtctagtttttacttttactttgttactcacgcgtttcttgtttttttcttttctgtgtttcaggtgtatgcctaggcaaacaaggagcacataacagaaggagctgatcaacttgtctgttctggacttgggaaaacttgaacgcaccaaccaaaaaactcagagtttagcaatggctgacagagtcatcagagctgatgtagaaggagttatgagagttgaggatgggcaagcctacgatgagtttattacataagtttttgaaaattattgaaaacaaactttatctcttataattatgtacataaataatgagattgtgtgactttgtgttcatattttttatatctttgattttgtaacaacccgtcc

SEQ ID NO: 1633 - DNA, 570 bp, Arabidopsis thaliana landsberg
aggggagaccttgcctgtgacgcttcggggcacgggcggggaaatctgcctttaaaaaggggctcatcccccgggcagtagccttgcctcggtcctcttgcattcaccgcgcccttccgtcttccgagcctctagatggggcgcgccggtgtgggggttggcgctcttctgccatcgctcggcttcaagaattttcatcatgcagcccggctgcagtctcccgccagtggtcatctacaaggatgaccaccagcctcgtggtggagagaagcgagccgggctgcggctcccccctgccctcagtttcaaggatgttcatcatcctcgctggggtggaaggcgagccgagttggggtcctgccttccgcatgggctggtgacccgcttcttcctccagcatttggaggagaaggatgttcaccagccttgtggaggaggctgaacttcggctatgcggggccggcctggtgcaggctccgtcatgctgcgcgtgtctggctccttggcttggatggctttggcgccgcgtcccgctgccaaaaggggcacggctgtttgtccacatacggg

SEQ ID NO: 1634 - DNA, 624 bp, Arabidopsis thaliana landsberg
ttgcaagaaccgatcctcggtaaaacaaatcaccgtgtcatccgccttatttgcttgtgatttgtttttcgccctctctttcggactcaattatatttctaacgctaaccccggcttgtagttgtgcttaaactttataaatttcagatttgcctattcacccccctctaggcgactttcaattggtatcggagcctggtacttcattagagcctaaccgctcgaagtgatgtcgggagctcacgccaagaaggagatgctgaccggagacaagcccgccacaagccacggaaggctccatcgggggagtccggcaacaagaagagggaggaatcacctccccgcgtcaagtcgcaccggagtggcgacaagaagaagaaaatgaagaaagtggtctactacgagaccgattcttcgtcgccttccacctccggatccgacacgtcgtccatcacttccaaacgcactcctttactttccgtcccactaggcaaaccaccggtttttgacggtgaagattattgtatgtggagtgataaaatgaggcaccatctaacctcactccacgctagcatttgggacattgttgaatttggagcgcaggaacgatcgatgggggatgaa

SEQ ID NO: 1635 - DNA, 2304 bp, Arabidopsis thaliana landsberg
taggtttaccacttaagcagcttattttcataacttagcgaaatgataagtaatttatggtatgtgcctgtatgttttattgccactgctcttagtttcccccagagcattgtttctcaggttttagattatcaagataaaagagagtggtttcatctgtctattgtttatatttatttttcctcactttttcccaggtaccagatcccaccttttgatttttctgtacaaggagttacttcaatttctgtggacgtgcataaatatggtttggctcctaaaggaactagtacagttctatatagaaatcatgagatcagaaaggtaaatactagttatttttccagtcttatgcaatttctcctggctcaatatgaattggtttaaattcacctcctgtgttctgattttggcatgcttgttgggtcacggatcatctacaaaaacataaccacgatatcgcttacttttgcttccttggcattggatccctgaaatcattcacactgtcttatgaaatcttttgaatattctactcagtgctgtgaaaattgtagtttcttataaatgatctttacctgacttttggattttcttcctgcaaaatatgtgctccttcatctacaaaacagcaccaatttgttgctggtaagttatgaacatagattcttaaattcatggaaatcctaaatgcggtattactccttaactatttgaaactgggttttgcagtaactgaatggtcaggaggtctatacgtgtctccaactatcgctgggagtaggcctgggtctttggtagccggtgcttgggctgcaatgatgtcgctcggcgaagaaggtttccttatagatatctcactctctcaagcttctggcattagagtgtgtcaaagattgaaatggttgattctgtatgcttctgctgttccacaggttacctacaaaacacaagtaagataatggaagcatcaaagagactagaagaagggttggtatactttttttgactattttgccttcttcaatcgttttgattcttatagctttgactatcgtaatctgcagagtaagagaaatccatgaactattcgtcattggaaagccagatatgacaatcgtggcttttggttctaaagcattggatatatttgaagttaatgacatcatgtcttctaaaggttggcatttgaatgcactacagagacccaacaggtaatcttaacgaccaaaacactacattggtgttcaactagtttgaaacccttcactgttctgaaactacctatgcctgtgttttggatcagcattcatatatgtattactcttcaacacgtccctgtagtcgatgacttccttcgggatctgcgtgaagctgtggaaactgtaagtccattaataaaaagtcttttgatcgtttccattcctcagttgatcgctcgtttccattcctcagttgatcgctcattgttatacaatttttgttaggtaaaagcaaacccaggaccgatcacggcaggcttggctccaatatatgaagcagcagggaagatgccagaccgaggcatggtgaatgagcttctggttagtttcatggacagtcaatattaagtttcttgaaggttaaagcatctagtgggtaaattgatatcacatttcagttggagaagcaaaactttgtatattcacacccacattgtttcgtttgccctactaataaaatttcattacaatcttcataataaacaaatcttagttcgttacattacaccttcagaacaaaaaagatgatcaatcagatttgtggtcagaaggtggggatcggggaacttgaactggcttgtcttcttggcttttcgccaagatctcgtctctctctctgaagtattgctcgaaagcacgaggcaggaacctagggatcaagaaacagagtagattcactccgaagtagcctaagtttgctagtgctaaataccttccaaaccagaaccatgtaaccacctgcaaaacgatttcactcgattttaacataaaccaattctaaaacggtaaagaagacttgtatttgagtaaagaagggtcctagccattacattgggtgtagcattgattggtaaagacttgttgaaccaaacatctttagaccaaccaatgatgacaaagattctccagactgtgtagagcaatgggacgagagctcttaccggtggcgagaacagagaaaggccacttattacattctctgtcaggatttgacacgacagtagaaacaagtgtggtgttgctgatcttaccgcatgatcat

SEQ ID NO: 1636 - DNA, 606 bp, Arabidopsis thaliana landsberg
tagttgtccattagttactgttcaaatggtgtagttgatatggttatcatgtgattcatgccatattttttacattagctacaatcaccaatttcccagacatcatccattttgttttgacaatttgttcacatgtatatggatactcttatcattgcatagcatttggccactctgttgaatttgatgacgttaaactgatcatttggataatttgaaagtgtttagatcccttaatccattgtggtgatgatgttgtctcaagcctgcaacaagtcttgatgattcaaattaacgtaaaacgaagtgaacctctaatccttatccactaaatttgaaacattgttatcaaattaaaacctgaattcagctaaggagaatcgatatttgggtcttaaaaaaaggaaagccacatgattgttgagattaatcctttgaaagttcaagtctatgggtcaaactcgtttcatctacatagcatcgagattcctgttaatcgaatctcgtgttattgacatggtatataggatggatatagatctgtaaaaaggtttcaaatgcatatatttaaatggccctgttattatggacacaaaaaattgtttg

SEQ ID NO: 1637 - DNA, 566 bp, Arabidopsis thaliana landsberg
tgcgactctagctattgcgtgtgtttctatcccatcttactcttggggtttcattgtgatcaatcttgtaagggtgagaggctccaacttgtagagattcctcacaaagaggataaacttgagataaaaagaactgtggtattcaagtggatcattggatcacttgaaaggggttgagtgcaaccctcgtccgttgggacgccacaacatggactaggcaagtgtttcacttggccgaaccacaggataaaaatctccgtgtcaactgttgaaagggaaatagggttaaccgttccctataaataattttggtggttgacgaccaacaaaaacacatggactaactagtttgtctagaattcatgtattacaggtgcataaggttcaacacaaaccaagaaagtaatcaagttagggtcacaattcaattggagcaaaaggacctagagtgtgctgaaaaatggcgcaccggacaccagggccgtacagagttgaaccagcactctcgggaaaatggaggcgcgctccgctataattcaccggactgttcggtgtgcactggactg

SEQ ID NO: 1638 - DNA, 841 bp, Arabidopsis thaliana landsberg
actaagacactgaggatgcaacacctcaaaagaagacataaaaacagcttagaagttcaagactcgagaacaagagaagcccaaagaatcagcaaagaaatacatgaagagggcagtcagccagcgcactggtggtgcagcagacagagaacagtacctgtccggtgtgcaccggactgttcggtgggacacctagatagttttgcgcagagaggcccacaacgggtgctctggggctgtagcatcagacagtgtgggtaacggtcggatccaacggtcgattgctacagaccctaacagtcggctgatgtggcagggcactagacaatgaacggtgtttgtcaggtgtgcaccggactgtccggtgtgctcattgacagaaagctgttgctttctgtccaacgactagaagtgtgggggagactataaataccctcccaaccgggaatttgaaggtgtgggagcccaagcaacataccaaggcatattgtagacatttccaagtgctcaaacacccaagtgcttaatagaatcactcggtgattagcgtaggtgctttgcgaagtgcttaggttagttagaccgcattagcgcttgctctaggtgaatcctagtttgttgagtgagtttagacaaaccacataacccctcggctcttgcgtgggccattgtaattgtaccgagtggggcgagagtcttgcgagaccgtgacaaccgcgtttgtgtcacggccgccaccgtgtaccgtagggaacgaggcccgcggtgtttcggccggcagctcgatagtggatacagctgtgagcgtccgagacgagccggaacggaacaccacttgcgc

SEQ ID NO: 1639 - DNA, 521 bp, Arabidopsis thaliana landsberg
ccacgaccctaatgaaacttaccaagcaacaaaacctatccgcaaggcgctgtccggtgagtggtgtttttcccctaacccaaacgatcctaggagcaagcatgctctgataccaacttgaaacgtcccatcccgggttgtccgtccggtgaggctgttcccatccgaggacaactcaagtctcctcgggtcttatccgaattcgctctaagtgtaattggcagcggaaattccgagattcatgagtgtttccactataggctattacaatcattcgatccaatactttaacttaaacaccacccacttgcccggacaaccatcgctacagctaagccaaatccttcccatgaacttggtcacaccctgaaattaacgaatcatgagtatgccgtggtttacacttagcgatcatgcatatgctatgatgctcccatgtttcaccccacacataactcaatcgttagaacagagtattagaaggatagatcacatcaaccgaatccccgagccttttaaga

SEQ ID NO: 1640 - DNA, 598 bp, Arabidopsis thaliana landsberg
taataaactgtccttcaactaatagttagaagttttattagtatgtatgtttaaatctatttgtaatgaaagtgatatagtgagaaaggcaataaactggtgaccgagatggggctgattctagacgataaaagtgagttgcagaccacatcaaggctcaccggaggccatggcggtcctctgtagggggagcgaatcgatcctcttccacatcggtgtggaactacatcctagaaaaacaaattgaatcacaaaaattggcctgagaattacatgtatcgggtaccataattagggtacccagtacttctaaacatggctgaagaacatcttttaaaaagactggtaagcacggttcagagttaatgccttgtctaccgagggacgtggtccgtctcatccgagcccagcctcggacaagaacagtagtctcatacggattcacgtctcgcccgagggtcccctcaggcagggggcgcaccccggcttgcctgaggcagaactcgggtaaactttgtcgggtagcggcctcggcaaaccgccttgccaccaaccgtatcacgtgcgcatttaatgcaagaatcacctgacaccttat

SEQ ID NO: 1641 - DNA, 585 bp, Arabidopsis thaliana landsberg
ctagtagcttggatccaacttagatattacacactaagaagaaaacaagttgaaaagatattacacacttttcggatcaaacaagtaaagggaataggtgagagaagaaagacatgcaagagcaaccacaagtccacactcatgcaagctcatgcagagagttttggaaataacaaaagcaataaatgcaaagtttgaatagaaaagagagaatgggccaaggcattgtgactgggccttggaccacaaattgggctaataaagggaggcttgaaagtgttacttaggcctcattaaaaaccttgttaagaaaactcactgggacaaaacttgacaagggaaaaagagtgcataagcaacacttaaccctttaccgagcctcttgagccgtgatcactatgaaggaggattgagccacgtctttttgattcttctttagctccttgagtagtccattgatagcttggttgaacttcttggattttgatcttgttagaggaccgccggaacgatgaatgcttcctcggtacaagctgctcctcggcttcaagctgacctcgtcttcttgtggttcaagtggtttgg

SEQ ID NO: 1642 - DNA, 593 bp, Arabidopsis thaliana landsberg
  unsure (1)..(593): unsure at all n locations
tattcttcattccgcactcaaccagacactcgagcataaggaagaaaagttgaccctttctattcactcgacctcccnnnnnnnnnnnnnnnnnnnnnnnnnnnnnnnnnnnnnnccaatactgtgtcgttttaagtattagggttttcgaatatttggctataagtagcatgtcttcgtattttcccaaacaagtttttatctagttttattctggagacactgtgttctagacctttgtaatccggatttctctttatctattcagtattcagtatttgttcttgatttcgtttactgctgttcatctgttatcatcctgttgttacactgttgttatcatgttttcatcctgttcaacgtttatgctttctgctatgatgtctgagtagtgaataggtttatggggatgggttagagtaggtgaagaattctcagtatgctaggtggttttagagtagtgtagaatagagggataacgtaaagctagagtaaaaattcaaacttttacttacagatggcctagagatcgagtacattggtggagtatgagtgatgtttaaacccaaatctttttttaaatcatatttact

SEQ ID NO: 1643 - DNA, 627 bp, Arabidopsis thaliana landsberg
aaatatttcggaggttataaaatattttaagcgtctcaaataactagattttgattttcggaaaataggaaaacactcggaaaatatgaaaaaaaatccaaaagcttctacaagatatattaacatgtttcaaacaccttttgcatacagaaacactatgcagcgacatgaatgcgacagtcaaagcttctctagagtttcacttcactaagcttacgcctatatataacaaaataactctccattatttatgaagaatagaagaaaagcaaggaaatgagagggtaacacctgaatttggtagatattagaaaagaaattttatacctccaaattcagggtgttacaaagggcatccacaataggaaggacatcaagtctgactcggctgcgattccatctcgggttccatgaccagcctgtactaaaattgacgcccaggacgcatctagactccgattgcagtggacaagatatggatgaaaagataatgatattatctaaccaacaaaacttagtcccccttaaagttcattcgaagtcaacgggaatcatcgaaacaattctgttttggtgctgcgacaccgtctgttgggccgttccgagtgtttcgcgtcgaagcccata

SEQ ID NO: 1644 - DNA, 414 bp, Arabidopsis thaliana landsberg
aatcagttattggatcaattggtttgatgaatacaattatgttagattttaatggttaatagtttacctgattattccgtcaactttggtaaaattaaattaaatcaatatcaatttaaatttaacaaacacatctaaaccgatttaataaagtcaatttatttcccaaatttctaaaacatacaagcgatgacattgagaagacggttgtcgatttaaacccgtaattttcccgccaaaaacgtaaacccgtcatttttacacttcacatttgtattttggtagcgtatgtgtgcggagagaagtctggacttttacaagagaaaacatttcacatgggggagacattgaacggacatagaaaactagtcattgagaccgaaatggagctaatgaaacaaaaactgagagagc

SEQ ID NO: 1645 - DNA, 508 bp, Arabidopsis thaliana landsberg
gaatggcattcacacaacagttgtgattcggtatggcttgctgtcacatggtgatccccatctccaataatctgtccatcacgatgatctccatctccatgatataggtacgccatcctccaggtgatgagtccttcaagacctatctaacgtatgctggtaaacaaattacatatacgctttggatcatcacatgttgacacgcaggtcattacattaaatttggacaatacatgtggctctagccgtattgccctggtcacgacacgcaggtcatgaataatttgttaacatgcatcacatacacataatagccataccgatcacatgtcctgcaaaaacaggttagacaaacacgtttctatacgttcgccactacagcagatagccacggcggtcccaaatccgagactttcgacccgaagaagattacactcatgacgtcgatctgttgcgtcaatctgctggttgtgtacgcagttagcccgatggtgattcagccggtagg

SEQ ID NO: 1646 - DNA, 11815 bp, Arabidopsis thaliana landsberg
ttaatgtgtaggggaggttcaatttgaaagaagattggcaaaaggatgctgttttttagtagattggttgtgtgtggaggtcttctaagtcgaagctcacaacgaaagtgcgtgcagtgaagaacaaaacggatttgctttcgctaaaaccaagtaacatacaatatgtgacggcttggaatgcatgggtgaagaacaggaagacctctctgccttcaaggttgtataactatttttaaattgacatttggatattttagaagatgatttgttttaatggaagttgcttttgtaggaaataaatgacaagtacaggatgttgaggaaggcacagattccacacaccaccagccgcaaaggaatgattcgcctagcccatgagatggtatatgtctactctttaatcaattaagcttgtgtaaattggttaccatcaactaatcactatcatacttgtagaagagaaagagttctgaccctagtaaagtaacaagaagtaaagtctggatagtgggacatacacattcagatgggagacctgttaagccagagtttgaagctgttattgtaagaatttacattcttattatggattttgtaagtagcttagagtaattgcggcttgctttttttgattcaggataaaataaagactatagatagtcaaatggactccagctctagtataagtatcaaagatgatgctgtgagccaagtattaggaaaagacaaatccggaagagttagaggaatgggaagagggataacttcttccaagttagcattcatagaggctagagacactcatgtgcaaaagcttgaagcaacccaagcagaattgctcagcaaggttgaagacctacaaaatgtagttcgtgacttagctgcagggaaaagggtaagttaaatgtacaatttgttattaaattcatgtcaacttgtaagtttttaaatacttctttgttttcttcttgtatgtagcatgatgatggttgtaactcggagtccagtaatgttttcaatggaggaccgaggtgttagctgttggaatggtattcagaagttgaggttgttgtaggggaagcagaattctgctcagctgatccaatgtacaagataggacatattccactcggtcctaatgcagcagcagttatggtgaagtctgcatcaaacaaagaaacatctacctggaggcctacaccatctgtgagttcacttggcgaagctgttggctgcaaaattccatggccattcaataaaataattctggacaatatagactcaccaactggaattaagacagctggttcatcggtaaaagttttttctttgaactagactaatttttgtttgaagcttatgactggaaggcttataataatttttctttggttatgtatatatgctaccaatgcattagatgataagatcctgatttatgattggaattctgaggatgaaataatagctgagggtagttggtattcaacggaccaaaaagatctagtcaacaatgttcctttaggtccaaatgctgcaattgtgactgttagtaaagtagttaacaaagaggcttttctatggagacctagtgctgatatgagtttgatgggtgatgcactacatgagaacattgcatggcctatacataagatacaattcattcaagcaccatggcgtcaggaatctgtttcaaaacacgcatcacctaaggtaaatttcaaaaccatttcccttttacttgtgatgatgaattgttgcatttttaggaggctttgttgtagtgaatgaaactgaaatgattgtttggcctctttattgtagagcactagtgtaagtgtaagtagcagctctgaccccaacaaaggtggaaagaaggaatgcatcatcttagattgcaaaggaacatgagaaaaagttgtagaaggcagagtttgttttacaaacccaacaaaactcgtccattttgtgccatatgggtcacaatgctaccaaggtttggatagacgtttctaaggctggagatgcaccagtttggagaccaaactcagaagtcgaaatcattgctgatgcattaggtactacagtgacttggccaaatgacaaacttgtttttatttgaaacattgtctttacgttgtgcaatttgtgtactattaagtacttagggctcagtaacttttgtatcttcttatatcatggtgtgaacttggtgtaagatgttcttcttaaagataatttaaatggttttaagaggtttttcattattagcagcaggtttccataattgacgattagaaaacaacgaacaatagaaataatagaagtacaaaaccattagtgctataataaaaacataggtatataaagtaaattataacaaaataaaaacgttgttatacaatttttaattgcactgaaataagcgctatcttaaattactctattgtagcataacaaaaaaacgttatataaatctattatgacgggggtatatagagtgtttaccaaaccgctatactaaccatcttagcgtttattagatgctataaatacttcatttttctgtagtgccaactcctccagacttcgcttttacttgccctcaagcaaaacacaaaagccgaacccgtggaaaaggttttgaaaacaaaggaactcccaacattctctagcctattgccatgatcatccaaactaaatccacatgcctaacaattctaatcaaatcctaaccaacatgtatttctctgcaagcttacacaacattctagattccatacctaagttccacaactattcccactaggctttcatcgctgggtctcatcaatcaagctaatattcaagaaccttttagactcattcatgtactataccatgatgaatcgaccattctttatatatatattttttttctttggtattctttctctcccccagacttgttctttttgaagagtaaacaaaggggaactcgcatactggatcgacaccctcgacatatttccaacttttgtaattgatcattcctaataatatataataatggggtcatggaaatattcctacccctatacactaccgaaaatcatatcaatctcttgcttcttctttttttttaataaggggagaggaatacttttctttttcacattggtctcaatatcaggtatgaacaaagagtcaagttctatgaacactaaccgttttgatgaggtaaaaggaagagcagtgagattaggtccggccttaatgaattgtgttggaaaccaggatatcctcattgagtcgaacctgcaacattaatcaaccaggcaataatctaaagaatagagatcataattccttacaaaattttgactcaataaaacgactcaaaaagaaacataagaataagaataagactcaaaaagaaaaacgtagttagtaagcgcctcccccagacttaaacgacattggccccaatggcattcaaatatagagtaagcgagaaaaataaaagaaaaagaaaaccataccagggggttacctcccactaagcgcttgtttagagtcaatagcttgactttggtggagtttggggatcaggtggatcagaaggtggtagtaaatatcgtagagaaagacctctcatcatccatgctggcgtataagcagttaacgcatgaggtctatctaggaagagaggagtatcagcagggtgggactcatgtatggatggaatactccttttacctgcacaatcatcaaaagaacaaacaagcgctcgacgagaaactcgtggcttgctaaaccgtgaaacagtttttggaaattttaaactcttattgatgaaatcaggagttttaggaggaggagatgagtaccttagccgtttatgaggtggatcaaggagtgacggtgcattggttgacgtgaccggaatgcctggagtatcagcagtgaactcaacacgaaaaccagctctaataaataactctggctcaacctgtgtcgggtgtcgatcgacacaagtggtggctgtcgatcgacaccatcgctggagttcgattctcattagcttattcgtcagctgcgtcttgtggatcttgcttgtaccatgaacctcaactaactcaacatcagtccattgttcatcgacattatcatctgttgatgacactttgctatcgagcccgcttgatctcgctccttcaaacgttgaagcattgactgtttcacaagagtgttgatcgacatcaaggtcatgtcgatcgacactgagacttggcgtcgagtggttctacaaattagtgtggcaagcggtcacgagtggtgtctctaaggtctggtgctgaattccactccttgactgaactacattaacatcctctctgttgaaccgagcattcaaatcttgtacatcattatacagaccatcaatcctttgattcgtcatcacttggctcttgagaatttgttgtagcatgcattccatcctactcgtagaagtggattaagggtgggcttggtgactagaatagctggaatgaccagcatagaacatatcaggcgtgttgtagtcatcaggttgaataacacgtccatctgcaacagctgcagttctgcattcgccttggtgtgagcgacacccaggtggtgttgattgtcaccctcggcaaaatcaggtatcaggttttcctgctcatcgattttctgaccatactcattgtatgccagaccagctctgtcccttaacactcttgcagcatcaggtattactatcaacatctttgtgttgcaattgaattcctaaagctcctgaaacacaagaaaaagaaaaagaagagaaaaactgaattagtaatgaaagaaaagaagagtctagacttaaaccgacacctagtctaatggtgaaacaaagagaacttcggcaatggcgccaaatttgatatagctcaaattgccttaagcttactccctcaaataagagatcgtcgttagcacttaagggtcgaattccactgagctctcgatgttcacacaatagacttatgatgttatttaataagctagatgaagtaattgaatgtaaaagataaataagcaagtaaacgatttgtagattcaagtgattaaagcatcgggtctaaggaattgtcttgggagatagataaatcgtagatctagctaatattaggattgttaacgcaccattctcaaactcaaactatgattctagagtagccagtggcgttccgcgaaactctctatacttaaagctagataaccagagaagccgaaaaatcatatgctaaagcatgcattgtttataagcttgataagttcacctagtatctaaatcatagtccttctatgaacctacatgttcttttttaaatatctaggctcatctatcatagttctaataacaagtacctatggcgggcatacctattatctaatatcaagttttaggtgatcaatctaaaactaacaataagaataattaagatgaagaacactatgaataatcctaaggggttttcgatctactaatccatctaaatccctattgagactctctagacccaacatggtgattacttagacatgataatagaaatacaaaccataatctgaatagttttcattgatgaattaagaataatagcaaaggagttcagaatcctctctttagggattggattcttttctctaaagtgtaacaaaagctcaagaacaaaaactgggtctaacaatgaccaaacaattaggtatatagtcctaaaaacgtgcagggattattttgcaaataaggaagacttcagggcttctcaaaggcttggtggaaaacgaatattctcttggcaacgataagagtgtagatcgacataggtctggtgtcgatcgacaccagcttctgaaaaacgtccttcaagatctttattgctgaaaagcttccaaaattccttattgtgctccatagttcccagatgtgtgagtgtatgtgaaatgactcaaaacgtacgaaaaagactagaaagactctaaaaaccataatgaaactcccatccttctgcttcatccttgttcaggaaagtttccattggacgcaatgtcaagtagcattctgatctttggtaaagctcctctgtagagtgtgctcaataatgaagccttcttgaaaccgtgatgggggcactgagtggtgtagcttttaaacctctcccaagcttcacagaaagtttcattatttttctctgtgaagtctgagatctcgtttctcaatctagctgtgcaagcattagagaagaacttggcaagaaaagctttcttacaatcgtcccatgagttgatggagtctgggggcagagtgttctccaaatggtgtgccttgtctcccaaagagaagggaaatagtctgagcttaaacatatcttcagtgacaccattgatcttggtaaggccacagagcctatcaaagctgtcaagatggtccaggggatcttccataggtagaccatgaaacttgtttccttggatcattgagatgagaccattcttgatctcaaagttgttgttctgaactggtgaaggcattatcccttgtctttggtgatgattccttgggacatcaccagcaccaatgtttcttggttgatcaacattaggtgggtcttgaacatacactggtctgttctgttgatccatagcagctggtctttgctgatcacaggatgcctttgctttggtttcttgtaactcacgagctattctaatctattctgtctctgaattatagtaggtgtgcagaacctttggatcgactttgcatgcacaaagattagtacctataccataaaaacaagcagacgaaaagatgagtcagtaacttgataaatgtaaaagaacttgatcttaactttttctgatatcttgaatgtaacaatgcaacaatgaattgtcaacggtgccaaattgataagtaggttttaaggcctacttatgtgctgaagtgttgtgtgttcagttcaattccccttaaacactaacatgtcgatgtagctataggggtgtcaatccagtccactgttattgctagcaatcaatatgtgtacaaaagcaactaagtcaagccagattataatgatggttggtttctagtaacaatcctaggtcaggatgcaaacaacaaaaacgagaactgaagagccctactagatcattgggtcgagtagaaccaacaggtgacaaatttaataactaaaaatgcaatcaacaggtgaatgaaataacaggtaaataaaagtgcaatcagggggtggatgcgaataaatctaagaagaatagaagtcctaaggatggattcattgataagggtaactctagggttcatcaggtggctaacaggcgaaaggcagataccctagacgatagattcaaaaaccgggtcaatcaattctcgtgacagagacccccataactcgacgacttcctaatcttaactctcgttgatgaaacataacagagcagggtttaagcaacaatctaccaaagtcaataaacagtctaaacatccaatctcttgggctagaatctacaaatctctagaattcgtagatcagacatccattttaacgtcttttggacgcttgatacctatgatcgaatctccacattagccagcgaaaaccgcataggagccaagcaaatccagaaggttctaacctaatcttaaccacttaactaacctagagattaccctaatctaatctagcctcaagaaccctaatcattactcaagcaacattctcaagaacacaaacccagaaattactgaaatcataccaaaatgcagatctaaacaagctaaacaaatttacttaaacaactaaatgcaaaaacgaaatagattaagagtaattaagttttgaagattcataaacacaaagaaaaactaaaggataaaagcttgatcctttggacaaaccccaaagtgatctatttatagtaaaatgttgaaatcctagattcactagaagacaaaagacttgaggcggtttgggcgaatgctcgatcttgaggatcgagtaaggagggtgctgcaaagtctgcgcctttgtgtctatgctccgagtaatcaattggtcgagtagatgcttcttcctcttctatcggtatgcttagatgtctggttgagtgggaaatgaggaggattcgaagacgctttgatagctcaagaagtcttgtagagatggtcacccttggtcgagtaaatggttcgagtagtggattgagtgggaggggtgagtagatcaatctgatgcttcatctacagttgccttgatcgagtaggagggtcgagtaaactgcatcctcccttgtagcaccttggatcgagtaaagaggtcgagtagaatgatgcctcttctgtagctgcctggatcgagtgaatggatcgagtagactccttttaagctctttttgcacctgaaaacacaccaaaacatgcaatgcgaatgcaagatgatcctagatgcctaagtatgcaaaataagctaaaatggtgcaaaatgatatgatacaatgagcaaatgcaaagctaaatgatgataaacatacacctaaaatgagtaaaatatagtgttatcaccttgtaagctccttctacacttgaaaacacaccaaaacatgcaatatgtatgcaagatgatcctaaatgtctaagtgtgcaaaataagctaaatgtgatgcaaaatgatatgatacaatgagtgatcaaaaagctaaatgatgataaatacacacctaaaatgagtaaaataaagtgttatcaaatcccccaaacttatatcttgcttgccctcaagcaaacaaaaaatcttaagttgaaggagatgtttgaaggtggggattcaaaaaccgaagcatgcatatagaatgggtaagctcactgtccaggtagctaattctaggttgcaagatgatagacccttacttaacaactttagccatactcgtcacaatgcaacctaacaacctgccttaatctattcaagcattcacatcaaccaattccctttaacattcattaagcacgaacagtggatcaatcaatgcaatggttatgaactcacttggtttcaggcttagggtaagagacaaaaatggtccctctaatgatttggtcgaataacaagggactctcagagaaaagattgagcttcagcagaatgctaaaggtaaaagccaacagacacatacaagaacagactcccatctaccccatgatatagtacgatagctcagaagatgatcccagtcccatagatgtcctaactttaccatttttctcattctttctctctttttggttcaagttctaaggggttctctttgaaacgatttaaaagtctagcaggtttgattttatactttgacaaacttaaggcttttttctaatcttagcacatagggcgatttaccctttctttgaattacaatgcctaacttctttgaattccaaaccctttactagacttaacacttttgtatcccccttagaactctaaactcttactctcttttttttttcttttcttttcattctcactcatattctcattcattccatacacaatcccaatcgcaaatacaagtctccacctagtcctagctaacccaaagagcgtgggctatgtctacatgaaagactgctcttgtcggctcatacctaacacgttataccaagctcaatcaaaaaagacctcacaatcacacacaaatgatctttgccttgaaataaggctagactaagggtacggaaaactgctctaaaaatgagagacaactacttggattaacagagggtgatgaagtgaataagatgatccaagtatgtatatggtagccataagttcataaacaaagcatagacatgataatttcaaattcagttcaggttctaatagatagggaatggcatcaaataagcaagtttcgatcaaagtagtataatcaagttacaaattcaaagcagggtgcagtcttatttcagagatacaatcggttatacaacagagaactaacaacctgggcattgaacttacttcattgaatcaaaacatgcttatcggtttcaaatcatcattatcccctatgcaaatgagcaatcctaaatgctaacactctatatacaatcctaaaatgatatgcaatctagatgacactctttttttgtgaaataattttctgaaaaagtttcaaattttttattgtttttctatgccttagatgatgcaaattttgaaataagaaaagagaacacaaagttaaacatgtcttgaaccctcccccaaacttaaattacacaatctcttgtgtaataaaaatctgaaagagaatccaagaccaaagcacaatacacacaaagaaaaataaaaagatgctatggtatatacaatagagaggtggtgttacctcagttttcaggtgaaggttcatgctcgttgatgccatagtaagcatcccaattcattcctgagtactgcccatcttgatcccactgattttgctcgacgttctgctcgttctgaacccacggatcctgctcgacactctgctcgatatcgcgtcgagtatcttggtcgagtgatcttctgccggacataagaaggtccttgctccttggccgaacaattcttgtttttctccttcttttctgctcgcggtgttcatgagacgaatgtcgtgcaggagcttgagggcgacttacctctcgtttctcataggcagattgtcttgaaggtgaaactctatgccttcttgaaaccacttctccagggcggttttctctcaccatggtggcgcctgaagatgaaaagcttagtacagcctgaatggcggctatggccttgccacatttttccaacatcctgtcttgaaacttatttcaagtactcatcaaaccaatattcttatgtgcaacagtcagactcttactcactcttggtggtggtttgtgttcctcaaaatggaacatacttgcattgtagttctcccaatccatctcctctgcttcttcattctcagcttctccttcactctcaaccctttcttcaatgtctggagcttctctcgtcgggggtgctcgttccatgaagaagagttcttcattaggcgggttgaaatcgatgttacccctcattgtgatggttgtgagctcttggttgggtaggagaaacctcccatccatttccgctctatgctgaaacttgagaatatgcatcccctcatgactctgatgatcaataaacaaagcccatctcaggtgagcaatgtcgatccatctaggggcaaagggagtcgactgaagtggcactccacaagccattagtataggtgttatcactcctcctatagaaattgttcccttcagcttatttgctactgcccatttcctgaaaccacaaagatgattcaataaacgcattgatggtgaagcatcgttggtgtcacccttcataggcactttgtttttggtgtagactatgatatcttttagggcaatatccagcagctctatctcgccattgttaattggtccggtcttctcccttgcgtagaggacgttagccattgctttctggaagtaccgaatgcaggggtttcggattgcgttgctcttggcacttgaggacgagaattgggcgtcatcacctattgttacccaaagaccggaaagctcctctttcttgaacttgggtttaacatcagtccctctagggaatccgaacatgtcttcaaaagttttgatagccaaaacatc

SEQ ID NO: 1647 - DNA, 645 bp, Arabidopsis thaliana landsberg
  unsure (1)..(645): unsure at all n locations
tgtcgtgctctatttgttcagttcctcctgactccagctccacttcagaactcccgctcattagaagaatgaggcgtccaagtcttcgtgttcaacgagccaatgccggagctcttgctcgtgctggtgatctgtcggccgcgatgaccgcggctcaaaacattctagctgtttccagcgcatctgcctcagcagatcatccctcgcttcctgaggtcaacaccgggacctctactgcagcacgtcagtcaggtaacattctggttgctcaagtatctgggccatctgcagttgttcgttctgatggcgcaccgtcctctccgaagagagctcggacccagccggaggtgaatccggcggctgagttgctcgtgagcgaccagggggtcgctctcccagagaggagatggtgggggcaggtcttcaaaccggtctcaggaagtgaggcagacgtccaactccggctgaggatccgcgggaagcgactttccacnnnnnnnnnnnnnnnnnnnnnnnnnnnnnnnnnnnnnnggacgaggctgggttggcgaactgcttcgcacgtcaaagggaggaatgtcaggttctggagtgaagacatggcgagaggcggctatgctacatgatgcgaagaggacatgtata

SEQ ID NO: 1648 - DNA, 4241 bp, Arabidopsis thaliana landsberg
ttggctggaaacgcacttcccctagagacaacagatcattaagctgacaagcgaagcgattaacagaaggcttaagagtcaggacgcttaccatctgtgggctttcatgaaaaaggggagagaactaacaaggcctgagcactgaaactctttgaacatctcttcagatattttgtttagtgtttcactcgatagcttttggaggccggtcttagcaataacactgttggcatagtctggagtagaatgcagtatccacctttcactaaaaaaatcaagataataacactcagaatttagaacgctgaagcaatcttaccccataaatttggttgcaacttctcaactactgtaatttcacatttctatattggttagtgaagcgatctacctatcagtagaccgtcccggcttggtgctttcacagtgagcccagctcaaaatctctgaattcttgaaagataagccctttactggtatctgattcaagaatcatagaatatgcaaaccgacagaaatcagctaaggctttcactagattactggattgatcaaccaacattgattacagactggaaaagcaaatatcttaccgaggacaacggctccttgaaagctagcataagagagaagcatggtagaacaggaatgttttgcagcttagtcgccaactccgggactagacttaagtctgtgtaggaaagcaaataaaagtgaatagagataaatgtgataaacactgaaacagcaactgcaggaggactgagtttgtgcaagtcttacccagaggcggtgggagtccagttacttgagtaaaccttggagaaacaatgtttttatctgatgcaaccactccatcgaaacgacccaaattttctccttttgaatctgtcaacaaccatggtatctcttcttccaaccattccatcttggcaataccagttccaaacatactcttaacacctacaatgttgatcacggagttgataacagagactgatgtttcagagatttgagttcaagctctcgactagaaagattagaaaaagtaccagactcattacacaaggccttagatatagagttcatgcccggaacacccacatacttctttgcatccccttcctacacacattaaaatcagaaattgattacttggaatcaatcaatcctagtatcaagcatcttacaagcgcatacattgaaacaagtaaatcacacttcataatctactaaagttttaatataagtacaaagactgatgtttcaaaacctgttggatgccaagaaacttgttggaggcacaatcaaaactcccaaaaacttgtttccattcagaaacaaaacctctggattcccactcatgaacaagagccatggcatcagagttgctcacacagaaaaatggagctccatggtcgaacatcaactccttcccatcttctccaatctctctgcttaaacgagacatcatcattcaaagttaaacactttataagtgaaaaggaacattcttaatcaaaaggaaccttctttgagacatgcgtccaccaggtccacgacccgagtcgaagatagtgacggagacgccattccttgccagagtcgatgcacacacggctccagaaactgctccgatttgaataattgaaaacttattttcatgaatgaaacccgaaaaagaaatctaagaatgaaattgaggaaacccacttccgctgccgattacggcgaccttcattgcgacggcaacgctgctcatttgtttcctaatcgccggcggaaattgttgtggctgccatcggtttgcactctgattacaaacagaactatgtctcgtttactattttcgctattcaactgcgtcccgtttctaaatttaaaaacgacacctcgttaaaaaaagtcacctttttgggctccaagcaacaaatgggaccatggcggacagtccatgccacatgttaccgtaatcgtaatgattatacgagacaaatgtcaagccctccaggaggaagccgtctcgttctcagatattatttgttcaggttcttgttgttgttcttttagatatgtgaatagtgaaggaggatgtaaaatgggttgttgggtaatgtgaaatgaccagatttgaagaagaacaaaaactgtgacgacaagacacaagacgttcaaggagaacttaggggaggctaagcaagtaactagattccttgaaacgctgcgtttagtcatgttttgaatgggaagagtgaatgaatgtgaagactgaagaaagagaatggtttttatcagatgacatgggtgaaatgaaactcgtgaggcaaaataaagctaactttatttgccaaagatgttgatgcattgcatgtttgaaaaacgaacgttatcacatctgcgccaacatttgtggcagtttttagcatcgactaacacatgcgtcttgttttattttctaaatttgttcagaaagtttttaagaaataaatatgtatttattttgataaattgacaacccgaaattttcatataaacttaaagaatttagatagtgttttactgcaactttaactaaaaatcatgcacttataccaacttatatgtgtatatatcaaacgtcaccaatttttttttatattactatgagtaaagaaccaagtaagctcttgagcaaaccacaaacaaatgtaaaatacaacatattaataatcaaaaggaaattaaaggtacaaaatacaaatcatcaaacgggggtatatatgcgtaattaaccaaacaaaaacacaccacaatgaaacaactcactacaacaatcttatgataaaatgtacatcatcaatcacatgaagtgatgatagttcaaggactcgaagtagttgtagaaggcgggggagagaagaacggaatggatgggagactagtcggaagagagggaatggatgggagattagttggaagagaaggaatggatgggagattagtcggaagagaaggaattgtagttggaaatgaaggcaaagttggcattgccgtgggaatggtgggaagatttggttgtggcaaagctgatggcattggaaatggagacattgcagtgggcattgtggggagagttggtaaagatggttgtggcaacgtcgatggcaatggaggtagtcccattgttgggataggcagatttgggatttgaggaagaggttgttgttggagaaggcggcgtgaggctgagcaagtgttgatcatcattgaggaagagacgctcactaagaaagcaatgagaaagagcttgtatgatgccattttggatgtgttgataaatctctaactatggttaagtgggcctagtgatgttaaaatgggtttcactgcccatttaattaaatgggtatgttgttaaataaatagtccatttagacccatttataaaaaattgttttaattggttaaatgggttaacccagttaagcccacttattaaatgggttttctcttaaataaatggatagcccatttatttctaacctaaagaacaatttgcagagacacagtgaacaatttgttgcgtcgctaatcgaatcaatttgctgagatcttgctgagaaaaaaactctctctccaattcactcaggtaaaggaacaagacccatctttcttcttccatcaattttgttccagacccaattttgttccaaactgggaagtgacgttttgttttattaatgagtaccaccaattcttcttccatcgttttacctttttattaaaacattcgagaaagtgttttatatgttaaagcatctccacagaggaaagaggcatttgcagcctgtgtagagagagtgggaataaggagtggggcagggttatctcttgatgttccaaccagatggaactctacatatgaaatgctcgctagagcattgaagtttagaaaagcatttgatagcatgaaggcttttgacaccaattataagtctttaccatcagatgatgagtggaatcgtggtgaaaagatttgtgacttgttgaagccatttagtgtaatcactacttatatttcaggttccaagtatccgacatcgaatgtatacttcacccaagtatggaggattgaattactattgaagaagtacgtcacttgtgatgatgaggatataaagcaaatggctatggaaatgaaaatcaagtttgctaagtattggaaggattacagtcttatttagctattggagcagttagat

SEQ ID NO: 1649 - DNA, 1802 bp, Arabidopsis thaliana landsberg
gtacattacttacattcttattttgcttttggtatttttttatgttctttgcggtaatccagaggatggtagaataatactaaaaaagtattttgagatgtttaataattttcaggaagctgttaattgcgccgagcaggtcatgacttagatacaagacatggctccaacaggacagcaattataccaggggtacaggattttaaactctatcccagattgtcatttactacattttgagagtttggacgtttgccccgagtgctttgtcctcacttatttgtttaagatccgtgttttgtgttagatcaattttcagtttgttggaaattcgctctgtgtcaagctgttaatcaataacgaaaaaatgttagaacatcattttctaccgtttgtattatgtatgattttgttgatttgtattcttggactacttcaatattcatggatttgtcactagtgggtttgtatactttagtccataattttacttttaatgaatggatttgtcacaagtggataggtttccatggattctgaataacggaatttaaggtaatagtatccggtaattattctctatattaaaactctgcgtctaagtatttatctccatcataccaatcgaatcaaccataaatactatcaaaataattatttaggtattcgataattgttctatattaaaacactacatcattttctacagtttgtgttatgtatgtttatgtggatttgtattcatggactactgcaatattcatggatttgtcactagtggatttgtataaatgaaaccataattatactttttatttaatttatataacattttaattatttacacttttatcagaacgacgtagttgtcaaatggtcataaataccaaatttctagggtttcctatagaaacaagcttattttcctcgtacaactttcaccacacaactagaacatggtagatcgacttggaggtatcccgattgtctgcccttgtggcgaggaagtagtgatgaaaacatcagctactccaaggaaccctggttgtttgttttatgcatgtcccctgggatcttccgtaagtaaatctacaaattatctgataatttctactacttgctatccaaaataactatcgataatacaggaaaattggaaccatttgttcaaatggacggatacatgtatcgttgaagagatccgaagatttatagaaaaagtgaataacatggagggttctacactaaaattgcaaaaagggctaaatttttgtgattccgtgattacctctttgtcacaggagacgcgagacctagattccgttcttcgggaagacattgaagacctgagatcgcagcttagatctatgaaaatgttcttgttttatttttgctctttattttattttttatgttttttaatcgttttatttccgaaattattgtaatttctattagtatatttatcaagacctaattcgactatccatcattgtttaaccatttcgattttattatcttccttcgttttgatttattcgtcctaacgagtaggattagttaattttcagagttacatattttactgaacatgacatgtaatccacttgcactagataattcaagcaacttgaagtagatatcataatctattcgtactttttagacctaatacatcaggttatcacttcaaactgacaccctttacactaatttatctgttggatattactatttgtgaagctacacatcaagggacccatcgtcaacaagtctatttttccgatgctagtttgtagaca

SEQ ID NO: 1650 - DNA, 551 bp, Arabidopsis thaliana landsberg
  unsure (1)..(551): unsure at all n locations
caacaatctcaggttcttcaggtactccctcaagttctatcccgtcccatatgtctctccgcaacacgcatcttgaatgaccaaaatagtcatcacacttgttgcaagagtaggcaccatagccgttgtccaccattgtatgacagactccgcaagaccatgttccggatggaagagaggaggtataagatatacagtggtggtgacgggatatacgctttgtatggtagggaagtgaggggaaacaaccatcgggaagaagctacgatctgaatctctcgtgtatggtttcaaccttagaactttgatacgtaaagtaggacagagggaaagaggctcaagagagagatcgtccccaccaccggaatnnnnnnnnnnnnnnnnnnnnnnnnnnnnnnnnnnnnnnnnnnnnnnnnnngttacatcgatctctccctcacgaaattcaccgactggatttgaattcatggttactactaagtcaatttttgggtagntgggatattcttctctccttactctccctcttccatatacatgtacagataaaa

SEQ ID NO: 1651 - DNA, 4354 bp, Arabidopsis thaliana landsberg
  unsure (1)..(4354): unsure at all n locations
tcaagcttgttcgtgcacgaaaatcgagatcaaactcactcaactcgattgcccacttcgccagacgtcctgacttggttggactatgaaggatggtccgaagtggcagcgatgttaaaagcacaatcggatgagattggaagtatggtcttagcttcctagctgcggttacgacagctaaggccaatttctccatcattggatatcttgtttatgcatcggagaaagacttactaacataagagataggtcgttcatcactccgctctacgcgtacgaagacaccacttattacattctctaagacagaaatataaaggaatagtcgtctccgaactcaggctttgcaagaaccgggggctcggatatatagctcttcagttgcctgaatgcttcttcgcaacgttcatcccacacgaaccccttattcgccttccgatgcaatgtataaaatgggaggcacttgtcagtagaccgcgatacgaacctgttcagtgttgcgactcggcctgttagacgttgtacttctcttatagtgcgaggtgaggacatttataagaacacatttatttgcctcggatttgctttgattccgcgcttagtgacaatatatcccaggaactcccccgaaggaacagcgaaagtgcatttcgaaggattcaacttcattctgaattcattgagaatatcaaaacattgctgaagatgatcgaggtgcgaagtggaaaaagctgactttaccaacatatcgntgatctatacttccatggacttgccgatgagatctttgaacatcttgttaaccagccgttgataggttgctcccgcgtttttcaacccgaaaggcattaccttataacaatagatccctctgtctgtgatgaatgacgttttctcttgatcttctagattcatcatgatctggttgtaccccgaaaaggcatccatgaaagttagcaattcgtttccggcagttgattccacaagacgatctatatgtggaagtgggaaactgtccattggccaagctttgttaagatctgtaaaatcgatgcacactctatcctttccattcttctttttgaccacaatggtatttgccacccaatccgggtactgcacttctcttatagatcctatttttaagagtttatccacttcgtcgtttactgctttcgctcgttccactccgagtttccttcttttctgctttacaggcttgaagcttggatccacattcaactcgtgacaaattatccttgttcctttttaacagctcgattcaagcttcttttatttcgccagataaagtagctccaatccaaactttctgatccggtttgtctgcttctagaattacttcgaccacgacatcatccaccttctgcccactaggaaacctcgggactactcctttctttgcgggctttgttaattgctattggattttcagtcggtggctagccaaataacaagttctcgaagcttcttggtctccccgaatagtttccactccgtttggagtttggaatttgaggcactaatgatacgtagatgggaccgctttcatctggtagatccacggagttccgaggatgatgttataagctgctggtttatcaaagatgacaaaatctacaatcttcgacatctttcccgccaaaactggtagcttaattgttccgagagacattgttgactcaattgtaaaagctactaaaggggatggcggtcctactacatcggccctgcttatccccatcctttccaaagtgctaagaaagattagatctaccgaactaccggtatcgacgaggattcttgaaacctcaaagttagctacatccagcgtaattactagagcgtcatcgtgaggtctttcgaggtgctgcgtctctttttcctcgaatgatattgaagcgccttgaaaatctacttcttcacttaaacttgactttagaagaacattccgtctatgctttttgattgcgctgatggaatcacggcaaagtttacatcctccaagaattacgttgattttatcttttgaacttcttggttcttcttcgccagccggtcttggtctcttagagttttgagcttctgagttatccctcgactcatgatattgcttgacgaagttctccatatttaattttgaaagatctccgcttgcccataattctgcgagatgccttttaaaaacactgcagtctttggtcagatgcccggtgactctttgtatatcacaatacaagctctcatcccgaacccaggtatttgaccttcctttcccctgaaattacttttcaacgttattattgaatggttgtgaaccaaacttccttggtccttgattctcccgaggttcgaacttcttgggtgaaaaagtagctgctggtttcgcttgcttatttctctttgcgaaactttctttttcatcttcgacttccatccaattattcgctcagaataatgcatcttgaatagtatcaggtttgtgaagtatcaaatcttctttgaatctcgaatcatgccataatccttttcgcaaagccgctagagccgactgttgtgagatcctcgggagcgttgaaagtacgttcttaaatttagcgatgaaagcccgaagtgtctcattcggcccttgagataaattccagaggtcggtatccaaaatgctcttatccagaagaattgagtattgttttaatatactgtcgatagttcgttgaaattactgatcgatcctggttccaactgagtgaaccacatcagggcttgcccacacagattttcggagaaaagtttgcaataccctacgtcttcatcggcctcgtttaggtcaactcacccagcggctatcagaaaggctgcgagataacctttcggatcttccaaaccattgtatgattctaagttgagttttcgagaatctctgattctcaaacttgtaatttgcagagtgaatggtgttcgcctagctttctcgataacccggttgatatccggttccgagcttgtagcnnnnnnnnnnnnnnnnnnnnnnnnnnnnnnctcccgacttacttccttcatggtttcgagttggtcgaagttttcctgatcgtgttggtcaaaaaactggaaatcatcttcaggatgcgtttctccatcttctggttgattctccgcgtttgtaccatccggggtctgtttggtctcttgttgcatttcgcggaagatgagggtggggatccgaagatggttctccaaactctagaattccctgcatttaaagaacggacacgagactgaatggtactaacattctggctgagtgatacctggtttgtttgcaatgtttcgacggttttttccacgcttgcaaacttttgcgtcatatcggtcatagcttgttgcatggccttgagggtttcggctatctaaacgttggtagcatcctctctagacattgcggatcacttcgggtatataatgcacagaaagaatctgatgactcaagaatcctccatccccacagacggcgccaaaatgtggatgtcggattcacactcaagtatttatttgtttagtgagaaggattattcttgaggtcaaatatactaaaaaataagtagatgattatagagaaaattatgagtattgtaaaagaaaatgtatagctaatttgcaccaaaatatgcgtgtgtccttacatgacctttgactctcaatatatatccaaagaatacatttaattcttatttaatcacaatcattctatcttaaacgtattcgtttctagtcttcgaattaattattcgaacgtttgaatttgaatccactccgagattcactggcttcgcccattgactctccagaccggacgttccgacttcgtcaccacatccatctcgcatagcgaccacctcgccagaaatcttctcttcgcttaaagaaacctgtggggcttattccttttgggccttccctgtccacgtggcaatctttggttggtcctgatcttccggtgcgggatccgacaccaacaattagccccccaagtctttcaaagtgatattctaattcggaagactttaatgctttaatggacaaagattgcgctaaaatagatttctgatttccctccaaaatcacattactcctttgatttcggaattacccataattactcgcatgacttctgtcgcaattatgaccacatctcaattatttaccattaaaacgggaaataactcttccacttcccccacaactctcgaggcggttccatcatcatcaaaagcttgcataaagtatatttattttaatctttatctccctttagaacaaagttcctcttccttttctg

SEQ ID NO: 1652 - DNA, 1430 bp, Arabidopsis thaliana landsberg
  unsure (1)..(1430): unsure at all n locations
agactatgattaaaatcaagaagcatggaacaaattatttcaagggaggaaggagtacattcgcagctgattcatggttaaagaacttaaagaagaactttttggtaacgaggtgtccggaagagtacaataaagacattgccatatactacttgaagaaagattcagccaattggtggaccaatttggagaagcaatttgaagacaaggacccaacttaggaagacttccgaagagagttcaagaagaagtattttccacaagaagttagagataagttggaagcgaagtttttggagttaaagcaagccaaaagaagtgtgcggaaatatgaaacagaattttcaagacttcgtagatacgcttcttgtggcaatgaagctgccaaaattcgaagatttatttgtggtttcagactagatattcgaagcagactccaagtagttgttttctcgagtctacaagagttagtcgaaagagttgttaatatagaggaagcaatagctaaagaggaagcgacattgctactaagaaatggtggaagtaattcgagattgatagcaggtcaatcaagtaatcggagaaaagttaaagttaacctaaaaggttgaaggtcaaaaccgaaaaacatcattgtcagatgttatgtatgtggccagtttggacattcatatccagcatgcccaaatgttcgataagaatagtcatctgtgttatcccacatagtgtggtgaagaaggtcattacaaggaatcttgcccaactatgaatctattccaacaacgcaacggttattaacaactcgttttccattagtctgcgcctcaagaagatagtcgataaggcataggtaaagaaaatcaagattattccttaggatagattacgcaaaccttcatgacttgaaaaggatctgtaacagggaagtatgggtactaactactcttgtttgattgtgtgtgcattgcttgggtgctttattttaagtagcatttacttagttttgtaaagcgtagtattatttgggtaatggtaaccccaagtgagtgttgctagcttaaatggtttatttttagtccgagtgagtggagagttaggattagagtcttttagtaaccctgaagactttgaaccctaaaaactaggaatctagagttttggtaaaccctaatggtttaggataactaccttttacccttttcatcggtggtaattgaggtgtgtggtatggctaaaggcaaatctgaatgctaggttggtaaccctagctgttatgtgaaaagaaatcacatttaccaaggtgaagttaaagtggatcaatgcangagcatagtatgaagccacctaacaactcattgttgaagaaagcattaacctactatgggaagaacccaagtatggttatttttttcgaaagttgcaaggagatc

SEQ ID NO: 1653 - DNA, 1747 bp, Arabidopsis thaliana landsberg
tttcgttagtttgatgtatatataaattgattgtttttgttttaaatttgatcaattagatgatataatgtaaagattttgtccgtggtacacctttggtcgatttttttgtaactaaaaattcaaattttaagatatagttgttttgtaaatattgtttattttgtttaatgtttaagaatgtataattatgttataattattaattctaaaatttcactcgtagattatcgtcctttattaatatcaactcaaactcatcccaccatataatttcattccgtaaaatgaaaaattattttgttattttaaatattgttattgtaatataataaaaaaatcgagggattgacatgtggtacatcttggattaatatatttaaaaataatttgtatatttaaaaatcgaaggattgggtaattatgaatatattgattttaaagtcgattttttaaaagaacaaaatccaagatatttattttgttgtagtgattgttaatttactaaactacccatgcaaaaaaatcatttacttagttttaaactacccttacaatgttgtagttcacacaatgctttccaattaatagtataaatacttttgatctttttactaatcatatttttttttttgtcatttttagtaatcataattaatttcaaataagtctaatctttctataaattaataatttaaattatagggtgtgatacttaataccaattttttaaatctttctacaaatatttatcctcttaatatgcaaacttttgtaattcaaaactagatattaacccgcggtataccgcggacctatatttttattaaataaaaaataattgaatattttttaggatgatttaataaatttatgctattgtttgatttaaatatataattcaccgcgagaaaaaattttataactcaaattttaaagttttaagttgtatatgtttattttgttaaatgtttaatattgtataattgtattttcattgttgtttctcggatttcacccgtagtacaccatcccatattaatatcgaatcaaacccgtcaattctaggatttcacccgtggtagtatttaattgtataattatattttaattgtcatcgtaggatttcactcctaattctatcgcaaattattatcaacccaaaccagtcaattttaaaatatcacccatagtacaccatcccatattaatatcgaaccaagcccgtcaattctaggatttcacccgtagtagtatttaattgtataattatattttaattgtcattttaggatttcactcctaattctatcgtaaattattatcaacccaaaccaatcaattctaaaatatcacccgtagtaaaccatcccatattaatatcgattcaaactcgttaattataggatttcactcgtggtagtatttaattgtataattatattttgattgtcattctaggatttaactcctagttctatcgtaaattcttatcaacctaaacagtcaattataaaattccacccgtagtataaagtttaaatatttataatgtttaaatttcttataaaagaatcaaaatgtgttttaaaaaaattaaagttttaagtttttttttttaatattgttaattttgtttagtgtttaagattatataattatattatgattgttattatatgtttttttccatagcatactatcccatgttattatccactcaaacccgtcacaccatataaccccc

SEQ ID NO: 1654 - DNA, 550 bp, Arabidopsis thaliana landsberg
aggatggtttagattagggtaatctctaggttagttaggtggttagtgtttaggttagtaccttctggattcgcttggcccctatgcggtttttgccggctaatgtggagatctgatcatagacttctagcgtccaaaagacgttcaaatggatgtctgatctacgaattccagagatttgtagactcgaccaagagattggcttgtctgcttattggctttggtatattgtttcttaaaccctactctgctatgtttcatcaacgagagttgagattaggaagtggtagaattatgggggtctctgatgaaccctagagttgcccttatcaatgaatccatccttacgacttctattcttcttagatttatttgtattcaccctttgattgcacttttatttacctgttatttgttgcaccttttattgcattttagttctttaatttgtcacttgttggttctactcgacccaatgatcgagttgggctcttaagttctcatttttgttattcaaatcttgatttaggattgttactagaaaccaggg

SEQ ID NO: 1655 - DNA, 969 bp, Arabidopsis thaliana landsberg
ttccctttcatatattttaagcttcccaaatcattttcatgctcagcaaatgcatacacttgtgtgttcttcacaagtactctaagctcagcaccaacctatacaattttaacaccaaaagtcactatgaaaattagttttaaaacgatttggataagtttaggaatcatacttagctcgacaatgtttctagctgcaccgagctctcccttagtgtagcgaacagagttaggacctccaagagaaaaagcatcatagcttggtagatcacctacacatctagcgttatggccatggagaactagacctggtggttgcggtttactgggaccttcttctaattgcctcagaggaatgaattttgttaaggttagttggtggcggttgaagagtggagaattgcttcctatacctaagcattgatccacctggatgatcttcctctctccaacaatagctccattcacaaacttagtgttgtcttgtgttatgttaccttgtagaaatgctacacgatcgatgcccataccactgagagttgttggaggtccattaacattgattgctcctttaggtaataaaaccttactttttgaagagatttcccgttttcatctctagttgttatctcttccaacacaactccatatgttaatttactctgacgtgtgaagtcatgtgcgtaaacaaacaacctagattgtttagatgcttgtgggagaagaaaaaatgttaatcatgagggacttagtaattacctcagttatagtagctttcacaccagctcgatccatcaagattggtgccactacttcctcaaatccaggttctccagtgagtactgagctaagtttactactgttgaagatgcttgtttttttgaagatacagtttctaggattggaaacaccgtctagatatgggtgtacatactcaagcttaaacgaaagatcatcctgcgggaaaaac

SEQ ID NO: 1656 - DNA, 2463 bp, Arabidopsis thaliana landsberg
tacgtttaagatagaatgattgtgattaaataagaattaaatgtattctttggatatatattgagagtcaaaggtcatgtaaggacacacgcatattttggtgcaaattagctatacattttcttttacaatactcatagttttctctataatcatttacttattttttagtatatttgacctcaagaataatccttctcactaaacaaataaatacttgactgtgaatccgacatccacaccgtctatcctgaatgacaccttctaataagaaagtccacgccaacacatttaaagaatgtaatgagttgactgacgtgaattcagagttctgtaggatcaaagcggatggacaaggacgagaaaggcgtaggactattgagcgaccgttctaacgcaacttttgtttaatgtggtctgtaggatatattcgagacacggtcaatgataacaggagagttcccgcgatttttagaactctccaccagatttgttcttttgtttgcttgaggacaagcaaagtctaagtctgggggagttgataacatcgtattttattaggttttcgatggagaaatcaggagttaatggacacttcaaggcatatttcgagtatatgagctttaaggaagaattatgagttttcatgcaaaaaatagtagaagtcgaccaaaatccatttcaagacagtttccgtacctcagatgtttggcatccggccaaggtctttcctatctcgacatgaagtctttggaaatctagaagagtcaagattcccggcgaagtcgaatcgaagcaatccatgaaaccgttcagaagttatgtcccgaagagtgaagacatgtcctagaatcgcggttttggaaatgatcaatctaaaaccgccggccgaagagacttgaacccgggcgtcccctcaagttttccaccgaccactagggcgcacaaccactccttcccttcctcttgccgccgacttcaagcaaccctaagaagcccaagaacttggcccatcacttactaatcaatggaaggacgtttctaccctttgacctaatgaagcccaataaatacaagtttaagggaaactctaaaagatcacccacgaaataggctacctcctgcgcctctcaccgccccaaaaagtcgtcctcctcttgttcttctttaaatctctctttttctcttcaattctctattctcttcttgtaaaaggaagaagatttatcaagctttggatttcctgagaagatctctaaacccttttctatattcatactctcttttatgcaatttcttattcatatgatgtcgtgttttgtgagtatgtgtgagtagatctctagttaggttttaggggggtttcaaagggtattcatggggactttagatctgatttaggttggctgtttctatggttttgtttgatcgttttcactatttcttctagttgagtttattcttaatgcttgtatgtccggaacgccacctagtacttgcctttaggtatttcattatttggcacaatctcgtttgaatgtttgacctaactcattgaataaagaactataaccgttgcacacccgccgagtgatagggacttatgaactagaattgaatctgaacttaatgcctgatcttgtattttgaaaccatgttagcacctactagccgacagggcaactgagtacgtaatatactagtgataatagccggttttcacctactagcagttaggattaactagttttgatagagtttcgtatgttcgggaatttggaagtaaacaaacctagccatgttatcacctagattgagatctataccttattattgaatcgtgaacatccggagaaacccccgatgacctaacgcttctctcttatagtttatcgtttagtttagttagtagtctcttagtttagttattcgtagcatacaacaactccctctcttttattttggtcctagcttcactctcttggtaaggaggtctctgaactacttctctcattgtggattcgatcctaaaatactactccgatataatgtgcacttgcagtagtcgtgtggtctttcaggtaaaagtctgaagcgaaataaaacacgcatcagctcttaagttcttatttttgtggtttgaatcctgatttaggattgttactagaaacccaccatcattataatctggcttgacttagttgcttctatacacatcttgattgctagcaataacaatggactggattgacaccccctataggtgcattgatatgttagtgtttaaggggaattgaactgaaccacacttcagcacataagtatgcctaaaaaaactatttattaatttggcgccgctgccaattcattgttgcattgttacattcaagatatcagaaaagttaagatcaacttcttttacattactcaagttactaactcatcttttcgtctgcttggttt

SEQ ID NO: 1657 - DNA, 590 bp, Arabidopsis thaliana landsberg
tggttcctaactctgttggttgctctgtaatctactaggaagcagtgaatctagttcaggcatctttaacaagagaaggattctctatcgtgcctgatgtcaagtgggatgatgttggtggacttgagcatctacgacttgaattcaaccgctatatagtcagacctatcaaaaagcctgatatttataaggtaactgataagtcacttagaactgttatatagtcaagattacttgctttttctcttgaggtctgaatgtgccactttggatctttttaggcttttggggtagacttagaggttggatttttactctatggaccaccgggttgtggcaagacattgattgcaaaggcagttgctaacgaggcaggagctaatttcatgcacatcaagggtgcagaacttctaaacaagtacgttggagagagcgagcttgctattcggacattgtttcagcgtgcccggacatgttcgccatgtgtgatcttctttgatgaggtggatgctttgacaacaagccgtggcaaagaaggtgcatgggttgttgacggcttttgaccagttcctgttgactagacggtgaga

SEQ ID NO: 1658 - DNA, 619 bp, Arabidopsis thaliana landsberg
gaagaatctttctattaaagacgagcctgcgacttaggcgaattggacggatttcaaaggatgatttcttcaacgagcattgatggagtaagaacgagctgattgtagatgaaaggcgagcttgaggccggaagacgaacttgatgtccgaggaagaatagagtttattcgttttatagctgaaccttgtaaaaggttgcctacgtacccttagaaagggatcaagccacacgtagttcatattagaataagtgagctaggccgtcattggaggtaggtcggcaggtagttgacgagggatgagctgatagctagacgaggagttggacgagctgactagctgacagctaggcgaggagatggtcgctgtgatgggaagagcttgaagacgagctgaggagcttgaggacgagccgaggagtttgacgaagaggagcgagctgatgaactacttgagaagggcccaatccgacccttaacaaagacttatgtttagatatgttttcatgcgatccaaactatactatatatttttttggacggattttttaataagttttatggagttccagacgagtttgaacgaagcgttttctttatatatgtgctatgcgaaata

SEQ ID NO: 1659 - DNA, 1992 bp, Arabidopsis thaliana landsberg
ttttaatacaaggtggaaaatcgtagaattgacgagtttaaatcgatattaatacaagatggtatactacaggtgaaactttaaaattaacaatcaaaatacaattatataattttaaatactaaacaatataaataatatcaaaaaacacatacgactcgcagtttactatacatttaaaattaaataaaataatatcatatatttataatcatctttgcaataaaagtttttagtttaactaaaatataagcctacatgcggtatgatttactacctaatagaataattctaaatattcgggtctggttcgggtaggatccagttgggtttgggttagtttggataaaaagtttcagatcctaaaaatacccaaaaaatagaaacgggaattttgtatgtagatagcgggtctccaaacaaaaaaaacttttaaatttgttaagttttaataaatttaattatatttgaatatattttactaaattttgacaaacataacaaataatttttgaatagtttagttattttggatatttaggtccaaaattaattgacatatttagatttataattataatcttagataattagataatattacgattaaatataattaatattttggatattaaattaatgtttgggtttttgaatactctttttgggtaacgggtaatttttggaccaatcggatatccacgggtttattaaaactctacacaataaggaaatttcctaaaattttaacccgccctaacccggtttttttggttcggatattgggttggttatcgggtccgtttttttgtcagccctatcaaagataatctaatataggccccaattagatccacaaatataaccaaaatactatacaaagactaattctaagttaggccaaaaattagatcctctaatacaaaggaaacatgtttcttaccaaaacaatttgtatacaaattttacacattaacttaaaactacatatgttgtatttattataaacataacatttttaaacaaagtcaattcaatgcagcattatatgcaaatagtaaaaacattgaaaaatattatgacattacttttatattatactatttcttatgtaattcaaacagaatatacaatttaatttatacaatattaatgcccgtgttgtatagcacaggttatgatctagttacatttatactgtacatgaaattttagtacatataagaagtcgatgctttgtcaccaatcgaaacccagcaatggtttaatactctttttaagtttaattatattatagtaattagttcaatatcctcccatataaatcatgacttcatcttgatctaaacttgataataaaaatcttttgatatgtaggaaacatggtggctctgttttaaattgggataccagattgcaaatagctaacgaagctgcattaggattataatacttgcatactagatgcaaaccagcaatggtgcatagagatgtcaaaagtataaatatattattggatgaagagttcaaggccaaaattgcggattttggactctctagatcgtttcaagttggaggcaatcaacctcaagtttcaacagttgttattggtactctaggataccttgatcccgagtaagcattttaatcattttgcatcatggtctaaatatgttacatttgtttcaagtggttagagaattgtagattaaatatgaatcacactacattttcttgcctttacagataatacttaacaagtgaattatttgaaaagagtgatgtctacaatttcgggatcttgttactagagattatcactaatcaacgagtgattgattaaacacgtgaaaaccctaacatagctgaatgggttacattggtgatcaagataggagatactaatcagatcgtggatcctaaacttcacggaaattatgacacccattatgtatggagagctcttgatgtagcattgtcatgcgcaaattc

SEQ ID NO: 1660 - DNA, 607 bp, Arabidopsis thaliana landsberg
tctcctatactttctaagttcagataatagcaagttcacttcatcatcatttaactcagcattaatgaccacggggtaagtagagtttggaccaaggaatgcgtaccttaaacttttaggaagtggtttgagatcaaccttaggcgccttgagttcagaccagtcatctgaagttgggatgatcagttcctagagtcgctggcagtcaaggtcgagtgattggtcgagtatgttctcgagtgtgcaggttgaacttgtgttgacccttcttcgctcattaccattacctctgttgctggtccaatcaattcctcaaagggttctgattcttccatcgctttatgggagtataacagcttatggtatctgatagtaggatttttgttaattaatcactaaaacactatcttgtcgttgtagtattttaggatgtcaatccaatcccggtgtgatgcaaacagatgagatatgatcagaaagctctaagtcaagccaagcagatagttggttggtctaacagtcctagtatgcaataacagaaatgaaatgaaactaaaagcaggaatggcaatagcaggcaagtgaatgacaaagcagaaatgataca

SEQ ID NO: 1661 - DNA, 778 bp, Arabidopsis thaliana landsberg
atcatttgaagcctaatgtttaacctgtttcgaatatgaaacctgtttcgagaattcaaaggttctcagggttagggaacttaagggcttccagtgcactggatttaatggcaaggcctttccttttgaagtttaacctttcaatctcagcccggaaataaaaagctagccgatgcataccctaatcaatgtttgagcgttttactgagaaagcaattaaggttataacgttggctcaagaggaagctcggagacttggctataacttttttgggactgagcatatactgctaagtctaattggggaagggactgggatcgctgcaaaggttcttaaatccatggggatcaatcttaaagatgcacgtgtggaagtggaaaagataattggaagaggcagtggatttgttgtagtggagattccatttactcctcgcaaagcgtgtgctggatttgtcactagaggaagctcgccaactcggtaaagatctttcgctatttattattatttaggctcggagcttgttatgtgttgtacaaggcataaggttacttgactcttgttgctattgttgatcctagggcataactacattggttcagagcaccttttgcttggtctacttcgtgaaggggagggtattgcagttcgtgtcttggagatattgggtgcagatcctagtaatatccggacacaagtaaatgcaccaattcttgttaatgttatgtcttagtaaacaatttcttgattacattttgaagatacatatatcatttc

SEQ ID NO: 1662 - DNA, 643 bp, Arabidopsis thaliana landsberg
  unsure (1)..(643): unsure at all n locations
ggtatcccaagcagtgtctcgtgcatcgtcgactttggagggcagtcttcaatgccaagacgctggtccgagtcgcccgactcccatggaggtgacagaggagccctcatccttagaggtggctactgcagaagacccagcccccgagggtggtgctggcagttacccaggcccaatggttgttgccggtagtgatccggctctggtgggtagcgcaactgcaacccagcccccgagggtgttaagtgtagcgcaagtgcaacccagcccctgagggtgttcaggtgggctctccttcccacacctccatggacgtccatgttgggtcgtctccacctcagtccgattgggcgacggcgatgcatgcttctacagctttgaataaacaagtcgccttagaggtcagcgagctagatgcaagaagtctgttatctgctggtggggctgagatcaccctgacaatgcccttcaaattgttcctactgatctcccccgtcaagccatgacatagctcccctgccttgggtctacatcgttcattccaatcttcaggtgaattaattcttgcttttattgtcatagtagtaaatatcntcgtagcttatctgctcgacacagctttggtgatgaatgctgctactga

SEQ ID NO: 1663 - DNA, 2064 bp, Arabidopsis thaliana landsberg
ataatgaaactactaaggcattgtaatctgggaactcactggcatctaaatcttcaactgaacatagtcagtttttttccacatcttggacaaaacacttgtattaacaacatcttttgacggaagctgctacaagagcgtctgacatatcgaagtgtcaggtaatttgcttatcatatcctcttctaaaagctttcctccattgagctcattcacaaattgaaccgaaaatttcacagaatatcttgctcaattactcaattagttgtcttatctgcatcaattatggacatctaacattcaatgtctaatgtatattcaaactcaaatttaagactcatagacaaaaatataattgagaaaatagcattcatagttaggaaaacatacaattcaacacaaactcttaatcagacaattaaacgaactcataatctaaactagaaacagatcgagtcagggacttgatagacgcttccgttgtcatggttatagagaaagactgaatatttgctctcatgttgactcaatgatgacgtcgataggtcttcctctgtgtttgacacaccattcaccaatggttctgtccattgttgatcaggagaagagaatggattcgttgtggaagaaaccgcacggttctgacctaacttggtctgattctcgggttgtagtaacagaagcttatcttgtaacacccgtagaccactttctaacgaacccttcatctctaagactttctccgagagcttattgtcgtcgaggatcttcttacgtagaaacagagaaaggttggttcttttcttgcgtcgctctctctcgtgtaatctgctaaacctctctgccatgtctcgaaccttggattcatcctccggccatgtcttgatgagttctccgtcacgaccataatatatgacacagacttcgatgtcgcacagagttgaaagctccaaggctttcttgaacatggtctgttctctcatagacaaattcgtggtcttttttgcagtagaagaagaaagacagagacgatttcttgaaacaagtttggtttcttctcacagacaaattggttttcgtcttcgttgacattgaagaatccattgttgtttacacacagaaaaagaagaagaagcggtagggtttctctaaaattctgagaactgcgttagggtttcattaaaccaagagagtttatttccttttttaagtaatgaatttcctttttttgtttggtgtctatgagagaaatcttaattagatcccttttgcatttactaatatcaatttaaccgttgagtaaacattctgtacataaattactaataacaggtaaaagtaaaaccctaaattagatcagatttctattttactaatatcatcaatctaaccgttgtccactttaaataatcacaaacttctccatcactcttcctcctctcacatcacaagctacgaaacaatactctccgctctctcactctctgctttaatttatttgattagtcttttaacgctttcttctcttctcttctctgcaggcttcatttgattagtttctgtctaatttcttctaataatcttcagagtatattcagttagatccgttttgttttcttcgtgtttagtaataataatggatacatgtatgaaagcttggtgtccacttcaagaacactttcttcctcggagagcttccaaggaaaatttggacaggttccgccatggatttcgactatgctcactacgatctaaccgaaggaagaaaagctaaagtcgatgaggtaacttcgctgtcaagaaaagcctacatgaagcaattggctaagggctataaatttgaatcgcacccggattctcgctttcagaaacaaacctcaagctctgtttcctagtaatcactctgcttttcttcaccagcagcgttaacccgtaaagcctcgtaaaaacatttcctcagacttgtgagagaatcttgaatgcaagtggcattgtggatgacttctaccttaacttgacaagcctatgtatttcctatctactaacccatctaaagcccatgta

SEQ ID NO: 1664 - DNA, 510 bp, Arabidopsis thaliana landsberg
gatcgaatccagtccatctggacctgattgaatccaagcctttaacatatctacaccgtcctcagaaactaagctgactattttagctgctacgtgatcaggcatgttgaaatcagggaacggaggaggctgaaagaaaatgcgtaccaacgttaacaccaaatttgtgaggctatataccaattcaaaactaaattttgcaatttttggatcaatttaagtctatataaaatgagtgcctcaattcgattgaaattgtttttgagtaaacattacctgtaggttaaaatgaaccaaaggttgacgaataggctacacggcaaattgatttcccctaacaggggcaagggcgcttgggggtccctaaccgataattaaagaggacgaactaggctgaagggaaacggatttgatatagtgatgaaatgggaaccctaattctctggattaatgaatagggagtggtgtggtggagcgatgtgttctggatataattagtggacctacaaa

SEQ ID NO: 1665 - DNA, 615 bp, Arabidopsis thaliana landsberg
tgcgtggggttaccaccaacaagtaatgtccctaatgcatatgaaaatgatgtatgcaatctttaaactagtaaactatgcatacaacaatcaatcactcaaacatacataaataagaaaagtaagaacccatactaacctgttatgggaccttttgcgggtcctgaaggtttggtaggttctacatctaaggcataaacatttgttggagtagcttgcttctttaccggtggtcccttaactttctgaactggcggtgggtggttaaccatttggttttactgctttatttgcttgttcgggcatgcgttacgataatcccctaggtctccgcagatgaaacaagctcccactcggttactctgtagtgccccttgtttattcgggcatgcattggacacatgtcccgactccccatattttgctctcctttaaacttccgaacacataaatccatcatcatcataatcagctttaagaacttggccgaaggagattcggcacactagctttcgtgcatctgttgttggtgttgctgttgttgaattatatgagtcaacaaggtcttaatcattctcgacgcgtgttgagtacggacacactttgaatataaga

SEQ ID NO: 1666 - DNA, 2074 bp, Arabidopsis thaliana landsberg
cttggcttgcagacacggcttatcgtatgtcatcggcttctcatattggttttagtttactgtttttatttgggttaccttgtcttaccaaatcagctggtattttccttttatacaggatcgcttagaccaccatgtggatgttagtgcctctgacgtagaggtaatatactaagctaatgactaagcggtaggcatgcctagaaaataataaaaattaaagacttacatggtctttatctgctctgttttgttccttattacaggagttgcagaggagcatcgatactggtgtttgcatgacactgctattgtcagtagtggttgtggtcttcggtctttccgagtttgtcaagtttggacgacgaaggattttaggttgagttacttggaatgattaagttttacttggtaaatttgcatattggttttgttatctatttggcacagtaatgatcatcacaaagaggaactccatagggatggtcttttttatgatctgctattttgtgtgatcatttggagtttgaactcttttgcacttgtctatcccctgatgtgcgtgtacttctcattcctctgattccccttctgttgcaagaacccttaagaagtagatgcaaagttttcgcagcttgctgtcttcgtaaagatttaagatatggtagcaagtaaatagaacgcagagacaaaaaaatgtatctatgagttcttccaagaaaaaacttgtctgacttcgctatatgaagcaacgaacattttgtgacatttggaaacaccgatttttatgtcatcaatggaaagaaaaccaatcatgaaatgaaaatcagtgattctttgttaatttgatcatttatgagttttgttgactcaaccattttctccagctacttgatcttagctcgccagagaagaacctaggaatgctcaagagactgttgactctagtcaatccttccaacgccgaccactcttcatcatccttcaccgatatacactctgcgagtgttgtcttcttggactcaatcctgcaactctcaggcgtcttttcttcttttatctcccaaaccggtacagtctcatttgtttctgttgaagcctcttccttcttgtcggcatctttgcttgatgttatggtgacactctctgtagactcttcatgagaatgattaacggtttccgaaacttccacggttcctcctgctgaagtgtcttcaagaaagagacatactacagcacaatcatcattcttggaagtaggatacttaagcctccatgctcgaaccgccgtgtcgactacagcacgagctgcagtatctcgactaggagctgaagccacaatatcaacagcttctttgttcgacaaaacatcccatacctagcattagagacactttagctccaaagatttcgatagtaaccagtgagaagaataagaagagtaatgtgtaccccgtcagtagctagaataatatactgatctctttcagtgagtctatggtagttgatatccgggacagagattagaccataatctttaaggcagaagtccccaaaagctcgagccattgctaaaccaggtgaatcgctgttcggtaaccacacacgcgcaacctcaggctcgtcttgtaaggcaaacactctacctttacatctatggattcttgctgattcacctaaagcaagtacatagagaagaaaatcagattatgtttccaaagatgatcaatagtgacaacataaagaagagactagatatacttggcaaatcaggttttaagtctatggtcaattgtacagccaccaaagcattgtcttggtctcttgtggctagaacggctctcgagtcaccaatatttcccaccaccagatccttaccctataaaggaatatataccaaacagtcattgaacagagccaatgatagagtaaataaccggtgatcggactttcacctgtttgattacagtgacagaagttgttccgctgcagaaacaattgatggttggatgcatttttaactccttatccatctgttgacaagtcttgagcaaagcccttttagaggaagact

SEQ ID NO: 1667 - DNA, 1293 bp, Arabidopsis thaliana landsberg
ccgcatatatgacatatgatcaattacataaagaagcaaatcttagcggctcatgccgccttggaaggctggagcacccatcgccacacctccttggttctgttgcttctccacgttccccgcccatcctaaaataccacatcaatttttatacgagtgttaattgttttgcgattacaaaacttaatcaatcataaacaaaatgacatcgaaataacttaccaagactcatatcgaaaccgcggtgcttgagttcacggtattcttgtgtcaaagcacaaagctcacagcagaaatgtttaaggcaatcagtacaaccatcacctctaatattgtattgagctctgatctttccacgatagatacacgagtagagacatccacaaccagttattgcggctagcaacacgtatagtgctccagcagtaccacacgctgacaaaaatttgaatcagcaattatttacaagcttatttatgataccgtgtattataataaaggcacttacaggtgtttcctcggtctacaatatcagcaacttggccaaatgtaatacatggacacaaccatgtgatacaacctgtccattcatttttacaagataaataatatagtttagcacaaaactactttttcagctttttacacgtgcaaatatatatgtaagtaattgtgaagagagtgattacagttttggcaatcagagaagcaatcacagaagcctgtggaccattctccttcagcatgagggttggcttgaaggtgttgagatgccatggagagagagagagatagaaagatcttaaaatagaaagcaatgtgtttaaagttttgtaagataaacgaagaataatgctttgtatttatagggatctattagttccattatttgtgaactcgtccgaacctatcaactttttgaaatcataaaataagtcacatgcttttgttttattttgaaagtagccaccacgagttacttaatatttgcttgaattttttaccaagtctttctaatggataatcttcgaattgatgtattgaaatatgaaaaattacacatatataactttttccatattttttcacgaaaaagtactttattttttagatttagcacatacatagacttaaaattaaaattttataatgataattattagtttattactatgactcgtataatgataaatatttatatattttgtaaaaataatcaacacatcttttagatttatgctttattttcgtaatccactcaatgttttgcatttaaagagtctttcatagtct

SEQ ID NO: 1668 - DNA, 623 bp, Arabidopsis thaliana landsberg
cacctcacacgcggtgccttgcggctcaagtaatcaatcttggagccgaagttggctgggtcttgaagccgaagctgctggggtggtggagtgacacccatcgccactagttgccacgccatcacccgagacaactatcgcttgttggcgtcacagctgtccggacataaggcagcaggcagtgcagtctggccgaccttgggcgggatataaatagagctcacttcgtgttatgtgatctttggtggctaagtttacttatggagttgattaaaccctagagatttatttgtgcatagacccagctcattgagtaatcaaagattactcatgattctacttgtcttataggtaaccatagtgggatgaccatagtgggaagacgaacactaggaaatgctggaaataggatgttttgcgttgcttctgcaaaattactggtgtaccaaagggaaataggatgccggaaataggatgtttacaaggatccgatataaagatgactaagtgggggataggttaccttgttttgtagatgtcgtctccagagggagcacatcgttagtccgttgacggtcttaatgtgccaacatcgagacttcgttctgccagcagtatagatg

SEQ ID NO: 1669 - DNA, 2688 bp, Arabidopsis thaliana landsberg
  unsure (1)..(2688): unsure at all n locations
tggtataaaggacttataaaagagtcggttcaggggcatccatctcaatttggaaggatctgtggattccggctcaattctcgagaccagcaatacgtaatcgtttaattattgacccatctttaaaagttcaacatttaatagatagccagctaataccttgaaggagctctttgatccggaagatgtctagctaataagtgcattgcacttgggtgcatcaacaaaagaggatactctaggttggcatttcaccaaatccggaaaatatacagttaaatctggttatcatacaccaaggttagaaaactgggaggatttggtactgaaataaatgttctaaaagcacatgcnnnnnnnnnnnnnnnnnnnnnnnnnnnnnnncattttttgttgcaaacattgtcaggttgtgtccttgtcacagagaatttacggagaagaattgtgatataggatgtgtcagatgtggcgctattacggaaacaataaaccgtacccttttccaatgtcatccggcgagacaaatatgggctctctcaaagattcctacggttccaagaatcccttcccacatattctatttttacgaatttggatcacttattctcaagaataccttcagaatttgattcatcttcatatccatggatacgaatgattctagagtagccggtggcgttccgcaaaactctctatacttaaagctagataaccagagaagccgagaaatcatatgctaaagcatgcatctatagcccttctatgaacctacatgttctttcttaaatgtctaggctcatctatgatagttctaatattaagtacctatggcgggcatacctattatctaatatcaagttctaagtgatcaatctaaaactagcaataagaataattaagatgaagaacgctaagaataatcctaaggggttttcgatctactaatccatctaaatctctattgagactccctaaacccaacaaggtgattactgagacatgataatagaaacacaaatcataatctgaatagtttgcattgatgatttaagaatgcaagtaagggagttcagaatcctctctaaaaggattgaattcttctctcaaaatgtgtaacaatctctaaaacaaaacttaggtctaacaatgaccgaacaattaggtatattcgtgactaaaaacgtggagggactactttgcaaataaggaagacttcagggcttcgtaaagacttggtagaaaacaagaattcccttggcaacaataagagtgtcgatcgacacaggtgtggtgtcgatcgacaccagcttctgaaaaacgtcttttaagatcttcattgctgaaaagcttccaaaattccttattgtgctccatagttcccaaatgtgtaagtgtacctgaaatgactcaaaacatacgaaaagactggaaagactctaaaaccattctgaaactatgttagaaatcagtaaaaaccaggacatatcaatgccgacaaccaagaagtaattctttttgcagactgttcagacctggggaagatggtgtcttccccaattgaatggccagtcttttcaacatattttgaggagtttcaaagcaacacggaagaattctcttatttttctttatctttaatctctcgtaatgcaaaggtcaaggcggattatttggcacggaaaatttgtacataaccgctacatatcacttatgtaaacaatttctcccaagatttgctcgtttgagcctttaataatatcttatcataaaaaagacgggtattttttagacattaatctataagtattgaacctcaaccacacttttaggattcagtttcaaacgagtttactactatgcggctttgactttttttttctgctacatgttttgtgatttatttttatatgaaatataaacacatatattcaattttgctgatagttattcctctatagctagaaaattataaagttattactctagtgcttcgtgtgtttgatagaaataaattgaaaaacatgaattatttgagatgtattgtgattaagcttgactttagagccagccttgatagctaacgtcgtatcgtcggtctcatccttcgaatggtggataattgatttcatatttccttatggatctattgaataagcatagctccagaatttggtttttcatcatgaagccttctgtttctttctctccaaactttatagacggtggcttgaaataagtatcgcatgaggaacctgtcaactcgattacttcacggggctaagactgtattgatgagctgagaccaatcacttgtatactcccgcttgaacaaatctctagcaagcatgtcctagataaccgaagtaaaagtgcaagaggtttataagaaataatttggccacctatgtcactaaagtgcacttatcttttgagtcaaacgtcctgagagaactccacaattaagcgtgcttggactggagtagtttaagggtggttgacctttcaggaagtgattgtcggaaccatgcgagtgaagacaaaacatggggaaagatcatgtggtgatttttagggttggtaacaagtctttaaagcctcccagacagggcacaatgactataagacaggggtgggcccatggacccgagataggatgtgggacccactggtaggggggtggagcgt

SEQ ID NO: 1670 - DNA, 2900 bp, Arabidopsis thaliana landsberg
ctgatagggtgaaacgcgtgtaaggctttaagtaaataagacctgctcgttttgagcccgtaatttttctgatacaaaaaagagatctatgggcttaaaattttaggtgggtttcgggtatccagtgaattttaacccatcattaacatctatatatatatctatatatacatttttgcagccattttgtgaaataaatcctggagttgcaacttatttacaatggctgccactggcttttaattattggtttttttcagcaataaattgattaacaaacgaaaaacattccaaatatattccaatcccatatatcacgcagatttttccaaactttgaactagatttcggcaactatttaaaacaaaaaatgtttgacaacccaaaagacaattacaatcccttaaaatgagcaacacgcaactaaatacatttcttatcaattcactaaatcttatttctccaaatttgaactagatttcgacaactatttaaaacaaaattttgtttgacaaactaaaacacaattgcaatcccgtaaaatatttattttaattataaatttaagttagcgggataccgcgatttttttttacaggacgggtttgccggaacgggtttggaaggacgttacttaataacaattgtaaactataaaataaaaatattttatagatagatataatttgcaaaattttatatatactaatttaaaaaaaataaattgtctccgcggtgtaccgcgggttattttctatttcaggtacaaacttggaaggttttgaggcaagcaggttaaacttaccaaagtgcttgccaggccgttgtgagggcataaaaaatgtttttgttgccgaaatgttagacctagattatgcgcacctaccaaagaagcttgtgagactgatcatacatgtcattaaacctaatcttcatccattccctctttcaaagatttaagaaatttgagaagctctatgtttgcgatttatctactacgaataatattaatataaagggattccaacaattatgattatagcttttgggtttcaagttatttcgaagttcgaacgagtacgtgcaaacggattgtcacctacaataatcaatttgtttccttttaaaaaaaaaagaataatcaaaattttaatggcttttatctatacatctagatgtaattttctttgtgttgttaaactgtgatagtatccatatgaccatatacaatgattaaaatgaccatgcttttccgcgttaacacgtttttttatgatgtatatactcacccttttcataaatgattgattttctttaggaaaaaaatagtttctaaaagattgatgttttaggttttctgtaacacccgtcccgttatataggccaagacggcatgttattcatctgatcttgccaaaacatttttttaaatttcacacacgaacaaaatattgcacacaattcctcatttttactaacctgaggaaaaaaggaaaaaaaaaaaggtgagtaaagaatactcagtgaggggaatcaactctgcccactgaaacgtataacactttctaaagctatacaaccatcatcataacatataaacttagacacacgcaatcaacctcacgtgctttaacttctaacaacaaattcataacaatcatcttatatatatatataaacatacacatcgtaaggtccagtcatcctggtgacgacttgaacctaataagtggaggctggccttcgtggctcaaacacttccatgcattgcgggctcgtcagccgttcttggctagctgttaacccgtcggtccatcactgtccacatcactagggagaccacgacccatacctcgattctccccagtctttcatacaaacatacatactcatcatatatacatacttatacttaacattctcatacataatatatcatagtcagacatcatcaccatcaatatcaatcaataatcatcaaattatatcatcacataatcttatcctacgcaatcagatctaagcctacatatcatgcgtcaagaagcataacaaaagacaatgataatatgtttcgcaaataccaccctcaccttagcctagttgaagatgaaccacatctctattctcctttctctcctaatagaaaaacttactataagagctttaactgcatactcttgagctccaccttgcttctccatcaaccaaaaccttactccatgagtcctaaaggcttctgcaaagcttcagctccaaccgaacccgtttcccattcaaacaataaaaacttgtcatggtttactccatacaaaactgtctcagtaacatactcataagtcaagaactaaccgttagaaacgtaatcccaccgttaaatatatagccagtagtatcatgaataagtacacgaagtttcatcccgatcggactttacatgaatctcccatgttcttctgaagatgttgcattagaactgatatctaggtttctgcaacttgagatgattctgggcaaacttctaaggtcaattctggatggagcttaaatccgatggacaatatgtcatctactataagttccttgattgatttatacttaaaaccagtagtcacacactgttcttgatttatacttaacacagatttggacaacttctgcagttacttacccagaaagaaatactcatatcttctcgaatataattccgattgaaactctgtcagttgttatggcttcatggcaacgtgatatttttagagatgtcttatttagcaactgattctctttggtgcaacgggaatgatccttacaaaaccccatcttggaactgttcttcctccttcctcttttccttcttctttgatgttagtgctctgtgcaaagctccaatctgctca

SEQ ID NO: 1671 - DNA, 594 bp, Arabidopsis thaliana landsberg
cattgataagttttctgctgggaagttgcaactttttctagatttaggacgttacaaatttcaatcatgagtgcatcatgggcagatgtggctgattcagagaaggccgtttctcagtcaagcctccttatgttccccacacctacggaacaggccatcagagcctgttgctgctcctttgccacaaaatgatcatgcagggtatggtggtcaaccagctgggtctcgttgggctcctcctagcagtgggggtggtggtgccagcggcggtggctataggaatgatggagggcgcactggctatggttatggtgctgcagcagcaggtggtggtggtggtggctggaacaacacaagtggagggtgggaccgtagggaacgtgaagtaaacccatttggagatgatgctgagttagaaccggtctttacagagcaggagaatactggcattaattttgatgcctatgaagatattccagttgagaccagtgggggagacgtgccccctcctgttaacacatttgctgacatagatcaaagggatgcattaaatctgaacatccggaggtgcaagtatgtgaggccaacacggtc

SEQ ID NO: 1672 - DNA, 500 bp, Arabidopsis thaliana landsberg
tgaagaaaatgaggttgttgtctacagaagctttatgaaggcgggtctttgattcccattaaacaaatttttagttgaagttctgaagacatttgaaatcttccttcatcagatcactcctgaagctataatcagaatgggtatttttgtttgggccgtgagaagccaagggctggaaccgagcgcgaaatacttctgcaatatgcatgaactcctgtacgagacgaaggccactggtaaagagcagtatcacaacaaatttggttgttatggcttcgttccccgctccgaagcaagttaccctgttccgacatttcaaaaatgatctggttaaaagggaagacataaaggggattatccaacgccccatctggtctcgcttcggcctccgaagccaactaccgcgcttggaaatgacaccgaagcatgccagaaggccttcaataatgttttgtgccttcattggcacaagagacctgatccaagagcacatagcctac

SEQ ID NO: 1673 - DNA, 2003 bp, Arabidopsis thaliana landsberg
  unsure (1)..(2003): unsure at all n locations
atgtgttgagacttgtttcttgaggaacacttacagggtctgtaacgcccccaagtcgctctataaccggacaagtcacgtgccccgaaaatgccacattgagattgatcatcaacatccaactgaggttcgggaaccaatcccaacccttggtcggcgtattgatgaccactctcccacataaaacatcgtttaggcttgccaacacttacgatatttaagtgttgtgccgactcggactaagccattatcagtcactactcgcaaatttgtacaagaaacccgattaatttcataagtataaatattacacaacaagttaccaaacatttataagttttatggccaaggcctagcacaaaactactctcggttcctattgtccaccacgccctctattccccactacaggtttcctgcaaaacaagtagaatcatgagtaatgtaagattacttagtgagctcgggattccctacaacagacattagtttaccccaacccaaatacccaacatggaacacgcaacagagaatggcaacgtaaggtagattgccgaagcaaactataaagcatgcaaatgcattaagactccagttttactaagttttaaagggcccgatatgctgccttcaaaaacaacaccaaacacacacactcccgtgatttcctgcgttacaaccacaaaggtattcaaccagagcatcactaccaaacgctacaccgtcgtgtagacactcggtcagggtagctagccccgtctctttgagttcttcgcactacatggagatcaagtaacaacgttacaaaaccccatgatagcacggttcactacgaaggtcagacatatcacgatcgtggcacgcttatggtctttgcctcctaccacaagcaccacgtaccaagaccccaaagtttaagatattatgaaacatatggttcattcaaacacatagaatcatcaatatcccaacacaatctctcaacaataaacaatagcataagaatctaaagatcacatatgcaatcgaatataaccattcacacgatccatataactcacgaaatcaatcaagaatgcatgagaatatgattatgaaacttaaaccattatccataactcactcagtaaccaacaaaatgcgtgcaatgattcgggcagagttttcagcttcgggaccttaacttgaatcggacgaacggtttaaactcggcagcccttcacttctgctcactttctcttcacaaaacaattggggtttagttgagcttatataggcaaggaaatagtgagtcagcatgtccacgtgtcaagcgtatgggcgagtcaccaacccacgtgtcatccgcccgtgatgacacgctcgttgctctagcggatgagcgatacgtggccaccaaaacatcggctccacgcatctaaaattcggctccaaaaaactttgcttgggccccaagtcagccgagccacgcgtccttggcgcggtcaacggtcggtcaacgcccgacgggagaatttcgcccgcggcacgaccgttcttgcccaaacttgcccattcatgcccaaacttgccccttattgcacaaacttgcctatctttgtcccttgatagtctattgtgttttgggcacttaaggttaattgtccaagcattcgggcaactttccaaaattcagactctcgcctgtggccgatgtctttacgcgggtcactacattctccccccttaatagaatttgtcccgaattcctgaaggattagacagtccggctacatcctctacgtttcctggttcgaaaaactgtggatattttgtcctgaacttttcctcatcttcccaagtaataaccttacgattttgcctttcctaggacacttgaattggcagaattcttctattgtttagctnctgcattcgtttttcagcaataccaagaggtctttcaggataggtgagattcgttctcaactcttgtatcggctcgggtatgatagcattaggat

SEQ ID NO: 1674 - DNA, 2118 bp, Arabidopsis thaliana landsberg
tttcctcgttgaagatgtttaaacttggagactttggctacagaatttccaaaagttgattgagctaatatactgcacaaggcactaagctagatttgagcaccttacttgaaacatgtcatagtggatctttattttgttttctaggagtactagaagtgagcatgagttatctgtctctgtaagactaaaaaactaagaagttcaatgttctatggttgattaatttcttgtattgtgcctgaaaaacgtctagagaatacagaaaaataggctcaagagtcatgtaccagtatataattagttagaggattgatgctgtgagccttgtgatctatgtataattcatttaacctttcttagattattgttgattcttgagtcctgattcattaccaatggtaaatatttgtgattagggccggcttttcaagatggggaaacgaaagggtctacaacggtagatcaggtgagatgatgcgttctatgatattcatgggcccaactttctaccagcgacttgtccacatgtcagaggacaaagtcaagttcaggaacactggaccagtccacccgctcacacgccagccagttgcagacaggaagagatttggcgggataaaatttggagaaatggagcgagactgcctaatagctcacggtgcatcagctaatctgcatgagcgtctcttcactctaagtgactcttctcagatgcacatctgcagaaaatgtaagacctatgcgaatgtgatcgagaggactccaagcagtggaagaaagattagagggccatattgtagagtctgcgtatcctcagaccatgtggttagggtctatgttccgtatggagctaagcttctgtgtcaagagctgttcagcatgggcatcactctcaacttcgacaccaagctatgctgattccccctctttattatgtaaatggcttattgccttaagaccatgttatgtgtagtttgcttcagtcccggttctggttagtagtataggttttggtttggttgattcggtaagggttatccgaaccgaagaaatcgtaaaaccgagccactgatgactgaactaacccgtaagtgttgcttttgtgagatttgactctttaaccgttaataattctcggatctaaagtaaagttttaggaaaactttcattgtcttcttcttcttccggaggcataaaccccttgcttggagtcgtttctctcattcttcgatttcgctttcatatagaaggtcatgactccattttatgattttattggttctgtttttttcttcataatgcgataactcataactccgttcaatcgctttgttcaaataagaacactatagcactactatatgttcttcatattcgtgttctttaggaacatgtgaatcaaaaacttcatatttctcgtatagtaatgatcgcaaaacatgttcttgaattagttataaaattctcataatttccttcagaacattaataaactactagatatatgagaaatgagaagggatgaggaacaaatttctatagattattatagatcttgcacaacaatgggacacaaagagtaaaaacttggaataaaaaggaaactaatcataattatcaagagatataatcaacttaatgcgaatgattcttttgatcctttcctccacacgcctgagtcacgaggcagcctcacaatgtaacgctaggaaacttgcaacgctcatttcctgtaacaagatagtaaccattacaaattacaatcataagaatattccagaatttcaccaaaaagttgaaattaaagagtatttacacgtctgtgtagagttttcttgtgagacaagttaagagaaacttaccagggttggtcgtggtctcacgagccaaaccattgaagtagcattgagagctttggttccggaactgagcccagtacgagctaaacgcatagcttgcatgccaagtaaccgtcaccggtgcatagcattctcctcctggagccaacgctgcacatgttgcattgcttcttccgcaagcaaagttaagcgcctgccctagctcatcctcatcaggccccatcaaccgccacacaccagggcatcatctagatcg

SEQ ID NO: 1675 - DNA, 658 bp, Arabidopsis thaliana landsberg
  unsure (1)..(658): unsure at all n locations
ggttccacgtagagagtcttttcgatccagacgccattcgctgccgatatcgtcgggccgccactcggggtgctgtcggcgaggatggtggtgacgatcccggaggagacagcgttaagctcatcgggagaactggcggcgacaaaactgaggatgacgctgagtaacgccggcgagaagacgaggttcgaggttttcccggcggtgctagcgataacgtgctgagttaacctcagaatgatgtcgtttaggttcccaactgaccctttcaggttctccaggatgtcgtattgatcatttactgattctttcaggtccatctttctcacggcgaggataagttggatttttttggattctcttaaaccgacttctcttgttttcttttatgttttgaacaagtaccagagatggtctcgacaacgagtacttgtagaaggatccagaagatccacaagttaatatgaaaatattttatatttattatattcatatgtaaagatttagttctatcttagtttaggaaacgattttactatatataaacatatgtacccaaagcttatcattatgagagtaaatatatatacattctccaattcgtaaantctcatcacattatcgctttctttgtaagacagaccaaatgatagtgatg

SEQ ID NO: 1676 - DNA, 1319 bp, Arabidopsis thaliana landsberg
ggggtatgaaatatgaactcttgtccttttcaattttgtgagtttatatgcatttagaacataacggtctttgaacattatagatttataaagttgcaatttgcaagcataaagttggtaatcgaattgatgtaattacccttctttactttgtactaaacaaagcgcacttagccacttaacgctaaaacatcgtaaggacatacctgtcatttccacaagtgccactcgatttcgccactcctacagtcctactcgtcgactgctcgcttaaccattgaaaaagtgagccaagggttttgattattttcgacgtctacggcgaatctctccgcatcttcatcgatttcccggcgacgtttactaccgccgttttactcaatcgtgccagcttaagcaatcgaggtacccattttaggtgttacgctttgattctgcttttaagcattggacaattccggagaatatgctttagtttcctctcttttggagaatgattcggttctaggggaaagattgttgatttcgtgtttgtattcatcattgattgaaacatgcatgatgcattttcgtggttcatggtttttcacggcttcttatcatcttcctctgccctctatctctttttattcttccttctggctcaccgcgttttgtggccttcccgatatcgacattaatgagatggttgttgtccagatcgtcttctcctgggcagatcaatatttctgcgctaggagaaatgttttctccagactttctgcaaaaaagctgcgacatctttctttgaagagtttggacttataagtcatcagctcaattcctacaacttcttcattgaacacgggcttcagaatgtgtttgagtcctttggtgacattcttgtggaaccgtcttttgatgtaataaagaagaaggatggcgattggatatacgcaacggtgaaatttggaaaagtcactttggagaagcctacattcttttcggatgacaaggagcttgagtttctcccatggcatgcaggcttcagaacatgacatactcagcaaggatcaaagtcaatgcccaagttgaggtaactaaactaacaaaatctttgtcgaaattaagtaagcttgtctggatttgatgaatgatttcccttgcttgaaaactcagaaaggccagttaactatcactttctagttcaacattatgcaatatgtctatgtagtcgagagtggaataccacatggtatgaaatataaaagaaaaacatcttaagctttttatttatttagttcttccccattccctcactgttctttaattgagtgttt

SEQ ID NO: 1677 - DNA, 558 bp, Arabidopsis thaliana landsberg
  unsure (1)..(558): unsure at all n locations
cccccttccaccctcatcagtgttgttgctcgcatagccagcgaaaagaagtctccctgacacagagaatgcaatggaggtgacaggtccgttctcacnnnnnnnnnnnnnnnnnnnnnnnnnnnnnnnnnnnnnnnnnnnnatgtcatacagcctgcatgttccatcgtctgatccagtcccaaatctatacccatccggagaggactttcttcctggtaatcctgatgctaacctaaggaagagctgtaatgccatcttgatcagagaaggagatgatgtgtgggaagaattggacactgaagacgagttggagctcgcagttgcagagatggtgtcgaccgacaccttccagtgtctatatttctcttgattattgcctgattaatgagtgctgcaagttcgactcaatccgacttttggaaaatttagatggcaaccaacaaacttgaggatacctagtttcgacacaccactaaggttggactaatccactgatctcgtgtaccgttcaacgggtagtatcatagacgtgagccaatgtgatagaagaatgtg

SEQ ID NO: 1678 - DNA, 680 bp, Arabidopsis thaliana landsberg
tgggagacactcaagctccttgtcatccgaaaagaaagtaggcttctccacagtgacttctccgaacttcaccgttgcgtatctccaatcattatccttcttctttacaacatcaaaagacggttccacaagcatctcaccaaaggattgaaacacattctgaagcccgtgttcaatgaagtagttgtaggagttgagctgatgacttataagtccatacttatcaaagaaagaagttgcagcttttttgcagaaactctgcagaaaaccttctcctagctcagatagattgatctccccagtagtagcctcgaactcttcaagatccttcacatcaatgtccatatctggcatacctcaaaacacactgtacgaacaaaaaccctaaacaaagacagagaaattgattaaaaagctgtgaaaatcatgaaccacgaaaatgcaatcatgcgaatacaaacacgaaatcaacaactttcccttagaaccgaatcattctccataacatattctccgatgcttaaaagcagaatcaaagcgtattacctaaaataggtaccttgattgcttaaagctggcacgatggagtaaaacggcggtgtcggaggagtgcaaagtaaacgtcgccggaaaatcgctgagatgcggagagattccacgtataaaccctggcacacttt

SEQ ID NO: 1679 - DNA, 919 bp, Arabidopsis thaliana landsberg
taaaaagaaaaaaaaaaacttatgtaaatcccagttattttttttccaacaaaatctaacagacgaatgtaaattattggatagagtaatatagagtaaaccttgaattttatgtacactctaataataatatatgcagatattctccgataaaatatgcaggcctaatataaaatatactcagatttaacatgaaggagtgttgtactcagcaccttccccctggtaaaaaggtaaaacctttcaaagaaaaaatactgacttaagagtaattttttgttatgcaagtaacaaacaaactcgagtaataaacctaactaaagtataacacttaaataagataagatctttcttctccgcggtatgtaataaaatgaaatcaccagatggaagtcttgttgtagagaaatatcgatctgataatcttatcacggaagaagactttggtctcgattgcatatctctcacgcacgactctcgtttgtatgaatcgaaagaacaaatattagagtgtatatacttggtttagttgtggcgatgttagctttgttgggcaagcgcatgtcgatgattctggtcgcttaagcacatttatctttggatcactaacaagaccaccggaagctcgtaacgtttattttcagtttcaagccatggatattcatgtccattgatgcttctctcattgaaaaaaagttgtggaggacacatattcattgggttttcaagtccaagatgaaagttcctttcatcttgagggggagtattatagtgtatatacttggtttagttgtggttaagtttggttagtagttttggtttagtttacttgtatttaagcttaatcatgtataacttttaaacttaataaagatttcacgattattaaaaacaaagacacacacaatttaacgagttc

SEQ ID NO: 1680 - DNA, 595 bp, Arabidopsis thaliana landsberg
tgctaaatttaagtatggatttgcaaagtccatcttttaaatagcatctttgttaaccatgtggtcaagttatgggattcataggttgatcagacctacccctaaaaaatgcggactcaaatccgcgaactccccaactcgggtttagtcagttcgatttattttctgggctttgagcttttattatttttcctttatttaatggcgcatttgtcttaaatgcgtcggttgccattttgtcctcggaaataaaaaaaagtgtcacgcttctaaggcaataattaccttttcctcgattcccaaaaatggataaactcattccgacacgccacaattattaaatttgtggtttcgagtaaaaccctaaatcactataaataagggtataatctaaactccctcaaaatatgatctcaaaaatttacttagtaaacacctctagaatggaaaactaaggagcctccaccgtttgccccctcgatcccggaactccattgtttctgtccagcgatggcttcgagcgcttggaagcgcgtgaagaacgaacccgaggtggatgttaagacgaggcgtcacctcacccgctgatgaagga

SEQ ID NO: 1681 - DNA, 616 bp, Arabidopsis thaliana landsberg
tcgtattgacatgacttttcctgcttaaagcatctgctaccacgttcgctttgcctgaatggtagtgaatttccagttcatagtctttgatcaactctaaccatcttcgaagtctcatattcagctccgaatgggtgaatatgtacttcagaatcttgtggtctgtgtagacatcacatttctgcccatacaaataacgcctccatgtctttagtgcatgcaccactgaaccttcagttgccgagacgagtaagccacaactcttctctcttgcatcaatacacgtcccaagccagtgtagcaagcgtcgcaatacaccgagaagggcttgtgcacatccggcaagactaagacaggcgttgtagtcaacttctctttcagcgcttcaaaggcctcttggcacttctgggtccacttgaactccactttgttggctagcaaagctgtcatcggtttcgcaatcttcgaaaatctttcaatgaatcaccgataatatccggccattccaataaagctcttgattcctcgagcatctattggtgcttccagttcagaatgtctgcactttattgggatccacgacatccatctttgtttattatgtgaccaagaccag

SEQ ID NO: 1682 - DNA, 1887 bp, Arabidopsis thaliana landsberg
taaactatatcgaattgaagaattaattgtgttatacatcttttctttttatgtaagatgttataacacataactatttcatatgtattttaataaaaccaaaaaaaaaagtttaattatcaaacatataccgggcgtagcccggattatcctctagtcctctcttaatacttgatcaaattgttcattctcatccattctggggggtggttcaacatcattgttaacttcaacatgcaatacacttcaaactatttcttcaatcacatcctcaaaataacactctagatcttcatcatctcgagtatgatttggtgtttacgtctttggaatgagaagcctcatctacatttatcttccttcaaatcttctcaatcaacttcgcatatgttacttctcctttcgattacttcaaaaatagtgaatacacttcttcatcttcttcgttagaattccaaagtacatattctctgatactattatattacccatcatacgtaaaacatagtattagaaattataaagtacctcccccagttgcccaattatcttctcaacgacatggtagaaaaggtcattctataccttcattggtagggaatgggtactcgtttcctcaatcaaacggatccaaatattgtccatttggtatttgtcccgaagattttctatgtttggcaaaccactccgctatctttcccactattgcatctatcaattgtaatagcgagtagttccttactttctctaaaacaccatttatagactcaaccgaattgcttgtgtctatgttgtatttttctcctccaaaataacatctaccacattttgtcacatccgcattatcatctagatatgtacgtgccgaaggatatgtactcgaaaaatctccataaagccttaagaactccgcccccgtataagctcgagcacattccctatacttttttccagaaattgctttgtctactccataaaccttcaggttcacgttttgaggcaaatggtagacaaaatgtccatggtgggacaactaatagatatcggctattgccttgatgagacattggtttctatctcaaagaaacacaattttcaggatcatccggtataatcgacttgagcttcatgagaatccaagtccagctgtagtttttcccaccatctactccaaaatcaatcagataatggcaatgatcgggatcatgagccgtagcaacaattaggactccaccatatgcagtcttcatatgaattctatccacaatgatgactttcctcatagctcggaagctttcaatggaagcacctaaagcaaaaaatagtacttaaacttattttcctcaaccacttccacatacgaaactgaatcatgattcatattttgtaacatgtatataataatgcccaaccctaaaatctttctttgggttacctctaatatcatttgcagcttctcttttttctctacacgcggtagtataagagacttgcacaccaaatcttccttgaaccaaatgaataagatctattcatttggagtggcaatttgacctggataatctttggccaataatgaagcaaccatagtcggtgtgcctttccttttacttcgtcctgtagttttacttgaacgagagcatgaatgaatccttatatgagttcgtatagaataaggcttagaattattacgctttgcagctcatagataccaatcacatccattatgtgcttcttaacatgccatcacatatctcaacagctctgatttctttacaacaaactcaaagatattgttgtgtccagccttatcaactaaactttggattgcttttttgcttccaaaatcttgggcaaccggaaatttcaagctcatcaacccaaaaa

SEQ ID NO: 1683 - DNA, 740 bp, Arabidopsis thaliana landsberg
gacgccgattctaagattaaagaaaatgattgcaaagaagatgagaattcgaaattggaacaagaaaggtttacacagcaagaaaaacttaacactcggacaataaagtttaagagagcgaaaaatatacatcacaagaaacccagcttttctccctctgacctattgcatgagagaccatctgaaagaaaataataatgattacttgtggatcattaatctaagaacgtcagagaacgattcaaccaaagtacatattaccgggtaggtgcattcccaaggttttttatgttcagcagtaaaggaaccttgaactccttggcctactagatacctttggaacatcagcagctgggtcatcgaggcgttgcgtcgacgggaagagatggtgccactggtgcgtggggaagtggatttgagaccagagaaagctggtatccaaacgcagttttcagagccattgtgagaggagagctctcacaagcgctagagaacatgcagaagacattgatgctctctatggttaaattgaaagagagagagaaatgaagaaatggaagagaaagcttctctgcaacttattttaggagactgttcctattgagaaagagtatatgaaataaaccaatgagatctcttagaatgcccccactaactcttatccccccaagtatttcataataagtagaagcatttaaaggcctaacatgaaactgtgagttgctttcgccagttgtatt

SEQ ID NO: 1684 - DNA, 522 bp, Arabidopsis thaliana landsberg
  unsure (1)..(522): unsure at all n locations
tctacaaaaagtgttcagcaacacgagagagctaaacgccgcaaaactgggaactaactaggaaggtccctatcgaatcaccgatgtggtacgtgacggcgtctataagctcgaaaaagttatcaacggagtacctgagttacggccttggaatgccatgcatctcaaaaaataccacaaataggtactcaaaaacaatcannnnnnnnnnnnnnnnnnnnnnnnnnnnnnnnnnnnnnnnnnntcctcccaagagcgcagcaccactttaatcgaactacgataaggcttgatcccttagcaggctacgtaggcagctccactcaagagcgcagcaccacttcaatcgaactacgataaggcttaaacccctaaccaggtaagctgctcacctgacagttcaaccatccttcgataccaagcaggtctcctctagatgaccagacgttaaatcgtcttaacaatatcgagataagaataaaagaaaattttgatcccaatatcatgttgtgcaaacaatcg

SEQ ID NO: 1685 - DNA, 1494 bp, Arabidopsis thaliana landsberg
  unsure (1)..(1494): unsure at all n locations
gacacgtcctcccgatacaaatcggcgcggatcaaaacaacccagattttctagataactgcagctcagaatggatataaccaatcaaaagctatatatctgaagggaaatggcctttgacaaatggaaggctcggaaactcaaagctcaggctgcacgttttgctctagtaaatgaaaaactttacaagtggcgattatccggaccattaatgacatgcgttgaaggagaagcggtttgtaagatcatgaaggaaattcacggcggctcgtgcggaaatcattccggggggagagctttagccattaaaataaaacgccacggattcttctggccaacaatgatcaaagactgcgaaaactttttaaaacgatgcgaaaaatgtcaaaggcacgcgccaacaatccatcaaccggccgagctcttgttgacaatcgccttgccgtatccattcatgcgatagtgcatggatacaataggacttatgcatccctcaaagcagaaaaaattagtcctcggtccttgaccgcctatttctctaaatgtgatagaagccgaatcttacgccagtataaaggacgctcaagtcgagaacttcgtgtggaaacatatcttatgtcgcctcgggataccgtatgagattgtcacggataacggctcgcagtttatatcgacccgtttccaaggcttctgtgataaatggggaattcgacttagcaaatcaataccacgatatccccaagggaacggccaagccgaggctgcaaacaaaacgatccttgacggcttgaaaaagcgactcaccgccaagaagggctcgtgggccgacgaactcaaaggtgttctatggtcacatcgaacaacgcctcgtcgagccacaggggaaaccccattcacattagtctatagaacggaatgtgtgattccagccgaaatgacagtaccgagtctgcggcggagcctgtctcccgagcgcgaaccagataatactcaaaggataatcgacgagctagatctaatcgatgaacgaagagattcagccctagtgcgaatacagaattaccgacagcgaagatttcatgaaggagaccgagttctccgaaaaatctttcaaaacaccgacgagccgaacgctaggaagcttggggcgaactgggaaggactatacctgatctctaaagtcgtccgacccggcgtttatgaacttgccgatctaagcggcaaagccattccaagatcttggaatgcaatgcacctaaggatatactacaactaaatccgaggtgactaaacttnnnnnnnnnnnnnnnnnnnnnnnnnnnnnnnnnnnnnnnnnnnntcgtcttgggatgagttcagctaccccccccccccaaataaaaaaaggggggagagggtcgtatatcatactccattcattatttattttgtaagtttccgcttctgcataaataaaaatccatttcccatttctaaacgcttcggttaatacga

SEQ ID NO: 1686 - DNA, 2665 bp, Arabidopsis thaliana landsberg
gttgggagaagtgtggctctcaaaactcaaaagcatgtgagaggctacgtccgatttcaaaatcttcacgtgcagtttggctcaaagtaagaatcttgagaacattcgcgaaaagacattaaccgaagtgagtactagagacatagagcttctccgacgaaattcacagcctttccggcgagttacaccatgctcactcacaggcgacctttatgcaaactctttcacaccaaaggtctttttcccatctagttgttatcaatggctctatttaaactttgtgtaacattttcttttaatcaacactatttcaatattaacatgaaaacggtatatcttgttcaaaaacagatttatctcacatttaatgtgatcaacgcatatttctttgttaacttatgttgtgaggaataattcacattcttgcttacattattccacaatattaacgtttgttagctgaacatgaaacttttccttttccaaatctcaatcacaaattgattttcaacaaatccgatattatctgaatcccatattatctcaaattcgataaattttataaatcattatatacaccgtcttattacattcttataaataagagacaatataactaactaaactaactatatctcttacgaaacatacttttctttttgtcaaagctccaaagttacttgatgacgatgcctggaagaaacaagcgcaaagaaagatcctggccggaaccgcaaacgcaaccacagtcagagattccttcttgtcttctttggcagctgttaacatgtctcctccgtcgacgatagcttacgtattaccgccaggttttaagtttgtgccaaacgatgaagaagtcatccattgttacttgaaaccttactcggacggcaacacgaacgtattgctccatgttcctattcatctcgtcaatatctacgagtcgaatccacaaacactttcaggttaacttgtctccgtccatatgtattgtttacttagttgaattctttagtttattaagttattaacatatatctatatatatatatatatatatatatatttttgaaacagaggaattccataagggtaacgataaagaatggtttattataacggagaggaacaaagttgatcaaggtttaagccaaacaaagagagttggttatggtgcgaaaaggcagaaacgtgtcgacactaacggaggatattggcacgcaacagtggctgcccaaaagatcaacgctggagatggtgtcgttggcaacaaaaggccacttgcatactacgataggaaaccatcagaaggcgtcaaaactgattggttaatgcaagaatactctcttgatcactcttctcacaacacgacaaggtaagtatgtgtttcttggttcccaagttatttaggtttttaagttttttggattctgttttgagtcttgtttctgttggtgcgtctaggattacactttgtgcaggatctatcttactccacaagcaacaaagaagaagaaagaaatgggagaagagaagaagaagaagaagaaagaagtgggagaagagaagaagaagatgaagaaagaagtgggagaagagaagaagaagatgaagaaagaagtgggagaagagaagaagaagaagaagaagaagcagaagaaaggagaagccgctgtttcagtttcacctgtggaagcatcggaagaccagcagccttgtaatgccgagtatcatcaaccgctagcaccgccacattcttgccaaccgcagcctcatgatttggctgtgcagctggatttgcatcaaccagaccaattgcagctgcaacagcctcgtgatattgtgtatcaaccacagtattgtttacttccagaacaagatcagccgcagccttttccttataacttttctcagttgatgatcccagacgatttagaagatgaagaatccaacaattatgatttttttgaaggcttacttgacacagagaaggaatgataaaacataacactaactgatctcagtctgctcatactttgtcattttggtttttgttttcaaacactcaatctagtttttcttcctttatgagttttgttatcagaaagaaaacagagagaagatttcattagttttttttgctaaaatttcattagttgctatcggcattgttttccaaaaccagagataattctccctgtctttattgcttttgatgccttgatcatataaaacatttatacacaatttgtccaacattttcttggcgttttagacttataaactaacacatacagatataaaacacggtgtcttcttcttcttcatttcctcctctaaacatttgttttcctctgaaaaaacagtcgagtcaacattttgattaaaacatgtccgtgttggttctgctacggaagtaaattaaaaagatgaattgcttaaggatgtagcaagtgaaaaactcacaagtattacggaaaaaaaggataccttgaataaatccttaggtgaagcgttatgtgcactaatgagcgaaacaggacatacctgcaaaataacgccattcctcgtgataaaatctaacatacatagtaatgtgggatcaattttctggattccccataatgatgtgttagcataaagctgtaaactttgtatactaatc

SEQ ID NO: 1687 - DNA, 2404 bp, Arabidopsis thaliana landsberg
caatcaatttcatggacataacataaattcgcgaagagtgaagattggtgtttattcttattttagtgtttttgaaattcttaccgttgccacaggcaccataaacgccacaaagctctggcagatcaagaagtttttgggaaacaacgataccgaagctagggcctccattgttgatgaattgacaaaagcagtcaacatatgtcttgcctactgtatacacctcagaacaacacgcgaaactaggagtatggatacgattatcagttaggtaggggaaacaattcaactgcatctgcccagtctctttcaagcactcgtcctcgtccgactgagcagagacgcttgtagaagacatcacagccacgaaaactgtaagcaacactaaaaccactcctatcttcatgtttccttgatgaaatacgtggttggagaagaatcttttgagttttgttatgatcttttcagattcgtttggtttttcagagtcttactagctaattggtactatatataatataatactgtgtgttttgtgttcaattttgttttataatatgaacaattagctgttatttttccttgacttaaccaacagccaacttgtagccattattaaataataatttaaatacaatacagttcgtattactataatttttaatgtcaattttgtttggttttggctacaaagtggacatcatcttaaccacgtcttgtaatacattttttatattcatcagcatcattctatataacaatacaatatgtttcgcaatgttattttgtatgttatttggtttgattaaggaacatgagatgattattgtataatataacgtgttttgtattatttatttttttgtttgacaaaatgaatgctgctgatgaataaaaaaacgtattatcatctcctcatgttcgtttaggcctgattgttttgtcatgtccgagagcctatttttaattttggctattacttttgatccgctattccgtttgatccgaaatcaccaccgttggaacagccaattcaatttcctatgactttgatgaagggctcgaaaacaatatcacaaaggaaagtcttcatatgacgtgatctttcaagtacttcatattgtttatggataatatcatatcatctctcttgttctttccttcatattccgtcattgtttggtcttttaagaaccaaatatcctctaaaacctctcttctttatggttctcactccaacacctaaaatggatgaactcaatgcaaaggctatcttgaagaagtttaaatggtgtgttaatgcatcaagataatgaaaacaaggggataaaatcattaaaaacattcattgcatacattccttgaaagtttattcttcttatatctaacttcaagagcttatctcacattaggtctttatgtttcataacgatagattgtttgctttgtttccttttggatatctttttgtagtactatctccggctcttgagtttgaacccaaaacatttcgattactaccttctcaaattgtgttatggaagttaatgattattgtaaacggtaaaaagatctccgttggtacaaagaaatatcactttagggagtaagaaatcatacagcataaattacatcgcacaaaatagagagtaacttttctttgggcagttaaaattgcctctttttggctttttcactatcttgaatagaatgtacaaagagagggagttgtaactcctataaaccaggaatgagaaagttaaaatgctggctccttaacccaatgaagacacacattattgacacaactgaaacaaagactcgttcaacacaataaacacaaacaacgattacatcagttcaaatactttcggtttgtgacacatgctaggtttgatgtcctcctaaccagttctccatctcatgcaactccatcaccttactattatatttttcaatccatctcctgtaacataaattcactatatacataaagactacatactataggattggtgtttcttcataaattgatgttaagaaattcttaccttcgttacacacactagcaagataagggtcaacgccacagatctctggcagtcgacgagcttgtatgaagttagcattgatatcgagaatagagcctccactgttcaagtattgacaaaaacagtcaacagaagtcttggatatgtccagcaacgaaggacaacaatccgaatcatcaggcaaggaaggataggaagaagtcaggtagctgaaacacggcttcagtgatttcttcaactcgtttttgcagtttgactgagcagagaccctccagaagacatcacagccatgaaaacaatagacaacacaaacacaaacaccattcccatcttcatgtttctttgttggaggg

SEQ ID NO: 1688 - DNA, 2303 bp, Arabidopsis thaliana landsberg
gtgtgatcgacgacaacttgaaaagcaataaagggttagttttctcaccaacttttataatgatgcaaggtccgaggagctgagaatgaagatctctaccttctctcaagaagcagctgaagcatttaaagccgcttggatcagattcagaggatatcagagagattgcccgcatcattgtttcagtgaggttcagttgttaggtatcttccttagaggagttgattgaaagctagtaatgggaatttcatgtcaagatatccagaggatgcaacaatgttgattgaaagcttatcttctagcattagtaccaacaacgttgacattacaaggaaaacgcaagttcagtatgttgcacatgttgacagttttgccactttagagaagatggatcaacatggatatatgagctacaatcagcaatctacacatcagaaaccggttcagcaatctacaagcttcactccgacttatgcttcttcaacccaagcccactgataataggtttttagtaaattgtcctaaaacaccaatcatgtcattgtagtattttaggtgtcaatccaaatgggtgtgatgcagacagatgagatatgatcagaagttgctaagtcaagccaaacagaatttggttggttttctaacagtcctagtgttgatgcagaaaacagtaaaaacagtcgactgccagaagggaccctgtgatcgagtacaacaggatgatagagaacaaaagatgaccaagcaaatgaaagcaaaatctgaataatttagaagaaaaatcgaaatagaaagttgcaggaatgaaaagcggctgctgaataatagtgcgaaattcgtgtctctaaaagtgcatgtctcaaggcaaaacccttagagacttatttatactaagataagaaagcgggcttcgagcccacttaacggcccatggacggcgtgatcaagagtgtcggctcaaagtgggcttcctgatgggcttcgaatgggccttctcttctcttctcttttcgatgctcaggttgtctggttgagtgcggattgatcagagggtcaaggtggtggtcgagtaggttggttgacagaatggtctgggctgcttcttggcctctatgatcgagtaagtgtgtcggctgtcaggatggactggttcttctcctctgcgatcgagtataaattgtggactggcaaagtggactacctggtcgcctctgcgatagagtagaattgcagaatggactgcctcctctcctctacgatcaagtatatctggccgaatggactgctgagctgactgcttccctctctgctactggtgatcgagtatgtttggtggaagtgtgactttctgttctgttttccctctttctgagcaccaaaagctccaaaacacctgaaacaactccaaaatgcagaatgtatgcaagactagtcctatactcgactaaagatgcaaaatgtacaaaaatgatggtgaatgctatgaaagatggatgaaactagactcaaaatggtgataaaaggatgtgtaaaacatgcaaattatagacatatcaactcccccaaacttagactttgcttgccctcaagcaaacaaaagaacaaatctggtggagaggtttgaaaatcgtgggaactctcctgttatcagtgaccatgtctcgaatatatcctacagaccacattaagcaaaagttgcgttagaacggacgctcaatagtcttatgcctttctcgtccttgtccatatgccttgatcctgcagaactgtgaattcatgtcaatcaactctttacattctttaaatgttttggcgtggactttctcattagaaggtgtcattcggggtagacggcgcttggtatgaaaggggattttggttttaagtggtggagttaaagtgtttagggttaccgtatagtctcgaatgcaggatatgttgcaaaacagcaagagagaacggatcggttgaggtccacagtttccaagcacttcgtcttttaaacaccttcttctgctttacttctttcttactttcggttcccccagacttaggtttttccaagggggctctcttttgtaattggctcatctctcctttatgtttcaatgtctttccttggagctatgccactagactctcttggttgtactatttcctttccttccttttttttattattatttttatttatttttcttttcttttcttttccttttccttctcttttttgtttttttatggaagggaaaacaaaacttctaaacactaagtctattgagcataccttttgaatgtggttg

SEQ ID NO: 1689 - DNA, 833 bp, Arabidopsis thaliana landsberg
atgtaccagctcttaataataatatacaaagagattttcttagtgtcacaaatcccaatacctcatatgggtcatcagtaggggtggggcataatatcagatctgaaacggaacccaaaatccttccaaactcaaaaattcgacccgtatcccgatttgaacggataaccgaacaattcacaatttaaatacatagtaataatatattatttacattaatatttgtaataatcttagtgtcagaatattaggattttcggatattttatatgtttttgggtatttaatttgggtaaaaatattcaaggtttttagatatttttgcactttcgagtagtttggatatatttggttataaaaaacgatatttggaaacttcgggtaattcgaatccgaaccctatccaaacgcaaaatctagaattacccaaacgatttctatatctctaaatccgagaactcgatcctaacccgcaaatgggtactgaacgcccgtcaacaaatgctagtaaatattaacatttcccctgcttggtctcagcctcctaatgtttaacatcacatatacaacatcaacatcaactccaaatcttttgtttgtctttccacactttggtcaaacacaattataacagtcaataaatctagagctaggatcaaattttatcaggttttcttacaaaaaagtaagtttttgaatattggtataattggaatggtaggtcaaaaaatgtcaatattttactacgaaagagacatgaaacctttactaaaacgaatctttgagagacatgccaacattaatatggtgcatcaaacaatatacaattttag

SEQ ID NO: 1690 - DNA, 1282 bp, Arabidopsis thaliana landsberg
tttgattttttttgtttaactaaataacaatttggggtttgcaaatcaactatattcttgtagatctacatgttattaaggtcaaactttttcaaaaatgcttaaaatataaagtaggggtattttggtccaaattgacatttagcaaaaaaaggttatatagacaaaaaaaaattgtagaactcttttaaatttaatttccccgtgactcaaaaaaaaattaggagtttttactacaattattgaaaaaccccaacggttagattaatatcagaaccgtgttacataattatcagagtttattttctctttgatgagctatatttttttattatttttttgtgtgtaaacaacacaatgggttcttcaatgtgaagacaataattaagggtttttgcttactttaattaattaattaataattaccttacgacggttagaaataggatctaattttagatttcatcattaaatgaagaaaagatatggaaatcagtatgaaatatggaaatcgatcgaatttaaaaaattctatataacccgattgtatgttttcttcaaaatgtaaaatatggaaatcgaatttaacatgtcaactttcactacttaagttgaagtagtacccttaacccaattcatctttagcgattagatatagtattgaatgggcctaaaagtatccggcccaattgattaatatcttatttgacgtcgtggaatctgcgggcggcggagaagggaggcgagggaatggagagttgctgtcggagcgtcatagcttcaaggacgtttcatctgcggtcaagtggccgtctatttccctctcttagcttaactcatctcaagggcaagctatctctctccatcaactcgttttcctccaagattcagtctcatgctctccgaggagttggtataggcgagtcagataagaaaaatcccctgccgcgaggggccggagaaggagtcaaggaagatgcgaggagtaagctgcttcatgtagttttggtctctcctcaggtttgcactctcactgctacctttggtcttcttagtacatgttgatggatctaaacaacttatactctccttgacagattcctgggaatacaggttgcattgcaagaacatgtgctgcctcagctgttggtctgcatttagtcggcgtaaagtaaccaaacacgacttgttcattatttccagtgttgatgacttaatctgtcatttgttcctgcttcagccattaggttttcaagtggatgacgccagagttaagcgagct

SEQ ID NO: 1691 - DNA, 484 bp, Arabidopsis thaliana landsberg
  unsure (1)..(484): unsure at all n locations
gccatgagccgggctgacgtcctcgggggacagctggctaaggctacggagcggccggttgagccgtctgctcgggccgggttcctagaggagaccctagctgcgatggcccaggcgtggtgccgacagattccttcgaggtggagatcctccgaccatgttgccgtccgaggccgggtcggattccgctgaagatggagtcgacgccgagggtgctgctgctcccccactgatgtctgatcctgcaggagcagtttatcttgtagtgtgcgtatgttttttgcggccgccgaggccgaaacatatcgtcgtcgtgttgtaaagctgcgtttcttttccccttgtttcgagtatctggacttatttgtcggtaacaaaattgtttgtccgagcgagagttacttnnnnnnnnnnnnnnnnnntgaggtatccgtatcccggaggcgtaggagtcctcgactcggtcggccttgcgctctacgtg

SEQ ID NO: 1692 - DNA, 444 bp, Arabidopsis thaliana landsberg
aaacttgtgagtcgcctcactcctcgtgcgacggctgggagctgtatggttcctagagaaaaggtcggatctccggcaaatccggtaagcagctggaaatcgaggtgccccattcttaagaaggcgtcggcaaagactacgtcaactgagcttcccgtgtcgatcattatacgggagaattcgtagttgcctacatccattccatcatcgagctcttgccttttgtgtaagaatctgccttcctctaatgagtttcgatcgaattgattgagtcgttgcagagctaagaccctcccatgatgaaatcgatgcgtttaggggagaggtgctcggttgcgcttcagcagaattttgagaggcgtaatggaaacctctgtgtggtgactgaccttcctgtctcgccacctagatcgagttctgcaaagactacgtctatgcgttctc

SEQ ID NO: 1693 - DNA, 502 bp, Arabidopsis thaliana landsberg
ttgagacgaacaataaaccgctgcggaccaagtttatttgtatgtaaaaacggtccttttatgatccgctgcggttttcttctattttttttggtcattgatgaattgtaaataaaaatagtctgattcgttgacggttttgtccgtcccaaccgccgtaaccattcaaaccctaaatcgaattcacaagtcataacaactcattctccctaaatataagcatatcctaacacaaactaaagaaatacctattattatttaataaatttagtaagaatacctattattatttaatgaaccatccaaaccatacttacaaaagtagcagtccctatctaaatagaaactgttgatctcaaggtttcatttgctaaaaaaaaaaaaaagaaaccggcaaccacatttctttctctatctcactctctcgtttaacattctcatgaaattagggttttagaaagatagatcgattgaagatgaggaaaggtaagagagtgataaa

SEQ ID NO: 1694 - DNA, 1831 bp, Arabidopsis thaliana landsberg
gacatcttggcattcaagattgggacatccttattctgttttgcattctataatttctcagttttctctactcgtttcttcttcttcataaaaacttttatcttgttccgaatgctctattaataaaagccataaattaccttttactaaaaccttcattgcctccagacgacctcttgaatatatatttaccgatatttggacaccaccaaacaattactttgtcctcatagatcatttcactcgttactcttggttatatcctctacaacgcaagtctgatgtcaaagagatttttattgtattcaaaaacctcgttgaaaaccgattccaatgccgaaatggtaccttgttctaagacaatggaggtgaatatatcgcacttcgtagcttcctcacagctcaaggcatctcacatcttacctcactgccacacaccccggaacacaacagcctcgctgaacgcaaacataggcatattgtcgagacatgccttacacttatgtcaacggcttctgatcctctcgcctattggccctatgcttttgcaactgcgatatatctcatcaatcgcatgcctacatcagtcctctctatgcaatcaccatttgagaagctatttgggacaacaccaaattaagggaagcttagagtgtttggctgcctctgtttcccttggttacaaccgtatacaagtaaaaagcttcaagctctgtctcaacggtgtgttttccttggttactcgacatctcaaagtgcataattttgttatgatcaagcaacaagatatatgtatgcatcacgacatgttcaattcgatgaaaaaacgtttccattctgtccaacgctacacctcatggtccaagaagaaaccgtcaattctgaatctccatcagcacctgtcgtctcacctatacaacctgcaataccaattggccacacaccggttacattgccaccatcgtaagctgaaaccccgtcgtgagctgcttcctcgtcgtcaccttcgtcttcctcgcgaaataaagaagacaaccaaatcttagaaaatttgggcccaacttaaacaggcccaacaaccacttctcagttaaatccggcccgaaaacagctcctagcccacatcaacacaagcccgaatcaaaacagagaataaatgctcacctcgacttcttcacgacaaaccagagagatatcactgtcgctcagctctcaaactccggccagctcaacgggacccccacgctctgaccttcacctctctccgtcgccgaatacttagttatcgtcttctttctctcaaaactcttcttcctcatctacctcttagcccactgctccacataaaaatggattgacatccacaatccagccaattcctccacgtattgagcccaatgttccaccccaacatgagttacgagtcataactcagtcacaaccaccaacaaatgcaacaacagcacaccaagccgtgtctcagtaatcacataaccaaaacgatcaaccttcagaaaatgtccgcaacatgaaaacttgagccaaaaataacataaccaaaccaatccaaaaatttaatctcattgtttcaggtccaccatcgaaggaacctacaacaatcaagcaagctctcaaagaccaaaactgaagtcgtgggtgctcatccaaatttgatgctctaacaatacaccaaacatgggatttggtacctccagcctctacacaaaacatcgttggatgtaaatgtgtcttcacgacaaaatacttcttcaatgacgtcttggagagatataaagtgcgccttgttgccaaggtttccaccaacaatact

SEQ ID NO: 1695 - DNA, 1292 bp, Arabidopsis thaliana landsberg
aacttcatatagagaaacaatctcgagggaggttcaaacctgcaacatgggtctcttggcaggtaaatcacgggagctaccacttccatactcagctgcaaccagaataattgcggcctaaccaactacttatctctgaaaaaaacagacattatcattatgcaatcagatttaaacccataaaatttccttggaaaaatgaagccaagaaacacgaaccatgacaacatcgaagaatctacaggttttccattgaaataaatgtttactaccttttcttgtgtctgcttaggtatagccaaaccctgccaagaatgtgcacatacaatcaagaaagtagcacccaccaagggcctccacagcaagtttaaatcaaatagatgctaaacaaaaatacacctccatataccaagtataattgcttaacttgaacccaactttactgtctaaacacgagtgtcagtcagctttcatttcttttaaaggaaaactatcatgtggcctgtgaaaagataataatatctttatagtggtcaatcaatgaaataatacttagtggttaaaaaaccaacaaaactcatacctcttagatccggaatgcaaggttcaacactatccatatttgtattccatagaaaataagtaaacaagcttttgctgaggctgaatttattcaaaaaaagagtaaaagaagtcgattaaaaaccaaaaccaaaatatgaagatacaaatccaagaaatgagaagacaatttcgcacctcactatagtcaacaaacatgttatttgcccgaagatatggtttaatcatgactacctgcacctaaatagttatggcaactcactgtctcatcgcttcttccactcaatttgagataccatagagtaacagactgaatccaacaacgtacactacaagaaacatgcaatagacgactacgaaaagtgaccatcaacgtactcgtctttttgtgcgactacttaacgacgatttgtcaactattttacgacaacgaggtttttagtagttgagtagtcgtttattagcgactaacaaaattagtcagaaaattgtcgtctattaacgactatttaatgattatattattgaagggagatattagtcgtaacgtagtcgccaattaacgaatacgcttccgactgaagtaatttgtcgcttattaggcgacaataatatgactatttgacttggtcgtcatgtagtcgcataatggtcgcacaatatagttggaaaacgtttttcacattgccgggtaggtacacctgattatg

SEQ ID NO: 1696 - DNA, 578 bp, Arabidopsis thaliana landsberg
  unsure (1)..(578): unsure at all n locations
agaattgtaaagcttgtttgattaaagggttagaactagttggaatttagcatatctttaggatgaaaaaaatgagaagtagaattggaaatctctgtttccgccaaaaatatgattttgagttataatctggaaaatgtctatgtacgtacactacttcggtttgcttaacagtatatcacttttaacactactttgatggattggattcttcggccgctgaagaagagatattagacactggatttttaatagttccttatgctggatccacacaatcccatctggtatgtcgtctactaatactattaacaatctgtttaaatggtgtacgtacatattcgcttaagaagttagttaaactatgtttcaggatagaggaaatgtntgttgttggtaagactgtctttttaggttcaatgtctgggactgtctatgttacacaggaaaggaggcctgtggaagaagctactgttgacaccgagatggaagaagttccatctaatgtgtctgcaagagtttcagaggtagatcttgtggtaatcgntatatacagatttccatgactatatgcatat

SEQ ID NO: 1697 - DNA, 431 bp, Arabidopsis thaliana landsberg
  unsure (1)..(431): unsure at all n locations
ctagttgtctagcaacagactgtgcagtcgagtatccctgttattgttggggtcggnnnnnnnnnnnnnnnnnnnnnnnnnnnnnnnnnatgcctcggcgatcttgtcaaaggaccaccccgagccaggctccaaaacacctcggggatcacgtcaaaggaacgtcccgaggcaacaccaagaacgcctcggaacattgccacagaggattccccgacctgatcttgaagcgcctcggaaagaaacccgggaaatcattccgaggcagatcttaagacgcctcgggagcacatcattcaactaaaggggcagcttatcccggctcggagaaacgtcggatcgggataaaaccttcaagaaatgagatcgaacataccaatatgagatcgaacataccattttcgaaaaacccggaagagattagagaacct

SEQ ID NO: 1698 - DNA, 507 bp, Arabidopsis thaliana landsberg
tttagctatgcaatttctgtgtgagttgattgattcgacatctaaggaagaagaagatgtgttcagagttttgttttctgctagtgatgaatgtaattgggatatatcttgttgttttcgatatgggtttggtagaagatgatgagtttagggtttttagaacggtgattgattcgggctttagtacttgatgtcaagacataccgagctcttataggctgctcttgggagttgtttaggtgttctcccggggaaggttgcaactgtccagatatgtgtagactccaacatcttattgaggattcaacacttgtaaaagtttgtttatattttatgaagttgacaaagtttttgctgtgatcaattaacatagttctgatacatgtatataggtaggtattggaattgatggtgactctgtgaagcttttccatgactatggagttagcatcaaatcaaagatgttgaggatctttcatatttagccaaccaaaaaattgatggaga

SEQ ID NO: 1699 - DNA, 3317 bp, Arabidopsis thaliana landsberg
  unsure (1)..(3317): unsure at all n locations
atgctcgttccatgtgactctaaagaatttcttatccatttgatttctctgtttacttacctgcttcattcacttcctattgaattttagtattttcttgttttcaaccattctactcgatcacaccagtctactaacagtgagactgcgtgatacagtaaacttgtccatttctgcattttcacactctgtcatcctgttgtactcgatcacagggtcccttctggcagttgaccctgcgatagagtatatcagtcatttctgtgactttttactgttttctcgaccagcaactcgacctatcttcccagcaggatcaccaactgctccaaaaccagttgctgtcaaaaacaaagaaaaggtctttgtccctcctccctacaaaccgcagcttccatttcctacccgtcacaagaaagcgttgacagataaatatagagctatgtttgccaagaatattaaggaggttgagttgcggatacctcttgttgacgctctagcgctaatcccagactctcacaagtttctgaaagacttgatcgtggagcgaattcaagaagtgcaagggatggtggtattgagtcatgaatgcagtgctatcatacagaagaagatcattcctaagaagcttagtgatcctggttcattcactctaccatgctctttagatccgttggctttcaatagatgcctatgcgatttaggagcatcagtcagtctcatgccgctctctgtcgccaaaagattggggttcacttaatacaaatcctgcaatatatccctcatcctagctgacagatcagtaaggatccctcatggtttgctcgaaaaccttccaatcaggatcggagctgtggagataccaactgactttgtagtcctggagatggatgaagagcgcaaggagacctttcttagcaactgcaggagctatgattgatgtcaagaaagggaagattgatctaaaccttggcaaagactttcggatgacctttgatgtcaaagacgcgatgaagaagcctaccatagaagggcaactcttttggatcgaagaaatggatcagttagctgatgagttactggaagagctgccaaaagaagatcatcttaacagtgctttaactaaaagtgatgaagatggatttctgcatttggaaacattaggataccagaagctgttagactcccataaagcgatggaagaatcagaaccctttgaggaattgaatggaccagcaacggaggtaatggtaatgagcgaagaagggtcaacacgagttcaacctgcactctcgaggacatactcgaccagccactcgaccttgtctgccaacgaatctgaggagccgatcattccaacttcagatgactggtcttaactaaaagcaccgaaggttgatctcaaaccacttcctaaaggtctaaggggaatcatgagcaattacagtggcagttcttctgttgatcctgactacaacatggatgagacagagtcgtcatcttcaaggccagaaagagaacagagagaatatgatagcttcagaagaaaggctaatatacctcgagggaggagagcgatgacagagaggtatgagcttatagatgaggatcaggatgacgagtacatgcctgagcatactcgcagagccaccaaactgctaaacaaacccgatgtattacctgctgaggaatatattaggctcttcaagctgaacgagttctgtagcacgaggtatccttgctcaaccacactttcacaactcggattgttggaagatgttcagcacctgtaccagagttgtcatctggacactctaatggcttatccgtatgtagcatatgaagatgagacaattcaattcctctccacgctgcaagtggagctctaccaaggtatgacctctgatgagttggattgtgaaggattgggattcttacgattctctgtatatggtcatgagtataggttatcaatcaagcgattggaaggattgtttggcttccccagtggaatgggaactaagcccaagtatgacagagaagagnnnnnnnnnnnnnnnnnnnnnnnnnncagctctgtaccgctgaattcttccaggtcaaagagcaatcggatacgcagccctgtcatcaggtacttccagcgttctatagccaatgtgctttactcccgagagatcacatggactgttactaattctgatatggagatgatcgcaatggctctcaagggaactcttcgccaaactaagaatggcatgtctctccaaggtgaaatcaatgacacacctctctctgtacttcttctgatccatctgtgtggatacaagagcaggaccgtcagcaataaccacaagagagcatgaggcgctctgtgcataggaggtgttgtgacaccgattgtgaccgcttgtggaatcccaatcacatttgatggacttgagccccgggcaatggatatcgagcacctacatcactgcaaaatcatgtagttcgcaatggttggtgaaatgcatcgtttcaagtttgagcactctatagataagaaagccaacatccttctcctcaatcctgaggttacgttacacgcataatagagagagataacattgatttcaagcctgatcttgagaatctctattctgagaatactcaaccaacatatgaggatgttcatacagaagaagctactgaggatgagatcggtgagatagatgaggagaagtatgactcggacatgaactatttcagtgagcatgtagctctagctagggagagtatgagcttgggtaaagctcacataaacaacagcatgttgcagaagtggtgcaagtaacaagataagttactccttatgtgcctaaagactatcaagtttctgaaagacaagctaatctactccacttccactactgctattccgcagggacaacctcctcaggacatgccatcaaggagatttgatgagcctaaggcaagtcaccacaggcctgagcctagtgagaagagagtctcacatgtccctgctagacattcgtcgttcgatctagcagaagataatgccttatccacgcgaggagatcactcgaccgcggtgctggccgcagcagaagaagggaggtcgagtatactcatggcggtgctggccgctgatatagctcaaattaccttaagcttactccctctaataagagatcgtcgctagtacttaagggtcgaattccactgagctcttgatgttcacacgatagacttatgatgtttgcaaacaagctagaccaatagattataaaataagagattaagataagcaatta

SEQ ID NO: 1700 - DNA, 1113 bp, Arabidopsis thaliana landsberg
gccaaattttataggcaatgctagattttataatccgagtttcagccatcaagtcgtgtacgtataaaagaacagagaataaacaactcttcatataacagttcttgctctctctaattccaacagaaactttccctcctattcaccatgtttctagggttttcagttctttgtttgggttctttgtgttggtagagaaatctccggctgaaatggcagattcgacggcggacgagtcaacaaacgctgatactctgtggcgggagttacacaaggtactgccggagatttggtacgacggaggaggcaaagatcactgtgagattgatgaggctattagaatcctgacttgtctgaggaaaatagaatcgaagaatccggaatctgatatatctccggtggaagttccaaaagagtttatatgtacactctcgaacaagatcatgatcgaacctatgctcatcgcttctggccaggtttgatctcttgtgattcttgcttcagttttcgatattccatttattcgtatgagcatataaagttccatttaaagtttcagtatcaaagaaaaagaaagatccatatatatgattctggtgtgttcatttatgtgttatgcaaatacagatagttaggatccaagacacagattctctggtttttatatatgctgattttactcttttgtttttcgttcagacttttgaaaagagctatatcctagagtggctgaagcatgaacgtacatgccctagaaccaaacaagtcctttaccaccgttttatgataccaaaccatttgatcaacgaggttattaaggaatggtgtcgaattcacaactttgatcggccaaaaacatcagatgaagtcattgacctgttcactggtgaccttgaatcattgcttcagcgtatttcctgtcctacctcggttgaagatcagacagaagctgcaaaagagctttccctcaaggccaagagattttccagtgtttgtgtttactttgtcgccaaaatccctgattccatcaccaggttgctcactccgctctctattttggaggactcgaatcctcgagtttctagagaacatcgtcacagcattgcacatatt

SEQ ID NO: 1701 - DNA, 1043 bp, Arabidopsis thaliana landsberg
aacttgatcttcaataataagtatgcccaaaaaggcatctattaccagaattactatttgatgagccgggtttataagtgtgtaataggaatcggcctatctacttacgtgaacatatcaaactcgattagcatgcatgtttaggattagggatttgccaagccaatgctgggaatctttagctttagacatagggagtaatgccaagccaacgctgggttactctataatagtggtttgagtttaagaacggttcgataacatcctagcaactattagatctattaatcatcaatttccttagaatactctaagcctaacatttttatcatcttattttacaaccccataatctgctatttgtttgcttttattttctctttattttcttatctttgtctagcttgatcttgatacttatgcctattgtgtgaacaagagctttgtagaattcgaccataagtactaaagacgatctcttattttagggagtaagctttaaggacagtttgatctatactagttgtcatccaacgtccaggcccgagaaaaagatcaaccgcatggttctcgaggtaaggtttgtttcataacatacactcatgtacaagaaattctgtcaaactggggtcgtgtggtaggtgtaggtagtctcaactaaagcacaaaatatttttatgccggcccatcacgggattttgatatctttgcagagcttgaggacaaagacaaggggatcttaactttgaaggagaaaaacatgaagattcttgacttcatgtgttcaaaattttctgattttcttgatgatctataaatgcttttgaataaatttaattttgttgttttgtcaaataattttattttcttttgtaagataatatatgcacttttaaaatagcttatcttcttgtagtgtataaggttgtactcaataaaggtgggatatatgttggaaaaggctacttatgtgatggtcttatcaaatagcatgttgaaccgatcaataataaaaatgcacgtaatattgttgcttttattta

SEQ ID NO: 1702 - DNA, 475 bp, Arabidopsis thaliana landsberg
  unsure (1)..(475): unsure at all n locations
aaactctgtctttttttttggtgaagaaaacaaaaaaaaattcatattttgattccttttattttcagatagggtctctttattttcatggtagctaggtttgtctagttcttaatatctctgtctttgtgttcgaccagcaaataaaacgatcatgatttcagattccannnnnnnnnnnnnnnnnnnnnnnnnnnnnnnnnnnnnnnnnnnnnaattactaggtgcgatcgatatatatattacaaaaaaaacagtgttgttgcaacgatatttttgcaatgattatattcgttaaaaatttgtaacaaattttgctatacttttgcaatgatgagtgaacgttccaaacttacaatcgtattacaagtctattgcaaaataatgacaaaacaatattgcaacacgaaatatttaaacaaataacattattcattttctacgtaaattaatgttggttttgtgtagttatgta

SEQ ID NO: 1703 - DNA, 1258 bp, Arabidopsis thaliana landsberg
aattttaaaaccgccattgttgttctctttactacttttgggaattagggtttatgatttctgggtattagattagataaatttgtttctgatttttttaaccaatttaaaaatctattatttctcttaaagacttgtaattttggagtttttaatgcatggacggaagagaagcaatggcatttccagggtcgcattctcagtactatcttcaaagaggagcctttactaatctcgcaccttcccaagtcgcgagtgggcttcacgcgccgccgccacatacgggaatgaggccaatgtctaaccctaacattcatcaccctcaggctaacaatccaggacctcctttctcggattttggacacaccattcacatgggagtggtctcctctgcttctgatgctgatgtgcaccgccaccgccaccgccaccaccagaggaaccgatggttaagaggaaacgtggacggccaagaaagtatggagaaccgatggttagtaataagtctagggactcttctccaatgtctgatcctaatgaacctaaacgggccagaggtcgacctcctggaactggaaggaagcaacgcttggctaatcttggtgagatctcgagttttctattctgtgtactttgtcaagttaagttgttgctttagctctgttagctagtcttgaaggacatgagcttgaatcttatggatgctagaagctttgaatgattctatagttaagttaggttttgttactttgtcgttactgatactcaatattgattgttggctattagtttgacggatctatgtgtggtacaatgctaggtgagaggagtaattggttattagtagatgtggacgaaatcgacttcttgatttaagttattgatttaggtttttaagctgtgaaagagtaatcttactaatccattcatgtttaagtaattggtcatcataatgtgattaatcaaactttaagtaatagcaaactcttgactctgataatttctttaggtgagtggatgaatacttcagctggacttgcttttgcacctcatgtgatcagcattggagcaggagaagtaaactgaccaaaactcctttatatattaatgatcatttatgcagcttttcattgtatcaatttccttttatttttctttgcaggacattgctgcgaaagttttgtcattttcacaacaaagacctcgggctctttgtataatgtcaggcactggaaccatttcttcagtcactctgtgc

SEQ ID NO: 1704 - DNA, 489 bp, Arabidopsis thaliana landsberg
cgccaccttttgagaacaacacacttcctcgacgacatcgacatctgcgacaaccaacgtcatctctttctcatctcgtgaaatcaacaccactgccggactccaacgacctacggtgaaaaaaattataagcaattatagaaacagctcacgagtcaactcacgagccagcgaatcaatttaaaccgatttagaaaagaatttgtaatgtagcgatgagagattcgtaagcatagggagtcaagaaaagttttatatttttaatatcttttatatattaagattggataatgacaacaattatactaatattattattaatatagattgcgagaattacagaattcttttctcttacttatgaaacattcgagaatcactaagataatggtagacaaatctttaatatcattagttgccgtcagagaatattgtggtattggcttcatggatgacaaatcatcaatacacgtaaacatatttgtcgac

SEQ ID NO: 1705 - DNA, 522 bp, Arabidopsis thaliana landsberg
aactaactgttagtttttgtaattgattgtgctattttcttcattttaatgtaaatgaaaaaacatagcgaatcagcatatgtagcttattaaaactcaggagtagctgtaaattttcacttgtgatttcaataagtcaatttctgccaactaattagcaagcacaacagtttctttacttctaacatacctcagaacgcaagctgtggaaatagccatgaagagcatgttttgaaacaaatgtctttagcatgagaagggaacttacaaggatgttgagcttgccgctgaaagcagaagaaacttcctgagtcaacttattcctctgatccctaaccatttatgtgcaacttcatagtcaaacacagacaaaatcttccaagtgatcctcatcaaccatttgctttcagattttgattttggtgacaggaatcgatttgagaaataaccccaaaacctgaaatagattcaattgtatctagaatgggattgagagacgtcaaaattgttttgaatagaatg

SEQ ID NO: 1706 - DNA, 1161 bp, Arabidopsis thaliana landsberg
  unsure (1)..(1161): unsure at all n locations
ccgattcacgggcgttacagtctgacccaaatccatggacccgaactcggataaacacgcgtatcctagagctaaagctcttaaaatactgaatacnnnnnnnnnnnnnnnnnnnnnnncacacgtcactccatttgctcgacggactaagaagctcttaaaataccgaagatcctaagaagcgccaatgcgcttgccgacgcacttgttgtatttacttcaacatctgatccatatattcgttgtattgatctttctctctcttcaagccagcgccaaccatggatccacctgggccgccgacaatctacttaattgtcgatatgctctcctcaatttcttcagcaccacctaacgtttctgcgaaaacactgcctgcataaacaccctcaaccacccccaaccaaacctacgctcccctagagcacggacgatctagtcatttaggattggcgtgatgaaataagaaactatatttcagacggtgataagtgggaagctcgacggttacgtgcccgcagcgcatagtatacactgctggatggcaatcccatcgatggaacgctgctggggtacttcactcctgtcttgccggtgacaaaatcttgcaggttatgcgtgagatccacgaatgcaccagtggcaaccattcaagaggtcgtgctttagcactttgcacacgcaaacatggccattattggcccaccatgctctccgattgcaataagtttgtcgccagatacgccaaatacgagaagtatcaaaggcacacaccaattattcacgcaccgacggagctcctgcatactattgcgcctgcttacccattcatgcgtttggcgatgaatatcgtcgaacaacttcaagcgtctcgccaaaagaaatacgttctcgtcatgatagattaattgaccaaatgggtcgagccggagtcatatgcccgaattcaatcgaaggacgtccagaattttgtttggaaaaacattatttgctgccacaagcttccgtacgtaattgtcactgaaatggctctcggtttacttcactttaattcaagggcttctgtgcaaaatgggaaatccaattgagtatgtctacaccttgttacctgcaaggcaacatacaagataaggcaacaaacaaaactattattgatggact

SEQ ID NO: 1707 - DNA, 449 bp, Arabidopsis thaliana landsberg
tctagcatattcttatgggtgctgcaatgaagactatgatcgtagtgaggataaacagagcaaggtttttaaggctctgaatgaaaagctagacaagcttttgctggctcggcagaggcaaatacactacatcactgatgaagagcatttccaaatgcaagaaggggggaatgatcaaactgaagagctgtgctacatctagaatcaaggagggttcaacaagggctacaacaactacaagcccaacccaaacctctcctacagaagctctaatgtagctaacccccaaaatcaagtgtatccacctcaacaacatcagtccaagccttttgttcagtacaaccaaggttatgtccctaaccagcaattcaatggaggatatcaattgcagaatccaccacgagggttcagtcaacaaccacaacaagcttcaccaactcaagatcctg

SEQ ID NO: 1708 - DNA, 3028 bp, Arabidopsis thaliana landsberg
aggttacaacaaaggtttcaacaacttcaagcagaaccatcccaatctgtcttacagaagtacaaacgttgcaaacccgcaggaccaagtctacccttcacagcagcagaatcaacccaagccctttgttccgtacaaccaaggtcaagggtatgttcctaagcagcaatattagggcaactatcagcagcaagttccaccacctaggttcacacagcagcaacaacaaccagcttcaacaactccagattcagacttgaagaacatgttacagcagattctccaagggcaagcaacaggagcaatgggtttatccaaaagggtggcagaaattcacaacaaggttgactgcagttacaatgatatcaatatcaaggttgaagcactgacatctaagatcagatacatagaaggccaaactgggtcgaccgcagcaccattgtctagggatagcttgattgcgcttgttaaccattcgaataggctaggatagcactctactcgattaccccatccttaggaatttttcgtctatctgatttctctgttttatcgttatcgcttaatcgttctcattgcatgtttcttagtttttgcaattactcaaccaacttactcgacgaaacccagtgtgtggcaacagactgtgcagtcgagtacagttgtctcgtttcctgtctgttactcgaccagcatactcgaccacatccagtttctggcaacagattgtgtagtcgagtatagctgtttcatttcctgtctgttactcgaccacatcctgcttctggcatcagcttgttgtggtcgagtgattttagtaattctgttattgtttctgttttctgcatgttcgcttaggattgttagaaacctcaaaactgttattgcttggcttgacttagtgacttctgatcacatctcatctgtttgcatcacacccatttggattgacaaccttcagtactacaacgacatgatagtgctttaggattaattgatcttaaaaacctattatcagcggtgtgtaaaaagatctggtatgggcagctacaggtgtcgatcgatactcatgtaaactgatcgacaccgttgctctacaactcccatttgcgagctgagctaaaaggagcgtttttggtggctctatttggggattctgagcagtctgaggaggtgtgtcctgggtggagatcatgctactgataagcctaattaactttgtaccatccctgcctaactccatctccaagtcacaaatgttaagagacactgtacctctctttacatcaatcctagcaccagctgtagctaggaaagctcttccaaggatatgatatttggattccttatcataatccagaaccacaaaatcagaagggattaagcaattaccaaccttaacgggaacatcctcaaggattcctttagggattcatttggagagatccatgaagaggagagtgatcattgttggcctatagttagtcatgctcaatctctctacaatagacttaggcatgaggttgatactggatcccagatcagacaaggagtggctgaacctccttgtaaagatagaacaatcaagaacgaaactacctggatcgaggagcttctcagtggtttgatctgtaatgatagtacggatgtacttagcaatgtccactctctttggcttctctttgctgaccttaggcaacattatggctctgatgtcccttgtcaccaaattagcttcatcagtttccctgtggctgcccaaaactttctgtaaccttggccatctatgtagaagacttctgactcagcctcaggctcaatggtctcatcttcagctgcaaagtgaacacgattcttccctgtaagcaagttatgaaccgaatccagcttagcatgtacggatgtacctgtaccatcttatttcctgaaacagctccaacaatcttcttcctatcaaagtcggcattcttggtactgttgctgcaagcaaggttctttatcaaagcggtagcattagccggatattgtgtgttgaagttaccattgctcgctgcatctagagccatctggtatctccaatcaactcctctgaaaaaggtatccaaaagttgtaccttactgaaaccgtgatgcgggcaatctcgttgatactccttgaatctaacccattctgctttgaaagcttcagctggatcttgggtgaaggtagacagcttgtttctcagctcctcagacttagcatcatcatagaaattgttcaagaatgctatcttgatgcttctccaagtcttgagttaacctgcttttagttgtttcacccaagaagcagcttccccaacaagttaataaggaaagagcttgcatagtaggtagtcctctgcgactccattagctttgatgctcagaactaggtcctcaaaacgctcgatatggtccattggctgctcatgagacaagccatagaaagggtgctggccaacaaaggcaaagtatccaggcttcagctcatagtcgttcctctagaaaggcgggggtacgatcactgactgattagcatataacaagtctagcctgttgaaattcccaagagtacaacgtggttgtgtcgcttgacaccaattgcttctccattccgctcccaaaggtgtcgatcgacaccgagccctgctgcgtctctggcagctaattgcgcgttgagacgcgcatgattcgcatcgacgtcctcaggtaggttgagtctatggtcatccaatctctaacaaccttcattgtaggcttgcccatcctcatctctcaaaactccttctgcatcagctctgatgactctatcaaccattgctaatctctgagtttttcggttggtgcgttcaagttttcccaagtccagaacatacaagtgataagctccttctgttgctccttgtttgcctaggcatacatacacctgaaacacagaaaataagaaaacaagccacacgccagtaacaaaataaaagtgaaaactaaatgaaatctctaaactaaactc

SEQ ID NO: 1709 - DNA, 579 bp, Arabidopsis thaliana landsberg
atttgtttacaggatgaatcagacaatgatgctgctgtcgaattttagaagaaaaaaaagcatccccaaaggtcccaaaaaaagtgaagaagcaactagtctatgaacaggatgatgcccatcctgatggttttaaggcaaaaacagtcttggtggcagatgtaccaactcaacagacagaggttgttatcagggctggaaatgtctcatacaaccctctggacatggttgacccttcaaaagtagaggaattcaccaatatcattaaaggaccctctgtgtaagtatattatattatattggattattaattattccatcatcatttttgcaagtcttaagcttgttatcaaatatttttctggatttacaggattcacactcttttcgggtttcgcaaagttcccaacaagttttttaccaagcttctaacacctggtgtaagtgtacgtacactgattatattttttgaatatttcagcatttagaaatgatggtaatgttgatgtggcacaagaacggagaacagatgatagcaaacagatgtattgtattggacatgatgctgacgcatgaact

SEQ ID NO: 1710 - DNA, 587 bp, Arabidopsis thaliana landsberg
gaactcacatgtttgggtgaggtctgctgattgggaagagtctcagaaggatcacgatcgtgctcggagtttgtgggaacgagctttggaagacgagggttgcaggaaccatacgctctggctcaagtacgcagagttcgagatgaggaacaaagacgtcaaccatgcgaggaacgtttgggatcgagccgtgaagattctacctcgcgtggaccagttttggtataagtatattcacatggaggaagatttttgaacggtggatggattggtcaccagatcaacaagcttggctctgttttatcaaattcgaacttaggtataacgaaatcgaacggtcaagatcgatttacgagagatttgtgctttgccatcctaaagcttcttcctttattcgatacgcaaagtttgagatgaagaacagtcaagtttcgcttgcgaggattgtgtacgaacgcgccattgagatgcttaaagacgtcgaagaagaagctgagatgatctttgtggcctttgctgaagttgaaaaactatgtaaagaagtggaacgggctaggtttctttacaagtatgctcttgatcatatc

SEQ ID NO: 1711 - DNA, 589 bp, Arabidopsis thaliana landsberg
gaccgaaatgacaagcccgttaaagacccaatagcccaatattgaatcaaaccgcagatcccctttcttcctccaaaattgaggtcacaaacccaaacttctcacccgtatctaaaaagttctcgtggtgtatagtcctaaactagtacacgacagaatcaaacctgtttgaagtatttagcacggatccaaacacgagagacatcccaaggaatctgattctccaatgtttgtctagacataagatgcgttgatggtaaagaagaaacgatacgcacatcagattcacagggttttacttctttttttggtaagattgcatttttctctcacccccatttcttattccatgcttcttagatcgttaattgaatctgcatcccgcagtgatcattctttaatttacgaatttgttttttgttgtcttgttgtcgatttttgtcaattttattgtgtaatttaccaagtgtaaattgtgattgaatcgattgggagggcattgcgaggtaaatccatattgcgattctttggatagtgtctaactagctgaatcgtactccgcataaatcacaggatttttttgtgagaa

SEQ ID NO: 1712 - DNA, 686 bp, Arabidopsis thaliana landsberg
  unsure (1)..(686): unsure at all n locations
aaaattttcccaattgttgttatgtttggagttattatatggacttggcaattctaagagcatttagcgaatattggcaaacgctgtataactggaaatggaaaaaggaagaacaaaaacgaaattgacatttcgaatgacaaaaagatgtacatgacatgttgttttatgtattggcctgtgtttactcttcctgtgccaaactatttaattctctttagatgctacttcatcaacaacaaagcttgagctcgagtcccttcagcagctgcattgaaccaccaatcttaagcaagatgatctgttgttttctggttcaagtcgtcgttggaacgtaaaccacattgttcagtaagctgtgagatcggccatagaagagatagatcatgcttccagtaaatagccataccaagaccctgaatccctgatccatgtcccagctctgacattacataccactaggaactcactcaatgttgatgatcaagtaggtgttgaccaagttaaacgtcctaaccagatgataaccaactcagcaaatgaatagaaactcttaagtaagcagcttttttgaagaaagtgagaccaaccaattgatggctcgcagaatcttatattcagntaaaatttctcttttttgggctgtatgaatgtataggcaaaaaaatatggcttaaataagcttc

SEQ ID NO: 1713 - DNA, 634 bp, Arabidopsis thaliana landsberg
cgtcgaagaggtaaaacaaaaccgtctgttctctcaccatctttaagggtttgtagattttggttatgaaaccagtaaaatcacacttttggttgaccttgaacagcgtgaaagattgaagaaactgttggagaagacaaagaaacagaaagacaagcttgaatcactttgcagatcccttcaagctgaaagaaaacagaaagaaactaacagtgctgattctgctgttcaaccatgaaacagagagagactatgaattcagtgatttgctctcttttttttctttgtcagagttttgaactaattagcacttcagattacaaaactacaattagactccaaattcactttaaaatgtagaaacatatcacatcatattgattctgctcttttgcgagctaagtccattttatctcacaaaatgcaaattgataatagttaattcagctgcagcttctgcaaatctccaggttcacaagagaatgattctgcattcactaagttcacaaccgatttggagaagaatagctacttcaacatctgccataatgaccagctgattctttgcaatcttaaaccaaaccgaaccgaaccatttgaaccgaagaaaagttaaaccgatatggattatgat

SEQ ID NO: 1714 - DNA, 851 bp, Arabidopsis thaliana landsberg
ggagatgagagaccactcttgatttctaagctgttgttctgtactggcggcggcactgggcccttatctttagggatgattccttggggcatcaccagcaccaaggtttcttggttgatcaactatacgtgggtcttgaacctcaagtcctctgtcctgttgaccctaatctaatccatcctcaagaaccttaatcactactcaagcaacataactaagaacataaacccagaaattactgaaattatatcaaaatgtagatctaaacaagataaacaactttgctcaaagaactaaatgcaaaatcgaaataaattaagagtaatctatacatttgatcgaggaagaagatgctaaattagtagcaaagcatcttccagcaaaaagaaaagacaaaaaacgtgacgtttatcaggaaccgcgaccacactacgatccaaaagaggtcaaacgaggaacgatctttgtcgcaatggattctaaataccaatctccccaaccatcgatgtcgatcgacattgctacatggttaaggtggctaattcgtttctccaagtatttcaaatcaaatactaattatttcgacttctctagcttaataactctaggaataacattatctaagtctcggggagccaaagggtaaccatatcttttcttttcttaagttagtcgtgtcgttttcttatctatgttttttattgagtgaaattttgtttgtctccaattttgatctttctctcgagtttattgcctggttgattaactgttacagatttgattcgatctgactaatggaaaatcctgagggcaaaccaataaattagaggacatccattattccaacatat

SEQ ID NO: 1715 - DNA, 794 bp, Arabidopsis thaliana landsberg
  unsure (1)..(794): unsure at all n locations
ggttcattctatcggttgttacgcaattcactctcgactttcactacgttacaatgtttacccgaaaagatacactctcataacttgtcattcctccgtaaaaaaatggtactgtaattttgacaactttgaatgaatcttatgcagctcttgtatctggaatcgatctcttctttgagatttttagaattggtaaaagaacaagaaagctttagatgtgctgcgtagagctgtaactaaagatggtggtcattgctttggatgctaaatgatgtggagaagaatcaatttccttcggattgttcttgaaaagggtttagtagtctgtttttgcggtatattgagtgattcactgtcttccttttttggtctccaggatgctgatgtgatgtggttcatgaactaatttgcttctcaatgctttcttatgatttctttgttgagttgcatttgactgagaactctcgtgagatgcttcacatacttataaagtctcagtctgcttggcatggaatggtattgtatatcagaagaccattcaatatggagattgatgttgtagtaattgttgcgtaggcttcttttttatgcttgtgtcttttctatattgttgttacgacgatgttacaacggttctcaaaacgacgtcattatttttgtgtcatttaacaaccgacgttatcatcaatatatattccgaaaattcacgactgatgaatgctctacttatagtaaaattatatcacatgctanttcaatgtgctgacatgccatgcagaatgcagtcgcaagga

SEQ ID NO: 1716 - DNA, 1130 bp, Arabidopsis thaliana landsberg
aaaatgccactaatctcgatacattgtatcttgatggatgctcgaatctactggagcttccctcatctatttggaatatcactaatctccaatcattgtatctaaacggatgctcaagtctaaaggagctcccttccttggttgagaatgccattaatcttcaaagtttgtctcttatgaaatgttcaagtttggtagagctcccttcctccatctggagaatcagtaatctctcatacttagatgtcagtaactgctctagtttggtagagctcaatcttgtctcgcaccccgtggttccagattccctaatcctagatgcaggagattgtgagtctctggtgcagagactagattgcttctttcaaaatccaaagattgttctcaacttcgctaactgcttcaaactgaatcaagaagcaagagatctcatcatgcacacatcaactcgtaaatgtgcgatgttacccgggacacaagtgcctccatacttcaatcatagagctacttctggggattccttgaaaatcaagttgaaggagtcgtctcttcgtacaaccttgagatttaaggcttgtatcatgcttgttaagggtaatgaagaaatgagatatgatcggaaatcgatgagcgttgacattgtcatcagggacgaacagaatgatctcaaagttcagtgtacaccacgctatcaatttatatatccagttttaacagagcatatatacacatttgaacttgaagtagaggaggtgacttccacggagcttgtctttgaggtgacttccacggagcatatatcattcagaagcaattggaagataggagaatgcgggatactccaaagatagataggagacattcttcgccggatctctcgtcgggatcttctcgtgcgttctctctctctcactctccccctctatctctttgtctcatggattggttaatgactcgatttctcctaatgggtttcaggtgtgtttctagctgcgaccactgtttgagaggtaagaatcatgggtttgatatctccttgagtcattcgatggattccattattgggtttattttgtgtgatgggaaataaggttttgtatcgagtttatgatgcttataggctataattt

SEQ ID NO: 1717 - DNA, 4677 bp, Arabidopsis thaliana landsberg
tttcatttgatcggttgagttgttaaattggttaacccatttaagtaataatttaattaattattattataaagcaacaagaaataataataataatttttagttattaatttattatcatcaaacttaggatatttacggattctactttttacgggtttacgtttttggcggcataattacgggtttacgtttttggcgggaaaatcatgtgtttacgtttttggcgggaaaattacaggtttacattttttgtcgggaaaaattacggatttacgtttttggcgataaaatcacgggtttactttttttggtgggaaaattacaggtttacgtttttggagggaaaattacgggtttacgttttttggtgagaaaatcactggtttacttttttttggtggaaaaattacaagtttacttcttttcaatctcatcgcttgtatatttaagaaatttagaaaaacattaattttattaaattggtttagatgtgttggttaaacttacattaaaattggtttagaaatgttagttggtttaatacaattttacaaaacttgatgggttaattgggtaaaccattgaaaccattaaccattacaatccaactcattttactcatcaaaccaattgacccaataacttatttgatccatcaactcgtttgagtcaaaattttcaactcattagggttcatgggttgagttgagttgagttgactcatgaattttgacccattttgacacccctagctacgttataggtaattagatatttaaatactattttagtataagaaaaatatctcaaaatagtggtaaatagattgttggtggaagaggagataaagctaggccaacatgtgccagaaattgctaatgcgacacacatttatatatatatatatatatatatatatatatatatatatatatatattagtttaggagttatcctcaaaataaataatattttgtcttctcgtttcacgtaaagtaattgttccacgcaaaacaaattttttgtgtttaagtcgtagaaccttacaacaaaaaaagaacaaaaaaagaagaatttaatttaatggttttatacaataaacaaagattaatgaaaaagtgtaaaagtttattaaaatttttacctataccttggtcatatgtattagagttagctccattatatctactaacatctacgtccgaaatgaggagacgtgaaatatatctttcatgagctgtagtatcaaacataactagatatgtaccttacaaaaagtcaacaacgatataatcataataccactagttgtgaaagtttcgggataagagaggatgtttttgaactctttccaagaatactttggtatatatgaaaaagttgtaatcaatttattttcgagaatgttaaataacttcatttggaggctttggccttggcgattcaagagccaactgcctggaaacaaacaaacctaaaagaagtagcaatcaaagagtctatcgcacttccgaatctggctcatctccctcctccttgaacccctgagtgtcaaattgatgcttcttggcatttggatgataacctgagtggacatggatgggttttagtttatcagtatatttctcttcatcttggcctcaaaagtacgagaagaagcctatcatcgcttcatgcggaagttgactccttactttgggctatggagtgtatgatatcaattagcaagacatctggagcatttgcatctgattgctctgatttgatatctcttctcaacaaccaagaagaatggccaacctttgcttcggaaatggcctcttttcggtctctcattattatttttccttcgtttactattagatttcttcctcgaagctttactactcgagcagaccttttagtcaaaacaggtaggactagaagtattcttttctccatgtaaacacgtcggttcctgaatggctctccctagcgaacagtcaatttttttataacttaatagaaatgatgtttgaagaaaaagaaaaaaaaagaattgaaatactttgcctaacgaaataaagaaggaaattaacaatgttaatgttatgatctctcgtcaatttcaatacaccaatagatttgtattcgaagaagataattaagaatagaaagagatgcgacacaagtttactccaaatcatgaaatgtgaatatgattatgtcaactccaaataaatctattcattctgctaaagataattctttatgttggtatgctctactgtatctcttgttttttttttcaatgtattagttttacttttgctaacttttgagtgtttttatattataatataagtctagttagatgtacttacagattttggattacacgattgataccatgcttatgttgtttgaaatctagcaatacaatgaaagaagtaaacatgttacaaaagtgaaactcatcaacagataagagagtatagaactgctaagagaacagttaacttatctaaacacaacagtcaactatgttccacaatcgagcatgattcacaacagaacaagattcacaagagaacagactatagaactgaacaagagcacacccagtatataactgaacaagagcacacacgagtatagaactgaggcatatcctaaatttctaagccgaaaacatgctaagcacacatacaactatgttccacaataaagcatgattcacaatagaacacgattcacaacagaacagactatagaactgaacaagagcacacaaagtatagaactgaataagagcacacactagtatagaactgaacaagatcattctaaaaacatgctaagcacacagtcaactatgttccacaatagagcatgattcacaatagaacacttcacaacaaaacaaactatagaactgaacaagagcacacaccatatataacttaacaagagcacacacgagtatagaactgaaaaagatcattctgaaaacatgctaagcacaatagtcaaatatgttccataatagagcatgattcacaacaaaacacgattcacaagagaacatgattcacaacagaacacgattcacaagtcaactatgttacacaatagagcatcaatcacaatagagcatgttccacaacagagcatgatttacaatagaacacgactttatctacacaggcagagcacgagaacaaagtagaggaagagaacatagcattcagtttttggctggggaatgggagacaatacaaaagtccacatttccctgccaggcactgagagtatcgtattcagagccaccatcgagtcttcttgtagctccgacaacgttgcaggagcttccttttggaagttgttgccttgagacgaagggtgactgtgagattgagtgtctggatttggcgaataaggagggtcttgcagagcaggctctgttggtggtggattgaaatggacctcttcagatcgaggctgcagatctacacgctgtggttgagtggtggtgttttggaacagtcctgcagcggtggatagttgcggtagtgggggctgacgttgaagggacggcagcatgagccggctgcatcgtaggaacttgaaccgagtgcctctaccgatcttaagatcataccacttacacttaaaaagtgtgatcctcaaattgacgatgccctcatactcgagttctatgatatctgttaaggtaccacagaaatccgcttcatcagatgaatccgcgtagttttcacctttaacacataccccatagttacatgtctttcgtcctgtgccgtgattttgcgtatgaaacaaatatcatcttgtgaaatacattggccaagttttaaccttgttcaaaggtccatgcataatctcttgaacccaagtaggaaatggagaagtagtgttccaatatgttacctacataataaataaacaatatcaatatctataaattaaatgatcacttttcgaatataccaaaatgatttagacttacatattctttaacccatagatgatattcttcagctattttcgcgtagagctctttttgcgtagagttctttttcgggcaagcatggatatttcgcagaaaaaaaatcctcgaacatacaatttttacaaacgaattaaaattaatcaaagttatcttagtggaaattttaaattaaagagactctaaaaatacctctcaagtggtttaaaatagtcacaatttctcaaaacgtatgcatgtgcgctttggtaatctttctctgaaagccattctacatttcaccacttggacgaccgacgtgcatacatatgttaggtactccagggacatgatatataggaacttcacctttatcgaatcttgttaacctgatctatgtaattgaattagttctgaagtatagcaagtaggattaaataaataaatatatttaccttgattttgtttatatatgatcggtaaagtagtgctctgaaaaataagcaatttcgtcattgatatatgactcaacaattgattatgccgcatatcttctattctttgcttttcctttcaactttatgaaaacctctcaaatgggtacatccacctatattggatagggccacccaattccagctttgtatgtgagatggataggaggtgttccatacatcaaagatgat

SEQ ID NO: 1718 - DNA, 542 bp, Arabidopsis thaliana landsberg
aatcagacagaatcaagtgtggcatgtggtgtttttgcaattttcataatgacaagaatccatggccgctgggagagattgaatcaagattatattcaagaacctatgagtgtttccttctgggtaagtaactacagaagctgtccaaatctgggctaagtataaatccagaacagtgtgtgactattggctttgcgatgcgttttcccgatggagcaaaaggaattacatcacgatcaagaggtctatggaaagatcttgcttcaaggaactcagcgtagctgacatcttgtccatcggatttaagctccatccgtatttgactttgaaaggttgcccaaaatcatatcaagttgcagaaacctagatatcagttctgatgcaacatcttcaaaagaacgtgggagattcatgtgaggtccgatctgatactactggctacatatttaatggtgggattacgattctaacggttagttctcgacttatgagtatgggactgagacagtttttgctggggtccaccatgacaagagctcatt

SEQ ID NO: 1719 - DNA, 512 bp, Arabidopsis thaliana landsberg
aagaattctacagataaggtaggatggggctgatctattaaaccatttgaatccataataggaaaccctagacctagcaagtggattactcagacataataaacgaaacacaaatcatggtctgaataagaaatcaataatagcacgagaaagaggaaatttctgcaacgcttaggtctaaacaatgaccgtaaaaactatatatatgacctaaaacacgtgatgggccttctttagaaataggataaagttctgggccgaatttggaattcttcaaaacatcaataagttgcgtctagaaattgccgtcagattgttggtgtcgctcgacaccagtgagtggtgtcgttcgacacttatgtgcatttttgtctttggattgtttctacagcttaagttgtctattttgctccataatctccaaatgcatcccaaacatgtaaagacctgacaaggactagaaaagactctagaataacaaatagactctaaaacctatacctaaaacatag

SEQ ID NO: 1720 - DNA, 585 bp, Arabidopsis thaliana landsberg
  unsure (1)..(585): unsure at all n locations
agtgtcattataactgcaaaacaaatccatttgtttgttttttttgttaagaaaacaaatccatttgtggagattttgtttttacttttaagttgatacttttttcagttagtattgacatatatatatgaacttccataaaaaatctttcacaaaaacttggatgaaacaaattataatcttaaaaccttaattcttgcaacttagtatccttcttgtctgaatcaactaatatatacaaggagatggagagtggatctgagttcgtgaagcctctagactttttgcagaagaagaatctctgtgtagtttctgagtaatggtatgaggaagaagataaagattgagctgattgactatctgtaattaaactagcccttgtgttnnnnnnnnnnnnnnnnnnnnnnnnnnnnncagcactccccactattacccaattctacaacagcaacaacaatcccagcgagtacccaacaaacgatacgcataacccacgaaccttatcgccggaagacctccgattctgtcgagagaggaacaccaccgcgtaaaataaccgggaatttggtacgattttgtttttta

SEQ ID NO: 1721 - DNA, 823 bp, Arabidopsis thaliana landsberg
tttttttgggaaataaaacaaaggtgaaacgatgtcgttcgtgtgtgatttttggaaaatcaaaaaaaagtgaacgacgtcgttttaagacgggtcgtgattacttatgtgggtaattgtaatcgcggaacagtaaacgcgattttgtggttaaacccggtttaatgactggttcaattggaggcgtattttctcggatgaatccgaaagtatatgacgttttattcagaaaatttagaattgatggttgttttttcagagaaaaaaagtataggggggaacgatgagttttgaaatagtttaggttgtaaaattcagggaatccttgtttttccgacgagtgtagcttcaaaacaaaaccaccaacagatcttcaaatctcgttggtgggcaacgtcacacacacatgtgtacctctctcgataaactctagacgtgcaatattttcctttcgcgacaacgttctatttatattcttaccataaacccctcaagctcacatgacacttttctctcttattggtcatctcttctaagacaccaaagccacatcatctcttaagattcgtgactatatatttctcttcagttcaggtctgtttctctctgtatccactcttcagctccagctcttgtgtcacacgcacagtcttgcgccacacgtacaatcttgtgccacgcacatattttgtatcacagattatatcaactttgatcatcttctttatctagagtctaacaactagttacaaataaacattcattttatactacaaattgaggatagtatacaattttctttctttcttgattctgaattttt

SEQ ID NO: 1722 - DNA, 830 bp, Arabidopsis thaliana landsberg
gcacaagcgggtaacgtgccgagctttgaggagtacatggaggttggtaaagtgagattggggcgtttgtgattgtagcaggctctttgatgggtatggataatatcgatgcagtggaagcttatgactttttgaaatccagatctaaattcagtcaatcttcagctgaaattgtgcgttatttgaatgacctggctggtttcgaggtacgtagacatggatacaatattttaaatcaaaatatcgtgaggcattgtattataatacctttccatttttaatagatagagaaaatgaattaaaaaatgtgtaagaatttatgtagaatttaaaagtagatattctgtttgaggaattaagtctcacttacagtcttaacttttcttaaagctttgattacgtatcagtctgacttacagctttaacttttcttaaagctttgattacgtaccaattatgttgtagctttacagcccaattttttttttttaaaaggctgtagtagaataaattttcaaatttctattttcttggctgtagaaattttaattcactagatttattttatcaagaattcataggatttttttatttttatatcatcataatatatttatttaaatcagtaatgcaaggcattttcatttactacaaaaaaaaattttacgactattatatttactaattcattttttataattatttaaagtcaaaaacttacagcaatcattttacaacaataagagttacagctgtagccaacacagatacaacaaaatctctacaactaaaattctacagttacattccaaccaattacccacttaatt

SEQ ID NO: 1723 - DNA, 760 bp, Arabidopsis thaliana landsberg
actcttccttaccatcatcaaccctaatctcatcaaccaactccttataagcaaagcccatcctctcataccccatactatcatacatcaaatcagagggctcaccttggctagccgtagtcgaagtctgagtggactgtgatgatggaccactaccacgatgttttctgaaaacgactactatactccttaaacagagtagtcaaaacattgttgaccttttcagccatctctttagcatcagtagtatcttccccataaagctttgcaaaacacatattagcaaactgcattttcttccttggatcaaagacacttgcaactattagatagacattaatgtttcttgttccatcccaatacttaacaaaatttcctaacatagctttagccttagttttcagatccttgtctaaattattgcctagtgacaccaaattcgtttttatagtcactatctcaccatagcacttataagaagctactgaattagaagcagacacaaccaaagtatagttgtagaatatgaattagaagcagacacaactttctggtcaaatgaatcacaccttgaagttgaagacctcacatactgcactgcattgcgtatggctgccacataatcacccaattcaaccaaaccctccttgacaattaaattgattatgtgagcagcacacctcacatgcatacattcgccttctaaaacaaatgcttcattactccttaagctgaatgcttctggaaatttcttcaaagc

SEQ ID NO: 1724 - DNA, 807 bp, Arabidopsis thaliana landsberg
  unsure (1)..(807): unsure at all n locations
gactatcccgaattgaattaaacttgttcaatttgtaacagaaaatattctttttttttgaattaactaaacctataaggcggtgtaggggctataatcatcttttttaattaaaagagccaacttgaccctccatagttgtaactgttaatcacttctcaagctccatcacaacgcacatatgaagaacatagaaaactaacaaacacacatgatgatgttcttcaatgtaagtaacatctctttcgcaaccttcacaattgaaaacctaaccagatcataccatattcaacatcaatatctatttcgatagggctcgatcccgaatgcgaaaaaaagcaagcaaatcagagagtataaccaaaatgttcttcactataacctggttcccacaatatccttacaatgcttattcccattgtacattatttaaacacatggactaacatatataagtttttgtaaaagagtgtgtatgagagaataaaactaaccgaagaaaagtgtagtgatccaatctcattttcaaagattgaaccattttttatatatataactttgttcgcttattcatttctcgatcttcctctgctgcttctttggcccggaaacgactaatctccttacagaacaaccacacctcgctctgaaaacaagcacggctcgcccattaggcggagccatcttcttcagctcagcttccaattcacggtgatgaacacgaggcaactcaaacattccnctcttgttgctggagctcttgacgcattcctcagtctcaagctgaatatcaaactcaacagcttt

SEQ ID NO: 1725 - DNA, 384 bp, Arabidopsis thaliana landsberg
aatctctggggggctttgttgatactaggaagcgccattggcaaagctgcaaagcataagattttcaagaaatacattgagattgaactccacttgggaaacatagatagatgtagaaagctgtatgcgcggtatcttgaatggtctcctgagagttgctatgcttggaccaagtttgctgagtttgagaggtctcttgctgaaacagaacgagctagagctatttttgagcttgcaatatctcagcctggtcttgacacccccgagctgctatggggcatacattgactttgagatatcactaggggaattagagaggacacgagctttatatgagcgactcttggaccgtacaaagcattacaaggtgtggcttagttttgc

SEQ ID NO: 1726 - DNA, 657 bp, Arabidopsis thaliana landsberg
tgctcgacgactccaacttcttgaggagctcgtcgttcttcttcttctcagcactcagctccccacgaaggtcctgcgagcccagtacttccatgttgcggaaacgacgctcgtacagataagccagacggttcatcgagccaacagcctaacaaaacgagaaaggagggaaaaagtcaaggaatcatctcggccaaaaaaaaaaaaaaaaaaaaaaggacacattacatacatcgaacgtcttcctcgcaacgtcggtaaaggccttcatctcctttaattccttgacctcgggaaaaggagtcggcccgtagctgatcttgcagaaaagatccgcacaagactccgcgtcgcaggttatggggacttcacgacccttgcgtcaggacggatctcctcaatggcccccgaggatcgcctatggtgggggtcgttggcagaaccaggatgaacaatcaaagtgttgcatcccggtggaacatcagagcgagctgaaccttcccgctgctttccctgccgagccgcggccagctctttctcccgagactccttggagccggtaacagacgaccccgattcaacggcactacgcccctggtgacctcgggggctcatatatcggagtgtgctctcttctcagctgaacgcgcagtcgat

SEQ ID NO: 1727 - DNA, 3052 bp, Arabidopsis thaliana landsberg
acttgggaaaagaggaattgaagaagagatatagaaaagttttatttatatagagagatcgagagagaaagataagtttgtttttaggtttgttttccttttttctgctccgactttgttttaaaggaaaaataaattatcttttcgtctttaaattgtgtatagatatttccaacttttttcgggatatacacaatctttcatatttacttttaattatgattaacttaggtgggattatttatttattaaagtgttttctagaagaaaaaaatcttcttaaaagattttatgagaaagaaagactagaaaaataaatacaacaattattttgaatgacatatatccatacctttttataattaaattacttctattgtttattaatatcattctatgtaatatttttaacattaaataggttttaaatatacttctcaaataagatatgtgcaaattaaagttttttttaagtgtttgagtaaaaagaaaaagagagataattttgattacctcaaatcggcgaccaccagagacatgattttgtggtcaactgatcaaatcggcgagcaccaaaagaatgattctctgagataagcatgtgaatttggagctaaataccagattatttatttattaaattgttttctataagaaaataatctttttaaaagattttatgagaaagaaagactagaaaaatacatacaacaattattttgaatgacatatacatacatttttataattaaattacttatgttgtttattaatatcattctatgtaatatttttaaaattagatatgtttaaatatacttcccaaataagagatgtgcaaattaaagttttttctaatgtttgagtaaaaaaaaaaagagaggtaattttgattacctcaaatcggcgaccaccagagacatgattatgtggtcactgatcaaatcggcgagcactagaggtatgattctctgagataagcatgtgaatctggagctaaactcctctgttttatacggtcaatacgattttatatggttcgaacaaattggacccggtttaatacggttaagagttaaaaccttgacttttacatttaactattaagtttcagtgcaagacactaatgtgtagatggttaccttcctccatgaggatgctccactgggttcatcatagccacaccacgaaccttagcccacatgtttctctttatcatcagcttcttagttaggccactactagcaatttgaccaatcataaccctgcatccacttaggacagtcttctttgaatccagtggcaacttaatcctgtccaaacatataatcaatttatcattgtgaacttaagaaaccaatatagcaatgtaggaacatagtcaatgtacgagaagatccgacaaggataaaaaattatgatgggtagtcgtaggatctattaggaatgttgtaacataaagctaaactcctctgttttatacggttaattatgatggagagtcttagttgcagaatataacttgttcactatgttagctctatattagtaacagaaaagtaaagcggaagagtgatctgtgttgtaagaattgtattgaacttgatactccaattgacaaacaaaacaaaagtagtctagaataaatttcaagaatttaagggtttcttcattataacttcaagataatataaagaaggaacaacatctcgaaatcttcactcccaagtaaccgaaatcatcgaattagcgatcccagattgatcaaacgtggccttagctccataatccagagtcttggaagcaccaggaatcgcctgcacaagcttgaacgcctttttctcggattcctccatgtgagaataacagaaagaccagagaagctgaatcggttcgctcttgagaaacttcctctgctttcttctcccatctggaaatcgaacacaaatactgcacacaacgcttctatcacagtctgctttaggctcttctgtcaaaaccggaaactcaagcaggtcgcatgacaaacaagtttcctcctcatgttcggataaagtcattatgtcttcaaattctggcccccaagaaggagccacaacgcgatcagacgtaaaagtctcctcctttccagatttgattacagtcttgtcttcttcaatagcgtttccccagaaagtagccatgtcttgatcatcagcgtggttgcttgaacaggagatcttctctgttttcatacgtttgttgcttgtcagagatgcaacgtgttcgtgaggaccagaatccatgtacttcatcaaatcctcgagaaagccctgaggttcaatcataccgctccacatacgcatcttctggccagtgatgggatcgatgagaagcaccacaggaggaacagagtcgatcttgtagaaagtagatattttctgaccttcgctggtatcatcatagacctgcaacaagatgaagctggacttgatggcctgaaaaacagcgtcgtgtggccataaatctcggttaagtaagtgagaagcaaactgggtcgtggactggaggttaacaagcaaccatagatcctctctagaggaagttgctttcgcatcttcaaacgaaccgtggaaaaacagacttggaggaggacggtacaaagaagacaacctagaatcggattcctcagatgtcgactcgtcgtcccagatctcttcaggacatactgcgaccgaagtgttgtgagacatggaaggatcgtagtcgtagagagtatccttcttcgaaggtaaaggaagagggactagttcttctttatggtgatgatgagggtttctccgagcgatgagaaagaggttgatcgcatcttcaaggttccaggttgttgcctcaaggaactgtgttgcgatttccacagtttggttaacggtgatatcgaggaaagatgagatcagttttctctgttggtgagtcctcgttgcagtctccattgtttcctgttttgtgtgagagagcgagagaaacaaggaatttgtgggaaccctaaattacgaatggaagtgtttgtgtt

SEQ ID NO: 1728 - DNA, 1450 bp, Arabidopsis thaliana landsberg
taaattaattcggtcaatttgccaatccaattaaaccggtcatcaagggctcagtcactctcgttggctccattgtcagtcagagttagttaggtttgtagatcgaggaagaacaaaatcaggcgaaactaaaatgttggctagggtttgtagatctgaatcatcttctgttgctgcttctgctagattgatcagcacgagatggattcatcttcgcgtcgccgagaaaggtacaatgagaaagcgactaccttctttaccagtccattgcagtggtcgcaaaggagcttttgaaggagagaatttgaaactgaaaagtggatttcattatatcaaaagcttagataatgcgatgaaatgttcgatgaaatggttagatctcgtcccttctatccggcaattgatttctgtaaactaattggtgtcatcgtgagaatggagcgtcccgatgttgcgatttctctctatcagaagatggaattgcgggggattccacttgatatctacagcttcactattctgatgaaatgtttctgcagctgtcataaattggttttcagcccaacgttgttacgtttaacaccctaatccacgggttatgtctggaaggtaggatttctgaggccgtagctttctttgattatatggttgaaactggatgtagacccgatgtcgttacgtttaccacactgatgaacggtctttgttgtgagggtcgagttctccaagcgctagctcttgttgatcgtatggtagaagaaggtcatcaaccttacggaacaattataaatggattgtgtaagatgggtgacactgagtctgccttgaatctgcttagtaagatggaagaaacccacatcaaagcccatgttgtcatctataatgccatcatcgatcgcctttgcaaagacggacatcatatccatgctcaaaaccttttcactgaaatgcatgacaaaggaattttccccgatgttattacctacagcggtatgatagactctttttgtcgctctggtagatggagtgatgcggagcaattgctgcgtgatatgatcgaaaggcaaatcaatcctgatgttgtaactttcagtgcattgatcaatgcattagtcaaagaaggaaaggtctccgaggctgaagaaatatacggtgacatgcttcgtagaggtatatttcctaccacaatcacatataactcaatgatcgatggattttgcaagcaggatcgtctaaatgatgcgaagcgcatgttagattcgatggctagcaagagctgctctccggatgtagtcacttttagcaccctcatcaatggctattgtaaggctaaaagggttgacaatggaatggagattttctgtcagatgcatcgaagagaaattgttgctaatacagttacttacactactttgattcatgggttttgtcaagtgggggatttcgatgc

SEQ ID NO: 1729 - DNA, 1317 bp, Arabidopsis thaliana landsberg
gttgcggattttggtttgatgcagcgtttgcagatagagaaatctgttttaggaatgttagatgacataggtttgggaaccatctcttgtaggcagtacgatttgtatcctgagctggttaaacaattcatgacttctgttagggtttcttatgtgaatgacaggaaacacaacgctcaggaaggagctcttatcttcttcattcgcggtgtcagataccgtttaccactgcgagatttgtgtgacatctatgggtttgacaatgatatcactggagttttcctgcctggtcagtttaaggacgctgtacacttagggattcgtcaccctgttctacgatatttggttaggctgattagtagcacactgttgtgcaagatggagcctagcaagatgagactttctaagttgttattgctctatcacgctcttcatgacttctttccagccggccttggatttgagcaggttgaccgtaatgtcaacttggtgctgtgttcgctcataacttggtttttctcaagaccaagccctttataggtagaggacagaaatctgagagagttagcagtcttctcactcccatattcgagcattttcgcatcagctttgagggcgaagaagtcaacaccacgcgtgtcactatggatgagacttacctgaagaactctcactggcataaaggcaacttactatggtgcttcagagatgatagaggtcagcacatgattcagttacctcgccctgcacatacaaagattacaggagagcatgaggagataggctttcatcccgatccttctcttctgcatgccgcaccacgcaccaggcgacagagaggttcagcttcaagatctgcgcctacacagaccgaggacgagttcattgaccctggtgggggtccgagagttggatcttcctcgtctgctcttccatatcaggtgccttctcctccaccaatcccgatggagccacacgtatttccgcagtacgtcgttgacagtttcaagagcgtctggaacgccatagctacactcactcatcatcgtcgtcgctctcccgcacccacctccagctcagaacatgaggactagccatcctccttatcttgctttgtttttgctttatttcagactattggttatttgttttgaaacttgttgcacttattttcctatgctttgttggaactatggatgtgtgttttagtgatttaacagtctaactggaggatccatgtgaaaacactaaccaaggctctacaacaatgagcagaattcacaaagctaaacgaaacgaccagagtgtcgatcgaca

SEQ ID NO: 1730 - DNA, 794 bp, Arabidopsis thaliana landsberg
cgtctcgatcacataaccccgtcaatccccatcgatcgagaaaaccatggaaccttatccctgaaaccaagaaccaaggagccccgaaatgcagcaaaccttagacattattcagagtcaattgggtcatatgattgaacacaacaacaaattcaagaaagccagcgagagaatcaccatccgcaaagttcctgaagctcgtgatgatgatgagagacttaggaattcgcgtgtttaaaggagaacataacacggtcgcggcagacaagtggctacgagaccttgagacgaattttgagatttctcgatgtcctgacaatttcaagagacagatcgcggttaacttcttggacaaggatgcacgaatttagaagagaattcaaaaagaagtactttccaccggaggcccgtgatcgattggagcagcaattcatgaacttagcacaagagacaaggagtgtctaagcatacgaacaagctttcacgcgactaaggaggtacttatacaacggacaagatgatgaagcattgatggttcgcaggttcttgagaggactcaggctagagatatggggacgactacaagcggtcaaatatgacagtgtcaatgagctaaccgaatgggcagttaatgtggaggagggtattgagatggagaagagtgtaaccaacaaggaaaatgattgatcgggagggaggaagactaataacgcggaggccaaaaacaacgctcctaaattcacaccaaatcaggagagagacaatgatcgaggaagagcaagagcgaacttcac

SEQ ID NO: 1731 - DNA, 497 bp, Arabidopsis thaliana landsberg
tgacaagactaatatcgaatgaacacactctttataaaaaactaatcttttataacatataaattcttggtcaatgggcccttgagcatacacactcaaatccaaccaaatcaaaatcattaagttttgcaaaaagcaacaaactctataccggtttccctacgtcttgagtatttctctaatggttcccactatggtttccttcaaaaaaaagtggagtcataagtaatctaagattacttagtgagctcggtctacctacaacaaattttagttccccatccaataatcacacgcaacagagaatagcaacgaaaggtagcttaccgaagcatctaccaagaacatgcacatgcaattaagactccacttttattaagttttttaaaatagggcccaatatacttgtcttaacccacaccaaacacacactcccgagatctctcgctttacaaccacaaaggcatgtaaccagagcatcccttccaaatgctaca

SEQ ID NO: 1732 - DNA, 850 bp, Arabidopsis thaliana landsberg
gatgatccaaccatatccatttcctttaggcatgtttttgactgtactcaataaaatttaaacacagggcttaggacaaattacacatcacgtgacatattgtcatccaaaaattaaaatacttaccgcaactccttcccacagcttatgtaacttgctattcggcattttgagcgtcacaaggttttcaggacgaaaattagaaggcatacatctcataggaaaattgggccaacacaatagtttgagtctagggggcaaatagtccaaactttcgggtaagtacaatctacctgcttttccaaagttcttcgaatcaatttctaagaaacggagattacgcatccctttgaaagcactctcatgtacatacaactcatcaatttcacctgtatttaaagatatacctaaaaccttttgagtaccctgaaaaaaatatgatattaatgagaaagagacaaaaccatacaattcatcatttatcggatgacattctcttaacctcacatactgtgttatgaaattaaggaccacatattaaaagagaacttacaatgccttcactgagtacatcagaaatatcatttggatccaccagaaattctcgtttcccaggcttgtcaatggactgtgtgcgaacaatttttctgcccatttcttgtagcatacggtgcatctccacacaaccccgtctgacatgaatgatggacttatccactaggtttttcaacccaatattaatacccaagtctgtgagcaacgacgtgatggatgtgccttccatatgattgaaaaaacatgcgatataacgaaatatcgctttatcctcttcgctacctagaccatcata

SEQ ID NO: 1733 - DNA, 1516 bp, Arabidopsis thaliana landsberg
  unsure (1)..(1516): unsure at all n locations
tactataccattttttatgtacaaattcttcctgcatttctatatactctattatacttttactatgcacatttctcttgtacttttgtactcgagagtggtagcccacaaatatataaatacatgagtgtgtgaatccgacatccacattttggcgccgtctgtggggacctgaagttctcaagcgtttcagaagtttcaagacataaacaagccatattgccgatcaaaccattatcgacgcccttaagatgctagctgacttcgtaactaccatctcgggaagttcgatgacttggagaagttattagttgattgcaagcagcccaggtaacatttactaaaaactaaatcttgtttctactcgtgtggaatttatgattgcaggaacaagacagaaaatccagtgaggattacttagttctcccaattctcgttctcgcataactctcgtagccaacgagacaccgatagctgaagactaggaaaaaattggagctcaatcccagcacgagatccctagttagctcgatcaaggagtcatccgagatgaggaagagctcaagcgaggtggagaagaccatatccctttgacacataaagcagactatgagagagtccaccatgacctaagggaattaaatcaaaactccaccaaaccaccaggtcggctaaaaacattgatatgagaatcacttagaggcattcaacatatagagcacgaagttgttgcatcaaaggaaggagattcacttttggatatttccaaaaaactcggcaacgacaaatttgacgatgcatatctatctacctctttgcaagacattttcccgctgatttctggataccataataacattcaacatatgctcatgatgccccaagagtcagctttccaaggagccggacttttccttaaacgaaattgtctatgaagagttataatcagatctctgcaagagtcacaacatctccgaactcttaaaacgcagatacaagctgctacatggcgaggtagtttcccgatgactctcgacgaacctcgtgacgattaacatatcaacgcgttgccccaagagtaaatttttcaaggagcccacccttgctttggaaagaattgcccgtcaagagatatcgtcaaagctctgaaacagatggaacctcgtgaaggataaactaccagcgcgttgccccaagagtcaacttcctaactagcacgactttgcatcaaacgaagttgtctgttgataattatcgtcaaatctttgcaccatgtgcaatccgtacgaaatttaaaaaacacaggtccacacttttcaaacaagcccacttcgggaagggtttcccggcgaactacatggaaccacaagtctatttacatattagcggaaagccccaagacttatctttccgacgaaaccaagcttgcctctgattatacgtctgcgtggnggttcttgttttgtaattaacgtcaattctttttggtgaaatctaagtgatgagttcgcttttg

SEQ ID NO: 1734 - DNA, 1229 bp, Arabidopsis thaliana landsberg
acacataaactatgaaaaaatgtcacttctaatatttattctctaaactaagtaagatgtgtgttgattagttcttgactattcatcgtttcatctgataacaaccaaactcaagaaacctggaagttgaacggagtagcagcacaaacaacaagttcatatgtaaatgcgcacacagctggatataagacttaaaaaaagaggagataagaacacacctgagtcaattatcatatcacttcctagaatagacaaagctttggcaattgaagactctttcaaagggacagttttccccaaggccgtcctgaacattggcatagtttcagctgtatccacttgtctcgtttggggaattgagcaatttgtgttctgcaaatctaaaagtgtagccaagaacatggaacattcaaaagattttcaggaacacatattcaccaacattaagtaacaattcaagcgaattcagaaacaaatgactagtcaagggaattcaatactgtcacataaaatacctgaataagcaacattctctgctaaaatggatttggctttagcaatcgaagactctttaagaactacagacttccccagcccagtcctgaacattgggatttccccaggcatcgattcttcccgttctataagcttcgagcatccttgaagcatcaaataataattcaatctcctttgagtcacatgacaaacacgattcgacaaaaaaaggaagaaacgaagaatcaccttggagcaagagatcggccatagaaggtagaggagctgtcgattcgagcgccttggttggcgtagaatccgagacggactgaagaatccggccagcgacttcccaccggaaaccatcgccgctggaatcgggaaataattgccacgtcgacatttattcagttctagggtttcgaatttttccgactcgtcgttctctgattcagccggagaactaaacctcgcgattcagaattgcctaccacaccaagagtcgggagtgcggaaattttatttttatattttctgttttctttccccccaaaaccatcaccaaaaatctaaaaagttaaaagacggcgggaaagttgaaaacgatttgggccgaaattaactttgggcttggttttaacgacataacgtctcaagacaagtgagttaatgccacggccttttattgaggtaaaaaaggcacgaatgctaaccgaaaatcgttccaaacaaca

SEQ ID NO: 1735 - DNA, 446 bp, Arabidopsis thaliana landsberg
catggtcattatgctagtgagtgttaaacaagaggatcatgataatcagaggatgagcaactagaagagagttcatttacagaagactatgaagcaccatcaaaaggagagctattggttacaatgaaagctttgagtgtgatagccaaaacggatgaacaagagcagcgagagaacctgtttcattcaagatgtatggtcaatgacaaggtctgtagcttgatcatagatggcggaagttgcaccaacgttgctagtgaaaccatggtggagaagcttggtctaaaggttatgaagcatccaaggccatacaagttgcaatggttgaatgaggatggagagatgagcgtggacagacaagtgaaggtaccattatctattggcaagtatgaggacgaaattttgtgtgacatactgcctatggaagctagtcacatactacttgg

SEQ ID NO: 1736 - DNA, 648 bp, Arabidopsis thaliana landsberg
  unsure (1)..(648): unsure at all n locations
agcttcagaagaaaagctgagatagctcgagggaagagagcaatgacagagaggtatgagcttatagatgaggatcaggaagacgagtacatgcctgagcatactcactgagccaccaaacttctgcacaaacctaatgtatagcctgctgaggaatatatcagggctcttcaaaacttagagttttgtagcacgagttatccatgcttgaccacacttgcacaacttggattgttnnnnnnnnnnnnnnnnnnnnnnnagagttgtcatcttgacactttgatggcgtatccatatgtagcgtatgaagaagagacaattcagtacctctccacactgcaagtggagctttaccaaggtatgacctctaatgagttgaattgcgaaggattgggattcttgcgattctctatgtatggtcaaaggcactctcagccaaactaagaacaacttgtctctccaaggtgaaatcaatgacacacctctctctatacttcttctgatccatctgtgtggatacaagagctaggctatcagcaataaccacaagagagcatgaggcgctctgtgcataggtggtgttgtgatccgattctgataattgtagagtccaatcacatctgatggctcgagcatgggaatggatac

SEQ ID NO: 1737 - DNA, 542 bp, Arabidopsis thaliana landsberg
ttctttggttacttgtgtgctaactcgattccttatattcttctttgattccgtctttacgtttttgttactatgcatacatctatgcatcatatttgcttgtacacattcataatttcttctcacttgcatccttggttcattttctgatcctttcgcttacttattttctgctttcattccttacttgattactttcttcttttattttttcttccttgcttagttaccagcttcttcgtttgtttgtttcctttcttgcttccttgactcttttgcttacttgcttgcctttgtattttctcccttatttctttggttaattggcttccttgtttcattgcttacatgcttgatttctttcatactgtcttttttttttacttaaattctttggttaactttctttccctgatactgtactgtctttctttcttaactactgaacttgttttaaaatttcttactttctaaccttatcgcttgccattttctgactaattatctcagtttattttccactaaaatgtgccctttgcttt

SEQ ID NO: 1738 - DNA, 569 bp, Arabidopsis thaliana landsberg
  unsure (1)..(569): unsure at all n locations
accgaattcttgtcactttcccatctctttctgcttgatttagaatatgcaccaaagcttccgtacacataacaaattnnnnnnnnnnnnnnnnnnnnnnnnnncttatacctctttcaggaaacagtttaccaaaagcttgaccatttatcaaaacagaataagagactgaagtcacacaatattccttgtaaggtcattcaaccctatcagatgccttggacatgtctgttttgaaagctaaaaactctttggaaatcttatcattagttctcaaattatgaactatctcatgagcaatgagtatgttgtcagaagctaacctctcagcgacaaaggcagattgggttggggagactaactctggtaaatgcttcttcagacgagcagatagtatttttgacactatcttgtataaaaccgaacacaagctgatcggtctaatgtttgccattcttcttggggttgaaatatttggaatcaaacataaatgggtgtgattccattgatcccgcatgattcccgtttgaaagaaacccaagatgtcctcaattatttgcttctttact

SEQ ID NO: 1739 - DNA, 1088 bp, Arabidopsis thaliana landsberg
cttacgttggggactgggagcgaagagagaagagatgtgacgtcattatctccatgtttgacaactttctggtggcgatccaccgtgtattatgataagaatttctccttcgcttgacacatgtagtcctcgtattgctgttgacaccttttcgggcgccaatcactataacgagaaccggcggcggtgtcctgtgcacaggcgcggacggtccgcggccaggggccagacggtctgcgacctgacacaaggctcgagttccctgcctgacgagccggacggtccgcgcctacaggccggacggtccgcgcgtacacaggggcaacaaaggtcgttgatggcgcctgaatctcactcccgggaggaaccccgtcggggaggagagatcctaggtgttgtctatgctaggcaagccgacctagactcctctaatcgacgtagagtcgaggagaggcggagaatttggggatcgagtggctaaacctaaactagactagaactactcctaggataaaatgcgagtaaaagttgtattgattcgattgttgatgattacaaatcggccgtatacctctctatttatagaggaggggggctggaccctttacaaactaatttccgagcttatcccatgattttagctaacaaccgtagcacaaaactcggaaccctaatctgttctgcgcacggcggaccgtccggcccacaggcgcggaccgtccggaccgcggaccgtccggcctcagggcgacgcgtccgcgctccaattttggttcgaacatatgcccccctgccttttggtggagcttggcgaaccaaaagcatcagcgaaaacttcggaaacaattgacctcatgagcttttgttcccgaagtaaggactcagctcgatgcaagtcatcggctcttgcgatcagataatataaatacttgatggaactttaatgcacagaggccgtttcggatcgcatcctcttcggccatgtctacctgatcaacctgtcaataggcaaaaacttgtggtgccccccagcctaaataagcaaacggattgggccagtaatacgaattcatcgccgtaccacccca

SEQ ID NO: 1740 - DNA, 574 bp, Arabidopsis thaliana landsberg
tacatttcttcttgtgttcttatttctgaaaacaaaacaaacctaaatcgagagctgtaaacgaattcactttgcaaacttcatcaacaccttatgaaagaaaagtaaatcatatttggtgcactaaagataaaatcgcaccttgctcagttaaggaagcagcttcccttccattccattgtatggctgccttgtcacaagcccaaattccataagaatctgagaaattagtcttgaaaccttcctactagatcaattattcaggataaaagacttcatcaaaatgtaatatacaaatcacgaagagcatacagcttatactcagataacaatcttatcaagatagatacaaatgtctcatagccatcagaaatctctagatatcacaaacggatcttcctgctaatggttctagcagaaactttttcacattaacgaaaaataaccgaacaaactaatgaattcaataagttaaaagcttttaatagagtggcacatcagaaatcagctcacagttgtaaaaccagtaagttaaaagcttttctctgtctctgtgcctctattatttaggaca

SEQ ID NO: 1741 - DNA, 3202 bp, Arabidopsis thaliana landsberg
atttggcaccagtagaaccaatatattgggtcatttaagtcgtgatgataatatttctctcgacagcatctactctgaaattattgcagaagaacgacatctaacaattacgaggagcaaagaagagcgtgttgatgctgtcggcttcgctgttcaaactggagttaatgcaattgcttcggtgactcgagtcaataatatgggtccatgtactcattgtgggagatcaaatcacagtgctgatacatgctttaagctacatggtgttcctgaatggtacactgaaaaatacggtgatactagctcaggccgtggtcgcgggcgcagcagcacaccacgtggcagaggaaggggacgtggaaactcatacaaagccaacaatgctcaaacttctcatacgtcatcctctgcttcagaattttctgacattccatgcgttagcaaagaggcatggtctgctatcagaaatctgctaaaacaagacacagctacttcatcagaaaaactctctggtaagacaaattgtgtcgattttctaattgattcaggcgcctcacatcacatgactggttttctggatttgctcactgagatttacgaaatccctcatagtgttgttgtgctacctaacgctaaacatactattgctaccaaaaaaggcaccctaatactcggtgcaaatatgaaacttacacatgttttatttgtacctgatctctcctgcacactcatctctctggctcgtcttctgcgtgagttgcattgcttcgcaacattcactgataaagtttgcgtgatacaggaccgtacttccaagatgctgattggggttgggacagagagtaatggagtctatcatttacaaagagctgaagtcgttgcaacaagtgctaatgtggtgaagaggaaaaccaataaagctttgtggcatatgcgactaggccatccatcttcgaaagttttatcttctgttttgccatctttagaggattttgatagttgtagttctgatttaaagacgatttgtgacgtttgtgttcgagccaaacaaactcgtgcaagtttttctgaaagtttcaataaagccgaagagtgtttttctttgattcactgtgatgtttggggaccatacaaacatgcttcctcttgcggagctcattactttctaactattgttgatgatcactctagagcggtttggatacatctcatgcttgctaagagtgaggttgcctctctccttcaacagttcattgcaatggcgtcccgacaattcaacaaacaagttaaatcatattttgctgaacgaggaattgttcatcaaatctcttgtgtctatacacctcagcaaaatggacgtgtcgagcgtaagcatagacacatcttgaatgtagcacgttcactcttatttcaagcagaacttcccattagcttctggggagaaagtgttcttacagccgcctacctcataaatcgaactcctactccaattctagatggcaaaaccccatacgagattctctactcacaaccaccgtcttatgcttcacttcgtgtctttggcagcctctgttttgcaagaaaacacactggtcgtttggataaatttcaagagagaggacaaaaatgcatattcgttggctatccccatggacaaaaaggttggcgtatttatgatattgaatcacaaattttttttgtctctcgcgatgtggtctttcaggaagatattttcccatttgctgacaaaaagaataaagatacattctcttcacctgctgccgtcattccatctccaattttgccatatgatgatgaattcctcgacatataccaaattggtgacgttcccgctacgaatcctctcccggctattattgatgtcaacgactcacctccaagctctcctataattactgtaacaccggctgctgcatcacctcctcctcttcgccgcggtttacgtcaaagacaagaaaatgtgcgcctaaaagactatcaaacttattcggctcaaggtgagtcaactcaaactctgtccgacaacattggtacgtgtatttaccccatggccaactatgtatcgtgtgaaatattctctccaagtaatcaacacttcttagctgccattagtatggttgatcctcctcagacttataatcaagccattcgagagaaagaatggcgtaatgcagttttttttgaagtcgatgctcttgaagatcaaggaacttgggatattaccaaacttccgcaaagagttaaagctattggatcaaagtgggtatttcgtatcaagtataactctgatggtaccgtcgaacgttacaaagcgcgtcttgtggctttaggcaatcatcaaaaggaaggtattgatttcacagagacatttgctccagttgtcaaaatgcaaacagtgagacttttattggatgttgcggcagcaaaggactgggaacttcatcaaatggacgttcataacgcttttcttcatggtgatttaaaagaagacatctatatgaaatcacctccgggttttaaaacaacagatccatctcttgtatgcaagctcaagaaatctatctatggtttgaaacaagcgcctcgttgctggttcgaaaagttgtctacatctctactcaagtttggttttacttagtctaagaaagattattctcttttcacatcaattcggggatccaaagttcttcatgtcattgtctacgtcgatgatgtagtcatttgcggaaaggctgtccgggaaaataatacctcaaaactcgctctcgggtagtcaccctaaaagcgtgctctctgatcgtcacccgaagtcaccgtacccctcgcactctaaagacaaaaagtccctcgagttaccggtaccttaggagcataccccgctcgtcacgagtcgttgggaccctcatgtccctcgagcaaacaatactaaacgcttccgagcatatctccagactctctcatggatttgcgtaagacacctctatatctcaccatccatcatatcccctcgaggatatctttaggaccaactcccggccgtctcgtaaacacacctctcttttaggttgtttactcaaactttttaaaaatagacaagtcctttctgggaactttccatttttagaaaccgcataacacattcttaaataagacaactccatgtcaaatccaccgaaaaaaa

SEQ ID NO: 1742 - DNA, 578 bp, Arabidopsis thaliana landsberg
  unsure (1)..(578): unsure at all n locations
cgtaaacttctctctccatcacatcttactctttcgttattcggaacagattgacaaaatgagtacatcatccaaatgtctacactctatcacacaacctatcaacacacaggttaaatttttcattattttaaacaatgtagtgttcattcattccacaaagtatatgtaacttctctaacattccggaaccaattctcgcactaattgttagccacgtttcagaagaaggaattgaggctctgaaaaactggattaaatctggtcatnnnnnnnnnnnnnnnnnnnnnnctgtcgagacactatcccgagttcgtttagataaaagccctgacttcatcaacatgtctttgcccgactctgttcacttctcattctactcaaaatgtcttgcaaaacgaaacccttatgctatgtatctccagagcttgaggctaggtttctgttctctcgacctgataggcgccatttcattattgaatgattgaaaagatgtcattcctatagccaaacttctttacattgctctaaaccgctgcgcaggtaatgaagtattagacgctttttatactttcaaa

SEQ ID NO: 1743 - DNA, 3533 bp, Arabidopsis thaliana landsberg
aaccaagagaacttccctggacaaactcgtcttaaacgacctcaatccgactcgatagccaccatctccttcgtccagctagatgcctagccgccagtttgtcgaattgcagcaagctcgtcgcctagcggtcaactcatcgcctaaaagctagctcgtcgcttagctgatagatcgtcgcctagtagccagcttgttgtccaactgatcgttcgtcgcctagcagccaactcgtcacttaccagccagctcgtcgcctaactgatagctcgtcgtctagctgcctagttcgcctaaccgccagctcatctcaaaacggcgtaactgctgagcttcaacgtcatgagaatcctgtccacctcacagttatatcatcaataagactatgtggtcgtcgactatcacctcatcaatctgacagttccgtcttatcaatccgaaagttctctatcataaactattagctcgtcaatccgatatacctgctcgcaacgctgatctcgtcaatttgacatttcttttcgtttatccatccgttcctgctcgtcaaacgcttgccaatttgaaagccgtcaacccgagaattcctgctctcaactgtcagctcatcaatcctacagttcctgcttgtcgactgttaaattgtcaacccgacagttattgctcgtcaactgacaacacctcgtccaacttccacatcgagctcgtcttcaagcttctcaactcgtccttaagtctcttagctcgtctccaagctcttcacatctcctgagaaactatctcctcgcatacatgtcgggtcatcccttgactccacagctcgtccatctcctcgtttaaatgtcggctcgtcccttgactctatagctcatctaactcgtcgtgtagctgtcgattcgtcgcttaactgcacaactcgtccaacttgtctagctcgccgacccgatgaagaagcaatgccaactttagaagaagtcatgccgaccaagtgaataaaattgccgaccaggtgaaggaaaccacaccaatcaggtgcaggaggccttgccgactcgaccaactagtcgacccgacgacttgaagttgctctgaccttgggaagtaatagcgtaaaacctgtcaaaaggtctcaaggaccagagaagaagtcttgtcgacaaggcacaaaacacaaaaatctctgaagtaccaaactcattggagcaacgacaataggcaatatcgcatggccaaacctctcaaaagaaagagggaaaaagttagccaattttcctaagaaagtatctccacaacacaaatctcctaacactcgccaacacgtagctccttaatcttacgaccaacctctgtctcatgttcactatgtgcacccttgccccagttattcacaaccaaatcgtcaaacccgttccccaccatgagacgacccagtccgccatactcgctaaactctccctcacggtcgctaagatccaatccattgagattcgcattaaatccgcgataactgaaggtggaacgaatctctcaacctcgctagaccgcacatcatcttcgccgagctcgtcaccatgcatttgagcttcaccaaactcttcacatctcatgactagctccaaagattcgccaagctcgcgaggcaacccatcagtctcgccgagctccacttcgcgctcctcaagctcgcctctcaaatgaatcttgcaactcgtcgagcatctcccacaccgagctccacacttaacggacaagccttgtgttggtttcttgaacccgactttcgcgatggcggatactctcagccctacaaatgcgcacatcagacgctttaaaaaaaaaaaacgctcgcctactgagctcatttgctatatagacaacgattgatttaatcccttctacctgacacatatgcaacttcatatgaacgatattctaacacacacacatgttactactctaagtctaacctttacaagtaacacttgtcattcccacatcgtctccttggccaggagtttgattctaaaacgcgttcccacatggatgcagtggtgcttgtcggacaggtctaaaaaacctgtttccgacaaaataatccacatctttacctaagtaagctaaaacttacacttaatgattaaagccgacccagattcgcaccgaataagctgataggcggccaaaaaatagtaagccaagtccgctcgcacgttctagctgacctggacgcgtccacagggtaaactggacaccaacaccgcacctacaaagtacgacgagtcagtctcgcatacttcatacgtaagccttgtgattcgagttcaacgtatacatgataagtcaagggacgctgttgaaccaaggattcacacaatagatttgtttaaaaggggaaaacaaatctagtaatttttcttcactaggtattctatccaagactcgattacaaaggaggttataatgtcttatgaaatacattagggttttgctccaaaacaaagaaagaattagggtttttagaaggtatagctgcatccatgatggacttcctacgtaccctgtgaagggatcaagccattcgtagttctcaccaggggtataaagttatgtgtcttttgtgagtatcaaattgtatcctttgagaagttcttgaggcgctttatatagggtccttaaaccgcctctctagcgatattctcggaatatttccatttatcgttaagtctgttctagaggataatcgtcctaaggatattttccttattcttcggatgctttggaaatatttcctaattcgacattatcttcaaagattctcctgtatcatttccgaaagtcccataaaagatcctattttaccggaaatgatcctttgagaatgaatggtttttacaagtctttgcctcaggtgttcttcacggctgggtggtcgtttgagagatggcgtcggggcaaacggtatgtagcggctcggggcgcgcttgatgactgtccattaagctcaattggctgtctcccgaggcgatatagatgtttttcgcagcgttctcacgattggctcggactgtgtttataggattaacacccgagccattttacaaactctctccgagacggttgattgaataaagtcccgaggtgctttcttctaggctagaggccaatcatatgtttaaccatgaggtgattgttactcttagactgtttggctcggtcttgcttgtgggggaattcgaccacaacacattctctcatacattttcatcacatataatgatatctaacgtttctcctgatgcatccatggtttgcctccacagatgaagaatcttgactcggacacgcctattcgttttgaaaggcttgacatcactaagatacgttaaacctaacggtaaagtcattgattatgtgtatagatgagaaagaaaagtgatgctttagaattgatgatattgcttgagtatttatacggttaggacttggttcttaaaccctagagcaacaccggattttttgatacatgaaatcat

SEQ ID NO: 1744 - DNA, 3732 bp, Arabidopsis thaliana landsberg
  unsure (1)..(3732): unsure at all n locations
cgttggtccaccggaaattggaccggagaagccttcgtcggcgttccggaaatgaccattccttacatctacaggttccatttcgttaacccttacactcccacggcgtcgttttggtacatcgtcccaccgttggactccgtttccgagccacggctgacgcggttcatggtcggcgccaacggccagctgaagcagtacacttgggatccacagacgcagagctggaacatgttctggttgcagccggagaatccgtgccgcgtttacaatctctgtggtcaattagggttttgcagcagcgaattgctcaagccctgtgcctgtatccgtggtttccggcctaggaacgacgccgcgtggagatctgatgattacagcgacggatgccgccgtgaaaacggtgattccggcgaaaagagtgatacttttgaagccgttggtgatctacgctacgatggtgatgtgaagatgtcacggttacaggtaagcaagagctcttgcgccaaaacttgcttaggaaactcttcttgtgttggtttttatcataaggagaagtctaatctctgcaaaattttactcgagtcgccgaataatctgaagaattcgagctcgtggactggagttagtgaagatgtattgtatatcagagaaccaaagaaagggaattcaaagggaaacatctctaagtctataattatattgtgcagcgttgttgggtcaatctcagttcttgggtttacattgttagtgccattgattctgttgaagaggagtcgaaagaggaagaagactaggaaacaagacgaagatgggtttgctgtgttgaatcttaaggtattttctttcaaggagcttcaatcagctaccaatgggttctcggataaggtcggacacggcggttttggggcggtgtttaagggaacattaccgggttcttctacattcgtggctgtgaaacgcttagaaagacctggaagcggggagagtgagttccgggcagaggtatgcaccattgggaacattcaacatgtcaatctcgttaggcttagaggtttctgttcagagaatcttcataggcttcttgtctatgattacatgccacaaggatccttgagttcctatctgtctagaacaagccccaaattgctaagctgggagacccgtttcaggatcgcgttaggtactgccaaagggatcgcgtacttgcatgaaggatgcagggactgtattatacactgtgatatcaaaccggagaacattcttttggacagtgattacaacgccaaagtgtctgattttggcttggctaagctccttggacgtgacttcagcagagttctagccacgatgagagggacatggggctacgtggctcccgaatggatatctggtttgcccatcacgacaaaagctgatgtgtatagctttggaatgacattgctcgagctgatcggtggtagaagaaatgtcattgttaatagcgatacactgggagagaaagagacagaaccagagaaatggtatttagagaatgtcttttacttggaatcaattgtaagagagaaaaaaacatatacattgaatcaatgaatcccttttcaggttctttccgccatgggcagcgcgtgagatcatacaaggcaatgtggactctgtggttgactctagactcaacggagaatataacactgaagaggtgacgaggatggcaacggtggcgatatggtgcatacaagacaatgaagagataaggccagcaatgggaacggtagtgaagatgcttgaaggagttgtggaggtgacggttcctccaccgcctaaattaatacaagctcttgtctccggcgattcataccgaggagtgagcggcacaagctgtagtgaaggccatggctgttcggatctcaatacaggtttgtctagccctggctcacggtcgtcttttggtagaccttctccttgatcaattttgtaaggtgatttggtcaaaaccagccttaaatgttataagtgttgctctctaagagggtttaattagtttaaactgtatttgttggttgtatgatatttgacttaatcgacattaacagttaaaaccatggattatgtctttcttcttagtttgaaagttcttgtcactttgataatcttctaatggctaatatgtaaattcttacagaatgtattgtatgagaatcattacgtgattgaatcaataaacccatgtcgatactttcaagttaactacacagaattagcatctttattataacaaagctcacacactctctctacacaaccacctttagcgtcttttttccacgaaaaggaactgattggcagaaattcaatatctgaaaccaatgttaccatactctcatttatgcctggttaatagccaacgtgtacaattcactggtccaaactgggttatggtattattaccttcaggctaagggacctcatagggaaggctcgaaccgacactagcaacgatggtgctgtgaaatggtggttgtgtgcttagattccaaatcaaaatcgagatggtgctgtgaatttaagatcaatggtgctgtgaagttaacagcaaactctcgccgcagcaacctttttagattccaaatcaaaatccaaaatttcaattaagggcatcacaaacatctatcatctaagcagatttagatcgaaagataacgaatttcacctgggaacagaaccttcgattcgagaagaagtgttgaagcgcggggaagtgaaattaggatttggtacagaaggtctagctcgatcatcatcccggtggttgaaacagtgtattttaggaacgatcctaaatggattgttctgtttttctttcaattgagctcattttaggttagaaacccatcatagaaatccacaaaaaacccttactagacttgctcttagcccctaaatatattttaatttctattaaaaaaaaaatttttactgtgatagttacaatgcttagattcaattataattcagattaagctacataaacctttttttaagacaaaaaaagaacgatgagagagaggcgatttaataggcgacttccttttctcctaccgtcgcgtctctttgtctcttcacgaagcgtttgtcgccggttaccggcggtttcttcagggatcaataactgcaattcggtttcaacttccatatctaacccaattgcaaatctatataaaccctgtgaatgtctttgtaatcctcgggttgatcagagtgaaaaaaaattatttcctttgttcatattgatcatggcggattacatccggcgacaagtgcaagagattgcactaggaatcgaagatgcgacaatcaatctccgtgttgaattgtgtgaaaaggcgatcaatgagactcgctttcgtctcatagtgaaaccggttaacccacggaaacaaaacttcagagcaatgttgagtgcattgccacgtctttagggggttagcgaagaagtgacaagccgaattccggagaataggaaaatccaattcctatttcaatctgatgaatcgatgtcctctgtcctctgtcctgcgaccttggtctttcaacgattggatgtgtgttctccacaaatggggctctgctgcnaaccgatgaggatctgaaacagatcccgttttgggttcagataaggggcattcccctcgttttctcatgcaccgatgggtacctacattggcgagaaca

SEQ ID NO: 1745 - DNA, 658 bp, Arabidopsis thaliana landsberg
aggcccaagcgctcaagcagcaaagctaggtgcacaaggttttcccttattccggtcattttcttttgaagaggtaaaggaagccacagacgatttcgattcatcacgtttcttagctttggaattatgcaggaaaatggctaaaacagagggcgatgtgtacaactttggattcatacttctggaatctctgataggaccagtacctactacaaaaaggagaggcctatcttctcaacgaaatggtatcatatagggtaaagaaaagaagcaaatcttcatcattgttaatagctgttgctgcaatgttgtatttgcagacgtcatttgggagccaagactgtcgacagaaaataggaagtccaacggtgctaacaacaagctcgcaggagtctttacccaattgccatctcaatcgccaataaatgtgttttgcttgaaccttctgcaagacttcctttaaagatgttctctggaacttaccatatgcagctcaaatgcagtctgccgcagacgctgaacgcaaatctgatacgtcgtcgtgaatccaaaggctaacctgatgattgatagttgttttcggatttataaatgttatgttttataagtttggtttttcagtagaaaaatgtaatactctagcggctaaaaaacatag

SEQ ID NO: 1746 - DNA, 1745 bp, Arabidopsis thaliana landsberg
taaatctcttacgacctattcttacaggctatccgacatattggtcttgatagtaagtgttttgattttcttaaaaaaacgatatatatatagtacatgatacactgtttgttttcttacaattcaggtcacctgcacactaactaatgttttatgtttgtttactaatcttccaaagaggcggtgccaaaaaagatcctatcgttcatgatcgtaccatacttgtcaagagagaacgtatccagccatttacaggtttgatatctcttgtcaaaaatgtttttggattttactgtttaaaatgggaaaaagttggaaaaacctctattaactcgaatcaaacaaataaactttatatcttattaagcacaaaaatcttccaagtttgagttgatttgtcgatttcaacctatccttagtcaacatcaagagctcgttataacaccctttaacttaaacttggggacttttttcctccactttaaatacatcataccatgcatagattatgtgtcattctacttgttatttaacttaaattcatttgctatgttatgcagaaatatcggatattcttgagaagagttgcggagcagggtttgtatagcatgttgtcggatagaggcatagactcgatgtttcgacaaactcacattaaggagccgtacttcaactattacacaccatctacttcttggtatgacacaagtcttaacaatagatcattctattccaaacccgtacatggctttggacagtctaaactcttgtccacaacacgtgagcccgtctgcttcaaccagatgccttacaactacatgaaccggtcatccacctatgagccgcaccgtattggatctggatcaaacttgacgctgcccatccagagcaacctcagtttcccaaaccaaccatctcaaaacgaagaaagaagaagctttttcgaaccacccgtgatggcaaacaaaatcgcccaaacatctcaagttcttgggtttggacaacttggaccgtcagctatcagtggtcataatttcaacaataacatgacgagtagatatggaagtttgattccgagccaaccgggacctagccacttctcctatgggatgcaatcgttcttaaacaatgagaacgtaacatataaccctcagccacctgccaatgcaactacacagccaaatcttgatgaacttcctcaactggagaatctcaacttatacaatgatttcggcaacactagtgagcttccttacaacataagtaactttcaattcgatgacaacaaggtatattttcccaaccctaatcttacaatgatatatatatgtatattgaagtaggtgctgtgagatatgtgtttaaataatcggtttgtgcagcatcaacaaggagaagcggatcccaccaaatttgagctcccagctgcaaaattttcgactgaactgaatcatgaagacgatggtgactggaccttcgtgaacataaaccaggtatttacaatttattaagagatcttagcaataacaaaaatcgaatttgagccaacgttctatcaaagattagattttatcaaattaatgttttataaaactatccaccatggaaattttctaactagacttgttagtattagacatttagtagatttgcaaagtttttcatgctgctagctagtcttgtaattagatagaaatcggcatctgttaatgtcttattgacttacatgacttggttgtaagggt

SEQ ID NO: 1747 - DNA, 364 bp, Arabidopsis thaliana landsberg
tctttgcaggcctttttttctccaagtccatacttgagaagcatgccgcactgagaatggtggccaatgggtttgccttgtcttgtccagctatatctggtgctgaaccatgtataggttcaaagagtccaggtccctagttttcatcacaagtttaacaatcaatatatgataataataaacagaggaaccttgaaatattagatttagtcttacttaccgattcaccaagacttgcagatggaagcatcccaatgctaccagtgatcattgaagcttcatcagacaatatatcaccaaaaatgttattggtgacgattgagtcaaactgcaataatgtttttaaaaatgccgtgagtactac

SEQ ID NO: 1748 - DNA, 539 bp, Arabidopsis thaliana landsberg
  unsure (1)..(539): unsure at all n locations
taaaatgttcaaccccaaactaacaaaaattaacttagtcgggaagagaagatacatcccaaacaaggaagaagaaatcccaaacgagggagccaattaaacctaaacctctgatgttactgatataatcctgtttttactgattttatctatgttttagatttaagattttgagtctttttgttatttctcgagtctctttagagtcttttcaagtattctatgcagtgggacaacaatggatatgaggagacattttggagcacgagctaaggacgatttcagttccagattcagtgagagtnnnnnnnnnnnnnnnnnnnnnnnnnnnnnnnnnnatgacgcttcaagtttacagaagtgaaaatttgctctagaagacttccctatttgcatcattgtttagacctatgttcctttttatcaagttttttcatccagttttctttgagagacataagctattcatcccttgttcttcagagattcattcagttttcaatactgtgaagagatcctttcatactctaatcttagtt

SEQ ID NO: 1749 - DNA, 1626 bp, Arabidopsis thaliana landsberg
aaaagtaaactgggcttctgctgattgtattgtttaatggtgtaggcaaactacctggcttttgtggaaccaggctccatagggaactgtggtcttaaagttgagatcctgagcaagttctcttacgagagttcttgaaccgccgaatggaactacagaatcttgatctccactacaatttcgacactacaattaagacatgaaaagaaggagataaagtagatctttaatagatgtattacctgaagatccaaataggagttttgttcagtataattctcttcagaatcggaagcatgtcgatgttcccatcgatatcagagtagtttaacacgctgtgacaggcaaagtgaacagccaaaagcaatcaatgtagagatatatgaactccagttataaatagcttctctaattttgtgatcaataaaaccgagagaaagtacgaaaatttacccgctgcacattgaccatgaataaggcagatgagtacggttcgcatgaagcgccttttgtacctctggaagattaaagtagaaccgtctttcataggtcatacacacatccactcccatgctcattttagtagcctgcagttgttttagtaaattgacgtatatttcaacaaaaactttgttggtggaacaaaagataaagaagggctgaccattttcttgagcctcagctcttgctggacgatagacggataacatacatcgaggagaacatcatagttgttgacatactcagtgataatgttttcagtttcactaatagcttcattgcaggccgtgcttacattatgggggctagcaaatgtgtaatcatcaaagtcacattggctcgtgattgtgagttttagttcatcagagatcatcccatgtgaccagaagaactcgtacgtagctggactgtctctgtcaagcttcagaagtggattcccaatctgatcagacaaaaaaaacagacaaaagaattcaaaagagaaacaaaagagttgatggaatgtcaataggaaggttcttttgcttacagcaacgcctttgatgttgaatttgaatccacttgagtgtgaattgtagctgagaatcgcatcagccagttgaggtatgtaatgtcctgtaaaatatatatatatatgagaatagtgatgatgttttaaggttaacattcaatacatttcatcgatatcgaagacacacctgcatagctttcgccagtaagaaagagatcccgagacttcaactttgggaacttctcaaaccatctcaacaagaacacaagcatatcgtttgctgtccaaaccacaaaacatatcaagaaacaacggtctgctaatattgtttgaaaaggggattataaaatttaccagtagacttatccccggtgttgtaatcagagcttttattagagtaagaccatcctactccagcaggtgactccacaaaaagcaggttcgacgctagacatattacaccaagagagaatagcatcatatataaaatcacagagttctgttctctttgcttaaaattgtcaaaaacaaacctttgttccaagacatggagttaacacgaaggccacggccatcgccagtggggtaaaatggacccaactcagtgaaagctc

SEQ ID NO: 1750 - DNA, 1144 bp, Arabidopsis thaliana landsberg
ctctcttcttgttttgcaaaaaacacatacaattgggatccctcacttactagtgtgattgaagccaaatactataagatttgtcaactgcgtatgaaagacatggtttgtaagtgagggaggttacgagagcaacctctttggattgagaacacattgtgggaagaaatgtgtaactattgggacacagaagaagccaaagcaaagattttaactacatcatctactcgaatgtctgaccgtaatggtcttggtcctcacaagcatgtatcgggcatgaagttgttcttacaaatcaaacaagaggtggtaagttcaaacactgtgaacatttgttttgtttacttatataatatccatcctaagaagttgatttgttttgtttacaacatttcaggaagttgacctactattggtgaagttttccttagaactcataccaaaaaagatgggacttttgtcgataggaaggcggaggaagttcatgagtcataaaagaagaacaaggcaactaagttggttgcccttgaaaatgatgaagggtatgaaggtacttcaggtaattggttaattctattttcttttgatattatcgctttgattaactgataaggactaatcttcttttcttttgtttatgaaatcaactgtcacaaacgatagaggagaatactatggaattggaagcttagagagctacatcagcaggaagcggaagtacccaggaaggagttcttctctcacaaccatgcaatcacagcttgagaaagtcaaccgcaagatagaggaacaagcaactctacaagcacagtgtgaggcagcggctttacgagttacatttgagcaagaagagatcaagctagttgcaaatgagaaacaagcagagatcaagcacttgaagatggtgaagagtacttgagtgaaactgacccaaagtttctcgccttcttcgagtttgctactgcttcagaatatcaagcagagtagtttcagtctactactgcttcaaaaaatcaagcagaggagttcccttagccttcctttcttatttgaaaaaaacttgaacttatttggtggtttggggtttattgcgaacatatgctgggttgaattaggattgggaacatgtctaaaacctttttat

SEQ ID NO: 1751 - DNA, 1259 bp, Arabidopsis thaliana landsberg
agctagtcccaaaaaactacggacctctgtagcattcttgggtctaggccactgagtgatagtcgtgatcttctctgggtcaactgccactctttcctctgaaacaatgtggccaaggaatccaatctgtttttgccaaaagctacacttcgacattttggcaaaaagcttctaatctcgcaatgtctacaagactattcttaagtgcttagcgtgctcttcttcacttttggaatagatcaaaatatcgtcgataaacacaatgacaaacttgtccaaaaactctcggaacactttattcataagcttcataaatcctgcaggggcatttgttaatccgaaagacataaccacaaattcataatgcccataacgtgtcctaaatgttgttttactgacatccttctccgcaacagcaatctgatgataacccgatgccaagtctcgtagcgcttcaattccattttaagaaaatttctcaacaactcaactccttctatcactacagggacgtctaaataggtccttgatgatcctattaattgtggtcctgcagtctcaactttccttcgcttctctgcaaagcttatcctggaatcccaattcctcgctaaagcggggctcacaaaacaatgtgtagctccactatcaaacattgtataggctgcaactcctccaatgaaaatcgatcctacatagatcattaactaagcaactcacacatagaaaaaagacacatgcaactacttacaacaaggagggaataatatcttaaaagctttcatgaaaaaaaactcaccagcgatcggttctgcaccatcttgaccttctagtgcatacactcgaggtcccactgcttgcctctttggtggtggtggcaaaattcccatgttctgaattccttgttgtcctcctccgaggtgcattgtgcaatcccgagcaaagtgacctcgatgaccacacctcctacagttgttaaatccctctgaacaattctgctggttatgtcctatctgtccacacttgtaacacttgcctgtattagcccaacaagctcccccatgcttcttaccgcaagtggtacacaatgaaaatcgtgtctgagctggtcctccttcacggttatcccaagtgcgcttctgagactccactccttttgttgtcttggcttgagtatttctcaagtgcttagcttccagaacaagtccactctttatccttgcagccttctcaaccaagtctatcatgctgaaaaattc

SEQ ID NO: 1752 - DNA, 592 bp, Arabidopsis thaliana landsberg
  unsure (1)..(592): unsure at all n locations
accattggaaagcgatttgggaacgtagtcaatgagaatgagatttcgttgcttagatggggaggcaaccgtacgcgcacaacaataaaatcgagcattggtgaagatatcacaaagcatggtagtaaggtaaggttttggctctgttatgatagttactgatggctgagttattaattttgatggctgagttattatttttgatggctgggttattgttaaatgatggctgtcttatatagtttagtcatgacttagtcgtggtttagtgatgggttttataatctcttatgttgtaactgcgtgtgcgtataatggttataaaggatgatgtaagcgagctgtttcatacttggccagataaaataaaagacccaacacttgatcacttggtcgaatacagacatgggaataagtttgttaaaggttattgggatgtgaagaggaatgagaagaaaaagaagaaaaacgtaaaagataatgcagcggctatgtctgaatctcctacaaagaagcagaaagtctctcacggtgagggtgctcaatatggtgtangagatgcacgatagaagaagaagaagaagaagaagaa

SEQ ID NO: 1753 - DNA, 499 bp, Arabidopsis thaliana landsberg
ctaacgacacataacttaaactaggtaaatacatgtctaattaggttcaaatattacataaaatccagatatcataacttaattaggatcaaatgccatacaccatcctcaataacataaaacacatcctaatcaccatgtataaagtaatgccctaagcctatcaatctcgacttctttggcgagtaacctttcatgattgcatgctcgttgtccatgtcttagtgcggaatcaactttgtgatttaccttctcaagctccttagttatcgcctgatcccaccactgcataaggtggttgctggactcgtactctacatcctgcgaaagagagaagacttcataaatatacttcacttgtactttgttgttccaatgaaatgaaaacacaataacttactttaagcattgggcattcgtagactctgtcgccttgcctgtaaccagttttgcacactatatgttttacaggcttaccacataaacatttttctggaac

SEQ ID NO: 1754 - DNA, 610 bp, Arabidopsis thaliana landsberg
cgctcatgaatatgaccacttggtttaaaaaagaatcctaaagattaggatttgttacatatttttgatcttctgatcaaagggtataaaatgagctagaaggattggagtcagcgatggattgaagtggaacaagtacatgaaagtagaatagatcaggtaatgaaacctgcaattgaaacacttgtgtatcacagaagaaaaaggaaatcaatatcctttgttgagaaaataggactggtctatgaaaactgtgaaattcttaggtataaagttggaaggatggaggagtatttaaggatcgaaattttgcgacgaattagccaagttctcctatttgctcgtaaagttctcgcaattctgtagtcaatttgcgaaggaccttttccatctcaaaggttcctcgcaaatcgcttgttttcttgtagtaaaaaggtttctaaaagaattttaaagcgttgaaaaagttattgtaatgttaacactctaactgttagtaattaggtctagacctcttactttcaaaaagtaaactggtttagtataaattcacataagcccaaatttacttaaaaaccataacatataggataaggaaaccgtgaaagta

SEQ ID NO: 1755 - DNA, 606 bp, Arabidopsis thaliana landsberg
  unsure (1)..(606): unsure at all n locations
cataggatttctcggcttctccggttatcttagttgtaagtatagagtgtttcgcggaacgccagtggttactctagaatgatagtttgagtttgagaacggtgcgataacaatcctgatattagctagatctacaatttatttatctcccgagacaattccttagacctgacgctttaatcacttgaatctacaactcatttacatgcttatttgtctttaatattcaattacttcatttagcttattcaacaacatcataagtctattgtgtgaacatcgagagcttagtggaattcgacccgtaaatgctaacgacgatctcttatttgagggagtaagtgataacactgtattttactcattttaggtttatgtttatcatcatttagctttgcatttgctcatcgtatcatatcattttgcaccattttagcttgttttgcatacttaggcatctagggtcattttgcattcgcattgcatgttttggtgtgttttcgggtgcanaacgagcttaaaaggactctactcgatccattcactcgannnnnnnnnnnnnnnnnnnggcatcattccactcgacctctttactcgatccaggat

SEQ ID NO: 1756 - DNA, 524 bp, Arabidopsis thaliana landsberg
tcattgtcatcacaaacatgcactgtatcgccatttctgtatccgttttcaatctcgggatgctgtcataaacattgatccgtttttttgtaaggtcaatatccagagcgacccaatgattcccgttgacaaagaggaaggcatataggtgatccacatcaacaaaccatttcttgtttgtcgctgcgtcacattgagctgtaccattgacttgatcctcataatactccctgaatttgaagcacctataatccggttgaaactgtttctagtctctgagcattgtggagatcaaatcttggtccaaaaaagctattctctggttgggatattttgacggatcacgattgaatcttcggcgaaacaatgacattgcaactcccatgtgctgcattataatcaaaacaacaattagggtacatgttttcttcagatacaaggatcatatgcctcacacgcacctaatacattatatcacaagattaatctaaaacgtttgggccagtttagttcagttttttttt

SEQ ID NO: 1757 - DNA, 559 bp, Arabidopsis thaliana landsberg
gtcttactatgctaatatgaagttgaatccgaggttgccacctcctttgatgtctagggaggattttagggttgctcagaggcttaaagggagtaataatgtgttaggtggtgttggggataggagaaaagtgaatgatagtcggtctttgttctctatgccacctggttttgaggctggaaaacctggtgcttctgcttctgagtgggatgctaatggattgattggtttgggacttggaggcaagcagaagagttttgctgatatctttcaggttggttattttttgatactctgctaatgtttctctgtgtgtatgtgttgtgtatagttctcctgaatactcttgcttatataaacttggtggattacttttgtgtaggcggatatggggcatcctgttgtacagcagccctcacgtcctgctagtcgtaatacctttgatgagaatgttgactctaataataacctgtctccatctgcatcacaaggcattggagcgccatctccatacagctatgcagctgttctgggttcatctttgtctagaaatggaact

SEQ ID NO: 1758 - DNA, 1062 bp, Arabidopsis thaliana landsberg
catatcaactagagaactgtatctcacagtgtctagaaactctctcattccttgcaaaataataggagagttttccaaattggaatgctcgtccccctctaatattttattgaaatcatcgagtgtcacccagcccttagctcggaacactggcatttcatagtgttgtctgatatcttcccataattctcttctttcttccacaaaattcgatgcatagacaaaactcggcctcactctcatctgtcagattagaacaagtaatcatttgtccgcttttgaaaacaggagtaattcttacagtattcttccaaaccacccaaatttttcccaatagactacgttcataatttgtaataaaagaccaaccatgaaacacctttgagattattttgttggctcttttttctttcaccctcgtttccaacagacatccaacgaactaaaaaatgtttatttgatttattgaaaccgcgtacattccagaagaaacccgtcaaataatgacgtttgtggagtatattttgctcgaagtgcatgggacggtgtcccttgctttttgagtaaaagtctccgaaagaacttttgtgaagtctttgtgaaagagtagttctcaaagaaccagttttttccatgtcaatagaattttccttcacatcctctgcattttgaacttggcccttaactgttgtatctatctcttcctccaatttttcctcaacttgagtacctgcgtgtactccgtctgtatctgaatttttctctgtctcactcagaacaaagtaatgagacgtaccaaaaaatccgaggtttaatcacgcacacatcccctagatgaccccatttaccacaacgagaacattttggaggcaaccaaggataagtaattaaattcaacaattacgtcttccttttcatcaatctgaaccggaaacattttgggaataatttagtcatgagactattttccaataatttgttttgcaaaaactctgtgcaagagaatttgtcaccttttatactaaatgagtacaccagcgcgccaacaatatttactcagtc

SEQ ID NO: 1759 - DNA, 18275 bp, Arabidopsis thaliana landsberg
  unsure (1)..(18275): unsure at all n locations
caatagtaaaaacacgagcttaagttgtgggtcaaatgacaagttcttgcgtttgttggttagcatgtcaaaacaatcccctaaggtaacagtcttgtgtggaccaattaacttgtcccagtaactcttcatgccaacaacataaactgcatcatcatctggatcataatcctcagaaaactcaccacagggcaatctagtcacgcaagcaaattcaggtaatgaaaatctcagggggtatccaccaaatactgtccacagctcatactttttctttgttaccagctgcctacatagcaaggcatgcataagcttaccagacatcgcacacttactaaccggcaaatggaatagaggtccaaagcaagattgaagaatgaaatccaatttctttgtcccctgaaaaatcttccggataaaggatagaatatctggtcttgagtatatatttagctttcccctcggatattgatcagtgacgaaaagtctattaggaagatttgaatcacactgagaagatggttcctgagacgttgaccatgtcattagcaagaaacaagttcagaagattaagattagattaacagataatatgaccaaatgaaaacgagttcacaaacgtctctctattgcttgcttagattagattaacagtgtaagagtaccttccatagtgtaacagaataaacttgtctgccaatgctatcgatttagatgttaaaccgtcttccaaatcctgtaacacaaacagataaactcatcttagatatggcagcaatagatataggaaaaggaaattataactatatgcagatatttttttctttaaacaagtcaaaatctgaagtttctttttcatctccacaaaagaaaatcaagttgcaaatgaaactgataaaataccagagagtgaacaaaacaaagttcacaaaccagcagaagattaggtgtaaccactaaactacagctaaaataaaatagaacggattagaaaaggatcactatgaagaaccagaagaaggacaactctaagaacctaacaaagcctagtaagtgaaataacccaaaaataattaaggctacttcagaaatgagaacaagagtcagcaaaaatcatcaacagagtatatggttttgtcaatcaaatgagtttgttacaaatgaattacgtttccaaaacaagaaattcccttgtttataactgaaatacgaaagaaaactaaacattgaaacaattcccataagatatattacttatgggattgtacaattactctattatttgttttttgccaacatataacttagaagcaccactagaatgcatatcaaatgaataaagattgtagttctgaagcaagaaacgaaaattacagaaaatcttatgatgaaagaaagaaactctaattataacagtatggctcaccttggttcatgagccagcaaacatgtggaagcacaggcaaatatggaggaagctagtgacgctctgcgagtaagtcagaaaggtacctgaaaatgccaaaatatcagagagtaaacaaaataaagttcacaaaccaactgaagattagttactgaaaaatcataacaccatgtgaattgattatgtatagaaaccaaagttccatatccataaggtcatatactttttttttaagaaaaacaagtctaaacttgaagtagctttttcttctccaaaaaccaaaatcaagttggaaacgaaaatgccaaaatatcagagagtaaacaaaacaatgttcacaaaccaactgaagtgacggagaatgtggaaattgttgagtaaagaaaaatgttattagagattaaagattaaataactagatgttatccaaatatagttgaccatcagatcatatccaacatgtttaagatcacaaccaaagttgaaaatgccaaaatataagagagtaaacaaaacaaagttcacaaaccaaccgaagattagttactataaaatcataacacaatgtgaattgattctgtgccctgtccccaaaaagggcgactgctaattatgtactgtaaaatcataacacaatgagtcatagagaacactctggtgctagcttacattataagacacaatcaattccactaatcattcacctgaatttggagaacactctgctcagtatttaggcccgtaaatgaacctaaaatccaaaaacaaaacagacagacacaaccaccagaagtaaaaagctaaacatgagagaataatcataggatcaaggcgaagtggaataacctaacaaagactagtaagtgaaagaaacccaaaaaggttaaggctttacgagagtatatggttttgtcaatcaaatgagtttgtaactgaaatacgaaaaacgagaaccgagaaccgaagatagaatctagaaattaataatcaagcagccgataataaagcaaaccgagaaccgataaccgagaaccgaagatagaatccaattcgatataagaacatggagaaatttgggggaaataccggtggagagatcacaagagagaaagtcgtgtgcaatagtggtggtggacagtgacagagaagttgaagatttttagggtttgtgaaggaatttagaagtcgtcctgtttgataaaatgtagaaaatagggtttaataacagagaacccgtcgcaggaattggttaagcgtcgtgcagcaccagaaaagctgaagaggatgatgttgccggagtcatcttcttcaacaaacagtaatttgcagtttttactggatttaggttttgacacgattctgaaacagtcttctaaagtcaaataaggtaactgcaaatttgtttggtgcttaaaccgattagtggtttgattaatgcgggtttggtttgaagacaatcggttagggtaaaatagtaaatttgccaaggcaaagtgcctgatgttttttaagtgtcgtaacacgtctaatgtttagaaaaagtgtctgagtatgcaatattcccttcaaattgatcgggaatggtatcaaatcatgacagtgtgggcgaggagagcaatctgggcatggttcagttttacttcaatttcattgactacgcaacagacaactagcaacgagggcactgagtttatatggtgaaccaaaatgcttacaaggctatcacatcattatcccctatgcatatgcaacaatcctaaatgaaacactctagactcgatcctaaatgtaatgcaaatacatgaacactctgtttttgtgaaatcattttctgaaatttttcaaatttttttggtttttctatgccttaaatgaatgcagactcaagaatctatacaatgcagcacacacttcctgagccctcccccaaacttaaatcacacagtccattgtgtgactaaacttagaagagagtactcaggacaaatcaaatcacagaatcaaaacaaaaacaaatcacaagagatgatataatacaatggtgaagtgagtcgcttacctcagtcaaagaatgaacagagttggtcgtcaatggctgcctgtgattgctcccaggccatagacgagtcgccctgttcagtatcagctccagcatgtgggtactcgacctcatcaactttgtggcggccagcaccgctctgaggatacttgacctctctccttttgctgcggccagcaccgcggtcgagtgatctcctcgagtgaataagttgtgatctgctgctagagcgaacgagtgtagccttccttcttctcttatgctcccgggactcgaatgacgaatgtctagcagggacctgtgagactctctgctcactaggctcaggcatatgctgacttggctcagactcatcaaatctcctcgatggcatgtatcgaggaggttgtccctgtggaatagctatagtggaagaggagcagctcagcttatctatcagaaacttgatagtcttgaggcacttggggagtagcttgtcctgtttcttacactagttctacaacttgctgttgttcctgtgagcttcactcaagctcttgctctccctcactggaggtacatgttcaataaaatgatacatactagcgtcaaactccacttctctgtcttcatccatcccatcctcagcagcttcttctataagatcatcctcatccaatggcagagcgttctcatagtagaggttcccaagctcaggcctaaaatcaatgttatctccctctattatgcgtgtaacctcaaggctgtggagaaggatgttggctttcttatctgtagagtgctcaaacctgaaacggtccctatcgccaaccattgcaaactctaggaattcgcagtgatgcagatgctcgatatccattgcccgtggctcaagtccatcaaatgtgattaggactccacaagcgatcagaatcggtgtcacaacaccgcctatgcaaagagcgcctcgtgctctcttgtggttattgctgacagcccatctcttgtatccacacatgtggatcagaagaagtatagagagaggtgtgtcattgatttcaccttggagagacattttgttcttggtttggcggagagtgcctttgagagccatatcgatcatctccatatcagaattggtaacaatccctatgatctctcgggagtagaggacattggctatagaacgctggaagtacctgatgacagggctgcgtatctgattgctctttgacctggaagaattcagcggtacagagttgccaatggtgatccctaaatctttcaactcttctctatcatacttgggcttagtacccgttccactggggaaaccaaacaatccttccaagcgcttgattgataacctatactcatgaccatacacagagaatctcaagaatcccaatccttcgcattccaaatcatcaaaggtcataccttggtaaagctccacttgcagtgtggagaggaactgaatcgtttcttcttcatatgctacatacggataagccattaaagtgtccagatgacaactctagtacaagtgctgaacatcctccagcaatccaagttgtgcgagtgtggtcgagcatgaataccttgtggtacagaactctttcaatttgaagagcttaatatattcctcaacaaacaatacatcaggtttatgcagaagtttggtggctctgcgagtatgctcaggcatgtactcgtcttccagatcctcgtctataagctcatacctctctgtcatcgctcttttcccccgggctatctcagcttttcttctgcagctttcatattctctctgttctctctctggccttgaagatgatgactctgtctcatccatgttgtagtcaggatcaacataagaactgccactgtaattgctcctgattcccctgtagagatttagaactcaaagctcaaatgtcaataggttagtctcaaacatagcaatgaaacccaaactgttatcaatatgcaatgaaacagaccctgttaatcgagtacaattttgtactcgagtagactgagctgtttttgagtttcccttagacgaaatgggtcgagtaacttttcttgaattcgagtgagtctgctcccagaggtcgagtgagtcgtggaggttgagttcagccggtgaagcctagaggtcgagtaatcactctgacagtgcttcagggctctgttgctttcaagaacaagaggtcgagttgctgttgcagaggtcaagtgaatacttgaggtcgagtgatagtttgtggtcgagtagctttgtggtaatcgagtggtcccggagacttcgacggtgaacgaggaggagtactcgattacggtggcgcagggatggtcgagtgacataggaaatgaactggtgacggcgacacggaggtcgagtgacggaagaaatggactagtgacggtggcgcggaggtcgagtgattcaccgtggtcgagtgaagtgatctggatcgagtggctctttggacggcgattcgtggtgtagagcaattgcagtgtcggtggtgagatgaaaagaggtaggtcgagtgaattttgtgaagtcgagtgaagtttcaaaatgagtggtggaggttgagttttagattctctctccagcttatccgcagcgcgtggtcctcgctcttttgaataagaaaatctgcagaagatctactgtaaactgcaagaaatccttgcaagtctccgtagcttatgttggttgagtacattgatgtttttaaaaattttggattttaaacatcacgtatactcgactgatgtactcgaattctgggtctccagatgcaacagaaaactttcaaaattttgtactccaccaggttatacactcgatctccaggtcttttgtagagtaaaagttttgaatttttactctatctccacgttgttcccttgtctccgagatagtcatgggacttcctcccaagtgagcttgtttaaagtcattagctcgactcgtttatttctttaatcatcaagaaggtcctggagatgaaccgatgtcacctctggaaggatttgatccgctaagtatttcttgagcctttgaccatttactttgaagtctccacttttaccagctagagtgactgctccatagggacggaccttagtgatacagaaggggccagaccatctggatttaagctttcctggaaagagtttcaagcgagagttgaacagcagcccctgatcaccaacctggaaatccttagtgatgatcttcttatcatggaaaagcttgtttctctccttgtagattttaaagctctcataagcttctaaacggatctcatcgaggtcactgagttggatcaatcgcttctcctcaacagtttttatgtcaaagttcgaaagttttaccgccgacattgctttgtactcgagttcaacaagtagttgacatgattttccatagagaagattgaaaggagttgtaccaatgggggtcttgaaggctgtcctgtaagcccataatgcatcatctagctttgcagaccagactttccttgtaatcccaacagttttttccagaattatttttatctccctattggagatcttaacctgcccgctcgtctgtggatgatagggagttgcgaccttgtgctttactccatgcttcttcaagaggttctcaaaaaccttgttgatgaaatgcttcccaccatcactgattactaccctgggaactccaaatctcgggaagattatggtcttgaacagcttcagcacaacttttgcatcgttggtaggactaacaatagcttcgacccactttgatacgtagtctatggcgaccagtatatacttgttaccgtatgaaaatcggaatggacccataaaatcaatcccccatacatcaaagatctcgacttccaagattggattctgaggcatttcatttcttctactgatgttgccttttttatggcatgaatcacgctttgaaacgaactgccgagcgtccttaaacattgttggccgccaaaagcctgcttgaagaatcttggacactgtcttgaacgttgcgaagtgaccaccatatgctgagccatggcaatgcagcaggataccttccacttcatcttctgagacacatctcctgtagatcttatctttacagagagtgtaaagataaggctcatcccagtagtaatggtgtatgtctctgaaaaacttcttcctttcataacttgtcaggttgggaggctctactccccatgccaagtaattgacgtgatcagcataccatggagattctccttcaacagcattcagttggtggaactctttcccactatagctttttccgaagaactctacaaccatgagctgttcttctggcattgaatcgtctatcggaagaggttcttcaattctcatccttgacagatggtccgctgcaccattttcaatgcctttcttatctactatctccatgtcaaactcttgcaataaaagtatccatcttaacagtcttggtttagtatccctcttggcatacagatgcctcaaagctgcatggtctgtatagaaagttacctttgatccaaccaaatagcttctgaacttctcaaatgcgaatacaacagctagaagctccttctcagttgttgcatatcttccctgagcatcatccaacgttcggctggcgtaatatatgacatgaagcttcttgtctattttctggcctaaaacagctcctactgcgtaatctgatgcatcacacatgatttcaaatggatagtcccaattaggcgctcgaccaacaggagcagataccttagcatccttgatggtgtgaaaggatttgaggcagtacctcatagaattcaaatataggtttccttgcacaatagtctggttaacggtctggctatcttggagaagtctttaataaatcttctgtagaacccagcatgaccgaggaaacttctcatgtccttcaccgtttttggtgcctgcaactacaacatcacttcaatttttcctttgtcaacctctatacccttctctgatatcttgtgacctaacactatgccttccttcaccatgaaatgacacttttcccaattgtgaacaagatttgtctctttgcacctggtcaataccctgccaagattcaacaaacatgaggagaaagaggggccatagaccgaaaaatcgtccatgaagacctccactatctcctcgattaaatctaaaaatataaaggtcatacacctctgaaatgttgcaggattattgcataaaccaaatggcattctcttataagcaaaagttccagaacgacatgtgaaagtagttttctattgatcattaaggtgaattggtatttgaaagaaaccactatatccatcaagaaagcaatagtatggatgattagctaagcgttcaagcatttgatcaatgaatggcaagggaaaatggtcctctctagttgcaacatttagtttcctgtaatcaatgcacattctatgtcttgttatagttctagtgggaatgagctcatctaaatcatttttaactatagtcattcctcccttcttgggaacacaatgcacaggagagacccatgtactgtcagaaattgggtagattatatcagcatcaagcgatttaagaatttcctttttaaccacatctttcaaatttggattcaatctcctctgtggttcaatactagtatatgattcattttcaagatggatcctatgagtacataaactaggtgaaattcctttaatatcagctaaagaatacgcaattgctctcctatactttgtaagttcattcaacaactatttcacttgttcaacactcagtccatcattaataatgacgggataagtatcatttggactgagaaacgcgtacctcaaaccttttggaagaggtttaaggtcaacctttaaaactttgagttctgactagtcatatgaacttatattctcccctccatggtcgagcatctcagtagagtttgttttttcaacaattaggcacatggtgcatcctgagactgtttcttctgagggaacgatcaattcctcaaacacttctggtccttccattggtatgtgggcgtcaagatactctttgtacccttgggtttctaggtgtaggtacccttcttctccatcgttggttaaggcacttgctaggtgatctccttctgtaagttcttccagtaattcgtcagctaatctatccatttcttcgatccaaaagacttatccattgattgtcggtttcttcatagctttgttaatgtcgaaggcattttcatctacttccccaggtttacgtcgatttttcccttcttgacgtcggtaatagctcctatagtagctaggaatggtcttcataggatcaatgggtcttttggctcctcatccatctccagtattacgaaatcagtagggatgtctattgatccgaatttaacaggcaggtcttcgagaactccatgaggtattctgactgatctattagctaatattagttggataccgcagggcttgtatttactaaaacccaatcttctggctacagataggggcatgaggctgattgaggcgcccaaatcacatatgcatttactaaaagataatggtcctattgaacaaggtagggtgaaggatccaggatctcccaacttccttggtattatatttttctggatgatagcactgcattcatggcctattaccaccattccctgcctctcctttgttctttccataatcagatctttgaggtacttgtgggagtgtggaatgagcatgaaagcatccattaacgacattcttagctcaatctcctttagcagcttatcaaaaagggttttgtatttttctattaattccttcttgaatcctcctaggaaaggcatagtcggtttgaagggtggcgaagcaaattctttatttttctctgtagccgcagctttcctttcctcaaaagttggctttgcttgatcgagtagaggttgagtgagtctgaaggttgatcaagcttaattggttcatcggtttgaacttcgttttgatgctggtcctccccatcttgaacttcactgtcctcagtgatcttttctgttggctggttgttgatcaatttccttccactacggagtgtggctgcatgtgcatattccttggaatttagaatggcttttcctgggtgttgccctggatacgttgaggaggtattggcaacagcttggcgttccatgtatgtcatttagatgtgagatcctcatatttgctttttaactaattgtaggcacagtcaactttactattaatctcagccaaaaagttcttccagaactagagctccagtagcttgtccttgaatgatttgttacagcattcgtttggtgtcaggatcttgagctgctggggcatgttgtggttgttcagtgaaccctggtgatgaattctgctattggtagcctccattacactgttgtttaggcacataaccttggttgtactgaataaaaggcttgcacggattctgttggggtgcatacacttgatcttgggggttagctacattagtgcttctgcaggagaggtttgggttgggcttgtagttgttgtagcccttgttaaaccctccttggttctgaatgtagcacaactcttcagtttgatcattccccccttcttgcatttggaagtgctcttcatcagtgatgtagtgtatctgcttctgctgagccagcaacaacttgtttaagttttcattcagagccttgatatccttgctctgtttatcccccccccctccagttcctctcattgagcgatcacagtcttcattgtagcacccatcagattgagcaaggttctcaaccaactcccatccttctgctacttccttattctggaaattcccattgctggcggtatccagaagcattctgatctttggtaggactcctctgtaaagagtgctgagcagagaggctttagtaaagccatgatgagggcattgagtggtgtagcttttaaagctctctcaagcttcacagaaagtttcattgtttttctgtgtgaagcctgagatctcgttcctcaatatagctgtgcgagcattagagaagaacttggcaataaaagctttcttacaatcgacccatgaggtgatggagtcatggggtcagagtcttctcccagtggtgtgctttgtctcccaaagagaagggaaacaaacggagcttgaatctgtcttcactgacaccattgatctttgttaggttgcagagcctatcaaagctgtcaaggtggttcaggggatcctccattggcagaccatgaaacttgtttccttggatcatggagatgagaccactcttaatctcaaaattgttgttctgaactggtggaggcactatcccttgtctttggttatgtttccctggggcatcatcagcaccaatgtttctttgttgatcaacattaggtgggtcttgaacatcaactggtctgttctgttgatccatagcagctggtatttgctggtcacaggctgcctttgctttggtttcttgtaactcacgagctattttatcaattctgtctctgaatggtaataggtgtacnnnnnnnnnnnnnnnnntttgcatgcacaaagattagtacctataccacaaaaacaagcacacgaaatgatgagttagtaacttgataaatgtaaaagaacttaatcttaaaagtttctaatatcttgaatgtaacaatgcaacaatgaattggcaatggcgccaaattgataagtagtttttttttagggctacttgtatatgctgaatgtgaggttcagttcaactcccctacaaacactaacatgtcgatgcacgtatagggggtgtcagtccagtccactgttattgctagcaataaagatgtgtacaaaagcaactaagtcaagccagattatagagatgttcggtttctaaaaacaatcctaggtcaggattcaaacaacaaaaatgagaactttaagagccctactcgatcattgggtcgagtaaaaccaacaggtgacaaattaagaactaaaatgcaatcaacaggtgacacaaataacaggtaaataaaagtgcaatcaggggtgaatacaaataaatctaagaagaatagaagtcctaaggatggattcattgataagggcaactttagtgttcatcgggtggctaactgataacactgtattttactcattttaggtgtatgtttatcatcatttagctatgcatttgctcattgtataatatcattttgcatcattttatcttattttgcatacttaggcatttaagatcaccttgctttcccattgcatgttttggtgtgttttcaggtgcataaggagctaaaaaggactctactcgatccattcactcgatccaggcagcaaaagaagaggcatcattctactcgacctccttactcgatccaggatgctacagaggaggctgcagtttactcgaccctcttactcgatcaaggcaacctcagatgaagcagcatattgatctactcgcccctcctacttgatcctctactcgaccagttactcgatcaagggcaacatactctacaagacttgttgatcgttcaaagcggatcctcctcattccccactcaaccaaacatcagagcatacagataggagaggaagatgcatctactcgaccaattgatcactcggagcatagacacaaaggcgcaaactttgcagcatcctctttactcgatccccaagatcaagtatccgtccaaaccgcctcaagtctcttgtcttctagtgaatctagggtttcaacattttactataaatagatcactttgggatttgtccaaaggatctagcttttatcctttagttttctttctgtttatgaatcttcaaaacttaattactattaatctattttgtttttgcacttagttcttttagtaaagttgtttagcttgtttagatctacattttgatatgattttagtaatttctgggtttatgttcttagttatgttgcttgagtagtgattagggttcttgaggatggactagattagggtaatctctaggttagtcaggtggttaagattaggttagatcccttctggattcgcttggcccctatgcggttttcgctggctagtgtggagattcgatcatagacgtccaacgtccaaaagacgttcaaatggatgtctgatttacgaattccagagatttgtagacttgaccaagacattggctagtccgcttatttactttggtagattgttgcttaaacccttctctgctatgtttcatcaacgagaggtcagattagaaagtggtagagttatgagggtctctgtcatgacagtggattgacccgatttttgaatctatcgtctagggtatctacctctcacctgttagccacctgctgaaccctagagttgcccttatgaatgaatccatccttaggacttctattcttcttagatttatttgtattcaccccctgattgcacttttatttaccttttatttgtatcccctgttgattgcattttagttatgtctggtggttctactcgacccaatgatcgagtagggctcttaaagttcttatttttgttgtctgaatcctgaccagaattgttactagaaacaaaccatctctataatctcgcttgacttagttgcttctatatacatcttgattgctagcaataaaagtggactggattgacaccatttatagctgcatcgacatgttagtgtttaaggagaattgaactgaacctcacattcagcacataagtaggcctaaaaacgtacttatcaatttggcgttgttgccaattcattgttgcattgttacattcaagatatcagaaaaagttaagatcaagttcttttacatttatcaagttactaactcatatcttcgtctgcttgtttttgtggtataggtactaatctttgtgcatgcaaactcgatccaaaggttctgcacacctactaccattcaaagacagaattgacagaatagctcgtgagttacaagaaaccaaagcaaaggcagcttgtaatcagcaaagacccgctgctatggatcaacagaacagaccagttgatgttcaagacccacctatagttgatcaactcataagacgattgtaagaaagcttttcttgccaagttcttctctaacgctcgcaccgctagattaaggaacgagatctcaggcttcacacagaaaaacaatgaaactttttgtgaagcttgggagaggtttaaaagctacaccactcagtgcccttatcacggtttcaagaaggcttcattattgagcacactctacagaggagctttaccaaagatcagaatgcttcttgtcaccgcctcaaatgggaatttcctgaacaatgatgtcgaagaaggatgggagtgataagtaggttttttaggcctacttatatgctgaatgtgaggttcaattcaattctccttaaacactaacatgtggatgcagctatagggggtattaatccagtccactgttattgctagcaatcaagatgtgtacacaagcaactaagtcaagccagattataatgatggttggtttctagtaacaatcctaggtcagggttcaaacaggtaaaaatgagaacttaagagccctactcaatgatcgggtcgagtagaaccaacaggtgacagtattaagaactaaaatgcaaacaacatgggatacaaataacacgtaaataaaagtgcattcagggggtgaatacaaataaatctaagaagaatagaactcctaaggatggattaattgataagggcaactctaggattcaacaggtggctatcaggtgaaaggtagatacccttgacgatagattcaaaaaccgggtcaatccactgtcgtgacagagacccccataactctaccacttcctctgtagctgcctggatcgagtaaagaggtcgattgcctattttgtagctacctggatcgagtgaatggatcgagtagagtcctttttagctccttctgttcctgaaaacacaccaaaacatgcaatgcatatgcaagatgatcctagatgcctaagtatgcaaaataagctaaaatggtgcaaaatgatatgatacaacgagcaaatgcacaactaagtgataataaacatacacctaaaatgagtaaaatacagtgttatgatacctgaatcatgatgatcccatctgtatgatgtgtgtcacgtgtaactcaattctgctatggcatacgaatgctcatggatggttcgctaccgaccgggcgctacatgacgatgtagtataaggaatggaaatcttctttagactttgtatctacgagtatgccagccattgcctcgaggagatcatgtattcgtaaagggccttgcttaggttgatagagccatgattgcattagttatcctatacatattaagaaattcgagtcttcatgcattctgcatggtgcattatattttgcttgtgttgtatgttgtgtgttaaccttgtttatgtcttgcttgttaggtagtagtattgttacgtgttgttgctgcttagggggtaaggaagggtattacgataacactatatagatccggggttcactaagtaatgctagattacttatgacgctacttatctttttcaggaaaacttagttgaccaaccttgtagagggtgctcgtgacttaggacgaaccaatgtaggtttaacggctttttgtaaattcttactaagtatattatgtatggttttcaaagaggatctgaaaactatatacgttttgctaaccatttctcgtatgatatatatatatatataagactcggatttctaaaatttatatggttatactgactgatatttgtcttttccggactatcaccactcgcgtccgcggtacgggttgaaaagccttaggccacgggcgggaggctggactcttgcggttggacgactcgggcgaacgaattcgtttcgaaaacctgggttggctgactccgggcgttcaacgtgacactcctattttatttatatttttatagcgggataggggtgttacaaggtggtatcacagcatggtttgttacgctacgagaaaccatggttttcaatgttttatcgagtaaatgtgtcgcaaaaagctattaggaaatttgttcagtcacttgctagagtttaggtagattgacctataggacaaaccctttttgtttaggttggcttacccttgttgttagtattataggtggcttacccttttgcttgtattttcgtgtcttaacctctttgtttgtattatagtatcccactaaagagatcacgtggtagggagtctgtggaagaggagggacggtccttgggtctgtcgtccaggcgatatgaccttcgtgagagagtcaggggtaggtgtgtgagaagggatgtggccgagtgttcccgggttatatcggagactagatcgagcgatacggttgctgattttggtcttgcagggatagttgctatgtcagagcaggaggatgtgcatataggggatgggatgatgatcgattcggattgtgaggatgattgtgtgatcacgggagtgaggacggtggagcaggagctgggtctgaagggacatgagatcgtgatggtccatgtctatgtgagtgttcccacgagcagttctgccacgccatcctttgcacttaacccgtattcaccgatatcctacgagtcatatccggatgaggatgaggatccaccagtttctccatacgttccggaggctatcgatcactctcccgatagccattttgcactgttatgggagggcatgtcccccatactttgtttcgcggctgacatgagggctgacgctattctgacatttgacgggggctctacatcgggtatccagataccgttctgcttcatctttggcgaggatgtttattacccgaggactgttagttatacacgcagtatatgcccatggccattgcttgtctttacagtggagagtatgggcattacgcggcaacctgtatgctaatgagagatgacggtcagattcctgcaccgactagtacttccccatctcacgtagcaggaccatcatccccaccgattcccgacacggaggaggatctttttctaggctgtacatgttcgaggtgtagcttagggttactctgattcataaaccttagtaaatattaggaaactaaccccattttttgatgtatagcgacgactacaagggagccaatatatagtaaccttcggttacattgtgatatctttttgatgatatctataggcttgaataagcgggtgtgtatgatagtcaaaatcacgtcctttccccttagggctgttaactaatgttatgttacattatgtttatactaatatccttttgtgtgattgcttgatttattttcaagttattaatgtatttatgtgtgtgtttggtttcgtacttaaccaagtacaaaaccataggaaccctttcccaaggaactagaaagtctaggaagcctgaagcccactcaaaagagttaggagagaaccataaaaatttggatggaaccttaggatttgtggaccaagcctagtagtactaggaagccgataagttaaatcgttagctaaaccgtatgtggtgacgacaaaaatcacatacaagaaaagaaagtggcggagtccgttaggca

SEQ ID NO: 1760 - DNA, 13565 bp, Arabidopsis thaliana landsberg
  unsure (1)..(13565): unsure at all n locations
agataaaatatgacagttggtataaatgatattaatgagatgtaatataggtacaattatgtctcaatctgaataattacgtaattatgttttaataatttatttgtaattacatgaggcgatgaagaacaagaacatattcgtacaatttgactatgggtactattcagaaaaccatgattgattttcaaacaattctttaagtggtgtgttgttgaagacgtcaaagataacatactcattgttagtagaaaacatatgcaagaagattggaatagatgaaacctcaaggaaattgaacttgagttacattctatgcacatctaagagagagatatctattgtagatgatgatgactttttagggtatctaatggtagtgaatgctaagggaataagacaagctttgcatgtggaggtagtaaataaagaatgtacttattgagcatgtggatagccagatggatagggaaaaagataatggtgtggttggtagaattgagaattatgatctttcatgtgctgctagtgaaagaagtgagagtagtgagaaaattcagagtgttacggaatgggaagatggaacggggattgaactacaccaagaatttttttctaaggagacggtgcaagatttggtttacagagctgcaaataagtattgttttgcgaccgcaactataaaattggatctaaagcgactcatgatctgatgccgacaatctacaacaactgcttgtaaatggtatttacgatgtgcaaaagtaacgagctcaaattgtttcagtgttagagttcacaggaagatgcatacaatcaagcggtctgataagaattcaagcgattgttaacatatcggcacaccacggttagccgcgtctcttttgcatgagaattatccaggtgagtttcaaactccaccacctaaaagcataatgagtattgttcggggaagagtgggtttgcattgttcgtatgctaccgcatggagaggaaaaagacaacacattagtgacgtgcggggtagtcctgaaaaaaactacaccgacttgtactcttatttatacatgttaaaggaggtgaatctcgggacaatatcatatgtggaagtggatgcacaacaaaagtttaagtacgtattcgttgctttgggtgcttccattgaaaggtttaaagttatgaggaaagttgttattgtggatgccactttttttaagaccgtatacgacggtatattagttttcgcaatagcccaagatcctaatcatgacaattatatcattgcgtttgcagtaattgatagggagaacgatgctagttggtcgttgttttttaacaagctaaaatccgttatgcggatgaaccaggtttggtttttgtgagtgatagacatcaaagcatcatcaagtcagttatgcaggtgtttccaaagtacgtattcgttgctttgggtgcttccattgaaaggtttaaagttatgaggaaagttgttattgtggatgccacttttcttaagaccgtatacgacggtatattagttttcgcaatagcccaagatcctaatcatgacaattatatcattgcgtttgcagtaattgatagggagaacgatgctagttggtcgttgttttttaacaagctgaaatccgttatgcggatgaaccaggtttggtttttgtgagtgatagacatcaaagcatcatcaagtcagttatgcaggtgtttccaaacgcgagacatggccattgtgttnnnnnnnnnnnnnnnnnngttaaagtaagggtgaaaaatgagaaggaagaagtcgcggttaaattccttgcatgcgcacatgtttatactcaatttgagttaacgagagagtatgctcaatttaggagaggatttcctaatgtcggttcgtatttggatgaatgggctcaggtggaaaattgggcaaggtgttattttgaaggggagaagtataacatagacacgagcaatgcgtgtgaatcattgaacagtacgtttgggcgttgaaggaaatacttccttttacctttgcttgatgcaatttattttgttgacttgctaaggaaaacttgttattgccgacgttttgatgtcaacaagtatctgtgtgtacatgcgattgccgctgcccaaaactttgtggggaccgaatcgatattagatagtctcgaaatggaagacctaacttcgcgttattaccatatgattacgtggaaattggcatagctcattaccatttatccagtcccgcaatcatcagtttagtaagggtgaaaaatgagaaggaagaaatgatttagtaaaaaaagaaaatatttagtaaaaaagaaaaccgacgtcttcgcgggactcttttctccgatacgtgattttctccgatttcgtcgtcggcgacttgagcttcgatttcgccggcgatttgagctccgatttcaccggcgaattagcttccgaggacgccatagcttccaagccgataatctgctcccaaagttagcttcctcctcaccgacaaaagtaaatccgatatttttttgatttgtagattaatgtgaatttcttggttgagttagttgttaataacataaattttttgtattgttcgttatgggctgttgtatcgttttgaatcggagagttcaatcgaaattattgatttgagaaatctagaattgacgaactggaacaaatggtaaaactgagacataatagtacagggggtacaaatgttttattgagataaattatgacaattggtataaatggtatcaatgagatataatataggtacaattatgtctcaatctgaataattacgtaattatgttttaataatttatttgtaattacatgaggcgatgaagaacaagaacatattcgtacaatttgactatgggtactattcagaaaaccatgattgattttcaaacaattctttaagtggtgtgttgttgaagacgtcaaagataacatactcattgttagtagaaaacatatgcaagaagattggaatagatgaaacctcaaggaaattgaacttgagttacattttatgcacatctaagagagagatatctattgtagatgatgatgactttttagggtatctaatggtagtgaatgctaagggaataagaccagctttgcatgtggaggtagtaaataaagaatgtacttattgagcatgtggatagccagatggatagggaaaaagataatggtgtggttggtagaattgagtattatgatctttcatgtgctgctagtgaagaaagtgagagtagtgagaaaattcagagtgttacggaatgggaagatggaacggggattgaactacaccaagaatttttttctaaggaggcggtgcaagatttggtttacagagctgcaaataagtattgttttgcgaccgcaactataaaattggatctaaagcgactcatgttacgatgccgacaatctacaacaactgcttgtaaatggtatttacgatgtgcaaaagtaacgagctaaaattgtttcagtgttagagttcacaggaagatgcatacaatcaagaagtctgataagaatttaagcgattgttaacataccggcacaccacggttagccgcgtctcttttgcatgagaattatccaggtgagtttcaaactccaccacctaaaagcataatgagtattgttcggggaagagtgggtttgcattgttcgtatgctaccgcatggagaggaaaaaaacaacacattagtgacgtgcggggtagtcctgaaaaaaactacaccgacttgtactcttatttatacatgttaaaggaggtgaatctcgggacaatatcatatgtggaagtggatgcacaacaaaagtttaagtacgtattcgttgctttgggtgcttccattgaaaggtttaaagttatgaggaaagttgttattgtggatgccactttttttaagaccgtatacgacggtatattagttttcgcaatagcccaagatcctaatcatgacaattatatcattgcgtttgcagtaattgatagggagaacgatgctagttggtcgttgttttttaacaagctaaaatccgttatgcggatgaaccaggttttgtttttgtgagtgatagacatcaaagcatcatcaagtcagttatgcaggtgtttccaaacgcgagacatggccattgtgtttggcatttgtttcaaaacgttaaagtaagggtgaaaaatgagaaggaagaagtcgcggttaaattccttgcatgcgcacatgtttatactcaatttgagttaacgagagagtatgctcaatttaggagaggatttcctaatgtcggttcgtatttggatgaatgggctcaggtggaaaattgggcaaggtgttattttgaaggggagaagtataacatagacacgagcaatgcgtgtgaatcactgaacagtacgtttgggcgttgaaggaaatacttccttttacctttgcttgatgcaatttattttgttgacttgctaaggaaaacttgttattgccgacgttttgatgtcaacaagtatctgtgtgtacatgcgattgccgctgcccaaaactttgtggggaccgaatcgatattagatagtctcgaaatggaagacctaacttcgcgttattaccatatgattacgtggaaattggcatagctcattaccatttatccagtcccgcaatcatcagtttagtaagggtgaaaaatgagaaggaagaaatgatttagtaaaaaaagaaaatatttagtaaaaaagaaaaccgacgtcttcgcgggactcttttctccgatacgtgattttctccgatttcgtcgtcggcgacttgagcttcgatttcgccggcgatttgagctccgatttcaccggcgaattagcttccgagggcgccgtagcttccaagccgataatctgctcccaaagttagcttcctcctcaccgacaaaagtaaatccgatatttttttgatttgtagattaatgtgaatttcttggttgagttagttgttaataacataaattttttgtattgttcgttatgggctgttgtatcgttttgaatcggagagttcaatcgaaattattgatttgagaaatctagaattgacgaactggaacaaatggtaaaactgagacataatagtacagggggtacaaatgttttattgagataaattatgacaattggtataaatggtatcaatgagatataatataggtacaattatgtctcaatctgaataattacgtaattatgttttaataatttatttgtaattatatgaggcgatgaagaacaagaacacattcatacaatttgactatgggtactattcagaaaaccatgattgattttcaaacaattctttaagtggtgtgttgttgaagacgtcaaagataacatactcattgttagtagaaaacatatgcaagaagattggaatagatgaaacctcaaggaagttgaacttgagttacattctatgcacatctaagagagagatatctattgtagatgatgatgactttttagggtatctaatggtagtgaatgctaagggaataagaccagctttgcatgtggaggtagtaaataaagaatgtacttattgagcatgtggatagccggatggatagggaaaaagataatggtgttgatggtagaattgagtactatgagctttcatgtgctgctagtgaaggaagtcagagtagtgagaaaagtcagagtgttacggaatgggaagatggaatgggaattgaactacaccaagaatttttttctaaggaggcggtgcaagatttggtttacagagctgcaaataagtattgttttgcgaccgcaactataaaattggatctaaagcgactcatgnnnnnnnnnnnnnnnnnnnnnnnnnnnnnnnnnnnntggtatttacgatgtgcaaaagtaacgagctaaaattgtttcagtgttagagttcacaggaagatgcatacaatcaagaagtctgataagaatttaagcgattgttaacataccggcacaccacggttagccgcgtctcttttgcatgagaattatccaggtgagtttcaaactccaccacctaaaagcataatgagtattgttcggggaagagtgggtttgcattgttcgtatgctaccgcatggagaggaaaaagacaacacattagtgacgtgcggggtagtcctgaaaaaaactacactgacttgtactcttatttatacatgttaaaggaggtgaatcccgggacaatatcatatgtggaagtggatgcacaacaaaagttcaagtacttattcgttgctttgggtgcttgcattgaagggttcaaagttatgaggaaagttgttattgtgaatgccacttttcttaagaccgtatacggcggtatgctagttttcgcaacagcccaagatcctaatcatcacaattatatcattgcgtctgctgtaattgatagggagaacgatgctagttggccgtggttctttaacaagctgaaaacagttataccagatgaaccaggtttggtttttgtgagtgatagacatcagagcatcatcaaatcaattatgcatgtgtttccaaacgcgagacatgaccattgtgtttggcatttgtctcaaaacgttaaagtacgagtgaaaactgagaaggtaagaagcggcggctaacttcattgcatgcacacatgtttatactcagtttgagttcacgagagagtatgctcgatttaggagaagatttcctaatgtcggtacgtatttggatcgatgggctcctgtggaaaattgggctaggtgctattttgaaggggataggtataacatagacacgagcaatgcgtgtgaatcattgaacagtacgtttgagcgtgcaaggaaatacttccttttacctttgtttgatgcgataattgagaaaatttcagaatggtttaacaaacataggaaggagtctgttaaatattctgaaacaaggggtcttgtgccagttgtggagaacgaaatacactccttatgcccaattgcgaaaacgatgccggtgaccgagcttaacagcttcgaacgtcaatacaacgtcattggcgaaggtggtatgtcttattctgttgacttgctaaggaaaacttgttcttgccgacgttttgatgttgacaagtacccgtgtgtacatgcgattcccgctgcccgacactttgtggggaccgactggatattacatggtctcaaaatggaagacctaacttcgcattattaccatatgaatacgtggatattggcataccacagaaccatttatccagtcccgcattcatcagtttggattattcctgatgagataagacaattgatagtcttaccgccagataccacaaataaaccggggagaaatcaagaaacctggtttccatcaacaggggaacgtcgtagaaagaggactaacaacaagttttagcctgggattaatatcaacgcgtggttgcagcccgaggagtccgacgcataattaaatgtgtattttgtgttgtgttgttatgtttgtaccgtgtacttgtgctgtctgtactattgcttcatgtattatgtcttcatttttaagtactttggaattttcttaagtattgtgttgttatgtctgtaccgtgtagttgtgtcgtctgaactattgcttcatttttaagtactttggaattttgttaagtgttattatgtatgtaccttgtacttgtaccgtatgtactagttctttcatgtttatcttttacaataaaacccctcctatatatataagaaagaaatataattttagtattgttctttttacttaaatttgcttcaatttaatttaatttaaatatttttattatatcaaaaatatgggttcttatatcaccaactatccagtttatgggtttttgtatgaaaaatacacctctctttacttttaattaaaactataatttctaatatattaaatgaaaatttttaagaagctgaatttttaatatatttttactatttatgagacaaatacagtttatttatttatcctactaaaatatgatattattaaaaaagaggtaattttttaatttttctcataattataaagacaaagtttcatacttggaaaatctttgtatacattgttctagaacatttattaatcacttatactaattatcatacaatctaaaaaacaattgaacatattatactcatcaattcagaaaacacttcttacattatatggtatgcattatatcatgttggaccatcttgacataaacatggcaaaacgcatatatttggaaaattatataactacaacatgatatcttattattaaacatattatatcatctgtccaactataagttaattcccttaatgaagtccagctctaaatactaaaacttccacaaagtacaaataaattgagtaccggacaactgaataacttatggcacaactacggctaatgcgcagtattttgtctgggcccgctttccacttttattaccataataactattgtgtgttcacactatgcgttcacactatgtatttcaatttcaattcaaagaatctttctcattaaattacaaaattttctctctctttctttatttccttcttctcctttcttctctcgaaaacttttcttctctccttctctcttctctgacgacgaacctccgccgacgaacaacacgacgaacctccgccgacgccgaatctttctcatatcccgccagatccaagttctctggtaagttttgggttggattgaaaagaaattagggttttgatttccctatacactactttcaatattcaaacacaatttacagaaataaccatttacctcagattattcttcttcttccccttctttttcctcttctttagggttttcttccatcccctgagactgcattggttcttcatcatcaacttcctgaaaattcatacacaaccataaaattaatatttcgctgtactacttgtactagttatctcagaacaacattatcaactttttcagaattcaattttctaatgcaacccaatgtatgattaatcacgtatatccatgcaccaattacatagacctatactattaacttgtactcattgttttctagttgtccctaaacactatatcaatattcacacaaaattttcataaatttgtatatacctcagaaatattttcttcttccggttcgttaaggttttccggaggctcttgttcacagttttcgtcttcaaatttgttttcctctgccacttcttcacggttcatatccgcttcacggatgatcgtgaccctctcgtcttcactttcactcgaactaggagtgactaaccttacacgacccatgattaccttgcaaaaccactcaacaatcaaggaaaccgttcaaatcaacacaacaaaaacctattctaatgtttcaaatcaaaaaccgttccaatttctatacttaaagccctattcgacacttacaatttggaacgccggcggtttggaacgacgacggttaggaacaacaccggtcacggcggaattgcaacggcggctaaacgggatgaacgactatgcgaaatcgaacacgacccacacaatcggcgacagagataacaagtgatgtcgccggcgacggtgaactgaacggagagagaagagaaagtcgacggttttggatttttgaagttcgccgattgagagagaagagaagagagttgagagtagtcgacggttttgatttttgaaaagttacttaggttaaaaaaaattgatttgggggaaaacctaataatactgggtcggattctgagctaacccgtgaactgtggttggatcgtgtagtttcactaagtcactgaggttatgtggtaatctccctctgttttcctatttaaaaataaatcaaaaagaaattcatttttttgggtggtataatggaattttttttttcggatgatggtaaaatagataaaaatccaagtcattgggatatttcctgttgtttgtggaagacaattttaatatttatctctaaatgtgaataataactgatgtcattgaagttattgggatatatcgatcatcacacggttatggtgaagaaattggtgtttcgcagactaaagcggcctcaaagacaatgatcaaagttatttttcacacaattgacctgactcctgaatctccaaaacaaataaacatacgaagatgtgacattttcttttaagtgggtccttctaggaaagcatcattaaagttattacagaccaaaactatagcatagtttggtgttattttttatttctttgggataaaacagtgtggtgttattttatttagtaattttcacttggttaatcaaatttgctgttagttttcaaattcaatatcagaatatgaattttgttttaatttttactcgtttttaatagcatgcaaaaatgtaatgtagaatttacccttaaaagttacaagagtggagcaaaagaaatggcagccatttaatggcagataaagattttgtctctgaaacctcttttgtcaattcataacccaacgtggacccaaacttctgaaacctctttgaaaataattgggcactggtgaccagtccgccaataattctacaagttttgttccttttcgtatcgttacttacatatacaaattatttacatttttgttattaatttatgcattggacagtcttatttctttcgctggattcgctattctctgttctgtaatatgcggtgcatttaattttacagatttttccccataatcaagagatgctacattcaccttcctacccctatccttttacacgtaaacataggaaatatctgagggtaattaagtaatgttctacggacctacgactttaaattcttacccaccaccactctccttttcatttgcagacatgaccctaacttggtctcttactctaacccgcgagataatggctcctccacaaaatctcttccttgtcgctattgccttcgccgtcattttcacggcctccatcgtacatggtcgtcataatggtgcagaagatattgtgcattcatcctgcgaacacgcgagctatccatcactatgcgtccgtactctttcgtcatactccggtccaaccatcaccaaccgccgcgatctagctcaagccgccataaaaatcagcctctcccacgctcaaagcgccgcgaagaaactcgcggtggtgcgagactcggtggggaagaagaagcaagagaaagcggcgcttgtagactgtgtggagatgattggagactcggtggacgagctaagccgtacgctcggcgttttgaagcacctccgtgtctctggcggttcagctaaagagttccggtggcagatgagcaatgcacagacgtgggctagcgcggcacttacggatgacgacacgtgtctcgacgggtttcaagggatggacgacggtgaaatcaaaacggaggtgaagcagtggatgacgaaggtggccagggttacgagcaacgcgctttacatgatcaaccagctagatgagacacgtggcaaaccccacgacgtacatctttgatgttaatgcactagatcgttttaatggacggtctttattgtgtgtgttggtttttcgttcatgtgttttaagtgtgagattatctatcgctacgatatatagaaatgagtttttgattttggataatgtcgtttttcgtagttctgattatggtctaataaataacatgttattttatcctctatgtcagtatatggtgttatggattcgattgaaagacttgttactctcgtacgtacgtcatgtgattttgtcttgatatgaaactgaaactccattttcttgagactgataacgtatgcgtataactcataaactatagatgtttgaccaaagctcatgagaagtcaggcccatcaagaaagcccaacatcgacatggcatcatgtcgttaagaaagactactgataaatccgggatcacaaatagaatggcttcgatcgaaatccataagtgccgggaggaaacttgccgcatgagaatcgattgtgctaaaagttaggaatgaaccggtcggaaatgaatgtcctatacaatgctaaagaggcatgagaaaagggtcgatatttttttctgagaagtcaagagctgattattagacattcattttcatatccagttatactcagcattttgtactaaacttatattgatatcaataaaagaattatgtactttaaatctccagtcccttaaatcatttcagttgatgcttattcattatatacgacgaaagatcgttaatgtagtttccaccccttgttatataattaaactcaaatttctcaacagtatctagaatgtttcgcttcatttcctaatccacccatgttggtatcatatatatgaatttaaaatcttaccaactaattttttcaaatacatacggacgataatttagggctttagaaaataaacgaattttttttttgtctaaagttaatagtaatcatcattttcaatctttacagtattagttacactttcgagtaatcaaaactaaaataaaaaccaaataaaaagaaaacccctacacaatataatataatccgtcttatgaacatatcttaaaattaattctcaaataaatggtcacatgtagaatcatttaagactttttgtttttgctcttctttaaatagttaacgacgctcttaattttgttattacacaaccacaacggtcagtttgaatacataactaaactataatttttttgtttgtatatttttataaaaagtaaacagatttttttgtatatttctgaaaatagttagatcgtttgaaagcaatattttcttgaaatttcaaggaagttgtaaaatgtacattttttttaaatagatttgactaatccaggtccacggcgaaagagatgtcgcaaaccagctcatgtcaccaaacaacaattagagccaatgtgaaatggggtgggagtgtgaccacgtcaggtgggatttgccgtgagaggccttttttttatattaatttgttattttttcttcaattattatttccaataataatgaaactaaaattaaataaacttatcaacaaatacaaatatttgataaattagtggatgcgcagtaaaaaatatgaatattgatagcacaatacgataacaaatttttgtaattattattaaaaataatattcgggatttgataaccatatattttttaagtatggcggaagaaataatagtctcttactttttattcaaaatagggatttgataaccatattataatatttgtaaaatattaaacataaaagtaattaagcggaaaactaaaattacttaaaacgcaaaaaattaactagtacgtagatggttaatccacaactctttcttacatagaaattaacaaatcctgcatatcaggatgacatagtcgag

SEQ ID NO: 1761 - DNA, 9757 bp, Arabidopsis thaliana landsberg
  unsure (1)..(9757): unsure at all n locations
ttggtattcattaccgacattaaggaatttcacctagttatgcaaccatagatccatcttgaaataaatcctattttagcattgaaccacagaggagttaaatcccaatttgaaagaagtagtgaaaacgaaattttgaaactgcttgatgctggtgtcatctaccctattacttgggtttctccagtgcattgcgtccataaaaagagtggaatgactgttgtcaaaaatgaaaaggatgaactaatccctactagaactataactggtcatagaatgtgcattgattataggaagttaaatgctacatctaggaaagatcattttcctttaccattcattgaccaaatgcttgaacgtttagctaatcatccatattactgctttcttgatggatatagtggtttctttcaaataccaattcaccctaatgatcaagaaaaaaccactttcctatgtccttatggaacttttgtttataagagaatgtcatttggtttatgcaatgctcctgcaacatttcagaggtgtatgacctctatattttcagatttaatcgaggagatggtggaggttttcatggacgatttttcggtctatggcccctctttctcctcatgtttgttgaatcttagcagggtattgaccagatgcgaagagacgaatcttgttctcaattggccagaaaatagacaagaagcttcatgtcatatattacgccagccgaacgttcgatgaagctcagggaagatatgcaacaactgagaaggagcttctagctgttgtattcgcatttgagaagttcagaagctatttggttggatcaaaggtaactgtctatacagaccatgcagctttgaggcatctgtatgccaagaaggatactaaaccaagactgttaagatggatacttttattgcaagagtttgacatggagatagtagataagaaaggcattgaaaatggtgcagcggaccatctgtcaaggatgagaattgaagaaccccttccgatagacgattcaatgccagaagaacagctcatggttgtagagttcttcggaaagagctacagtgggaaagagttccaccaactgagtgctgttgaaggagaatctccatggtatgctgatcacgtcaattacttggcatgcggagtagagcctcccaacctgacaagttatgaaaggaagaagtttttcagagacatacaccattactactgggatgagccttatctttacactctctgtaaagataagatctacaggagatgtgtctcagaagatgaagtggaaggtatcctgctgcattgccatggctcagcatatggtggtcacttcgcgacgttcaagacagtgtccaagattcttcaagcaggcttttggtggccaacaatgtttaaggacgctcaggagtttgtttcaaagtgtgattcatgccagagaaaaggcaacatcagcagaagaaatgagatgcctcagaatccaatcttggaagttgagatctttgatgtatgggggattgattttatgggtccattcccatcttcatacggtaacaaatatatactggtcgtcgtagactacgtatccaagtgggtcgaagctattgctagtcctaccaacgatgcaaaagttgtgctgaagctgttcaagaccataatcttcccgagatttggagttcccagggtagtaatcagtgatggcgggaagcatttcatcaacaagggttttgagaacctcttgaagaagcatggagtaaagcacaaggtcgccactctctatcatccacaaacaagcgggcaggttgagatcttcaatagggagataaaaacaattttggaaaagactgttgggattacaaggaaagactggtctacaaagctagatgatgcattatgggcttacaggacagccttcaagacccccattggtacaactcctttcaaccttctctatggaaaatcatgtcacctacctgttgagctcgagtataaagcaatgtgggcggtaaaacttctgaactnnnnnnnnnnnnnnnnnnaggagaagcgattgatccaactcggtgacctcgatgagatccgtctagaagcttatgagagctctaaaatctacaaggagagaacaaagcttttccatgacaagaagatcatcactaaggatttccaggttggtgatcaggtgctgctattcaactctcgcttgaaactctttccaggaaaacttaaatccagatggtctggccccttctgcatcactgaggtccgtccttatggagcagtcactctagctggtaagagtggagattttacagtaaatggtcaaaggctcaagaaatacttagcagaccaaatccttccagaggtgacatcggttcatctccaggagcttcttgatgattaaaggagtaaaggagtcaagttagagactttaaacaagctcacttggcaggaagtcccatgactatttttttaaataaatttttactttctcgttatttttgatttgttttagttgtgtttgtggttctcaggaaaaaaaaaaaaaaaaaaggagtacgtgaaggtagagtaaaaaattcaaaacttttactctattgaaggcctagagatcgagcacattggtcgagtatggatgatgtttaaaacttaaaaacttttaaatcatcattttactcgaccaacaggagctacagagtcttacacagagttcatcaagtttacagcaaattttaggatttcctgaaactttcctagtgaagaaagagtaatgattcagaacaaagagacaagcgagggacccactgctgcaccctatgtctcccacgctcctaaccaacagacaagaaatccaactccttcttctcacacccactcgaccccctcaccttatcccatctctacactccactcgacctcggcgacatcaccctcctcacttatcacttactcgactttgttatctccacctcacctattaaactcgacccatcctcattcatcatcaccaacaaaacaactctcatactcccaaccactcgacctcctcaccaccctcttcatatactcgacctcatctttctccaaacaccaaactttttgcaactctctcatctcccatagtcgctcattgcaattcaagtcctcaagtgttcgtcacaatcactcgacctctaccccaagaccatcactcgaccgccgcaactcacttcttctccaaagccaccaccgacttctcttcttccgcgagttcaacatcactcgagttctcatcacgattgtcattctcacaaactttactcgatctcttcaccaccatcttcataaccgagtcactcgattcaacaaacgcactcgaccgctgcaccaccttctcctccgtccaagccgcaccacttggccgcttcatctctctagcccatacttcactcgaccacagtcccacttcactacctctcattcatagccacttcactcgattcactgcatctctctcatcatcgctcactccgattatcaccaagtactcgatttcaaatcatcatcaacttcaccgctttactccattcactcgacttcacggcaagagcacatccgcctttcaagctcacatttatcactcgacttcctcaagctcattagattcaccaccaaaacaacatcactcgaccgcgagttcaccaaaccgaaaaaaaaagaagaaatgtttttttttggtacactcgaccggttcacttgattggtttgtgtttttggtttgctgttactaacgtattaacacttatttttgagtttcgtctgttttcaggtttcatcatgagtaactacaatggagaatcctctatggaccctgattacaatgtggatgaagctgagtcctggtccgctagaccgagagagcaacatgtttaccagagcttcagggatgaattcgaacgctctgcagcccgacgtaatcagagaagagctgaaatcgccagaggaaagagggcgatgtcaagtagatatgagctgattgatgaggatatcgaaactgagtatgagccagagtcatggcgcaaggagacgaagctgctgaacaaacccgacgaggttacagtggaggagtatatcagattctttgagatgaatgacttctggggaacgaggtatccgtgttatgagactttagcccagctggggttactggaggacgtgcagcatctgttcgagaagtgtcatctggagacactcatgtcttacccttaccctgcctataagggggagacaatcgagtttctttccacgctgcaagtggagatgtatgagggactcacaaactttgagctggataccatggggttaggcttcttgacgttctcagtgaatgaacagcgatatcagctatcgatcaagaagttggaagaactatttggtttccctagtggaaagggaaccaaacccagatttgacagagaaaagcttaaggatttatgggccactatagggaacaatctaccgctaaactcggcgcggtccaagagcaaccaaatccggagtcctgtgatccgctactttcagagattggttgccaacgtcttttactccagggagtctacaggcaccgtgtctaacacggacatggagatgatagattatgcgcttacagggattctccgccggacgaagggaaagaatgtcttgagaggcgatctcaacaacgcaccaccagtaatgcctctgttgatccatctgtgtggatacaggaagtgggcgttgacgaacgggaagaagaaggtgagaggagcactatgcgtgggtggcattgtgacgccaattctggaagcttgtggagtacccctcaaggaaccagggttagcaccgaggatgatggacttggatcatttgcgccgatgtgagttcttggagtttgacatggctggcgaccttcaccgctacaggttcgagcattcatcgattagaatcgccaacattcttctcccctgcattgacgctactaggattctcgagggcaagaacattgacttgaagcctgcgcttcaagatctttatttcgagggcagtccgccaactgaggagataagtcacaccgaaagaagctacaacagaagatgttgatgagacagatgatatagatgaggcggagttcgacactagcatgtatcatttcagtgagcatgtacctccagcgaggcagagcaagagtttgactgaagctcataagaataacagtaaattgcagaaatggtgcaagaagcaggacaagctgatcgccaagtgcctcaggacaagtttattcattttttgtttctgtgattggatttgtcctgagtactctcttccaagtttattcacacagtggtctgtgtgatttaagtttgggggagggctcaggaagtgtgtgttgcattgtatatattcttgagtctgcattcatctaaggcatagaaaaaccaaaaaatttaaaaaatttaagaaaatgatttcacaaaaaaagagtgttcatgtaattgcattacatttaggattgagtctagagtgttttgatttaggattgttgcatgtgcattgtgcataggggataatgatgagatagccttgtaagcattttggttcaccggataaactcagtgccctcgttgcttgttgtctattgcataatcaatgaatttgaaataaaactgaaccatgcctagacagctctacacgaccaaattgtcatgatctgataacattccctatcaatttgaacctgaatctgatctttaattatcatgtctgcatcaaatttgaactcatggataccctaaaatacttggattttcttattcattttgatcactcttgttaatccaagtagctgactctccttattagagcagttaacccaaacccaaacctagactttctttcaagccctatatcacttgtgagtgtttgtgaggtcttattccgattaagcttggtagaaagtgttaggttcgtaacgacagagatagtgtctcatgtagttctagttcgcattcttcagactagataggactaggtgggcgcttatactttgggttgggatgtgtttcccaaaaaaaaaaaaaaaaaaaaaaaaaaaggggggttgattcaatgatgagaaaaagtaaaggactctaggtgaagtaagctaaagaagcagaaaaagtctagtaaagattttgggatttgtaaagaaaagaaagagttcttgttagctattgaagatgggcaaaagcccttggctttagaatgttaaaaacaggaatcttagttgttaaagaaatccaaatccgctagatgtatcaaagtgttgagaaagcttctcctagagttaagagaaaagaaaagaatgattagaaaaagggcttaaaagattcatgaatgcaaagggtagagttaagttcttgtattgggattggagttggattaccattagagcttcatttgatatattctgggtagatgggatcttatctctatatgcatagcttgggacctacctttagcattctaataaagcttaatcattttttgagagatccccttttactgaagcatattctataagggatcatctttgtctcttgaccttttaccttagccaaatgagttcattgatgatgcattgcttgattcacgttccagaactaatgaatgttaaagggattggtagatttgaaaacatgtgtaggtcgagtatatgagtcggattgattgataacaaggcatgtctaacgtttttaagtagaattcgatcatattgcagcttaaaactatcaacttggacattgatttcatctaatttatctggtgctttggctctgagtccccactttcaaacctcacctccagcttgttcttaattgcttgcttgagggcaagcaaagactaagtttgggggagttgataagtgtgtattttgcatgttttgagcatccatttgtcatcattttagcatcatatcatcactgttttataccatttcacaacatttatcatcactttgcatgtttaggatagttttgcatgcatgttgcatatttgcgttgatttcaggtgatttggagctgttgacgtgctatctggaagaagcggacctgatcatgacaaatcactcgacccagaggtcgagtaggagcttcaagatcttaagagatgactcggccaccaggtcgagtaggggacatcaccacttcacctcaccactcgaccccgaggtcgagtgccatcatctctatcaccagaccgtcactcgatcacttcactcgaccacgaggtcgagcgtcttcatctccatcacctgaccaacactcaaccacatcactcgacccccaggtcgagtgacttcatctccatcttttgaccaccactcgaccacatcactcgaccccctggtcgagtgacttcatctccatcttctgaccaccactcgatcacgccactcgatccggcggtcgagtgtccttatcccgttgccagaccactactcgacctcatcactctaccttgaagtcgagtaacaccatcacaccactcgactgcatactcgatgacaagcttcagagccttcttcattccgcactcaaccagacactcgagcacaaggaagaaaagaagtcactcgatctctcactcgaccacatgggtcgagtacagttcttaatctgtcccaatactttgtcgttttgagtattagggtttcacaatgtttggctataagtagcatgtacttcacatttttgcagacgagaagtttttatctagttttattccgtagacactgtgttctagaccttttgtaatccggatttctctttatctattcagtattcagtatttcttcttgatttcatttactgttgttcatcctgttatcattctgctattacactgttgttatcatgttttcatacgtttatgttttctgcaatgatgtctgagtagtgaataggtttctgaggatggggtagagtagtctagaattctcagtatgctaggtggttgagtttgatttatagatccgttctgtattagttgttcttaatgcctattgctttctgatcaactgtaatttgagtccagacatttccgcgcccaaaaggtgttcgatgaaatgtctgaaccactaattccagagattcgtggccctttaccaaggtattggttgtagggagcgttttggctttaacttgttgatttgtaatgcttgttaggttagctctcgtctatggtgattgagtctgggactaggttaacttgagggtctctgttgcggtagcacttagatttggttaatgaacttgttgtctagggataatttattgagcatgtcaatcacctgtaaactgagaaaacgaaactactcgattaccccatcctcgggaattctttatctgattgaattctttgtttactctactgttgtttactgcatcttgttatctgttgcatagtttctgcaattctttcctgttactcaacctgatactcgaccacccagttgtctggcaacagactatgcagtcgagtatccctgtttcactttctgcctgttactcgacctgtcactcgacctcatccagtgctctgcacagagctgtgttggtcgagtgttttgctgtttctgtttgattttcgtgtctctaaaagtgcatgtctcagggcaaaacccttagagacttatttatactaaaagcgtgtaaggataagaaagcgggcttcgagccaacttaacggcacatagacgacgtgatcaagagtatcggctcaaagtaggcttcataatgggcttcgaagtgggctttatcttctcttctctttctgttgctcaggttgtctggttgtttgcagattgatcagagggtcgaggtggtgatcgagtaggttggttgacagaatggtctgggctgcttcttggcctctatgatcgagtatctgtgtcagctgtcaggatggactagttcttctcctctgcgatcgagtagaactaatggactggcaaagtggactgcctgctcacctctacgatcgagtagaactgcagaatggactgcctcctctcctctgcgatcgagtataagtatcttgatggactgctgagctgactgcttccctctctgctactggtgatcgagtatgttggtggaaatgtgactttcggttatgtttttcctctttctgagcaccaatagctccaaaacacctgaaacaactcgagaatgcagaatgtatgcaagactagtcctagattcgactaaagatgcaaaatgtacaaaaatcatggtgaatgctatgaaagatggatgaaactagactcaaaatggtggtaaaaggatgtgtaaaacatgcaaattatagacatctcactatagcaccatccttttgtttattagcctcgctgacaatagccattgctatagctatatcagacttctttagcaagatggttacgatttgcctacgttttgggggtaactgtgttaacaaatgctgcttcagtcttcttatctataacaaaccaaaaggaattttcacatcacatagttctccaccaaatcacaacacaatacaagaaactttggcataacatataagtgatatcatttcttttctttttttcttcacaaatttcacgaacagctccaggcaataaacagatagttaactgacccgtccatgttggaacatgggaatattttcacaaaaaactctaaatttaattctcttcatatttatctagaaa

SEQ ID NO: 1762 - DNA, 13224 bp, Arabidopsis thaliana landsberg
caaaaaatgtcatcacattaaagtaaaaaaaaatattatttttaaatagcgggacggatttggattgatatgaaatatagcaagacgggtttagcaagacgtctatgatcgaatttccacattaaccaatgaaaaccgcataggggccaagcgaatccagaagggttctaacttaatcttaatcacctaactaaactagagaataccctaatctagctaatccatcctcaagaaccctaatcactactcaagcaacattctcaataacacaaacccataaattactgaaatcataccaaaatgtaaatctaaacaagctaaacaactttacttaaacaagtaaatgcaaaaacaaaacagattaagagtaattaagttttgaagattcataaacacaaagaaaaactaaaggataaaagctagatcctttggacaaaccccaaagtgatatatttatagtaaaatgttgaaaccctagattcactagaagacaagagacttcaggcggtttggtcaaatgctcgatcttggggatcgagtaaggagggtgctgtaaagtctacgcctttgtgtgtatgctccgagtgatcaattggtcgagtagatgcttcttcctctcctatctgtatgctcagatgtctggttgagtggggaatgaggaggatccaaagtcgctttgatagatcaacaagtcttgtagagttggtcacccttggtcgagtaaatgggtcgagtagaggattgagtagaaggggcgagtagatcaatctgctgcttcttctgaggatgccttgatcgagtaagagggtcgagtgaattgctgcctcctctttggctgcctggatcaagtgaatgagtcgagtagaatgctctgttggttccctcctggttggatagagtagaaggtcgggtagaatccttttaagctccttctgcacctgaaaacactccaaaatatgcaatgtgtatgcaaaatgatcctagatgcctaagtatgcaaaataagctaaaatggtgcaaaatgatatgatactatgaccaaatgcaaagctaaatgatgataaatatacacctaaaatgagtaaaatacagtgctatcaagtttgcaaagaagattatctgcttgaaaaaccatctattttgattgaggacactatgtcttcgaagacttctagatgatctagtggtgattcattagaagcacctcgaaactttcctcgtgaaacaagattataatatgcagggtgaatagcaaagtcttctcttacaaaaggaggtagctggatcgctgatcgattggagtagaaaagatcaactctattgaagtcgcctatggtagctggtctggtctgcatatggtgtcgatcgaacaccatgttggtttcgttcgacactgtcgtcgaaatctgccatagaaacgtgttacaaaatctgatgatacctgaaacacaagaaaaagaaaagtttagacttaaatcgacacctagtctaatgatgttgcaaatagaactttggcaacgacgccaaatttgatatagctccaattgtcttaagcttactctctcaaataagagatcgtcgttagcacttagggatcgaattccactgagctcttgatgttcacacaaaagacttatgatgattttaattaagctagacaaagtgtattaatgtaaaagacaataaaataagtaaatgagttctagattcaagcgatttaagcatcgggtctaaggaattgtcttggaagatagataaattgtagatctagctaatagtaggattgttatctcaccgttctgaaactcaaactatgattttagagtaaccgttgatattcaatgaaactcattatacttagagctaagattcccggtgatgtgccgtgaaattctatacttaaacatgcatgctaaacgagttcgataagttcacctagtatctaaactagagcctttctatgagcctacctgttctttcataaatgcctaggctcatctaagatagttccagtaatagatacctatggtgggcatacctattatcataaaatcaagttctagttaattactcttaaactagcaataagaataatcaagatgaagaactctacagaataacctagcaaaggggttttcgatctactaatccatctaaatccctattgagaagccttattcctaacaagcagattagtgagagtgtatcaaacaacatgattgaataagaaagcataaacacagtaaataagataagggaaagaagggatctcttcactgtattaagaacttgaatgaatctttgaaaacaatcgatgaatagcttatgtctctcaataacagggtttttgaataaaggttgataataagaacttgataattgaaactagggtctaaaacaatgtatataaaccctataaaacgtcgagagactaataatgtaaatagggaagttttctggggcaaatttcctcttttgtaaacttgaaagcgtctagggtttttgctgggctgaaattggtgtcgatcgacaccaagagtgtgtcggtcgacactcctcgctgattcctgaaccaaaatcgtccttagcttccttttccttagattttgctccaaaatgtctccttatctccattgttgtcccattgcatagaatacctgaaaagacactaaaaagactcgagaaataacataaagactcaaaatcctatacctaaaacatagataaaatcggggaaaataaggatatatcactcgcgaccgggtgatacttctctacgtacgattctgagctcggaagatcgcctctctaacctctaggaactcagaaggaaattttgggctggccttgtagcgatctgcaatatgaagagaaattatgagaacgagttcaaaattaagatctttcaagtcctatctgtttaagagaagtctaccaggatcctctgccgacatcctcttccttcccgagaacggactctcgtaagattcaagatcaaccctaacaaagaagtagaactcctcccagttcttgaaattgctaaccttagggccagggaggaagttatatttggggcgattgcttaccacctagtatccaggcgacctaatggttttcatcgttgtcagctcttcaacgttcactcgatagccttcctcagcaccaaaagtcaaggcagcgacgaaattacagattgctgctggagtaacttgggagatcgccatacgacggcgagtgaggaaagaaatgattaaggacgggattggaaaccagaggtggcattgcctgaagtaggcctcatataaacacacatatccccgttgaggactccaaggacgatcatcttcaccaggaatcatgtaaatgatcgggcgatctccagacccgcagagagcaaacagttccgcaatagactcatccgtggagaggcttttactcgcagcgatctcagtgttccagtcaacgatcagatcaagatcaaaatgagcggtctccataggaagtaacctcgcctcaacttcagcctttatgtattgcaggtgaacgttataagcgtcttccagatcgatgaggggatcaaatcgatctaggtagtctacatgttcttcaggaagaacagcgagatgtccatcgggaccctcccgatctgattcatcaagcaacgtcggaatctcgatccggttagatcgactagactgagcttcgttacttggattcccggttaaccgagagtttcggcgaactaatgatacttcgctctcagaggaagaagaggacggagagacaagaacaaccttacccattgccggaaaaatcgataaagaatcgagagtacaaaataattcgcagaggagagagcgagagctaccttagattcttcttgcaagcggcggaaaatgatttcccgagggtttaatctaatataaatagaggcgaatgggcggcaaacctacgaggtcatcattaaacctacgagacgcttcggttcctgagcttcacgcgcgcgtacagacgcggcgatttgacacgtgtcagatacgttcgaaatacttgacggtgtaaaaataaatttagtcaaattttatttttaaaccctcaagtatttttgtacatgtctaaaccttagtttgtagatatagcggttgcagcttttttttttttctctttttttgggtgcgaaatagtggttgtatagtttcataatcgtgtaataatctcgattcaaatctttcacatgatgtaaaaaaaaaattatttttacaatgaatgtgaaagatttttttactaaaatgacgttgagtagactagataaagaaggttttgataataaaatgactcaatattgagaaatgtgactacaatctaagtcaaaacattaggaatttctgatgatgttacattaattaatatgacttcttgaattgtttatccgttttcataaaagacggaataaccaaacatctacacggatttcattagttttatcatgagaatgtcattcaaaaccaaccttgtttctaaattgttaggggtggtgagaatgaaactattagtgagaaaccgtgactataaacaaagtcaaacaaaaacaaagtcgttgttccaatgcatgtcgacactaatgagtttcttccttatatggatattaatttcaattagttttttaggatgtgcgattgcaatgattgttatatcaactaatatgcaatcatttgttgctttatcctcattctttaatcaaactatggacaaaaaaccaatagatggtgatcaaagcagttttgctgcctagttgtagcgactgctttataaccatctaacgtgataggccaacgaatcgatagtaaacaaataattatccagagacatatcatatacaaaagactttgtatatagaatattgctttgtaataatttctcaatatggatacattctttctacgtgagtaataattgaaagtttaaacaaatgcgactttgtttttctttctctcttatacaaagaaaaaatagtcatcaaactgattaacaagagtgtggagaaaatatcattactaacacaacgatcatttttgtatcaagtttatcaatttgtataatttgtaaccaaattatttgattgtgagataatcaaaatggtcaattatatgcatgtttcgttctggtcgaaattaattagaattccttcgacggcctaattatggttgactttgcttttcctttattttttcaaacgaaaggagacgaaaatatagacgtcaatatccttagtcttgtagcgtaattatattagagacccacctaaaacctaaccaaccaaatctaaaagaggcctccttattactcttttagactgctgaattcttttagtcattaggttacctactagtttttgtctcctttagatatattgtaggcttgtagtctcaaaaacacttgcaagctgcgttctattttctccaatttagtttgcttttgagttttgaacttaagtttaaacaataaattcgacgtaagaatgtaatagtagagacgggctctataagcatgtaagatgtgctaatgagtaagcttctaggtttggggaactacataaaagcatccccaatggttaagaaccaaatgtttaaactaaatttttaatctaaattttactttttgtgagctaagtgcatttgtgtagagactatgtgacaaaatttccaaattctttttttttgttactctagggtccaatatatattgttttaaatatttaacctctaattagtgttagacaatagaaagtcttaataattacaaaatattctatgaattttttttatatacttaattaaaaattaatgcatccaaatctaacagcaccacataatgacagtaagtaaaactttaagttaattgactagttgtatcacggggagcctcagctctggcctcctcctcaatttttttgttaacgcatataaacctaatgctgggagccagagctgcgtgcttgcatacagagccagggctacaggggacagtttggaattgaagctgcttgaaaaaagataacatggggtcaagttttaggcaaacaaaaactacaagtagtgagaaagggtaactagttggggtaaaacaaatagtagggcaatgacaaaacaaggctagaatgcttaattaccagttgtgcatgttgtcgagaatagagatgcgtgatgaaactatcaaagtcccggccagtaacaagatctggggcagcaaaatgatgacacacagcgcagaaccaggaggctggatcacccatttcactgcacttctcctcctcaagagctactggatctgtggaaaataaaaataaaatagtagagctagttcagcaacagaattcattcaatgaggagaaacacagacctgccagaaggaagtcttcccagaggctgattgcaagagtcaaaggcatttctccgaatggaaacgggaaaatagtgtagcgacccttctcacggtccttgtcacgtatagaagagaagtgtcgaggaatgtaggatggtggacgggatatgaccatcatattagctggaggtggagtacgaagaagagaggactcaaggaaaagagcatacatgtttgtcggacctgttgagaaactagagaattaagagaatcccattaagactctagctatggaataaggatgagaagatactaacttttaatgacctccttaagagagattccagtggaatacactgctttaaggatgtcacgagggacctctgatagtacgccaaaggcagtgatggtgataggacctgtgtagcctaacttcctcaaattccgtttgatacacggacccaccagtcgagcatcatagccatcgggaaccggaaacgattttatgtcccagaagaccgatactggggccaaagctgcctcctcggtaggcggaggctccatcaccctcatcatcggaaaatcaaaccttaaaaaaaaaagaatcaaattcaattcagtcaaacatcagagaaccgagaggaacacggctgctatagaagttgtagggttcttctatctatgcaatcagtcgatgaattttgcttagaaaatcaaacatcagaaagataaattgacacaccgatcgagagagggagatatagaggaacacagctgctaatcgtgttctatctatgcaatcagccgatcagttttgaaagaaacatgatgagatcgtgttctatctatgcaatcagccgatcagttttgaaagaaacatgatgagataaggaccgagaattttaccttagagatgttagcaggttggatcgatctcgatatcgtcgactaggttttcttatttttgaatgaggatattataccgacgccgcagtatatatactcacaatgggcttcgctttaatgggattcactttaatgggcttctcttctccaccgtgatgaatagactgagtgatttttccactttgctagaaccaattggagaattaggataccctgtcgcagattacctttcatagtttcttaaattgttgtgtgccgatgaagaatagagaatgatagctttagatgtctttgatatactaaagactaaaggtcatggcagtgtctctgtgtacaacattcttatggaagctctttacaagatgggtgattttttcaaaagtccttgtcacttttctatgaaatgaaggaatttgggtttgaaccagattcatcatcttaaagtattgcactttgctgtttgttgacaaaggggatgtcaaagaggcttgttcatgtcatgaaaaaatcattgagatgtcgtctgttccttccatagcagcttatctgtctcttactaaaggactctgccaaatgggagaaatagatgcggtgatgttattagtccgtgaatgtctagcaaacgttgaaagtggtcctatggagtttaagtacgctcttacggtttgtcatgtatgcaaaagtagtaatgcggagaaggttatggaggtagtacacgagatgaaccaggaaggtgcctttatcaaatgaagttatatactgtgcgattatctctggtatgtctaagcatggaacaataaaagcagcaaaagaagttgttgattctgaaaatcgcacaatagatttgtttaaagggggtaaacaaattaacttaactctctctcgctatttagtgaccaaagattcaatgaaaagaagaacaaggttgcttagagacaaagttagggttttgcccaagtacaaagaagaaaactagggtttttagtattaagtttcggatccttgaaatagaggacaaacccctctatttatacgggattaagacggttaaaagatttgttaaacttctatttcttcgaggcttgaatcttctaatttcctttatctccaaagacttcctattttcaaaggagaaaacttctttttcttcgaattaggaagtcggctagacggtctccctacttcgggctaaagtcggcaaatgagctccttattttggcccattaaaaggctaaaccgggataccccggtttgactgaaatctcagtctaattcgtagtttctctggtttaagccggtattgtcggaggtgctaattccggcaccaacaattagtcccccccagttcgggaaaatccaaatgctaaactcgagtttttccgaattaaaagaagtgaatattcggcttatactttaggaagatgcgaattaaaatttgatccgttgaacctccaagatacgtcagtttagcttggcacgcgtcgatgatataaaacaaggctaagcttgtgagttaggtagtctgatggacctcatgagttgttgaggagttgtgggatgctctcctggatgatctgaatgcctagcagagaaatgacctgactgatgagccgagcagtgagataggttaccaaatgatcttgctaacaagctgcaaggcaagctatcagatgatctgacgagcgatctgggatataggttgctgaatggtttgtcttgcgatctgcgagatagccgggcagatgagctgaaaaaaacatttgcgatgagctgcagacatgccattatcatttgggttagcaagatacgtgtgcttttgagctctttttttttttttaaggtgcgaggaactctcggcttatcctgttttgaagacttaaagcaagacgaggtctcggtttttgtgaaacattttcacataatagcaagcgttgagctcggctcaatttataagtgtgactgcgagcgttgagctcggattaactgcaagaattatttttatcttttgaatgtagctcgatgctaggtgaactaagctttttgagtcgggactcaatttagagcttgacttcaacaatcaaaaaatgtaaagcacgaatacttaatcttgatgggagaagaaatggcgagaggctgagctcagaattgctgttccaaaggtagagttgcattgttcgtctatgaagagtcgttcttatcaactagtgattaccttgcagcagagagaaatactgtgataactctttgtcgaattcgacgttaaggtgtaggttggtctttctagaaagctgagcctcggggcttcgaattgatatgcagatcgccatgaacattcttttggattgctagaaatttgctttctaatttggttgatcgtgcagtgaggatctgcgtttcgctggttgcatctgttgcaaagaaagagtcataaccttcagtgtaaatttctgattgaggcgagattggcttcttttgaaagctacttttcgaggcattccgtggataggttacacaccacgcagttcgtcggaatcttcctggaaattgatttcaaagtcgactggttttgtaacttttgatcagtgtttcgtctggctgtatctgctggagagaagcgcatgtaactttcggcacatagcttcgattggaacaatattggactatatggagagctgtctgtctgggcaatctttataaacttctttggagctctccacattgttgacttgtcttgtagaaaaagctcaaaatgttagctgttgacaagttgagctaggaaagctgctaggcgacttgttgaagaactccaagctgttgacgagctattaggcgggcaatagcaagctcggaaggctgtcggcgagctgtaagctgggcgaactacgagccagagaaactgcagacgaactgtgagctaggaaagtgcagactcaagctagacgaactgcgagctaggaaagctacagacgaacagggagctaggaaagttgcagacgatctgttagcttggcgaagtgcagacgagctgctagctaggaaagctacagacgaactgggagttagaaaggctgcagacgagctgttagctatgcgaagtgcagacgagctgctagctagacgaactgctagctaggaaagctacagacgaactgggagctagaaaggctgcagacgagctgttagctaggcgaagtgcagacgagctgcttgctagacgaactgcgggctaggaaagctacagacgaactgggagctaggaaggctttaggtcggttgacttatgtcgaccactcttatctttcagacttttatatttgaataaaatgtttttgtccttaagaacaagttcatgtttttttttttttttttttttgtgaacctccgtcggttgattacgtattaacaatatcggattcccaatcttgaaattaggttttaaatcgactagattataagccatatgcaagctttgagctcggctttcgggcggactggttttcacctgacgtcacagccgattttttctgtctaagttcgggttagatgttaagtgcgaaactgtgctcggctttataaataaaagtattcggcgtgtactgggcgcgagacgtctttcggcttatgcccaataggcctatgtataatttaaagagggagttctaggctctgtataaaaaataagtgaggcggactcagcatattagttggggagcgagatgctgggctcggcttactccccgtagagcatctgttcggcagatcgcgaaatacagggttcggcttatatttctgtccgaaccagagcttaagtgcgagaaaactggtctcggctatccctattagaaaaattaagtttctaatagggcgtggattatttcaccactgcatccatgtgagacgcgcatcgaacacctggccaggatgccgagagttgatttattacagatcttaaagcgaattccgtattgagaatgcaaactttaattttattaagtggtatagctgcatccttacgaaggattgcctacgtacccagttagggatcaaaccattcgtagttcaagttctaatggagaggtcggattaccgagctcgggttttttttttttttttttttttttttttttgcatagacgagtgtttcgaaaatctatgcaaaaaggtataacagataatgcatgtatatgattgagtgatgtttgttagattataatcgataacacttatctcaacggtttggagatggagatgatgacatcaacgacatggacgatctgaatatccgaaattgtaaacgtcgatggatgaaaatctacatttgagatgttgttcgttagagaagatctcatctgttagtgatataaggatgaaagctagcgctataagcgaaaatgtcgatcaagcttaactaatatgtaagaaagtaattgaacttatcttttatgtgggaggtcgtcgagacggagacagaattggagatcgcatcattgatgaatgagtggaagccttgagcgattgctagtgatgatccattgtcacttgttggtgtaatgtacttccttttgctgatttatagaagaactgataacttccgtttgaaccgttaaattattgatcccaccgttgaatctttagctgatagtcccacgaagattttgtccgaattttagtcagatcggatattgcctgaggcttctaccaacttatgaagttgctgtgacaaagtgaatttttcttcctttgctatatttgtttttggtttcggttgctccggtagcaacatacgatcctcagtgaatataggaggcagtatccagtgatgcttactctttggctgacttctggtgatcgttcttctttagtgctcgttcctttgaattctcattacacgacatgattttgtgagatctgaacaacgtcttgtgattaaggaagataaagcagaagctctccaaggcgaggaagggacaattttgcttagatatatgttgcgttccatgcctccatgacacatggtccgtggtgatgaagtgtggcgatgatgtcaagctttcgtaaattgaagaccatcggtggcgaggtgaagacgtgaagcctaagatgggcatgttggtggaatcgtcctggaaacgacgatggacgtaaaatcggtcacaaaggtggttgatctgatagccgcagacatgcatctttgggctacagccaggacgtgcttgtcgcagaaaaacagtaataactcttgttagacgtaatcaattgaggcaaggatgagtccgttagaaagataagccttgtagcttcaaaatgataagccaggttggctcgctatcctgggtggaatccgaccccaacaccattctagagccaataagaggagaaacacgtattctaggtgccaagaaggttttaaaagttttgaagctaaaagcatcaaaaggcgatcattctagtacttgagaagtttagcatccggccgaagtctttcccatcacggcaaccagatattttggtatgtatcgaaagctagaagagtcaagattaacgtcgaagtcgaatcgaagcaatccatgaagccgtttggaagatatgacctgaagagtgaagacatgtcaagaaccggccgcttggaaataataagtccaaaaagcatgcggccaaagagacttgaacccgggtgtggatgtcggattcacacactcaagtatttatttatttagtgagaaggattatttttgaggacaaatgtatgagaaaatgaaataatgattacagagaaaactatgagttttgtaagaaaatgtgtatagtaagtttgcacaaaaatgtgtgagtctttccatggcctttggcccataattattctatcttaaatgcatccgttttggtcttcgaaattaatgttcaaacgttcgaatatgaattgacttcgagcttctt

SEQ ID NO: 1763 - DNA, 1299 bp, Arabidopsis thaliana landsberg
aaacaacactatctgaaatccataaaattctatgcattacatttctattaaacttaaactattcatggtttgctttgggagacttaataccacatttaggccatataagctatgtttctatcaagtacactttcgtttctgttagttttaacttttaaatataattagattttaacacgcggtataccgcgggacaatttattttttaaagttactatatataaaagtttatatataaaagttttttaaagttacaattgatgattataatcgaattgttatagtcatgtagaaaaacaatatcaaaatgataattttgtagtaattaaatgatattaaatattttggaagctttatttaagtaactaatcgtgtagttaatatggagagattttgggaagattgttaaatatttaattcaaagattttctttctaattatcaaaaacaattattaaatgccaatggtagctccaggatttatttcagaaaatggctgcaaaattgtatatgtagattggtgcatgcaaactctatttctactaaatccaatgtatctaattattttagatgcaacaaagatcacatccaaaaatatccaattatatcgttagttttgattaaatattcaaggtttcatcacaaccttgtgatcattaattaagagttaggtaccgtataacgatcttaatttaccaagaactatcgattttaagtttttaacgacttgattccattaagaacaagaacaagaacaaaactttaaataggattctcgagttgattgaagaattaggtactaagaagcaacatatcgaattttaggtgaaacatagtactactacaagcatagctagaataacatttttccgaaatacagaagaaccattatctgattttcttctaatttattcttatttgattgacctcgttacatcataggtggaatgctctgctcgtgtctaaagaagttctctggatcaacctttgctttaatcatcatcaatctgttgaaattgtttttgaagtagttagctccccagacttgagcttgtttgatgcatgttttcacgtctttcgtgttccttcccaggtctaaatcacggtagttcacgtaagcttctcgtgggttacttgagacataaggcgtcatgtaactatagagatctctgatccagttgatgtgtctgctcggtctcttgtcactgtctagccaacttgttacgtactgaaccttgaagaggactccttttcgatgcggaaaagggatttgggattcggggattttcccatcattcct

SEQ ID NO: 1764 - DNA, 1535 bp, Arabidopsis thaliana landsberg
cttgggatttgaggttcttgtgtgcttccacgaggccttagaccgatctcgagcggccaatccaactatggcaacagcaacgctcgaagccagcgaaggctcttgcactacagtaggttcggcagccgcaataatcgcctcgggagaggtcgatgatccaaaaattccgaactagaagtacaagatacgccgcagcttaactttagggctcgttcgactctatccctagaaaagtggtttagctaattgcaccgccgagctgcaaaaaagaacaatgaaacaagttaaacgccaatttctaacaaccgtctcgggggcaagctaataactctaagtctaactaccaagagtgccccaactcgtcaaaatcgtcccgataaggttttcgggaacattgacatcgtcgagagccacaaagcagaaatggtaagtatatggctcgtccttactaggaaaccccagatgattttcttatccttcgccggggaaatgtagtatctatccaccaccgacttgggaactcggcaaatctccaaatagtttctcaagtgtgtgagtgtgatctcattccacgtctcgtagtttcgcactataatcctgacgagataccttagtgaacgagtagtgatctgggaaagcgcgatctggtaggaagtcacgtatttccaaaatcaaccttgggattgggaaccagaggaaacaatggtagaaaacctctcgttgagggcgaagaaaccctccggagggttatcgactcttttgctcggggtcggaagagcaggataacatcttcgccgaagtgaaaccgagaagccagatcccgaagcgactgctcggtgcaaagagttgaaccaggcgggtcgggcataacctgtttctttttctttttctttttctttttctttttccctttgtcagctttgcacatcgcaatccgctcggccacctgaaagatgccctcagcctcgttcggcctgaagaaaagatcatcctcgaccttcacctgagggaagaaaggttcgggcacatcccatcaattggacgttccagcctcgttagcagttgggacatgaggccttcgaacaagagatggctcaggatcctctcgaagatcgagttcccgagctatatcagcggaagtatcttcttgagccatgaaagggctcggctcttcgggcgtattagatgatgaagccgcatcaccctggtgactcgaactcggttcggcatcttccgacgagctccaaaccatcctccttttatggatcggagggagatcgtctcggtgcgcggagttttgacaaaacaaaagccgtaaccagaaatttctaaccaggaaaatcaaaacaaacctaaaagacgacggaggttcaccggaaatatagaagaatataaagaaatcaagattagaggagagaaagaaaacctcgaaaatttttccttcggaacttcaaatgaaattcttaaggaatgctttattatttatagaacttttagggtgcattgggttcggaggaaatcacgaaccgcgtcgt

SEQ ID NO: 1765 - DNA, 10281 bp, Arabidopsis thaliana landsberg
  unsure (1)..(10281): unsure at all n locations
agcacgggttatcaatctagttttaaaattaaatgattatgtattatatataaaagtttgtaaattttattattttataagattgaatgttttataggtagaattgttattaaggaagggtataccacataatgatttaatttataactagatatcgttttttatagtgaacgtttacagttttgttatcaatggaaatgttggcaaaatggattgctttcgttgcagttggtctcagacttttcttccttaagcatttcccaggtgatgacatcattcttgttgtgcattgttgatttgtatctatgtattgttgtcaactttgtcatacaatcgctgaagatgtctcgaatcttataatgttagtgaaacatcgagcagagcaagtatctatggtttctgtttcttctgactatgttgcatacccataaactacgtcaaggtcggttctatatataaaagaatctcatttctcaactatatgtttgtcctactgtaagaaaaaagttctgaaatatgtttctctgtaaattgcttatggatttcgtttcgtatatgcagtcgtcgaatgtttgtcgttttggtattgcaaaaggggattgaacgacacgttgtttataagattctctgcgaacttacaacagaggtcaaaccaaactgaaccagcataaaattgttcatgggatcacggtggttaagctttaaccaaaaagatttcaggtctttattaaaccaaaatattaaaatcctggatttatttgttactaaaccaaactttgtgcacatcacaattgtggcgtaacgtaaacaaagatggaattcgaattttcatttacgaaatgggcgtcttttctttcatttttttttttcgtcgtcaacttaaactttttattaataaagtcaaggtacattgttccaagatattacataaccagattggttcgttcttgcacttttcgctagagaatctgctacatggttcgcgtttctagagatctttataaagctaaaatcatgtcgagcgttatttatctgcaggatgtctctgatatacgaagagactgtagtatgttcccatctttgtaagggatgtgcagcttcgttcatctctaatgctttgtaaagatccatgttgtcacctgcaaaagcaacatgtgaatatcccaggtttctgacttggagcaccgccattctaactgcttctgcttcagtctcaagagaagagaccataggggagatagcagcagaagcctcgaagaaggagggcagcgtccttgttatagagttcccaaccaatgccggcttgttgcgtaggtgaaagccaggagccatctacaaaacaacaataggcgtcagagctgtgaattgcctcttccatagtacatatttccttcgttggcagcttcacattatgcgattgactacatggcttattctgatttaatttgcatgcctcattccacacagataaatcaacaagcgcttgactaatgacatcaggaacaaccattcttttgttctaaaaaatgagagcattcctcatcttccaaattcgtcacccaaggaggaataaaagtttcagctcattggcatggtttctattaatcatgattaggtcctgcaaattatcagctagattgtgggcattaagaaattcacctgaaggagttgaaataggagtgaggtcccagatttccttcgtgagcttgcattgaaacaaaaggtgatttactgtttcatcttcttcgccacacagctgacagatggcatctacccgtaggcctcgtttcttcaaattatctgcaacaggcaagccattatgcaaggagcgccaccaaaaatgcttaagttttggagggacgtccacattccaaatgtacttaaaaagaaaatgagtgtgttggctgttcacagtagcgtcttgctcaattcctcttctacgaactgcataatagccagatttgacagagtagctaccatcttttgaataaatccaagttatactatcactgacccccactaaagatggtctaatagcctttattagatttctgtcttccaaagctattaccttatctatcaactcctcattccaccgagtggtacctggtatgaaaagatccttaaccagttttagtgaggtacgaacattttcctagcgtttaggggcacgcggtgggttcgatggaagccatttatcttgccatatattttttctctgcccattaccaactacccattttagtccatcagctagaagtgtattaccttgcattatgcttctccaagcatggctagattgccacttgacaccagcttccaacaaacttgagtggggataatatttagctttgtaaagccttgctagtagtgagtgaggttgttggagaagcctccagctttgtttggcaatcatagcaaggttaaagtcctttaagagcaggtccaatgaaaggctttaaagggctctagagcaaaagactcttcctataaaagcccaaaggaacgttcctaaattaagaggtttttgtgaagctaaagggacttgacgtgtcacagcctgattggtcgtgagtttgataaaacaatttttttttttccctttcccatctctttctcactctctctcagctgctcttctctgtttttttttctgatctctctgaaatcaattgatcttcaacatttttatttccaaagagacccaatttaagattccaccattggacataaaaaatataaaaacccatcataatctctaaactatacaaattcttaaaatttattactataaaattttaaagagactctgtcaagggcttaccattgaacatgctctaagtctctgatgccaagtccacccatcttctttgtgtcattgattttgctccaagctacccaggaaattttattatgatgttgtgtgctggcccaccaaaacttgcgaatgactgaggtgatttccttgataagtttgatacacaacatgaaacatgacatacagtaagatgggagagcagtggcaacagctttgatgaggacttctttccctgcaggagagagaaaatgagaataccaactttggagcttctgtgaaactctgtggtgaaggtaagaaaaagcattatatttactcctgccaacaaattcaggtaaaccaaggtatcgtccaaaaccactaattttagtgactcccataatattagtaagatcatgtttttgttgacagttgaggcccttgccaaaagtaacggcagacttttggaaattaacttgctgacctgatgctgcatggtattggttaagaacttgcaggagggcagaacattcttccactgtggccttacagaacaggagggaatcatcagcgaatagcaagtgagatataggagggccgtttctgcttgccttaaatccatgcagtttactttgatgaatattatgacggattaaggctgagagtccttcagaacataataaatacaagtacgaagagatgggatcatcttgtctaatacctctctgtgggaggatgttgccaattggagaaccattgacaaggactgagtaagtgacagtggtgatacattccataatccacgcacaccatctttcagcaaaaccaagcttcttcataattgcttcaagaaaagaccattcaactttatcaaaggccttactaatatctaatttgaaagccatatatggttgtttaagattccgagtctgtaaggaatgaatcagctcatgtgctataagaacattatcaatgatcatccgacccggaatgaatgcagtttggttttctgagatgataaattggagccaaggttggagtctatcagccaagattttagagataagcttataggcaacattacacaagctaataggtctgtaatctttgacttctaatggattctcgacctttgggattaagcaaatatgagtgtgattgagttttgggtctaaggtacccgtattaaaaaagttttggacaaactgaaacacacctttgcttaagaccgcccaatgatctttatagaatccagctccaagaccatctggaccaggtgatttatttctattcatactgcatagggcctgagagagctcctcttctgtaaccggcttggtcaaatggttgttcatttcctctgtaactctaggctgaatagacgtcaatacctcttccatgttgttgctgccatgcgaagtgaaaagggtgctgaagtaagtctccacaaggttgtaaatttcatcctctttagtacaaacgttaccctgctcatctacaagggaagtgagacgattaaaattcctcctctgttttgttttcgcatggaagtaccatgtatttttatctccagcttgaagccattgaactctactcttagttctccaatattcctcttccagccgatattccttaaccaactgatttttgagatcattgatatgagcatagtttattggaagagtctcataagccttatgcaacttactcttaagctcttgaattttcttctgggagttggtaatgtgcttcgacttccatcgggacagactaacacgacatttcttgagtgcaagatgaaagtttgtgttctgaatgtcttgacattgtgtagtccagactttgtgaatttcttgctttacagcaggatcaaatctccatctattatcataaaggaacaatttatatcctctccattttctgtttcctgtatccaacaaaaggcacctatgatcagagccaccccatgacatcaactgaacatatgctcttggaaagagatcttgccaatctgaagtagccactgctcggtcaatttttgatttgatttgatgtgataatgagatcgatggcccgtccacgtaaatttcctcctatcgtcttgatgtcatgaagacctgaagaattaagcatttgtcgaaaagtcttgaaagaagcctcagatcgagaagggccgcctgatttttcttcattagtcttgatgtcattaaagtcaccaagaaccagacgtggtttactttgatagagtcctgcttctgcccaaaaaatcattttcttccacaaggcatttcgctctttatattctggattaccatagatataagtaagacgaaaagcaggtgaaccggattccgatatatacatatcagtataatggagagtaggtgatgatagaaaatccagcttaacctcatcattccaaaaaactgccataccaccgctaagcccttccggattcacaacaaaatggtgggcatatccaagatcattacatagactttgtacatattcttgaccgttcttagtttctatgaggaacactacatcaggtttagaagactgcctgatgtcttttaaatatggaattgtcagagggttcctcttaagtccctgacaattccagtgtaatatcttcattttggcgatggtggtttaggggttgccacctccccttgagtgagtattggatcttgcgtcctttggcaacttgttgcagcttgatcttcatcaaaaaggttatcccctttccttttgcgactactatctgctgtgtttctaagagcatcaagctcttcttgaggttgcaactgtgtcggtcccatttcttctgagtgaagtgttggctggatttgaatgggattctcttctcctttttgcatagattcatcattaccagcagtcaataaattagttgctctggtgcgaattgtaagagtctcagatgcttcaccagtttctctgacaactaaaggaatagggccaacaacatgtgttgaggaactagaaccttcctgcataggttcgtcatccccttgattaatgccttgcatcggttctatagcttgtctagttgcttcaacgttcaactggagcacagtgctttgatggttacaagctaattcatcatgcagcaatgacccacatctaaagcagaatttcttcagtttagcgaaaacaaacctaaccatgaatggggctgtggcaggttcgaattcaacagatcgtacaaagattaaacgatcggagatgttcattgtaacatgagcctagacttcaccttcagcatccgcagtggcttctataattttggtttcatcaatatgccccagaaccccnnnnnnnnnnnnnnnnnnnnnntctatcctaaaatcttgaggaatatgcagaattttaacccaaaaggagatttgagagagaaaatttgacaaggtacgattggtccatcgatcaacagccaccatccaaaaattatggtgccaagggccattttctaggacagacatgagatggtgttcagccttaaagaagaattgaacagtaccgtcatcattaattctacttgtaacccttccatccaatctccaagctttaggcaaagcacctttaagtcctgctggtttctgatgttgagggtttagacctttgacaattaggctgagacgattatctatatcacgcgagcgcctcgcttcagctgacatcttcagaggagctctctcagatcctagatctaaattttgaagcgcttgccataattctttatccatggattcagagaagacaacaacagtcaaagagaacaacacgaacggaccggcagagacaccggagagtaagatccgcactaggacgacaaagagatcaccacaaaattgaggcggtggaagtcggtggaggatcactgtagaatcccccagaatgaagagagagaaaaggtgttccgcggtcttttctttcattttgaatgctgaaatttctatataacagaaataaaattagaattatagccaaggaaataaaaaagccgtttaaagaagaaaagcgtctactacaagtttctctctaatatctcttgtatattttaagaaccccaaattctcattttcgaatagtctgccgaagagtaacggtggttttgcggcgggtcaccggcgatggtgatctaggaaggccgttctctgatttcggctaggttaatccattctaaggttagttataagcggtctcccaaattccgatgaatctgtttctgatgtgtgtttctctgttacttgattcgattacaattacttttattctgttaatcttcttgaattttatgagtcttgttcgagtgattatgtggttttacgctttcaatactgatataggaaaagagaaaggagtaatgaacacgtgtactgtggagattagaagttggatcaatggctgagattgtttggatgctaacagaagagaaaagaagcgttaaaaggaaacgaagaggaaaaataatcattcatgaaaaattgtgttgagttgttatcttcttcttcttcatttgttctctgtttctctgagagttctattttgaattatcatagctatttcttcattgttgatagagctgtttctacttctaagctttatcacatgagatttggatttttgttttatgaacgacgattcaattgatgtaacttgttcgattgaatttgagtgagatacaatttttctttagcaaaggtatcagagccattcgtttcctcggaatcaatggcaggaactagatcacgatttgaacaaatgattgccgaacaaaatcaagagatggacaagatgattgctaaactgttggaagcgattcgactgcgtggccatcaacatcaacaattagagaactcggaggtggagaatctacatgttgctgcttttccagcgattcagagccaagacaaacctcgaagctcacgtatggcgactaaagctcaagcgcagcagcatcagatcacggggatggtggatgaggatctgtcttcgtgtgttgagattttggaagttaaaattgagaatcaaaatttgaagatacataagcgatttgcagcgatgcctatgttattaaggtttggtccatctcataacatcgatgtgcataatcaatttcgatcctcacaagcatctgctagtttctcttcagatccaaatttttttgagaatcaatcaggttatttctaatacttatgctgatgctacacagcctgagaagttagactttcctcggtttaacggtgataagattcaagagtggttattgctagttgagcaattctttgagatatatcaaacaccagatgagttcaaagtatgtttagtatctatccattttgatgggctcgctaatgcttggcaccaatcaatttcacattcagttatgtgggagcatgttaggcatgattggtggagttacaaactattgttgcaagtgagatataatgagcatgttgatgattcaattgcaaaattgacacaattgcaggagactgaaggaatagaggagtatcatgctcgatttgagttgattagcactagagtgaacttcggtgaagattacttggttagtgtttacttggaaggtttgagaactgatactcaagtgaatgttaggatgtttggggccagtaacttgtgattttaagaagttagagatgcagttccatataggacataaaaaggttcttcttcaaggtattaggcaaggttccgtcagagacgtgaaggcattaaagcttaataagatgagaataattagccgagaagggattgatgataatcaatatagagttcaatttggtagagaatgagattaaaaaagacttgctaaaagttaatggtgcaaagtctagtgatgataatcaaatctcggttgctggggaagtgcttgaattcaacatagaagagtgtgaaacagattcatggatggaacataatccgttgattcaagatcaagtcgcgtttcactccacagacatagaaggtgtctcacaacctcagaaggttagttcaaaccttaaggactttgataaagtcgatgcaagaatgaatcaaatgctgtcatcaattggatttgttgttgatgaattacactctagttgtggaagtgctactgtccatgtccagaagaagcctggtaagtctaccaaatcctcgaagttcaaatttaaaaccagctcacaagactgcaaattgatatccaccaagttctggtgtgagttggtggtcgtgaggtatcaatgtgtggttcgagatgttaccattggatttgccaaagtaaaacgaaggcttgaagtcacatagagccaaacctttgaccctggaatcacaagcgatctaaaaactcatattccaagtagagttgcttcaatggttttaatcaactggactcgggaactatggagaaaagcgacataagagtcctctttgtttctcttcatgactaataattcttatgagtaggggctgtttacaactatgagaagccagatgctctctaaccttcaaatggagtgtagaatggcattttacttgcacattggtttgacttctttacaaaaccttgaggtcaaggtttctcgaacgagggagattaaatacaggaaaatggaagagtaggtgacgtggaagaatagaggaagatgattggtggagacgtgaatgatgcgttggcagctaacgtggagatagagagttggagctatatagagaattatcgatcatttgcagaaaattaaccagaaaatattaatttgtgtaatctttttcttcttcttcatttctctctattaactcttaaggtttgatatttcattgttgatagagctgtttctacttctaagctttatcacatgagatttggatttttgttttatgaacgacgattcaattgatgtaacttgttcgattgaatttgagtgagatacaatttttctttagcaaaggtatcagagccattcgtttcctcggaatcaatggcaggaactagatcacgatttgaacaaatgattgccgaacaaaatcaagagatggacaagatgattgctaaactgttggaagcgattcgactgcgtggccatcaacatcaacaattagagaactcggaggtggagaatctacatgttgctgcttttccagcgattcagagccaagacaaacctcgaagctcacgtatggcgactaaagctcaagcgcagcagcatcagatcacggggatggtggatgaggatctgtcttcgtgtgttgagattttggaagttaaaattgagaatcaaaatttgaagatacataagcgatttgcagcgatgcctatgttattaagggtttggtccatctcataacatcgatgtgcatatatcaatttcgatcctcacaagcatctgctagtttctcttcagatccaaatttttttgagaatcatcaggttatttctatacttatgctgatgctacaca

SEQ ID NO: 1766 - DNA, 613 bp, Arabidopsis thaliana landsberg
aaagggtttgttaagatggcatcacatatgatcgttggacaaaaataactgaagaaattagggctcttctcatgaattagtccaggtgaacttcctaatgcaaaaccttaagatgttttaagttcaaaatttataggtattcaatttaccttctttttttttttttggtgaactatgattgcatgcaaggtttgagatagatgaagaatactagaactatgattacccatttgagtggcgaaaactagtcaaaatcaaaactagcaaagagtttaaggtaatcctttgtacttaactaagtttattttatatataatatcttacataaaagcatttctctgttaggttgttagtgatagttataaggatagaaggagcaaacagattcctcacaccattagccgcaaaggaatggttagactagcagaagatatggtaataataccataactatgttgcatgttttttctcattgtttataatacttattaactgtaattttttttttgctctgaattagaaaaaggagagttcaaatccaaataagataacacggctaaaggtttggatcaagtcacgtaccagaaaagattttatctatgatttagggtta

SEQ ID NO: 1767 - DNA, 13270 bp, Arabidopsis thaliana landsberg
  unsure (1)..(13270): unsure at all n locations
aaccaaaggattttataaccatgagttgctcttttggcattaagtcgtctatcaaaataggttcttcaattgacagatggtcagctgcaccattttcaatccctttcttatatactatttccatttcaaactcttgtagcagaagtatgcacctcaacagtcttggtttagtatccttcttggcatacagatgctttaaagctgcatggtctgtatagacaatgaccttggatccaatcaaatagcttctgaacttctcaaatgtgaatacaacagatagaagctccttctcagttgttgcatatcttccttgagcttcatccaacgtccagttggcgtaatatataacgtgaagcttcttgtctattttctggcctaggacagctccaactgcataatcggatgcgtcacacatgatttcaaatgggtggtcccagttgggtgcttgaacgataggggcggacaccaatgcttcctttatcaaatggaaagctttgagacaatcttcatcaaagttgaactcagtttccttgcacaacaatctagttaacgacctgtctatctttgaaaaatcttttatgaacatcctgtagaactcagcatgaccaaagaaagctcctaatatccttaactgtctttgggggttgcagctgcatcatcactttgatttttcccttcttaacctctatacccttctctgatatcttatgccctagcactatgccttccttcaccatgaagtgacacttctcccaattgagaacaagattagtctcttcgcacctttctagaaccttgcacaaatctaacaaaaatgaggagaaaaaggatccacagactaaaaaatcgtccatgaatacctccattatctcctcaataaaatccannnnnnnnnnnnnnnnnnnnnnnnnnnnngtcccaggagcattacataaaccaaaaggcattctcttataagcaaaggttccatagaggcaggtaaaagtggttttttcttgatcattagcgtgaattacaatttgaaagaaaccactatagccatcaagaaaacagtaataaacatggttagctagcctttctaacatttgatcaatgaatggcacgggaaaatggtcgtttctagttgcagcatttagtttcctataatcaatgcacattctatgtcctgttatagttctagtaggaattagttcatccttttcatttttgacaacagtcattccaccctttttagggacgcaatgcactggagaaacccatgtactatcagagatagggtagatgacaccagcatcaagcagtttcaaaatttcttttttcactacttctttcaaattgggatttaacctcctctgtggttcaatgctagaataggattcgttttcaagatggatcctatggttgcatagactaggtaaaattcccttaatgtcggataatgaataaccaatcgctctcctatactttctaagctcagataatagcaggttcacttcatcactatttaactcagcattaatgatcacagggtaagtagagtttggaccaaggaatgcgtaccttagacctttagaaagtggtttgagatcaaccttcggtgcttttagttcagaccagtcatctgaagttggaatgatcggctccccagattcgttggcagacaaggtcgagtggttggtcgagtatgtcctcgagagtgcaggttgaactcgtgttgacccttctttgctcattaccattacctccgttgctggtccactcaattccttaaagggttctgattcttccatcgctttatgggagtctaacagcttctggtatcccaatgtttccaaatgcagaaacccatcttcaccacttttggttaaagcactgttaagatgatcttcttctgccagctcttctagtaattcatcagctaactgatccatttcttcgatccaaaagagttgcccttctatggtaggcttcttcatcgcgtctttgacatcaaaggtcatcctaaaggctttgccaaggtttagatcaatcttccctttcttgacatcaatcatagctcctgcagtgtctaagaaaggtctccctagaatcaaagggtccgtgggctcttcatccatctccaggactacaaagtcagttggtatctccacaacaccgatcctaattgggaggttttcgagcaaaccatgagggatccctactgatctgtcagctaggatgagggatatattccaggacttgtattgagtgaaccccaatcttttggcgacagagagcggcatgagactgactgatgctcctaaatcgcataggcatctattgaaagccaatggacctaaagagcacggtagagtgaacgaaccaggatcactaagcttcttaggaatgatcttcttctgtatgatagcgctgcattcatgactcaataccaccatcccttgcacttcttgaattctctccacaatcaagtctttcagaaacttgtgagagtctgggattagcgctagggcgtcaacaagaggtatccgcaactcaacctccttaatgttcttggcaaacatagctctatatttgtctgccaacgctttcttgtgacggccaggaaatggaagctgcggtttgtagggaggagggacaaagaccttttctttgtttttgacagcaactggccttggagcagttggtgatgctgctgggatgacaggtcgagtggtcggtcgagtaacgttgtcgagtggccgctcgagaggttgctcgagtgactggtcgagtgattgctcgggtggctggtcgagtggttgctcgagtggctggtcgagtggtttgtcagcttgatctttctcgagacttaaatcctccccatcttgatcttcactgtcctcagtgaccgtgttgggttcctccctagttggaagtgcttttccactacgcaaggtgatagcatgagcatattcttttggattctgaattgctttgcctggtagttggcctgtctgttttggagctgaagaagatgcagaatgtccctctaagtaacggactttggtattcagtgattccatcttgacattgagatcattgtagctacagtccaacttgttatgtaactcatatatcttctttgccatctccatggagccagaggcttggccgtgaagcagttgttgtagcatttgtttcatttcatcatcaggagtagcaggaccttggttttgctgaggtgcaaacccaggtggtggtggcggctggtagttcccctggaattgctgcttaggaacaaaaccttggttgtagggaacaaaaggtttgttctggccttgttgttgctgtggaggatacacctgatcctgaggattagcaacgttggtgctgcggtagaagaggttgggattgttggttttgaagttgttgcattgtttgtagccaccctggttgttgttgatgttgctgacttcttccaactggttaccctccccatcttggacttgaaactgctcgtcatcaacaaggaagtgcacatgcttctgctggctaagaagaatcctgtccagcttgtcattcagcgctttgatctccttcctgtgtttgtcatcagagtcagctgtgcctctgacggtcctatcgcagttctcgttgtaattatcatctgattgagcaaggttctcaaccaattcccatccttcttcaacatctttgttctggaaatttccattgctggcggtatccagaagcattctgatgcgtggtaaaactcctctgtatagagtgctaagtagagaggctttcttgaagccatgatgagggcattggttggtgtaacccttgaaacgctcccatgcttcacagaagctttcaccattcttctgtgagaaaccagaaatctcatttctgagtcttgcagttctggcattggagaagaactttgacagaaaagccttcttacaatcatcccaggtggtgattgagtcatgggacagattcttctcccagatgtgtgctttgtctcccaaggagaatggaaacaaacggagcttgaatccgtcttcactgacaccattgatctttgttaggttgcagagcctatcgaattcatcaaggtggtcgagtggatcctccattggcagaccatggaatttgttcccctgaatcatcgagatgagaccactcttaatctcgaagttgttgttctggatagcaggaggtgcaattcccttcctctgacggtgatcacgtggtgcatctccagcaccaatgttggcagggccattttgttgattctgttcttcagccatttcgagtggttgctgaggtacagtgttgactgtggttctcctttttctgatttcgcgggctgtgcggtaaatgaaatcgttgaaaaggaggttctggttgcctgttgatcgattttgtttatagcagaggtgtgcgtggatcaagaagacaacaagaaaaacacacagttagtaactgaattgaaatttgaaaaagaacttgatctaagcaagtctgaaatcttaaatataacaaacaaacaccaaatcggcaacagcgccaaattgataataggtttttcagttaattatcctaaaacaccaatcatgtcgttgtagtattttaggttgtcaatccaaatgggtgtgatgctaacaatcaagatgtgatcagaagtcactaagtcaagccaaacaataacaagtttttgggtgttctagcagtcctaagtgaacatttaggaaacagaaaatcaagcaaaaggtgtaaaacactcaaccaacacagctcgttgcagagcactgggtgtggtcgagtgacatgtcgagtaacagacagaagatataacagggatactcgactgcacagtctgttgcaagacaactgggtggtcgagtatcaggtcgagtaacaggagagaaatgcaaaaactaagcaacaggtaacaagatgcagtaaacaacagcaaagtaaacaataaaatcaatcagataaagaattcccgaggatggggtaattgagtagtttcatttcctcggtttacagaagattgacatgctcaataaattatccatagacaacaaaattattaaccaaatctacgtgccaccgcaagagagaccctcaagttaacctagtcccaaactcaatcactattgacgagagctaacctaacaagcattatgaatcaacaagttaaagacaaaacgctccctgcaaccaataccttggtacatggccacgaatctctggaattagtggttcagacatttcatcgaacaccttttgggcgcggaaatgtctaggctcaaattccagttgatcagaaaacaataaacattaagaataactaattcagaagggatctatcaattaaactcaaccacctagcattctgagaattcaaaactactttaacccatcctcagaaacctattctctactaagacatcattgtagagaacataaacgttgaacaggttgaaaacatgataacaacagagtaatagcaaaatgataacaggatgaacaacagtaaacaaaatcaagaacaaatactgaatattgaatactaaatagataaagagaaatccggattacaaaaggtcaagaacacagtgtctgcggaataaaactagataaaaacttgttctcgaaaatgtaaagtacatgctacttatagcaaaatattctgaaaccctaatactcaaaacgacgcagtattgggacggattaagaactgtactcgacccaggtggtcgagtgagaggtcgagtgataagctggaatcttcttttcatccttgtgctcgagtatctggttgagtgcggaatggagaagattctgaagctcgacatcgcgtatgtagtcgagtggtggtgatggtgatactcgacttccaggtagagtggtgtgatcgagtgatggtaaggtggttgaggtgaagacactcgacatgggggtcgagtgaagtgatcgagtgactctcgtgggggtacttggcaagggggtcgagtgatgaggtgaagtggtgaagtcctatactcgaccaggtggtcgagtggtgtgttgaggtcgtgaagcgtctactcgacctggaggtcgagtggtttggcatgatcaggtccgcttcttctagttagcccgtcaacagctccgaatcacttgaaaacaacacaaatatgccacatgcatgcagaactatcctaaacatacaaagtgatgacaaatgatgagaaatggtataaaacaatgatgatatggtgctaaagtgatgacaaatggatgctcaaaatatgcaaaatacacagttatcattggctaacccagattcctgcaacagtgcattcatcatttcttttagagttcgattctttcgttccgcaaaatgcattgaatggctcattatattctcatcctctatcacttcgaactatttttatagttctctgaagttgattttctacttcgagtgtaaattctttgaattttaccagagcttcatccttgctatgtaatagatatacataataatatcttgggcaatcatctatgaaggtaacaaaaaatttcttaccacctctagtttgcacatatttcaaatcacataagtctgtgtaaattaaacctagaggttcagttgttctttcaactcgtggtgagggagttttagtgagttttgcatgtacacatagttcacatttttcttggttagttttgaatttcggaattaaattcataggttcagttgttctttcaactcgtggtgagggagttttagtgagttttgcatgtacgcatacttcacatttttcttggttagttttgaatttcggaattaaattcatgttttgcatttttcgcattattttataattgacatgtcctaaacgttcatgccaagtagtaaacgactcaaccaagtaagcaataggattttcattcatttcaacaacagaagcagaaactacatttttcggaaagactgtcattacagacattttgaccactccacctttaacaaaatcatttcctagatacaccccatatttcttaagaactagcttatcagactcaaagttaacggcaaagtcattgttacttagcaccgttccagagatgagattcttccgcatgtcaggtacatgcttcacgttttggagagtaagctcacgtcccgaagtcagcttcagaaccactttgcccttaccttcaatcttagacatcgccgtgttgcccatgaagaattgttcatttgacttgttcttcacataggtggagaacatggtccaatctgtgcagatgtgtgtggttgcaccaatgtcgtagtaccactccacttggttgtcgtccaccatgttacattcagtgaccactgcaaccatatcctcttcagttaggtttgcctggctcttgacatctttggctttgctcttgcaaacatcagccttgtgtccaatcttgccacaatgatgacactttcctttgaacttccgctcaggattgctcttcttgaagtttgttgtcgatgaaaccttcaagttcttatgaggattagagaacccttttcccttgcctttcagcttggccttatgctcagatacatgaacatcatgcccttgattatgagcacccgcgtgagccccatgattgttgccttcaatcatcaaccttaggacgagatcatcaaaagtcattgccttacgtttggagttaaggtaattcttgaaatctaaccagcccggtggtagcttctcgatcaagcaattcgtcttgaagacgttgcagatcgacatcccttccaactctatctcttgagagatacgttgaagagcctccacctgttccatgattggtttggagtccaccatcttgaaattcagaaactttgcagttgagaatctttgcattccagactcatcagtcttatacttgttctctaaagttagccacagtgttttggaagacttggccttgctgtagaggtcaaacagatcgttcaccaaacggttcaggatcagacctttgcaacaatagtcaccttgagcccaggtatccatacctccaaccgtatacacatatgtggtaccttgcggaactattggtggatcctctgtgaggtacctttccatgtttatgctgaccaaatagtagcgcatcttttcttgccacgttttgaacccagatttaccatcaaacaagtgtgacatcatcccttgggaaacagaggctggtatggtagtgttggttgaaccattaccgaacagatttcggcgaacattatccatatcagaatcggtgatctgtgtcttttcaagctctttcgcaaggcgcaaagcttcctcatccggggtctcagcaactgtggtgttgccaacgatctcgttgttggtgttaatatcagtcattctgttcacagaaaaacagatttgattagtatattaaccaaaaaattcaggtaactaaattacaccgaattagttttgcaaactcgcttaagaagcgttcgcaaaaacttgtttcgcgtttcacaaactcactcaagtatgagcgttcgtggaaactagagaagtttatataagaaactgtccataacaatcgctacatagcgtttgcgaagcaatttagaaagaggagaaagaaagaagtaataacgttcttctataaaccttccgcgtaagcacccaaagatgatagcagaaacaatttttagaagattttaaaatcgttttaaaaaattcgaaaaattctcaatccttctagagcgataagctaaaagcggatttattgaattaagattgtaatagcccaaaaaccgaattgagaaacaagtacgaattctattaagataacgataacaataaaattacaataacagtaattaaggacaaaaagtaaatcacggaggcaagatatgatatctttttccttacttcaataaatcgcccataagtgcttttcggacatcataatttttgaatcccaggatacaactgatcacgaactaatacccaagcacacaagtattagacacaagcgaactagatctacgatatactctcgaaactatcgatttatagaacaagaaaatggtgtatataaagactcactctttattaatctttaggaaacttactcaaaacctaaagctctcaccaaagctctcaaactctcaaactctaaacttctcaataggattaccacaacttggcatctctatttatatgaaaactctagctattagataactcctaaaaacattagataactactaaatattgtatgtagataactcctaaatacaatctaatcctaatttcttaggatttggttagcttattccttaagctaacttcaagcttatcaacaaaactactaaactaagaacttacttttaagaagcaatagagcgagaggagagactttagaatttagagtgttttgtgtttgagagcttgagaaataatgagaggttgggtctctctatatagtagagagagataggattttgcagaatattcttagaataagcatgacatattttgagggtatcctgagaatattctgagactctcatatcttgagaatatttgtgactatcctgagaatattttcataagattcaactcagcaagcccaataactcacaagcatgacggtccgcaagcccgacagcccttgagccgacgacaggacgttctgacaacccgcagcccggttcagtccatcacatcaaagaaagaaggtggaaacatttttttccaaattgcacagaatcatgacaatattctccttcaaaagtttgacgcgactttgctccaatgatcggctacttaagttatgaaaaaatgctccaaattctacgatagaaatatttatgagatgattagtaaattattacataaataatttattttaacataggtatatatgacataattacctgatactgcaagatgcacgttacgcggtaggagttctgcgaacacaaatggaagcaatcgttccataaagacatgacagtcgtggcttttcatttccgaaaacttactgactgaataagtccacataagaactactttaaggttgaagttttgatctaaggacacatcgtatgccttaactccattcatccataaatcttttaactcctcgataagtggttggagaaaacatctagactagctcgtggatgatttggtcccgaattcaaaatcgttagaaacaaatactcactattcatgtacatatcagtaggcaagttgtatggagtcaaaattactggccacaacgaatgatttttggacatgccaaaaggattgaaaccgtcagtacataacctaagatacacagttctgatgcaaatgacggctgccattgctgaaaattcttccactcagctgcatctgatggatgacacattaatccctcctctgattcatgctcagcatgccatctcatcgaagctgcagtcttctaagatagatacattctcttcaatctatctccaattggtaaataccacatcttactaaatggtattcttgttcttccatcacttttctaataccttggttttccgcagaacttgcaatgctctaacttctcatcatctttccaaaagagcatacaattgtctatacatacatcaaatgtatggtacggcaatcctagcttttgcatcaaagtctctatctcgtagtaggaaccggtcgccttattaccctcaggtaaatacttcgtaaacgtttccgcccatccgtccatgcaattttctgacaaattgtggtcgactttatggttcatgaaccgatctgccaacgataattgcgaatgaccttcttgacaaacatcgtaaagcggcgtgtttgcagcaactaacatatcataaaaccgtttcgcttcttgggtaggttcttcatgaacttgatcatttccactttcatgttcatgatactcgttatatggtacagaaccatgaaatgcatgattaaccatcccaacatatacattattcccatcaaatcctataggttcatcatgaatccactagtaaatcgatgttttcaacatattcttgataagtactagttccctcccagtatcattgtaatcttcccatgttcatccagacataatattggccataaacctctactaagcaaatactgaaatggtgcactttcatacgtttagaatttgcaaccaccaaggacaataaccgacattttttgtcttgaacatgagagcttgcaaattcaatgaaatcttccacacccgccaaataatccgtcgagatattattagtaaatatatcgattcgattgtacatccattcgcgtgatgaattattccatatcgtttcaaatttgttttttgttatatcttttttctctcctttttttttgttacttatcgatctcaagaaatttgttatgaagaattcaaatgaaaaggtatgtatatataatgaaatatttgtgacgtttttgtgacgataatgtggagtcccaaaagttggtacacctaatttctaatgattttaaacgttttcgaaaatagtgttaccattttgcgaccgttattaagagtcacaaaaagtaagttctgcctacttacacctaattattttcgggaaaaatgttgaaaaatgtgccaactttcaaatttgggacgaaaaaagcatgaactttcgaaatgtcatttaaatctcaaagtttgagttggcttattaaaaaatgtctaagtttcgttgacatggtcatttaaggcatgccgtgaaatttccgttaacagaaaattaacggagtcaactttccgttaacagttcaaaatgacgtcgttttaaaaattaaaaataaataaaaaactgacaacagcctagactagaaccttagatcactggatctgtagtcaagcattaaaccgttgagctactcacgcttttggtgtttacttaagctaatagatatatatattcgtagatgtaattaattgaaaaacacaaacctaaaagctccattgttgcctgcgtaataaacagcgtgaacaagtccagaaaataactctgaatcagatgtaatcaagagttcacaatacttgaaatcgacaacattaaacggatctccaattgtataaatccgagaacggtactctccccaaacaaaccatcattggacatagacgagccacacgatctcaacctcacgctcatatttgacgtgattccacgccacctggtcacgctgttttcttctcaggcaacaatggagttctattagtttcaactagttacatatatataagctcaatcaatgttgttacaagtttacagtggctccatcgttgaaggcttaattacagctgcagggaatcgtcggttttacactaggttgtgtccgatttgcttcttatttttaatttttaaaacgacgtcgttttgagctgttaacggaaaattaagtctgttatttttccgttaacgaaaatttcacggtatgcataaaatgtcccagtcgacgaaactttgctattttattgagaagtcaacgaaaacttcatgatttaaatgacatttcgaaagttcatgcttttttcgtcccaaatttgaaagttggcgctttttttgacatttttcccaataatctatgttcatgtgataaagtatgtttggattcaaacttttttaaatcattgggtcctaaactaattaatattgatagtttaatatataatttaattatttagatatttgaatttgactatttaagaaaaaacttaaccatttaaatgttgatgtgtcatgataaaattatatacccccaacaaattataaactaaaattctcttaattatatacccccaacaaaaatgcctttagaacttaaaaatcaaacctctaccttcgcatcaccatccgacttgtgtattcaactatcaattgttcatcttctttcgtatttaaagctataaactcttaatttttgaaaccatatgaaccattaaaataaatttgtaatttccagacttatataatttgtaatcagaatttaacccctcttatcccatgttattttctattttgttagttttcatttatgtttgttacgtatattcttgttgtatttttttcacaaattttcaaagacaatagcaaaaaggtacttccttagtttttgttgaatttcgtctacaaaagatttactatattttttcattagggggggtgctgccccttattggagaatctagtagaaaaaatgcccaacaaagggggggg

SEQ ID NO: 1768 - DNA, 11777 bp, Arabidopsis thaliana landsberg
aaataattttctttaaaaaatactaaaatttaaaaaaattaattagtgagatgactaaaaaacgttaattagcgacatgggtaatattaaatagattccatatttttctaagtttacataataactatattttaatatagaaagtaattataatttcaaaaatgttaatttgtaaagtttgtaaaaatgctaattaatgacacctttgtttaaaaaaagtaatcatttttggagctgttttggatattttattaaaaaatatttatataatttaaacatttcgctatgtgggtagggaaagaagtatgtgaaagattttttcataagaaagtgaagtgtagagggatgaaggtgtgtttggtctgtgaagcgttaaagcaacaagggcatggtttgatggtggtgttcttaatcgtatcaatttgaatcaagttccaaagatataagatgatgtcttttagtctgggaagcgtgaaggttgataaggctcaaattaccctaaaaactactctctcaaataagagatcgattgcagtatttaaggatcgatttccacaaagttcttttgttcaaacaatttgtttaatgtcgagattaagctaccaggtgatgattgaaataaaaagagaacaaagtagaaagacaacatattgatttggttgtgaacgatttaataaagagctaggaacatggtattctcaggaaactattggttagtaaatctaataatagctaggttgttatcgaaccatttttaaactcaaactctaattatggaataaccggtgggcgtgccgcgaaactctctatatctatagctaacaataaccggagaagccgagaaactatcaacctaaatatgcattcttaacgagttcaattgtgcatcttagtagataggccgattcttattacacacctataaaccagactcatcaaataatagatccaactatagatacctatggcgggcatatctattgtctggattcaagatctagttaattactctagatcaagcattaagcataattaaagatgaagaattttacagataacctagcaaagggggcaatctactaaaccatatgaatccctaatgagaaaccctattcctaacaagcagactactcatacatattgaatgaaacaaacgacataattgagatagaaagcataaacacaataaatagagaaggggaaaaaaaggatctcttcattgtattaaaaactagaatctctcaagaacaatggatgaatagcttatgtctctcacaatagggttttgcaaagaacttgataaaagactttatttacaaaacttaggtctaaaaacaatatatatagaccctaaaaacgtctagggactaataatgcacatagggaagtcttctgggcaaatttgagcttctgtaaactcgaaagcgtctagggtttttgctgggccgaaactggtgtcgatcgacacaaagagtgattcgatcgacactcctcgctgatttctgaaccaaaatcgtccttagcttccttttccttagcttttgctccaaaatgtctccttatctccattgttgtcccattgcatagaatacttgaaaagagactaaaaagactcgagaaataacataaagactcaaaatcttatacctaaaacatagataaaatcggtgaaaattggtttattgatagcccgaaataaattgccatcatcggtgatcatccactcaacatggttcgcttcttcactagataacgggtcatcatgatcatcatcattctccgaacattcagacggatcagattcaattgacatatcggacttagtagatttactatcttcggccataatttgatcattcatggccacagacaaactgtcatcgtccgtactgctcggcggacgaaagttttcggggttgggcacattaagaccgtgcaacgaactgactgtgttgcttcctttgctagacaacatctgcaaaacgaggtaaacctatcccccacttagccatctaaaagacgaacaaccggaatctaatgttgcattctgcgacttaaatttactcgataaaatcatcgaaaacccaagtgtccacgagcatcgcataaccatgctctgataacaaaaattgtaacgcccccgaattgccctatggctagacaagccacgggtgacacagttacgctacagtgaagttgatcgatcacaacttagtagaggttccagatgaatccggttctttaaccaaattataatcgaccttccacccactaggaacaccacttaggcttgccaaccctcgtgatattatagtgttgagcgacccggactaggtcttatatcattaaacactcggctgcctttaagaaaacattttatgcatagtatatagcttatacttggcaaagagttacccaaaaatatatctttatatcggatccttgttaaaatttacataataacaagtaattttgcagaagcaacgtaaaatatcctattgcagaagcaacgtaaaatatctctagtctgaaacaagtaattttgcagaagcaacgtaaaatatctctagtctgaaacaatgtttcctcgaccatgtgcaaggttttatcgattcgggcaagtttttcttagtttcggtcgagtttttaatcggacagccttttagtctctctctcttgccttcaaaaatgaaactgggcggagagagctctatttataatccgcccaaggttggccatgcattaccgcccgctgccacaagtccggacagctgccgcgcccacaggcgacaggtgtctcgaacgacagcgtggtgacaggtggcaacgagtgtcactccaccacccatcaacttcggctccaagactcagctgacttcgtctccaagactcagctgacttcggctccaaggttggtaacttgagccgcaaggcaccgcgagtgaggtgtcctactcatgtcggttccgcggccggtggggcaaacttcaccgtggcacgcccttcttttcccatctttgcccattcgtacccattcttgccctttgatgttttggcaccgtttggacacacgcggtcaattggctttgcattcgggcaaaagtttctcatttggtcctttggccgtgcccgatgcccttatgggggtcactacatcgctgaccaaagcgtaaagttctttgtcataagtcggatagttaatgtggcaccaccgagcttttcactaaagtaggctatgggcttgttataatgtatcaaaacaactccaatacctatactagaggcattacattcgatttcaaaggtttaagaaaatcgggtaagatcaaaataggggcattagtaagcttctctttaagtgcttgaaaagctttctcttgagtttcttcccatttgaacccaacatctttcttgattacttcggtgaggggtgcggctaaggtgctaaaatccttgacaaagcgcctatagaaaccggcaaggccgtgaaagctccaaacttctccaacggttttagggctacgtcactccttgattgccttcactttctcttcgtctactttaacgccatctgcacttacaacaaaacctagaaaaacaagattatccatgcaaaagtgcacttcttaagattcgcaaaaagcttctcttccctagggactttcatgacgattctagatgatcaatatgttcagccatgctcttgctataaaccaaaatgtcatcaaaataaactacaacgaaatgacctatgaatgctctaaggatgtggttcattaagcgcatgaatgtattaggtgcatttgtcaacccgaatagcataactaactattcgtacagcccatgttttgttttaaatgttgttttccactcgtctccttctttcatcctaatttgatgataaccacatttcaaatctattttagagaaaatgcatgaaccatgcaactcatcaagcattttgatatagctcaaattgccttaagcctactccctcaaataagagatcatccgttagtacttaagggtcaaattccactgagctctcgatgttcacacaatagacttatgatgttttcaattaagctagaccaatatagaatatagtaaaagaccgtaaagcaaataaattgagttgtagattcaggggattgaagcatcgggtctaaggaattgtctcggaaaatatataaattgtagatctagctaatattaggattgttatcgcaccgttctcgaactcaaactatgattttagaataaccggtggcgttccgcgaaactctctatgcctagagctaagatcaccgcagaagccgggaaatcctatgctaaagcatgcattattataaagtttgattagttcacttaaatatctaaaccatagcccttctatgagcctacctgttctttcttaaatactaacaagtacctatggcgagtatacctattatctaatatcaagttctaggtgatcaatctaaaactaacagtaagaacaatcaagatgaagaactctaagaataatcgtaaggggttttcgatctactaatccatctaaatccctattgagactccctaaacccaacaaagtgattaatcacacatgattaaagtaacacacatcaaagtctgaatagtttgcattgaataagaagaagaagagtaaaaggagttcagaatcctctctacagggattggattcttctctccaaaagtgtatctcaaaacaaaacataacttaggtctaaacaatgaccttaaaaactatatatatatgacctaaaacgtgatgggccttctataaaaataaggaaaagttctggaccgaatttggaaatcttcaaaacttcaataagttgcgtctcaaaattgccgtcaggtattggtgtcgctcgacaccaggggtggtgtcgttcgacacctacgtgcattttcgtctccggatttcttcagcaacttaagttgttctttaatctccagaatactccataatctccaaatgcatcccaaacatgtaaaacctgtaaaggactagagaagactctagaaataacaattagactctaaaacctatacctaaaacatagttaaaaaagtaaaaatagggatatatcaactcctccagacttagcttttgcttgccctcacgcaaaacacaaaagccgaacccgtggaagaggtttgaaaacaaaggaactcccaacattctctagcttattggcatgatcatccaaactaagtccatatgcctaacaagtctaatcaaatcctaacccacatgtacttctccgcaagcttacacaacattctagattccttacctaagttccacaactatatccaccaggctttcatcgctgggtctcatcaaacaagctaacattcaagatccttatagacccattcttgtactataccatgataaatcgaccattctctttatacatattttttctttggtgttctttctttccccaaatttattctttttagatagtaaacaaaagggaactcgcttactggatcgacacctgataaggttcaaattaccctaagaactactctctcaaataagagatcaattgcagtatttaaggatcgatttccacaaagttcttttgttcacacaatgagttaaatgtcaaaattaaactagcagggaatggaagaaaatacaagagaacaaagtagaaagacagctgattgattggttgtaaacgatgaaataaagagttaggaacaaggtattctcacgagactattggctagtagatctaatgaaaggtgggttgttatcgaaccattcttaaactcaaaccctaattatggaataaccgggggcattccgcgaaactccctatatctatagctaagaataactggagaagccgagaaattattaacctaaatatgcattcttaacgagttcgattgttcaccttagtagataggctgattctcattacatacctataaaccaggctcatcaaataatatatcacactacagatacctatggtgggcatatctattgtctggattcaagatctacttaattactatagatctagcattaaacataataaaagataaagaattctatagataacctagcaagggggcaatctattaaaccatatgaatccttaatgagaaaccctattcctaacaagcagattactcagacatattgattgaagcaaacaatatatttgatatagaaagcataaacgcagcaaataagataagggaatgaaaggatctcttcactatattgaaaactcaatgaatctctgaagaaaaatggatgaatggcttatgtctctcaaaatagggttttgcaaaaaacttgataaaagagaatttaggtctaaaaacaatataaaaaacttataaaacgtccatggactaataatgcaaatagggaagtcttctggggcaaatttccttttctgtaaacttgaaagcgtcatggactttgctgggctgaaactggtgtcgatcgacaccaggagtgtgtcgatcgacactcctcttaatctggaactgaaaattgtccttagcttccttttcctcagcttttgctccaaaatatctcattatctccattgttgtcccactgcatagaatacctgaaaagacactaaaaagactcaagaaacaacataaagactcaaaatcctatacctaaaacttagataaaatcagtgaaactagggatatatcaactcccccagacttagtttttgcttgccctcaagcaaaacacaaaagccaaacccgtggaagaggttttgaaaacaaaggaactcccaacattctctagcctattgccatgatcatccaaactaaatccacatgcctaacaattctaatcaaatcctaaccaacatgtacttctctgcaagcttactcaacattctaaatttcatacctaagttccacaactatatccaccaggctttcatagctgggtctcatcaaacaagctaacattcaagatccttctagactcattcttgtactataccatgataaatcgaccattctttatatttttttctttggtgttctttttctcccccagatttattcttttaagagagtaaacataggggaactcgcatactggatcgacaccctcagcatttttccaacctttgtaattgatcattctaaataatgtataataatggggtcatagggaacattcctacccctatacactatatgaaaatcctatcaatctctcattttctttttatttttataaggggagaggaacacattctttatcacatggatctcaatatcatatatgaccatttattcaagatctatgaatatgaaccgtttgaagaggtaaaaagaagagcagtgagattagctcaaaccttagtggttgtgtaggaaactaggatatcctcaagtctattggttagcaatctagattttccaatagtcggattgagtcgaaccaccaacattcatcaaccagacaataatcaagagaaatatagatcatgattcctaactaaactaaagaaaactttttttattttttttaacgataagaaaatgactcaataaactcaaaaataaaaaataataagaatcaaaaataaaagcataattagtaagaacctccccagacttaaatgacacagtccccagtggcattcaaatccgaagaaggagggaaaaataaatcaaaaatgaaagaaaataaaaaaaaagaaaaacagaaaaatcaaaccagtgggttgccttccactaagcgcttggtttgagtcaatagcttgactttgcggagttcaggatgtgggtggattggtgaaggattgatgctgcctccgcgccttccaaggcggtgtgtaaactaatccggtctggacaactgtagtttcgatcgacactcatgattgtgtcgatcgacactatcatcgtttccttcaatatcaagaggagaaacaagctttcgaagaactctaggcttgttaacttatgaagcagacttcgaagaatctaaagaattaatctaaggtaaagaaggagaaaagatagaagagaacttatcaaagaaggcctcaagtggtgtgggttgaagagaatgtgcagaatcctctgtctatgaatcccgagggtgtcgatcgacaggagggatggtgtcgatcgacaccgatgctctacaattctcattggcgatctgagctgatgggagcgttttgtgtggctctggtttgggattttgagcagttagaggaggtgtgtctgtgctagaggcaatactactgataggcttagtgagcgttgaaccatccatgtcaaactccatctccaaataacaaactttgagagagatcctacctctcttcacatcaatcctagcaccaactgtagcttggaatgctcttccaaggataagaggatccttgggttcctgctcgtagtccaggaccacaaaatcagcagggattagggagttaccaaccttaacacgaacatcctcaagtattacttcaaggatttgtttggaaaattccgcgaagaggagactgtttctagtctccctttagttagtcatgcctagtctctcagcaacatacttaggcatgaggttgatacatgatcccatatcacacaatgagcggctaaacctgcttgtggagatgtactaagcaatgtccactcgatgtgccttctctttattgaccttatgcaacatgatggtactgatgtcccgtgtcagcagtttaggttcatcagagctaatgccattgtcaacaaggcgcttgacatacctgttgagtggagaagaggatgtctcagaagcatccttaggaagagaagagaggatcttttccatgatggttgtgcacttagcagcatgaatctcctccttagaacgacgcttcctcggataagggacaggaggagtgtacgcagactcgggctgcatcgggattcgcacctcacaaggtgcagtccggattcagtgtcgacactagaggtgtatcgatcgacaccctcgtgaggaaccattctgaaaacaatgttccatatggtgttgatcgacactagtaggtgttggtcgacaccaactctacagtagcgagctccaactcacctttaatgtccaattcttcccacacataatctccttctttgatcaagatggcattacagctcttccttgggttagcatcatgattactaggaagaaagccctcttgtctcttaatgaattgtgctgtttgagctacctgtacatccaacttcttcaagtgagagctaagattgtcgatcctcccattaagatctgggtagacagcatcaaacttgtcattacactccacaacaagctttgtttagctctcaagaatctgctcaagcatagatttcattctactctctttggtcggtctcctctggaagttgctctgaggaaatgactttagaaaggcaggttttggagtgtagttcgatgaactctggttccctgtaaaccgattgtgatatgatcatggacaatattaaggatatggagcatgaaccgaagcttgaacgtgagcttgtagccgaggaaggagctaagcttgtagctggggatgagcttgtagctgaggagaagcttgtagcggaggatgttcttgtcaagccattggcgggatgcttaaccatatttaggaccgaccaaatgacttaagccaagtcactacccttttggttttgattcaagctcaaggacctcatcaagatggataagtgattcatgagtgctctttttccctacctttgattttgtcccgccgggttttccaaaggaaggtttttaatgaggcttatgttttcacttcatataatccattttgatgattcaaggccaaaacccactaaaataaaaagacaattttgtggcttttgaagttgaagggtctatcttgaatttcaaactatgttaataatatctgttgtgttctaggcagtcttggagtatgttccaagacttgcctcttcatcttctcttctccttctctttatatactcttgtattctcttttgagaacttatcattcttttaatcaaaaaccttttcgaagaagatcatcttgttggtgtgtatatccagcaaaacccttagtcttttttggtgtgtatatccaaaggatctaagtttcggtatcttgaaacccttccgcaagcttctgtgatatccatcgattcatacaaatctatccatcatcacggtttcacagccacctctatccagtgctcaacttaagagtgccgagtctttgggtggatctcatcacttcgtccaccattctgaccatggaaaagtctggcatagactccgagcatcgaaggttaaactccatagcagcaaaaggaaaagaaagttgtgatgaaaaataagggaaatttggagtaatttatagggactttgtgtcccttgaggatcgcaattccatttgagaccggagtgattcgcggaaaaaggagtcgtaatttatagggactttgtatcccttgaggatcgcaattccatttgagaccagagtgtttcacagaaagagttaaagccttctagtcaaccctacatttaaaacatatgtccaaaacgaatatttcgagattaaggaaagtagcaaagtttccataaaataatatgggccagagcgcatagcaggttcaaaattaataaaataaaataaaaagtaacgagttcaggaacatttatggaagaggctcaagaacaggctccttcatcgccggatcagcgttcgaagaggatgcttcatttttatcatccacctcgggttcattcttgacacgcttccagtggttgctatcctcttcctcgtcgtcctcctcgctgtcggacgggatcaccttgacgggagcatttacgggaccagagacttgaccacgggcatggaggtaaatccgaagcttagtcgggatcctggccacgcaccttcctccaattcgattggaaaggatcactccacatggtcctcaccttcctctccactcgagcgatacgggcctcaagagtttgcctcttgaggcctaaacgctgcctctcatcgcacaagcggcgatgtttgtctacaacttagcccggaaaattgtttagcataaaaagaggaagaagaagaagtttaataaaggaaggaagagtgaatcccgaccttatccatgaaatcatacgcctcctttttgtcttttggaggaaagtgaaaagcggcgtgggaaaagaggacaccgtctggttcaaaaccatcgccggataaaaatatttgattgccaaggtcgagaggacagacggtggaggctccgtcgttttccattcttgtagtgtttaccaagaaaatttatgaaatcatagttggaaaattcagtggcagctgaactcttattttatagagggttaggttttgtcttggaacaaaaaattcaataattatggcatgtccgaatggtttaaaccatttttggaaatcgagaaaaggcaattattgtttcaaaggcgtgaagctttttcgtgggtctcgaggaatgggaaggaaaattgcaaccatcgcattaaagacaaaaagcccattaaatacaaagtaaaacacccaagctcatcaagtttaccgaattgactaaacccgagttggagaattcacgttgaaaacgagctcagttctcactaactaagagaaaggcctgataagccgataaatctcgaaatttaaccacatggtcaaaaatacttaatgcgg

SEQ ID NO: 1769 - DNA, 3414 bp, Arabidopsis thaliana landsberg
  unsure (1)..(3414): unsure at all n locations
ggcctcctcaacggggagtaggtttgcgagaaccgaacctcggtaaaacaaatccacgtgtctcactctttatttgcttgtgatttgttttgcatcctctctcgcggacttgattatatttctaacgctaacccggcttgtagttgtgattaactttgtaaatttcagtttcggcccaattcaccccccctctaggcgactttcacttaccacacttgtagatgtcggcgtttcgaccccggggggtccctggaccgacgagtaaattgtcgctgcgtgtcccagcctagatgggtcggcgggagacggtacacaaaggggggagaacagtaaaggggaacctcggccttcgtgttgtgctgtgcccagggcggatggatgcgcttgcaatagggggttacaagcgttcgcgtgggagagagcgagacgcttatgcgccggcccgttctcccgcgcggccaaccctctcgtacgagagccctggtccttccttttatagccgtaaggagaggatccaggtgtacaatggggggtgtagcagagcgctacgtgtctagcggagggagagctagcgccctaggtacatgccaatgtggcagccagagagatctgggcaccctgctggcgtgatgtcgtggctgtcggaggtgcggcggacgtggcggagggacagctgttggagcggtcgagtccctgctgacgtcgtcctgcttccgtaagagagctgggggccgccgtcgtcatagagctcnnnnnnnnnnnnnnnnnnnnntccggcggacgtggccggatgagacgccggtcttgttctccgtgacccgagtcgattcggggtaggacgatgatggcgcttcctgttgacgtggcgggcctgtgccctaggcagggtgacgtgggggctcctccgaagccgaggtcgagtctgtcttccgttgccgaggccgagtccgagcccccgggtcgggcgaggcggagatcgtttgaccgaggccagggcggagtccgagccctggggtcgggcgaggcggagtttcgtcgtcttccgggtcttagcccgagtccgagccctggggtcgggcgaagcggagttcgtcgtcttctgggactgagcccgagtccgagccctgggtcgggcggagcggagttcgccgtcttccgggacttagcccgagtccgagccctgggtcgggcggagcggaggttcgccgtcttccggggcctagcccgagtccgagccctggggtcgggcggacggacgtttcctatggtgcctttgcaaggcctgactgcctgtcagcctcactctgtcaagtggcactgcagtcggagtggcgcaacggcgctgtccttctgtcagaccggtcagtggagcggcgaagtgacggcggtcacttcggctctgccggggggcgcgcgtcaggataaaggtgtcaggccacctttgcgttaaatgctccttcgactcggtcggtcggcgcggcgatttagtcagggttgcttcttagcgaaggcaaagctcgggcgagccggagatgtgtccgccataaaaggggggcctcgggcgagacggaaacccctcgaggtcggctgcctttggcgaggctaggctcgggtgaagcgtgatcaagtcactcgtgtggactgatccctgacttaatcgtacccatcaggcctttgcagctttatgctgatgggggttaccagctgagaattaggcgtcttgagggtacccctaattatggtccccgacagtagcccccgagcctcgaagggagtgttagcactcgcttggaggcttttgtcgcacatttttgcaaggggaccagcctttctcggttgcgttctgttccggtgggtgcgcgcgacggccggntngatagcccccgaggcctcggaggagtggtttcactccttcgaggtcttaatgccttgcgtaacgcttcagcaggtctggttgttccctcatgcgaactggccgtagccgtcggtgcacggtcggggcccaagtcctcgggctggtatgttgacgctgtcaacgatttggccggagccgggtctgcgagagcagcccccgagcctccacacagggcgagaggacgatcagggacagactcggcttgttacatacgcccctacgtcgcctttccgcaaggaggaggggggggggggagagcgccatgttaccctcgatgggcactgaacatggtgtctccggtgagctgcaagcgggtaatccaagtggacgtccgtgccccgttcgttgggggtcggctaggggcccagaggcacgcccataagtacctgcgggtgatctgccggacccggtcccctggcgacggggtcagagggctcgatgcctccctctgatgggattccgttacaagatcgctcccgctggtctcggaaatgtcctagggtacctcgggagcgcaacccgagccttggtcatgtatcgaacgtacccatggtcatccctcgctcggcgtctgaggcggctgtgaacccttcgggggccagccttcgaacccctgatcagtaatgggcgcggagcccgagcagcctgaggcggccgtggaacccttccgaggggccggccttcgaacctctgaccagtagtgggtgtagggcccacgcgatctgaggcggttgttgaacccttccgaggggccaaccttcgaacctctgatcagtaggggggctcggagcccggttccttcacggggaaggacccttttcggggaatccctttccggtcctgttgtaagagatagagaaagaggaaaaaacggaaaaagggtacgaaatcgaacgacgcggcgtaccttttttggcgcggttattacggcgaaggcgaacgtcgcctgcctctcccgccagaagcaccgcctgtcccgccgcggagttgatgcgacggggcgagttgttcgcggggcagccgttgcgcgtgccgagctgtttgcggaatggaacacgagcgcgctgtcttcacgccgtgggagagggttctctcgctgtcccatgaggggacgtgagcttggctgacgacgtgaccgctgcttccgcccgcttgccaccgccattactaccggcctatttttggccgcatcgaccgtcgcgtcttctcccgcggctgactggctcgtgaccgatgtgcctggctggcactgttgggtcatacacagggttgcctcgagtcgcggtactaattccgtagtcgaggaggcgcggtagtggcgcgaggggcggtgcagttgctcgcacgtagcaaccggcgcgccagttcagtgacgtgtgggcctgggctccatgctgggcgcgttggagtaaaggggtgcaccacttggcgcggttgcatccgactgcatagttgtccgcctttcaccgctggtctgggcgaaagtggaggaatcttgt

SEQ ID NO: 1770 - DNA, 7746 bp, Arabidopsis thaliana landsberg
agaatcggccaaattaacacttgtccctgcctgcttatatatctctttttgaccaactctgtttcactctgggaccgtgattaccacttttcaaactgctacatgctttgattaatcactaaaatatctttaacaactcgtttttttggtttgtgaaatgaatatgggacattgcagaagggaaagaaacatatgatgttctatcaaccgaattattgattcgtggaaagtaaaatcactgtaaaagagaaaaagatgaggagtgtagtgcttgttgctttagccgctgcgatagggaatatgttgcagggctgggacaatgccaccattgcaggtatctctctttctatatttctctttctttttcctttgcatactaacgaaatctcactatgatttgatgttgattcttggtggcaggagctgtaatttacattaagaaagaatttcatttggagaaagaaccaaagatagaaggactgatcgtggcaatgtctctcattggagccactttgatcacaactttctctggtcctgtctctgacaaagtaggaaggcgatcaatgcttatactctcctctgttctctattttctgagtagcattgttatgttttggtctcccaatgtctacgttctccttttcgcaaggcttcttgatggttttgggatcggtttagctgtcactctcgtcccaatctacatctctgagaccgcaccttctgagatcagaggattactcaacactttcccgcagttttgtggatccggtgggatgtttttgtcgtattgtcttgtgtttgggatgtcgcttcaagaatcaccaagctggaggctgatgcttggtgttttgtcaattccgtccattgcctactttgtacttgcggctttcttcttgcctgaatctccaaggtggcttgtcagcaaaggccgtatggatgaagctagacaggttctgcagagactccgtggcagagaagatgtttcaggtttgtcttgatgaacactaagacctctagattatcgatctttgaacttatactaactcggggtatgatttaggcgagcttgctctgctggttgaagggcttggggtgggaaaagacacgtcgatagaagaatatgtgattggaccagacaacgagggtggaaatgaactgccgaggaaagatcagataaaactatatggtccagaggatggacagtcatggatggctaagccagtgaaaggacagagttctctcgcattggcttcccgacaaggcagcatgttaccgcgtggcggatccctcatggacccacttgtcactctctttggtagcattcatgagaatctcccttccgagaacatgaacgcatcatcccgcagcatgctcttccccaatatgggaagtatactgggaatgatgggaaggcaggagtcccagtgggatccagagagaaacaatgaagatagttctgaccaagatgaaaacttaaacagtcctctgctttctccgcaaaccactgagccggatgactaccaccagcggaccgttggtaccatgcataggcgacagagcagcttgtttatggcaaacgtgggtgagacagcgacggctacaagcataggcggtggatggcaattggcgtggaagtataatgacaaggttggtgcagatggtaagagagtcaatggagggttacagagaatgtatattcacgaggaaaccgccaacaacaacaccaacaacattcctttttcgcgacgtggatcacttctctccttccacccagagggtgatggtcatgatcaggtgaatggatacgttcaggctgctgcacttgtgagccaagcttcgatgatgccaggaggtaaaggcgagaccgcaatgttgccaaaggaggttaaggatggtccaggctggagggagctgaaagaaccaggggttaagagagctttgatggttggagttgggcttcagatactgcaacaggtaatgtttttttcccagatctttgtctgtagtaaagagacaaaacaaataaggaagtaaataacggaaaagaagcatgtttgcagtttgcaggaataaatggagtgatgtattatacacctcaaatattggaagaaacaggtgtgtcaagtcttttgacaaaccttggaataagtgccgagtctgcatcgcttctcataagcgccttaaccacactcttgatgcttccctgcattcttgtctccatgaggttaatggatgtaactggcagaaggcgagttttctctgctttcccttctctttttttatagctgaatggtataatttgaaagagtaacaataccagaagcgtgattgcaggtctctgatgctttcgactatccccattctaatactgtcgctggtaacactggtgataggaagcttagtgaatcttggaggttcaataaacgcgttgatatcgacagcaagtgttacggtgtacctaagctgtttcgtgatgggttttggggcaattccaaacatcctctgctcagagatattccctacttctgtgcgcggtctctgcatcaccatatgtgccctcactttctggatctgtgacataatcgtcacttacactctcccagtcatgctcaaatccattggcatcgcaggagtctttggcatttatgcaatcgtctgtgctgtcgcgtgggtttttgtgtacctcaaggtaccagagacaaagggaatgccccttgaagttatctctgagttcttctccgtcggtgcaaaacagcaagacgctgcagcttcatttctctctgatggatgactttctattctctgctgtctttttcaacattcctgctgtatttgaagttgagaacattaataataacaaatccataccatttgtttggtcttctagcatgcttcttcaggctgtataaagctttcctggattcttggtgttgtagctgcaaattgggagttcttcacatttgtaaccatgagatgagatctagacattaaccaaatttttatttttttgttgtacaagtcaaatcaccaggagattaaatacaaacagtgtaacaacaaagagggatatgtacatactagagccattatgaggtctctttggtgcaactaatttgctggaaatactttagttgcagcgacttgaaccatttgcagagatatcttcaagctgcctttccctagaggacctagccttggcgtcttcttctttctcttttacaaaggagagaaaggagtggatacgcgcggatggtgagcttcttctcctgatcgacccttctgcttcttcagggcattgctgtccaaactgacgtatcatcaacactgtatacactgcaagagcaagaacacatgccactccacacaccacaaataatccccaaaagctcttaagctccagcctatccacttctatctctgcgccttgcagagagcaagcttttctaagcaaccatttgttccgaattctctgcatatctccattttctgatagctgcaaaattgcagcggagacgtccacagccaatggcgagttacgcggaaatgcctgaacagtgggagagaaaaaatacatatcataaatcactatcgcattatcaaattctaaaaagttatgcatggaagaacttcctgatgtttcttccttaattatctatcatcaaacaagtagggagttgtttatattcagaacaatactcacaaatccccatccggttttcgtgaactcttgaccaactatgccgaactcacatctgtttgagaggaaaagctctatgtaagcacgttcatcaacaacagccgcaacaccacctttcccaggaccatctctcaaggccttatcatattcctctggagaccggagagggacaagtcttgacacatggatattgagttcgtggaccagatagtctctgacaaaggagccttgtggatacccaataggatcatggtttgtttgcaaagtttctatgcctttaattggtgaagacagctgatgaactgtgaggattgacgtgaggcttgcggtataactagagttaattatgagaactacgaatagccatattatcagcactattcttcctaggttgctggtggtagtctctcctgtataaattcagcagagaaaattggaaaccaatttaaaaatggaaaacaacttaagatagaatagggggtgtgggcagtacacttactatgagagaagaaaagagttgaaaagctaaacctgcaagacaagtaaacaacgacatatttcagagaaaaaattgtagtgtttggaattacgttcatccagttggagcttattatgttttcaccagaaagtagtgatcacttgtctacgaggagggcctcgaaactcgtcattgtgtttgtgctcaagacaccaaatgacagcaccgactatgaggaaagacgcagctgcaataagccacatctggggtgtgaacggcctcaagaacgccatagcactggagcccaacttccgaacaggagccaccaccactagccctgactccacatacggctgagtaaaatctgccattttggttctctctgttatgatggtgatatcaccaacacctgcatcatagacctgtgaaaaagatttttgagccacaaaatatgtcaaatacacacccaccaacagagccatcaacagaacaggttctaaaagagtgcttatgtactcaccccagtcgttatcaagcgcacaagctcagagttacttgggttgtcatgaccattcccaaaagctacaagctcaaatgggactgcgtaaggtcataagttaatagcggcaatgaagacatccacacagaagccagtgatcatcccattgcttttaactgagactacctcttcgaacctgtaacgatttggaactccaatcctcaaatgccttccattgttcgagaacacccagccacgtggtatttttattgaatgtcctggccagacaacactatgaagcttctgtcccgaaaaagatgtgttctccatctcgtcagccggcatcacagacaagcctgaatgattaaaccagtaaccaatagtcgtgtaaccagtgccaatgacattaagcacatcaaatgctggatttacaaggtttctgtcactagtaaacttcatcctaccggttaagccaattctatcaacctgtaagatgctctcaagaaatatctttcctccatcaaagactttcagagcatcaaggtgcaagtttccacccccaagctcagatataatcggattcttcgaaaaggaaacgtttccaccttttttgaagaaatcatcaatcgcctgagcaagcagccagacagtgtcataagcatacagtgcataagtgctaagtccaacatgagttaagttatgccacctttgaacgaagttctgcttcatgatagagttgggagtgtgcaggcgcagtgtaatgaccccttgaatgttatttatggtgtccaatgggagaggagagtctgtgtctataattgtagaaagccagttggtagcaatccacacataaccagtgctcatcataccaagattccgagccacattgaacaactctaggccccagatgaaagaagcgtgaacgacgataatccttgactcactcaaagctaccttaatcagcaaatcggtgatattctctctggtaggtgcggggggcaaagctgctttgtatgagattctgcagcgcttctctgataacctgtctcccaaggcagctaccccatttcggccataatcatcatcgccgtatattgctaccacctctctccaaccatagaattgaacaatatctgctatggcggccatctgaaagagatcattttgtgaagttctgatgaagaaagggaactgcagaggagacatagtagggtctgtggcagagaaggatagtataggaatttttagttctgttgcaacatgagctactacacgggcggtcgtagatctctgagggccaattatggccactgtctcagattccatgaactgcagagcttttaatatgatacataaaacaatcagtcagttaaccggataccagaatatggacatgagtatacttgcatgttgcagtatcataacctaaagtagatagcagaacaatccaagacatgaaaatgaatcagcgagcataaaaagttgattcaaaggtaaagaagaccagaggagtagagacctttcgaataatccgtgagcaaaacataaaaaggaaatgattgaacctcgacagacaaacacataataatcatccaataatcacagagttgtctcacttacgttccatgatgctcatgaatccattgtatttggtgtcatgcatgatgatcctaagtgtagtggtgttaagaatgctggggctagcattgacgtcttcaacagcagcatccatagcaactttgatgactttaccaatgagagaattaaatgtgaaaaccgaaccgatgttcacaacttggggtctcgcagagacaattttggtgagtccttgtaaaggaacagcattgcagatgatgagcataagcagaaaccacttcatcttctcaatttcaggagattcctgtttcacaaagtaaaaaagagaggaaggtcaagtcactgaatttagccaccattacgagcagatatagaatgtttgagggaagaaagatgcttgacctgtcactttctctcactaagcatgaggcaatggtggaggaagtaattgagtgcccattatagtaggtgtaaagtggagatcttctttatgtaatggtactcacagattcaactctcactcactcaaatccttcatatttcccccaacccacttctaatctcatatgattacttccacatcacagtgagaagctccttcaaatactaaacataccactcagatgaaaaatctcagctttcacgcaatcaagttagtgcgcaaaaagaaactctcaagtgaacaccatttttggctttctataccctaaaaagtgataattggctaaatgtagaaagaaagaaacccagattcacaaaatcaaagcttttccatagagaccgagataaaaaaaagtgtatatcttaagggttttggaaattgattcaaaggttgatcaaaaagccagacacaaccttcatatttcgttcaagcttttgtctactgtataatatgtacaagcgtgaggactgaggaagatgaaagtgacaaaaagaagaagagaaactaataaaatattaaactttaaatattcattaatcgaaatgatttactattttacaaacagagttttgatcaacaaagaggtatacttattattgagttatgctaacagagggatcatcaaaacaagttctaaaagagtgcttatgtactcaccccagtccttatcaagcgcactagctcagagttgcttggattgtcatgaccactcccaaaagctaaaagctcaaacgggactgcataaggtaataagttgagagcagcaatgaaaacatcaacacagaagccagagatcatcccgttgcttttgactgagacaacctcttcggaacgatttggaactccactcctcaaatgccttccattgttcaaattctgtcatggccagacaacactatgaagcttctgtcccgaaaaggatgtgttctccagctcgtcagtcggcgtcacagacaagcctaaattattataccagtaaccaatggtcctgtaaccagggccaatgacattaagcaaatcacaagctggattac

SEQ ID NO: 1771 - DNA, 10335 bp, Arabidopsis thaliana landsberg
  unsure (1)..(10335): unsure at all n locations
ttcgatagcacagcgtcgtcatccgtttattgagagtctgtctaacctctgagttcggtgcgaaactccaatagaggacccgcccccacctctcaaggtcagacctccaatgtggcctcgtccataggttcgcctgtcagcaggcacaggtgcttccgaatataaagcctcgggtactgccccccccccttcttaaaggcgacatcctggtcagttatgaccaatccagctgctgggtgcgcccccggcaagatgcgagctctttttgtagaagatgttgcaccgtccgccatggtaacctcagacggtccagagacctgggtgacctggttactagcacctacctggcctgctgtagaggtcccaacaatagcttcaaggagcagaagatgagacgtcgggcctctacagccgacatatgacctgtacgacaacagatcctggcagtagctcgctgagcacgaagacttggtcgccacattcttctggggataagcggactttctgaagtagaactggaatttgggagaactagaaaaacaaatatatatcgtttgtcaactggtaattcgtttgtatattaaacgaagttaaaataaaaacaagaaaaattgtacctataggcagatcggccacatggtctagttggacctgcgggacctcttcaattggatcccgctgaactgttggaagagcaattactggacctgttgtagctacggcgagagcagttctgatgcgatccctgttgaaggttgcccaatcaatttgaccacgcaggaggagggtcagcaattcaagttctgtcttcgaaagggtaacttctttgatttttgttgcaaaccaccaagagaagatcgatgttagtaacaataccaatatttcaaaagcaagaaatctatacacgactaaaacagtaaattcaaagcggcagatctccatctgacccaggttagaggaccatgtcctcgttatccttgcagggtcaaaatcgttgacggaatgatgatccacccaaaagaagcctacttaactcgccaattcgtgtcccggaaggcctttaaaccacctaagtaacaattcgtggtagccgaactctatgttcacttctcgggctcgagtgtacaacgccagcacatgacagacataatttgggcacatttgaggaaaggcgaaggcaagacagtaaagcatctcgaggatgcacgccagaatctggaagaacagcctgtacttcccaaagaagttggcgtaggcgcaacaccatccttgcaggacattctcagggtgagagcagcgaactcgggagtatcatagttacccccaccggaacctagcatctcctccgaaggtcgaccaggtcgctgttcgtaatcggtgtgccgcctttttgcttggcagcctttttcttcttcggcctgtcggctctggttgacggcggacgaattggacccattccgcctagggttattatgcacctttgtacttgtggtagtaacgccnnnnnnnnnnnnnnnnnnnnnntctcatcgtcaccgtaactgtggttgcttttgttctgggagttctcgaagtcgctcatcttttggtttcattagagaaagacgagagagatgaaagaaaagagcgaagagggcagatcgagaaagaagggagtagcagagaaacaatggagatagcagaaaaagatgaaatttttctatctctagaaacaaaacgcagtaaataataaaggtggagagaaattaccttgagagtcgtgtgagttgacgtgatgtcaagtggagaggtgggaagttatttaaagccatcatcaccacgattttcgagattgcagagatctcttctccgtgcctaatctggaccgttagatatggtgcgctgaagaggcgctccatctcagtcgtccacgtcagcagcacttatctcacgtatctcctcaatatctttcggttcaggacttcaaattaaatcatttttattgagtttatcctcaaaaccaacagatcccgccatatctatcatctcatcgagaatatttttgcaatcttatctgatctatatgtccgttcatcgggttcgcctactcactcaatgggctggggggnnnnnnnnnnnnnnnnnnnnnnctccaggaattcacctgcgaaaataccaagctagcccacaaagcccactaagcccaccaagtagaggacctacgcaactgatgagcccacatacgcgaatgggtacttgggccagataagcccagtcacctgatgaagggagacaagcgaataacaacctaggaacggatgaggagatattcgcggagcggacctgttatctcggaacgtacctgccgaatatccaggaggatctccgcaaatcccgaacggagctaccacgtgcgtagacctatataagggagcaaggacgacttggaagacacattcaattcagcttacattcaaacacatacttttacacttgtaatctcctttcacattgtaaaagctttgtcataatcaatacaaaaagtccattcgttcttagcaatataactctcaaggtttcagtgaagttctagccctcctttctcataatctcaattacaaatctctagtgtggatttcagaatccacaatgggttagagtagtttagaattctcagtatgctaggtcgttgagtttgattgatagatcccttctggagtagttttgcttattttctagggctttctgctcaactagaatttgcgcccagatatttccgcacccgaaaggtgttcgatgaaatgtctgaaccactaattccagagattcgtggccctataccaaggtattggttgcagggagcgttttggctttaacttgttgattcgtaatgcctgttaggttggctctcgtcaatggtgattgagtctgggactaggttaacttgagggtctctgttgcggtggcacttagatttggttaatgaactgaggaaacgaaactactcaattaccccatcctcaggaattctttatctgattgaatttattgtttacgctactgttgtttactacatcttgtcatttgttgcttagtttctgtaattctttcttgttactcgacgtgatactcaaccacccagttgtctggcaacagactgtgcagtcgagtatctttgtttcatttactgtctgttactcgaccagtcactcgacctcacccagtgctctgcaaagagctgtgttggtcgagtgtcttactttttctgcttgattttctgttttctgcatgttcactcaggactgctagaacacaccaaaacctgttattgttttgcttgacttagtgacttttgatcacatcttgattgttcgcatcacacccatttggattgacaacctaaaatactacaacgacatgattagtgttttaggataattgactaagaactattatcaatttggcgtcgttgccaattgggtgtttgtttgttacatttgagatttcaaacttgcttagatcaagttcgttttcaattttcatttccggtactaactatgtgtttttcttgttgtcttcttgatccaagtaccactctgctgttggttgcaaactcgatcaaccgacaaccagaacctcctttacaacgataagatcgaccgcatagctcgtgaactaagagaaaggagaaacacagtcaaccttgtaccccaacaaccacttgaaatggctgatgaacaaaatcaacagaatgaccctacaaacattggtgctggagatgcaccacgggatcaccgtcagaggaaaggaatcgcacctcctgctatccagaacaacaacttcgagattaagagtggtctcatctcgatgattcaggggaacaagtctcatggtctgcctatgcaagacccactcgaccacttggatgaatttgataggctctgcaacctaaccaaatcaacggcgttagtgaagaaggatataagctccggttgttttcattctccttgagcgacaaagcacacatatgggagagcaatctgccccatgactcaatcaccacctgggatgattgcaaaaatgcctttctggcaatctgcaagactcagaaatgagatttctggtttttcacagaagactagtgaaagcttctgtgaagcatgggagcgtttcaagggttacaccaaccaatgccctcatcatggcttcaagaaagcctctctgctcagcactctttacagaggagttttaccacgattagaatgcttctagataccgccaacaatgagaatttccagaataaagatgttgaagaaagctgggaatcggttgagaacctagctcagtcagatggaaattacaacgaggactgcgacaggaccatcagaggaacaactaactcggatgacaaacacaagaaagagatcaaagcgctgaatgacaagctggacaggattcttcttagccagcagaagcatgtgcacttccttgttgatgacgagcagtatcaagtccaagatggggagggtaaccagttggaagaagtcagctacataaccaacaaccagggtggctacaaagggtataacaacttcaaaaccaacacaccaacctctcctaccgcatcacaacctttgctaatccacaacatcaagtctatcatccacatcaacaaaaagagacagaacaaaccttttgttccctacaaccaaggtttcgttcccaagcagcaattccaggggaactaccattttccaccactacctgagtttgcacctcagcaaaaccaaggtcctgctgctcgtgatgctgaaatgaaacagatggtccagcagctgctacagggacaatcatctagctcaatggaaatggctaagaaattatatgaattgcaccataagctggactgcagctacaatgacctgaatgccaaagtggaggcattgaataccaaactcagatacttggaaggccaatcaacatctacctctacaccaaaagttacaggacttccagggaagtccatacagaatccaaaagagtatgcaaccgttcacgccatcaccatctgtcaggatcgagaactgccaactcgacctaaccctgatttcatcactggggacagtgatgctcaagaaggagaggcttctactcaggctgaagtctctgttgttgaatttaaccattctgctggttctcgccatctcattcaatccacctcggaagagaaggccgccataatggagagaatggggaaacgattcaaacctactccattaccctcacgtgctcttccgtggacattcaggaaagcgtggatggagagatacaagtctgttgtagcgaagcagctggacgagattgaagcagtaatgccactgatggaagttctgaaaggccccgatccggacgatcgcgggcgttacaagttctcaacctgattcctgatcctcacaaagatgtaagaaattctatactggaaaggatcaagatgtatcacgattcagatgttgaaagagatgccactccatctcgagctgctgaccagaggattgtttaagaaaagttagaagatcctggatctttcactctaccatgttccattggggaattagctttcagcgattgtctgtgcgatctcggagcctctgttagcttaatgccactctctgtggcaagaaggttagagttcattctatataaatcttgtgacctgactttgatccttgctgataggtcttctagaaaaccgttcggcatgctgaaagacctaccagtcatgattaatggcgtagaagtgcctacagacttcgtggtgctggatatggaagtagagcataaggatcccttaatactgggaagaccctttttagcgtcagtgggagcagtgatagatgtcagggaagggaaaataagtctcaaccttggaaagcatatcaagttgcagtttggcatcaacaaaactccacaagggtcaaccgaagatggaagaacctctggaaatgatagagcgatctcaggagaaggatatgagactgaaagagtgaaagaacttagaaagaagtctgataagcagaatgaaactatagagaagctggcccacaccattgaggaacttaggagtaagctgaatcagatgcagaaggaagctcaacctaaaggcgggattaacactatcccgagaaaagaattcacttcaagatggtctcaagatacagattatcctccagaagagaaggaagcctattttgaagaaagggggattgagtattctgctgcaaacctctccagggaggacgctgaatatgatgatggtatcagagaggattatgctaaccctctctacagttcattttcttcttgataagtgtgaggagtcaagctagagactttaaacaagctcacttgggaggaagtcccatgactatccttttaaataatttttactttcttgttatttttgatttgttttgtttgtgtttgtggttctcagaaagaaaaaaaaaaaaaaaaagaagtaacatgaagaagctacaaagtcttccagggagtctttcaagtttacagaggattgcgggatttcctggagtttttctaatgaacagagaatacagagaagagacaagaagacaacgagggacccgccgctgacgcccatgtcttccatgcaagagaccaagagacatggaatctcttcactcccactcaatcaccacgcaaccccaccttcactcgatatcaccttcatcactcgaccttgttttctcctccataaccaaataaactcgaccccatctttcttaaatcaacgctccctttttcttcttctactcgacctcaccatctttcttccccacgcactcgaccgctcctcgccatcaccacctctcaatcgtctcaacttcgctcgatcgcttcacgccatctctttcaagctcgtctctcatcaccaaacactcgactccttatcaccatcgttctctcatctctcaagtccagccatcactcgacaacaccaccgtttcatctcttccgcgagctcaagttcactcgaccgctcctctccttcctttcaaaaccactcgacttcgccattacacaccgcctctctatctcattatcactcgatctcttgaatcaccaccgcagctcgtctcaaacccactagttactcgatcgcggctccttcacagcttcatcgctctcaccgccatctctcaacatactcgaccttgcgtagtcactcgatctcgccgcttctcaacgcctctccatcgtttccatcgccgctgctctcatccccacgaaagctcgtcatcgccggttcactcgattaagcaaacaaactcgacctctttcaaaccgtttcaccatctctcgcctctaaaggtcactcgatcgccaagcacaaccaaggaatcactcgaccgcgagttcaccaaaccgaaaaaaaaaaaaaaaaatttggtacactcgatcggtttactctgttggtttgtgtttttggttttgttgggactaacgtattaacgtctatctttgagtttaattttgttttcaggttccgtaatgagtaacaccagcggagaatcctctatggaccctaattacaatgtggatgaagctgagtcctggtccgctagaccgagagagcaacatgtttaccagagcttcagggatgaatttgaacgctctacagcccgtcgtaatcagagaagagctgaaattgccagaggaaagagggcgatgtcaagtagatatgacctgatccctgaggatatcgagattgagtatgagccagaatcatggcgcagggagacgaagctgctgaacaaacccgacgaggttacagcggaggagtatatcagatttttttagatgaacgacttctggggaacgaggtatccctgctatgagactttagcccagctggggttactggaggatgtgcagcatctgttcgagaagtgtcatctggagacactcatggcttatccttacgctgcgtataaggaggagacaatcaagtttctttccacactgcaagtggagatgtatgagggtctcacggactttgagctggataccatggggttagggttcctgacgttctcagtggatgattagcggtatcagctttcgatcaagaagttggaagaactgttacgtttccctagtggaaagggaaccaaacataaatttgacagagaggagcttaaggatttgtgggcctttataatgttcaatctaccgctaaactcggggcggtctaagagcaaccaaatccggagtcctgtgatccgttactttcaaagatcggccgccaccgtcttttaattccagggagttatccggcgcccgtgtttaacacggccatggagatgatagattatgcgcttacagggattctcccccggacgaaggggaagaatgtcttgagaggcgatctcaacaacgcaccaccagtaatgcctctgttgatccatctgtgtggatgcaggaagtgcgcgttgacgaacgggaagaagaaggtgagaggagcactatgcgtgggtggcgttgtgacgccaattctggaagcttgtggagtaccgctcaaggaaccaggtttagcaccgaggatgatggacttggatcatttgcgcagatgtgagttcttggagtttgacatggctggcgactttcaccgctacaggttcgagcattcatcgattagaatcgccaacattcttctcccctgcattgacgctaccaggattcttgagggcaggaacattgacttcaagcctgcgcttgaagatctttatttcgagggcagtccgccaaccgaggagtttagtcacaccgaaggagctacaacagaagatgttgatgagacggatgatatagatgaggcggagtttgacacgagcatgtatcatttcagtgagcatatacctactgcgagggaaagcaagagtttgagcgaagctcatgggaacaacaagcaagctgcagaagtggtgcaagaaacaggacaagttactcgccaagtgcttaagggctatcaagtttctgaaggacaagatcatctgctcctcttccactacagctattccgcagggacatctccctcaggacatgccttcgaggagatatgacgcgcccgagccaagtcgccgcaggcctgagcctagagagcaggagattccgcatgtccctgcgaggcattcatcattcgagcctcgtgaatctgggaggaagaggaggaccacactcactcgatctagcagtaggagcagacaacttctgcagtctcgtagtttacgcgaccgcggtgctggccgcagcagaaggagagaggtcgagtatcctcagagcggtgctggccgccacagagctgatgaggtcgagtacccacctgctggagctgatacagaacaaggtggttcgtctatggcctgggagcaatcataggcagccattgacgagcaactacgttcattcttcgactgaggtaagcgcctcacttcaccattgtattatatcatctgttgtgatttgtttcttcattttttgtttctgtgattggatttgtcctgagtactctcttccaagtttattcgcacagtggactgtgtgatttaagtttgggggagggctcaagaagtgtgtgttgcattgtgtatattcttgagtctgcattcatctaaggcatagaaagaccattaaaatttgaaaaaatttcagaaaatgatttcacaaaaatagagtgtcatgtagattgcatatcattttaggattgtatatagtgtgcttgcatttaggattgctcatttgcataggggatagtgatgatttcaaaccgataagcatgttttgattcaatgaagtaagttcaatgcccagttagttctatgttgcataaccgattgtatctctgaagtaagactacaccctgctttgaattcgtaacttgactatactactttgattcgaaactcgcttatctgatgacattccctatctattagaacctaaattgagtttgcagttatcaagtctatgcattgtttgtgaactcgtggctaccatatacatacttagattatcttgttcatttcaccactctctggtaatccaagtagctgtctctcatttttagagcagtttcccatacccttagcctagccttatttcaagccaagatcatttatgtgtgattgtgaggtcttttcgattgagcttggtataacgtgttaggtatgagccgacaagagcagtctttcatgtagaccttgcccacgctttttgggttagctaggactaggtgaagacttgtatttgggaatgggatagtgtatggattgaatgggg

SEQ ID NO: 1772 - DNA, 759 bp, Arabidopsis thaliana landsberg
agtttggtatggaaactagacactactaatcttgctattgcttggcaataaccattagagaacaagtctcatctatgtgtccaatttaacttcaatcttaggagatttttcaagaagagagcttagctcagtaacatagctaccccagtcacttgtggcattaacacccgaaccagaaatcccttcctttgtagtcagagctccataaaaccgcttcattgcgacttcagtcgaaagagcatgcacataactgtgtaatctctgaaacttctctctagtttcttgctcatcgataagcttttctctaagctcatccgggaggaaagccagcacattaaccatattagaaaattgaaccaatataaaagagacatgtgtctcatatataaatcatcaagcctcttagctaagagttttttctaattctctctcttcatattctactttcatatgcataagaactatctaaaaaccttccattgaggatgctctaagcctaaacaatccaagcaaacacaagaactccgctaaacaatgagaacaaatttgtaagagttctttggcgaagacgatccctaattcattatgcatgccaaactgtgatcctttccttgcggagagaactgctggagctgaagagaaattgcctgctcaaaaaagcatgcctaggtaaaatttgaaaagttacatcatatggtcatttctttaaaataaagattggtggttctattcaatttgaaaagatttggcgaataggtc

SEQ ID NO: 1773 - DNA, 648 bp, Arabidopsis thaliana landsberg
attcagcatcaagaccacaaggctcctttgcttgatatcttgttctatcattaaagggaattctcatgagttaaaaagaacttagtgaaagtaatttccgaaagtctctcctacgcatttcatcgaacaccttcgctgcattgatcattagagtaaccaaaaccaaaattgttctctcccatttagtgtgaaaaccaatctctcttcaccaaatttgcttctgagtgaggaattcgatcatttgactaagatcattgaacctaactgaagttggtataatacatccgcacaagatttcctgaaacgattcgagtccatggtttgaaatttgaagtacgagaccgatcttttaagtcaaatttatgaaagatttagcctttaggatagaaatgattgaatttactaaacttatacacaacattattaggcatggagctaggattggctagtgatcattggtttattcaggatttggtacaatagtattcttgagaaactcgagactatatactctatagttataacggaaagattaaactttcttccgtctccacgcccagtcacacacatagagccctactctttctttttccattctctgtaatatacaaactttatccactaatgttgatgatgccagcagggaat

SEQ ID NO: 1774 - DNA, 5524 bp, Arabidopsis thaliana landsberg
  unsure (1)..(5524): unsure at all n locations
agatggtttttgaatccataaacaatttgaaaaggagaatgcttagaatcagaatgcgtggcatgattatatgcaaattcaatatgtggtaagcattcttcccaagttttaaggttctttttaatcaatgcacgcaagagagtacctaaggttctattaaccacttcagtttgaccatcggtttgcggatgacaatagtagagaaaagcaacttagttcctaactttgaccacaaagttttccaaaattaactaaggaacttagtatcacgatcataaactatggtcttaggaatgccatgcaaacgaacaacttctctaaagaacaagctagcaacatgagatgcatcatcggttttatgacatggaataaaatgcgccattttagaaaagcgatcaacaaccacaaagatggaatccttaccagtcctagtcctaggcaatcctaccacaaaatccatagatatatcattccaaggatgcaaaggaataggtaaaggggtatacaaactgtggggttgaaccttagcttgcttacaagtcgcacatcgttcacatagtcgctcgacatctcttttcatgtgcggccaatggaagtgttcttgcattaccttgtacgtcttagcaacttcaaagtgtcccattaagccacctccatgagcttcccttaaaaacaattctcgcaaagaagagtgaggcacacaaagtctattttcaaagaacaaatacccatcatgtcgataatattttccaaatgcaaacttctcacaagattgaaatattttgctaaaatcagaatcattagcatacaagtcttttatttgctcaaaacccaacaatcttagcatcaagagaagtaagcaaaacatacctccgagataatgcgtcggctacaacattatctttacctttcttgtatttgatgacatagggaaacgtctcaatgaattcgacccacctagcatgtcttttgttaagcttttgctgtcctttgagatgctttagggactcatgatcggtgtgaatgacaaactccttaggccaaagatagtgttgccacgtttgtagtgctctcaccaaagcatacagctctttgtcatatgtaggatagttgagagtagatcctcctagcttttcactgaaataagctatgggctttttatcctgcattaagacagcaccaattcctacttagaggcatcacattcgatttcaaaagttataagaaaatcaggaagagataagacatgggcatgagtaagtttctcttttaaggtttggatcgcattctcttgagcttgttcccacttgaatcacacgttcttcttgataacttcggtgagtggggctgctagagtgctaaaatccttcacgaaccttctatagaagccagcaagtcaatggtaactccttacttctcctagtgattttggacttggccattcccgaatcgctttcactttcttttcatcaaccttaactccatctgtactcacaacaaaacctaaaaagacaaggttatccgttcgaaaagtacatttcttaagattggcataaagcttttcctttctaagcacttcgaaaaccatttttagatgctcaacatgctcttcaagactcttgctataaactaagatgtcatcaaagtaaacaacaagaaaatgtcctatataagctctaagaacatgattcattagtctcatgaatgtactaggtgcatttgtcagcccgaatggcatcactaaccattcatataatccttgtttagttttaaatgcagttttccattcatcaccttctttcatcctaatttgatgatatccactttttatatcaaccttagaaaagatgctagaaccatgcaattcgtttaacatgtcatctaatctaggtatagggtgttgatacttcacaatgatattgttgattgctctacaatcaacacacatacgctaacttccatcctcttaggtacaagcaacaccggaacagcacatggactcatactttcacgaatatggcctctctccatcagctcattcacttgattttctagttacttggtctccacgggattggtcttataagctcctggaacaaagtcaatttggtgctcaatgcctctaatgggtggtaaaccttctgaattttcctcgggaaaaacatctggatagtcctgcaaaagaaacttaatactactcggcaaaaccggttccaaagctgttatgttcaataagttttccttaaagataaacaagagattatgtttagtactccccattggtttactctttgaaggctcttttacacatccttttatcaccattctgaatctagtttcatccatctttcatagcattcaccatcatttttgtacattttgcatctttagtcgagtctaggactagtcttgcatacattctagattctggatttgtttcaggtgttttaaagctattggtgctctgaaagaggaaaaacagaacagaaagtcacatttccacctacatactcgatcaccagtagcagagagggaagcagtcagctcagtagtccatccagacacttctactcgatcgcagaggagaccaggcagaccattctggcagatatcctcgatcgcacaggagaggaggcggtccattctgcaattctactctatcgcagaggagaccaggcagtccattctgccagtccaccagttatactcgatcgcagaggagaagaaccagtccatcctgacagctgacacacttactcgatcacagaggccaagaagcagcccagaccattctgtcaaccaacctactcgaccaccacctcgaccctctgatcaatccgcactcaaccagacaacctgagcatcagaaagagaagagaagagaaggctcattcgaagcccattcgaagcccattcgaagcccatcaggaagcccactttgagccgacactcttgatcacaccgtccatgggccgttaagtgggctcgaagcccgctttcttatcttagtataaataagtctctaagggttttgccctgagacatgcactttgagagacacaaatttcgcactattattcagcagccgcttttcattcctgcaactttgtatttcaatttttcttctaagttattcagattttgctttcatttgcttgttcatctttgtttcatatttttagtatgcaatctttcgtttctaagttattgtatttaagcatgttgtctgagtagtgattaggacttctgaggatgggatagagtagttgtggaacccctggtcaaatctgttggttaagtgtagatttattgaatcccttctgaattagttgtgtttactgcttattcctttatgatcaactggaatccgatcccagacgttccagcgcccagaaggcgtttaatggaatgttggatctactaattccagtgataatcgtctctatcccaagggattggccgtttagagcggttattggctttaacactcggtttttatgggctggttagttagagatcgctaatgggaattaagtctgtgtctagctatgcttgaggatttctatcacgggagtgaattaatctgctgttgaacatgttgtctagggatagcttaattgagatttgttaaccaactgaattgatcagggagaccacgctattgaattttagtatttttctgttttcaaccattctactcgatcacaccagtctactaacagtgagattgcgtgatagagtaaaatggtccatttctgcattttcacactctctcatcctgttgtactcgatcacagggtcccttctgccagtcgaccctgcgatagagtatatcagtcatttctgtgactttttattgttttctacatcaacagtaggactgttagaaaaccaaccaaattctgcttggcttgacttagcaacttctgatcaattctcatctgtctgcatcacacccatttggattgacacctaaaatactacaacgacagaatagtgttttaggattaattgactaaaatcctattatcagggagttcttgcaactctagcatcgacgctctgggaaccctattgctacacgtgtggaaagttagggcattatccgaggatgtgccgctactaccagccattaggggaccccaatgatacgatatattgcattagacgggacaggatactatgcgagtgcatggccggtggttatgacgggatcgtctaagagtccgtatcatgtgtttcctcccactgcagctgactcggcaagcctagatggttattggcctagttgcgtttgtccatgtactatgtgtaggagtatttacggttaggttgactaatagcaagtctaaggcgaaggtaagtagggtcctaatccttttgttgtaaaatagcgacttagatgtgtagtatgagtaataaagtccttcgcccaggtatgtaaccttaggagaaatagaatagatttagtgaagtataaaagaaatagtcgaagttttacaaaatggaacgtgttaaatagacttagaagaatcaaaggggaggagcgaagctaggatagatcatgacaaagaaaacccagaagacaagatttcaaagaggttgcaagaagattataaaagcaagtatcttaagcaaggtgaatggagagtagcccctaagtcataaaaattcgaggaaaaattttatttaatggaggagaatgtaatatccctcacattgagtaagactaagttgggctgttgagtttgcttaaggacgagaaaaccaacccgcagtacgtccgcattatacccgtagtacgcatgcactatgcccgcagtatgcctgcaatacgcccacattatgcgcgcagtacgaacgcagtacgcaatgtgagcgatccgcggtggcgtgagtttggccaagatggacgtgtgctcaacccatggccgacgtgtgcagcgaaggggcggccaggactcggccacgtcatcgaccagcttaaggcatcaagcaggtgggtaagctaattcagtgttatgtggcttgaggatcggccatctcgggccgccataatcgtgtggctgccgatcgacctcagagctggttccgattggctaacaggtggatagtgactccaggccggctgtcgccacctaagcatccccagggccggctccacttgagcatccctaggacggctgtcaccacctgagcatcccaggacggttgttgaccaacagactgtgctgggtgtctctagctgtgactcgacgccatgtgtcgctgnnnnnnnnnnnnnnnnnnnnnnnnnnnnnnnnnnnnnnnnnnnnnnnnnnnnnnnnnnnnnncctactaataccgttgacttcattaggaaacctccacccaaaactcgctctaagttagcacagctgaggatcgacaccattcggcccagcgaaatccatgacgctttcaaatttaaaaaagagaaaatttgccccagaagacttccctatttgcattattaatccatggacgttttatagggttttaggtt

SEQ ID NO: 1775 - DNA, 6682 bp, Arabidopsis thaliana landsberg
  unsure (1)..(6682): unsure at all n locations
ttttaggataagattgcggtttaagtttttatactcaatcatacacatgacatcaagtcatattcgactccaaaaaactaaccaagcttcttcttgcttcacaaagctttgatggtttagccacagtccatatgagtctttatctttgtatcttctattaaggaaacactacttaggcttttaggatatggttgcggtttaagttcatatactcaatcattcacatgacatcaagtcatattcgactccaaaacactaaccatccttcttcttgcttctcaaagctttcatggtgtagccaaagcccatatgaatctttggctttgtatcttctaacaaggaaacacaattcttacgcctttaagattcggttggtgtttaagttcttatactcaatcatacacatgacatcaagtcatattcgactccaaaacactaaccaaccttcttcttgcttctcaaagctttcatgttgtagccaaagtccatataagtctttggctttgtgtcttctaacaagcatgcaattcttacgcttttatgatctggttacggattaagttgttatactcagtgatatgataacactagattttaacctttttaagcccttgtttttcatgcatttagcttagtttcatgcctcttttcatgcattcttagtccattttccttccttttcacattttgcattgcattgcatagcatatttgcatttggagtgttttacaggtgaaacaggtgcttttggacctattttgggagtttttggaactaagaagttgagctcgtggtcaatactcgggatgtggtcgagtgatcaagccaaagagatgtcacgcaaagaaatgaagctatgctcgagatctaagcacgggataaggtcgagtggtgcatcagaagttttagcagtgcaacagtgacaacagaatgtgcagcaggagccatttttgaggatttgtgttgtacttgaactttatactcnacntgcatgtcgagtaantgaanaaaaanngaatcttgaaaattctcacctacttnaccaagctactcggactagagccgagtgatgtgaccaagggaagctgctcgacttttctactcggcctagacccgagtggtgctgcgctgactttcttattttgtcttctagcgaattagggcaacctagtatttgctataaatagaccccttccctttacctaatggagattcctcttttattccttttgttctagcctcttttgtgaaaaccctaaatatgttcctttaatttccttttgaatttttaagtttttgcaattattttcttctacagagttgtttgtcttgcttagatctacatcatactaagtttataatgatgtctgggttttgtcaattttctggattttgttctatgatgttcttcattgttcttgagtagtgttattcatagttcttaaggaacggttaggtttaggtggatttctctatttctttagctagctaagtgtttatatgcatgattcccttctggattaggtgttcttagtgctatttcctttctgatcgactcgagattgatctcagactttctctacccaaaaggtgtttgatgaaatgtctgaaccaactaattctagagatttatatattctaacccaagagattggatgtttagactgcttattgactttaatagattgtttcttaatgcctgttttgctatgtttcatcaatgagaatcgagattaggaagtggtcaagttatgaggatcattatcatgagagtggattgatctggttttgaatctattgtctagagataacttgattgagtttgttagttagctaaatagattgaggagtccactagaaccaattaccctattcttaagagctctgtttcgttttactgtgcaaaattggtgtttttagtattctactcgacctgtttagttcttgtgcaaaattggtgtttttattattctactcgacctgttttagtagtatgctcggccgaatacttcactttgtgcttggtttactttcttgttcttgcatttgatatttcctggtctttagtttcatttctgcttttatcacttgtgttctttacctcctgcttagtatagtgtcacttctgaatttgatttgcatgttaacctattgcttaggtttagtagaaacacaccaaacctattcacacttggcttaacttagtattctctgatcgcatcctgattgttagcaattccacccaattggattgacaccttaaatgctacaacgacataagatgcatttagggaattgacacaccgaaaacctttgtatcaaggtttgctcgtgggtccaacgtcgttttgtccattggttcccactccatcctctacactccatcctctacactccatcgaaccgttggacagggaggtagcatgcgcatcagttcggtctagttatactcgccgagccgcaccccctttccgaccaacaacttcgggatgtgttgggactcttttaagaatgttttgtggtgtctggatgatattgtgagatgccttgggcgtcctcccttatatagggggcgaatggatgcttctcaaagcatcacatctgttcctggcacccttccgaaaggtcacatccgttccttgcattctttcaaaaggtcacatccgttccttgtatcctttggtgatgcaaccgttcgttggtacccgctcgaccttacaccttttggccgagacacctcttcacccgtgagctaccaaagtcaaccaactcgagtgtcagctgactggaccgcccagctgggtcagttgactggaccacccagctgggtcagtacttgatcagctcaccgagctcagtcgagctgttggtcagctcacctagctgagttagctagtcttccagctggtttagctcacctagcttagctagctagttcatcctagtttgtccaactcacctagctggttcagcttgaactttctcgttcttccgactaagtattttagtccatttcttgaccatgatctagttttctcctaaaacaacctggcctcttttatgaacgcgggacgcggtcgttacaattcaggtctttcaatttcggagaaagagaagaactttgctttgagagagaagcgtaaaaaaataaaatgacagggaaagagtaaagtgaatttacctacacgcgaaccagtaatgatgacggaaccgccttgggagtcgtggaggaagtggaagagtttccccgctttaatagtaaataaacaatatactgtcataattgtgacaggtgtcacatcattaactatgggaaaattccgagatcaatgcaatcacgtaatttaggcgggaaatcacaagaatcatttggtgcaatctttgcccttatagcattaaagccttccgaactggagtagtactttgaaagacttgggggctaattgttggtgtcggatcccgcaccatgggctcggatccggcgaaagattgctacgggggtaaaagaagcccataagataaaaggcccacaagtttcctcgaaatgagagtgtggatgaggtgctgacctacgaagcgagggaagaatcgaagtcaacattactcggattgaagaggccgaatggcccagagtggattcaaatttaaacgttcaaataattaattcgaagactagaaacggatgcgtttaagatataatgattgcgattaaataagaattaaatgtgttctttggatatatattgtgagtcaaaggtcatgtaaagacacacgcatatttttggtgcaaattagctatacattttcttttacaatactcatagttttctctataatcatctacttactttatagtatatttgacctcaagaataatccttctcactaaacaaataaatacttgagtgtgaatccgacatccacactcacctccagcttgttcttaattgtttgcttgagggtaagcaaagactaagtttgggggagttgataagtgtgtattttgcatgttttgagcatccatttgtcatcactttagcaccatatcatcattgttttataccatttctcatcatttgtcatcactttgcatgtttaggatagttttgcatgcatgttgcatatttgtgttgatttcaggtgatggggagctattggtgagctaattggtgagctaattggaagaagcggacttgatcacttcaaaacactcgaccccctggtcgactagatggttccacgacaacaaaccacttgaccccctcgtcgagtagaagacttcaccacttcacgttaccactagaccacctggtcgagtaccaccatgagagtcactcgatcacatcactcgaccacatggtcgagtacctacatcaccttcactcgatcactctaccaagaggtcgagtatctccatcacaccactcgactgcatactcgatgacaagcttcagagcctttttcattccgcactcaaccagacactcgagcacaaggaagaaaagaagactccagctattcactcgacctccactcgaccacctgggtcgagtacagttcttaatccgttccaatacttcgttgttttgagtattagggtttcgggatatttggctataagtagcatgtacttctcattttcgaaaaaaaagaagtttttacctagttttatttctgcagaccttgtgttctagactttttgtaatccggatttctctttatctatttagtattcagctttggttcttgattttcgttttactgttgttcattctgttatcacactactgtcacactgttgttatcatgttttcaacctgttcaacgtttatgttctctacaatgatgtctgagtagtgaataggtttctgaggatgggttagagtagtgtagaattctcagtatgcttggtgattgaggatcaattgatagatcccctctggattagttgttcttaatgcctattgctttctgatcaactggaatttgagcccagacatttctgcgcccaaaaggtattcgttgaattgtctgaaccacttattccagagattcgtggccctgtaccaaggtattggttgcagggagcgtttgggctttaacttgttgattcgtaatgcatgttaggctagctctcgtcaatggtgcactacaagaaaacaggcaataaacgacttacggcgtggtcgcagattagtcgttaactctgaatctatgactaatccccgactaattacagtagtcgttgtaccatagtcgctaagtagagctggcgtcatttagtcgttgatttacgactaatttacgacaacataccatagtcgctaagtagagctggcgtcatttagtcgttgatttacgactaatttacgacaacataccatacaatagatattagtcgttgagtagtcgtacttatgtggcgactatttggcaacaatgtcacgattaataacactgtacagagcgtgtgaaacatattgtcgtccaatagtcgttaaattcttccgacaatgatacgactatgttacgattaaatttaatgaaccctaggtgtctttaaagtaatctcaaaatagtcgtaacattttttacgactacttgccgactattatacgagtaaatgtaagatactaatgatatgttatacttagtcatataatagtcgtataaatttatacgactaatagacgtctgtttgacgagtaggttatgactacttttgtttgtcgtaaaatagtcggtaatattggtgactattttacgactactttacgtttaattggcgacgcttttacgactatttggcgacttctggttttgtccgaataagaatttggtaatcaattgttgggtttcttgtttgttgtttagtgttattgtttgttgttgtttgttactcgaaatgctattaattatgaaaagataaatatacattgaaaattaagttcaaatacacatacaagagtatcttgttcttaaacaaactactttattcaaataaacataagttcaagtatagtgtttcgttcttaaatctatggagcagtaggtggagtatttgggagacgctcagtggatgtggaagagtgagtggccatgaagtccaagaattgtggatcggtttggcggagatacttctcgactaaggacaagtgttcgagcttgtccttttgctcagatgtgagtcgggctgactcagcttctcgggctgcaatctcagcatcccgcttctcattatacgcagcctgctcttcaattttctgttgagcttcttgcagccgttcttctaaatcttgaaaggatgctgagtctccggggagttggcggttggcactgcctagagtgtctttcagacatccaagtccataaggattgcctcttgcatccctatcagtgggctgcaagaaaaagagaggaagaaaattagtgactgaatttaaaacaatggacaagactctgaattagactacaacatcttacctcgagaaagatggctgtatactcatctattgtgagatccagaggtcgtgaagtgccatcagagacatcagaagctgaagcctccagtttaaacagcttatctctcacattctgctcataagttagagcaatcttctccgccttccgatcaacataagtgccatccgacttagtgtgtgtttggatgaacacctcacat

SEQ ID NO: 1776 - DNA, 973 bp, Arabidopsis thaliana landsberg
tctctgtctttgtagtcaatacaaggccgcctgttactgttgcaaccaacatgggtgtagccaactttcttagggtaagggagagtaaccctcagctcaatttattgctatcgcttgaagctcgaccttacttggttgatggtgtaattgtggatttgttggcggtttgtggtaaggagaagagccaagaggatgagatgcttcagtgagagggtggacaatcttctaagtgtatcacatatattcaatctgcagggtccaatggtgctgaatgttccacgaggaacaacattctccaatcagctgcgtcacttttaaatgggagcaactctgttgtaaggacatatactttggagtatgaaactggctctgatgttcacaactcaggtataatagaggttggttggccaacggttgtagaagagtgtgaagttaaagatgacactgactgtatagtactagagatgaatgagaacgttagtgaacagtttctgggaaccaatgttagtggtataataaatcttgctaatgcagccacaccataattgtcacactatgatgagatttcaaatgcagatgaggaagatgagcctttatctgaggatatgaggatgctaatagaggtagaagaattggagagagtggaactagcaaagcagaagatcaacgggaagcgtaaactatttgacagtggtgatgaggctgacaatacttcttacactaatgggtttagtgaatctactccagatgatgatgatgatgatgattgggagtatgagggttggagccacctgatggcgaagatattctacttgggagtagccatccttcttctatagctcaaccacaagaggctgaaattggtagaccctttactgcaaaagaagacatcaacaaatcctgttccaattactatagagatcatgtacgaacacagatgtggaggttacacaactgaagacaatgaagtctt

SEQ ID NO: 1777 - DNA, 1522 bp, Arabidopsis thaliana landsberg
attagatattgaatttttctgaacaaggcaaagaacatgtggtttttaatttgtgggttttgtcaacttatcttatcaactccttcatatctcctctttttttctctatgttgttggtagtaaaaagtccttataaacttattaagctttgaacgcgtgattgtaagctattaacagattcgggcaagcctctccggattttgctatgaaccttaaggacaaagttacgtttggacggcaggagagtgaagaagacaccattgcgagcatgtgaaaatgtaaaaaaataaaaatagagaagctaaagtaagaaggtgaaaggtttcacaagaagaagtatttaagtggagtcacgtgacttctatttctcttcaattgttgctgagtcaattatacgtaatacgtggcatgaatcttaccgtatactacaacgaccaaattttcaatgagagacgcaagctcaaatgtccgaaactatacacttcacttcttattcactaatttgacctaatcttatcctcaaaaatgacagcctcctcgaaaatgacatcctccactacgttgctgtcgttgttcatgaaagaagatgaagagggaagaaacaagaaaacgacaacctccactacgttggagtcgttgctgatgaaagagcgaagaaactgggtggatcttccgccggagctgacgacttcgatcctgctgcgtcttagcctgactgatatactggacaacgctcagaaggtgtgtaaagagtggcgacgcatttgtaaagacccttcgatgtggcggaaaatcaacacgcgagactgcctcatgtacaactttgatttcgtgagcatgtgccgtcacattgttgatctcagccagggtggcttgctagagatcaacgttgatgaacacttcttgagcgattctctcctcagctacattaccgataggttctctctctcccttcgcaagcacgctagcaacctttgaacggtttttcatggaaatctccaaatgctatttagagaattatgtggcttttatttgatttcactgtctgtgaattagacacaaatggtcctagtacatatattttgacagaaaagaaatctctaaaatgtgtttgttcatttttctcctgaggattagctagggcaaaaatttgataacttataatcgttgatttcgtttggtttattatgtgttaattaaactcagtttatcatgtttttttccttttaccggatctggcggtctgctatgaatggactttggatattcatttactacgtttaatttgggttagatataaacagatatatatgaaggataattttcatgcttttatagtgcttttagatagtaggtggtctagattttcatgccttaatagagttttagatatgaggctaatttctatgctatgacgctgctatatataaatgtataatagatctgttgccatacactattctagacttgttttgtttcacaccgtcattactctatcatcatcatcatatatatattttac

SEQ ID NO: 1778 - DNA, 1004 bp, Arabidopsis thaliana landsberg
agagcactaagtctgttatttttttcacaacaaatgtttacagatgctgcaacggtgctaagaagtgtactaaaatcttatttattggtcatgcaggtgaaccaattgcttcaggttgcacaaaaatgccagagcacgatctcagagagtgggtcagagggggtttctcagcaggatttacagtcaaatagtaacatgtaagttaatgcacattattcttttattgtcgatactctggcatttgtttctagtgctttttatcattgctgggtgccaatttgtgtatcagggtcttgggagcaggacggcaactggcaaagttcatggaactacagtcgctgaatgatcttggctatccaaaaagatatatcaggactctgcaggtattcctttgctcctttccttactgttactgttgtatatgaagtcgtaagaagtcctaatattgaggcatgcgagtgacagatatctgaagttgtcaagagcatgaaggatctgatgaatttcactggcgagcaaaaaatcggtcctattggtaagtatacaatttccatccacaatattcttcttgaatgagatccaaaaccaggtttcccctctggtggaccttttacttgaaatatgtactggtcgttgtaactctcctggtgaaaatgttctgactgaatctgaatgttatgatacctgcttatgtcatttatgtagaggggttgaaacggcttttggaacagacggtgacagtgaagctacagaaacagaaaatgcaagagatggagcagtttgggaataatggagctataaatgggccagttcaagctcaaatggtgttaacttcaggaacgatgaatggctcaacgggcaataacaccaataatcaccatcaaattgttggtcgtggagctatgagtgggccagctgaaggtcaaatggtgatatcttcaggaacggtgagcggcgcaactgccacaacaactccaatataccatcaaattgttgtcgggagc

SEQ ID NO: 1779 - DNA, 12177 bp, Arabidopsis thaliana landsberg
  unsure (1)..(12177): unsure at all n locations
aacatagataaaatcagtgaaaatagagatatatcaacttctccagacttagcttttgcttgccctcgagcaaaacataaaagctgaactcgtggaagaggttttaaaaccaaaggaactcccaacattctctaggctattgccatgatcatccaaactaagtccatatgcctagcaagtctaatcaaatcctaaccaacatgtacttctctgcaagcttacacaacattctagattccatacctaagttccacaactatacccactaggctttatttttttttgatttattttacccgtttaaacgacattgtccccagtagcattcaaatccgagaaagcgggtaaaataaatcaaaagaaaaaaaaaaaaaaaaaaatcaaaccagtgggttgcctcccactaagcgcttgttttgagtcaatagcttgacttggcggagttcaagatgtgggtggaatggtggaggattgctgctgcctcctcgccttccaaggcggtgtgtaaacggatctggttggggcagctgcaggtgtctatcgacacttaggggtgtgtcgattgacgctcttctcgtcacctgcaagaacaacaagagaaacaagctttcgaggaactctaggcttgttatcttctgaagaagtcttcgaataatctaaagaattaatcaaaggtaaagcaggagaatcgagagaagagaacttatcacaaagatcttcaagtggtgtgggctgaagagaatgtgcagaatcatctgtgaaacccgagggtgttgatcgacaggggtaggggtgtcgatcgatactgttgctctgcaactctcatttgtgagctgagcgaatgggagcgttgtgtgtggttatgtggtgggattttcagcagtctgaggaggtgtgtctgtgctggaagcaatgcaactgataggcttagtaagctatgaaccatccatgccaaactccatctccaaatcacaaaccttgagagagattttccctctcttcacatcaaacctagcaccagctctagctaggaacgctctaccaaggataagagggtccttgggttccttctcataatccaagaccacaaaatcagaagggataacagagttaccaaccttaacatgaacatcttcaaggattccttcagggattcgcttggaacgatccgcgaagagaagagtgatgcgagtaggcctgtagtgagtcattcctagtctctcagcaacagacttaggcatgagatagatgcttgatcccagatcacacaaagagcggctgaacctgcttgtggagatagagtaattaagaacaaagctacctggatctggaagctcctcagtggtttgaccaggattaatggtgcggatgtactcaactatgtctactctctgtgctttctccttcttggccttaggcagcatgattgcactgatgtctctgggaatcagcttagcttcatctgagctaattccattgtcaacaagtcgcttgacatacctgttgagtgagacagaagatgtctcagaagcatccttaggaagagtatggaggatcttctccattacggctgtgcacttggcagcatgaagctcctgcttagaacgacgcctcctcggataaggcacatgaggagtgtagacagactcgggctgcataggtatttgcacctcacagggtgctgtccggatccagtgtcgatcgacactagaggggtatcgatcgacaccgtcgtattgggtcgtctttgagaagagcgtcccgtatggtatcgatcgacagaggagggtgtcggtcgacaccatctctgcaactgcgagctccaactcgtcttcagtgtccaattcctcccacatatcatctccttctctgatcaagatggcattgcagctcttccttgggttagcatcaggattacgaagaagaaaactgttggagctggattcccctccaggaatccacctgcgaaaataccaagttagcccactaagccaccaagccccccaagtagaggaccgacgcaactgatgagaccacatacgcgaatgggtatttgggcctgataataccggtcacctgatgaaggaagataagcgaataacaacctaagaactaactgggaggaattcgcaaagcggacctgatatcccgaaactgacctgccgaatatccagaggaatctctgtagatcccggacggagctacgacgtgcgtagacctatataagggagcaaggacgactttgaagggacaattcaatacatctttacatttacacttatacttttacacttgtaatctcctttcacattgtaaaagctctgtcataatcaatacaaaagtccaatcgttcttagcaatataactctcaaagttcctgtgaagatctagccctcctttctcataatctcaattacaaatctctagtgtagatttcagaacctacatttggcgtcgtctatggggacggaaatagatcattccaacaccgaaactaacacatcaattgtgaccaacgatcatggatcccaattcatccaacacatcgagatctggcttaccagttcagatcccaaacgatgacgttacggacgggcacctcccaatggatctccctcccggagcccaggttgatgctatccataacactgacacggagaacatctcccaaaaatcgaattcttctggatctgaccaaatcactccccctccgcaaacaaggggcagagaacgaaacgtcacgatacaacgtccaaacggagataactcggccaacctatctaatcaggtccccccgcgacctgccagcgaattggccgagctccgcgcaatgatcatgaacttgatcaacttaaccaaaaactaagaaattgcgcatcgcgggtaaggagattccccccccccccctgcgaaactgggattcctgcctaggtccccatagatttgacaggtaccgtctcctcggctaatcctactttgagaactcgtctggatttcgcctcgatagacgtctcacatcctatcaaccggcaggtcgcctttttacaggcacctacgaagctctcgtcgaaaacctggcaacagtaaacaaaacaagcacaacgcctgccttcccaaggctaccggccccacctctattaccgatgggctgttcaccccctaggtacacgtggagagaaaccaaacaaccgcatccagttcccgcattctcggaaactcaacgcaacaacggacctctatcgctaatccgccatccgttccccggataccaggaagcgacctccttaatagtccccaagcaccggtcgatccgcgtaacgtcgtggatatggaaacattccgcaattacgcagcttaaacaaacgtgaacatggctcaaatgcattctcgaatgcacttagcagtgagcgatgccgttcacggataggatcgctcgctttcgcctccgagacgtcgggagactntgtttcncggagtgcgacggaacgagcgacccaaaggctcatctgagatccttctgtttcgctataacacgaccgtacctgacagatgaagaaaacaaagcaggtcattgccgtttcttcgcagaaaacctcgtaggtcacgccctcgaatggtttactagcctcgaagggaactccattgataccttcgaccagctcgccgccgatttcttaaaacaatattcgatgcttatcaaacataggacgtccgaagccgacctctggaatctcactcaacttcaaaacgaatccctgcgatctaacgcgcaaaacttcaaagcaattaaatcgaagattgcaaacctaaacgaggaggtagccatagcagcccttcgtaacggtccgtggttttcctctagattccgtgaggaactcactgttaggcaaacagtctctttagacgatgcccttcacaaagctctccacttcgccaaagctgaagaggagctcgctgtgctggccttacgattcaaagaatctataaccaaaacgctccccttgcaattaagaaacccttcaagaaggaaaacaaacgcaggggcagcataccttattcgcaatagacgaggcagctgaggaggagagtccagaacttgatctcggaacatattgcaagtatcacaagaaaagaggacattccaccgaggagtgtcccgccgttaaaaagttaatcgcagctggggtaaagactaaaaaaggttcaaacccctaagctgaaacccctcctcccgacgaacaggaggaggagcaaactcccaagcaaaagaaacgggaacgaacactggagggaagtgactctcccccacctgttaggagagaacgcatagacctagtctttgcagaactcgatctaggtggcgggacacgaaggccagtcaccacacctccccccgccccgcataagaaaaacatgagggttccattacgcctctccccgaaacacatcgatttcattatgggaggatctcaactctgcaacaattcgatcaactcaatcaaaactcatcaaaggaaagcagattccaacacaaaaggaaaaagcccgatgatgggacctgatcaacagatcacgttatgggaaagcgaaaccactaacctcgataaacctcatgatgacgctctcgtcatccggattaacgtaggcaattacgaactctcccgtataatggtctaagggaagctcggtcgacgtcttattcaaaagaacgggtcacctcgactccgagctgcaaggcaggaaaacaccagttactgggtttgccagagatacgaccttttctctaggaaccatccaactccccaccatcgcgtgaggagtgagacaactcaagaacttcttagtagtcaataagaaagctcctttcaacgcgatactgggaaggccatggctacaacaatatggaaggatctcgtaacatttctcaaggaaaacaagaacagtttcacaggtcaagagggaacctccaaggaataaacataaagtcccccctcacacgaactcaacgtcgatccgacctaccggcctataaaacataaacgtcgcaagctaggtcccgaaagggctaaagctgtgaacaaagaggtcgaccgattgctcaaaatcggatcaataagggaagtaaaataccctaactggctcgccaacccagtcgtcgttaaatagaaaaatggaaagtggagagtatgcatcgactttagggacctgaataaagcatgtcctaaagatagtttcccacttccgcatatcgaccggctggtcgaacccactgtatgacacgaaaaattgtccttcatggacgcattctccgggtacaaccaaatacttatgcgtcgagacggctaagaaaaaacagcttttattactgaccgaggcacctactgctataaagagaagcaaattggtttgaaaaatgccggaactacctaccaacgattggtgaacagaatgttcgtcgaccagctcggtaaaacaatggaagtctacattgacgacatgctggtcaaatcagctcacgaaaaggaccacgtcccacaattaagagaatgcttcaaaattctaatcaaattcgaaatgaagctaaatcccgagaaatgttctttcgaagtccaatcaagagaattcctcggatacctggtaaccgaaaggggcatcgaggctaatcctaagcagattgcagccttcatcgaaatgccgtcaccaaaaatggcacgagtggtccaacggctaaccggccgtatccccgcccttaacgggttcatatccaggtccgccaacaaatgcgtccctttctatcagcccctccgaaagggtaaggagtttgactggaataaggattgcgaacaagccttcaagcaattgaaagcatacctgaccgaaccgcctatactcgcaaaactcgagaaaggagaaccgttatacctctacacggtaatctccagaaccgcgataagcgatgtcctggtaagagaagatcacgaaggataaaaaccgatctattacgtgagtaaaacgttgatagacgctgaaacctgttatccaacaatggaaaaactggcactggccgtagtcatgtcagttcgaaaactgagactatatttccaatcacaccccatagtggtcatgacgtcccaaccaatccgaaccattctgcatagtccgacccaatcaggacgacttgcgaaatgggccattgaactaagagagtacgatatagagtatcgcaccagaaccagcttgaaagcacaggtcctagccgactttgtaatcgagctcccgttagccgacctggatggaaccaactctaataagaaatggctcctccacgtcgatggctcatccaaccgacaaggatctagagtaggaatacaactcacctcccccaccggggaagtcatcgaacaatcgttccgacttggattcaacgcatcaaacaacgagtctgagtacgaagccctcattggtggcattaagctagctcaagaaatagggatccgcaaaatacacgcccacaacgactcccaactcgtcaccagccagttccacggggaatacaaagctaaagacgagcgcatagaagcgtacctcgaactggtcaaaaccttgacccaacagttcgaatcgtttgaattaacctggaactggctggtgacgagttgggagacgccttggcagctctcacttctacctcagatcctttcgtcaaaagaattatccaggtcgaaggaatagaacacccgagcatcgacctaacggtcaaacatgctgggatggaaaccttcgacaacttgcaacttcacgcgagtaacccgaagcaccaccaccacagctagagctctcgtagcagccgtggaggcaaatgcaacggaggaggagccagagctagaaaacccccgaacaaccgtacaacgaccggagaattccaatcattgattacatcgaacaagggatcacacctcccgacaagtgggagaccagaaaactcaaagcctagagcgcaaggtactgcatcatggaagggagacttatgaaacgcagcgtcgcaggtccctatatggtgtgtacctacgggcaacaaacaaaagacctcatgaaaagcatgcacgaggggcaatgtggtagccactgtagtggacgtaccctcgccctcataatcaaaaagcaaggctacttctagccaacaatgatagccgattgcatagctcattcactcaggtgcgataaatgccaacgacatgcacctactcttcatcaacctcccgaggaaatgtcctcgatatcttctccttacccatttatgaagtggtccatggatgtcgtaggtcccatggaagcctccgagggaagaagagactaaaaaacctgttggtcctccccgactactctaccaactcgatcgcggctaaagccttccaacaggtaaccgagaaacaagtcgaggacttcctatgggaaaatatcgtatgccgacatggcataccttatgagatcgtcaccgataacgagactaacctcacctcgggaaaaatcaaagcattttgcgacaagtggaagatccgtcttaccacatccaccaccaccaccaccaccaccccgttacccacaaggtaacggacaagcagaagcccccaacaaaactatacttagcaacatcaagaaaagacttgattccaaataatcaatgtggtccgacgtgcttcacggagttctctgggcctaccgaactatacctcgcaaatcaacgcaagaaacactgttctctctcgcctatggtttagaagcagtaatccctgtcgaaaaaatagtaccaagcgtgagaaggaccgccagtcctgctaactcggacctgaacacgcaaatgttacaggacaacatggacttcatcgatgaacgcagagatcaggcaatgatccgagttcaaaactatcaacaagctgccgcccgctactataactccaatatcaaaattcgggattcgaagtgggaaagctcgttttacgaaaagtgttcagcaacacgagagagctaaacgctggaaaactgggaactaacaaggaaggtccctatcgaatcagcgaggtggtacgtgacggcgtctataagctcgtaaaagttatcaacggagtacttgagttacggccttggaatgccatgcatctcatgaaataccacgaataggtactcaaaaacaatcgaactacgataagacttgatcccttggcagggtacgtaggcagctccccccaagagcgcaaccaccacttcaatcgaattaccaaggggcttaatcccctaaccaggtatgcaggcagttccctccgcaaacgcaattaccatctcaacccttccatttgaaagacgaaacttcaacaaaggaaacagacatcacatcttccatcaacgaagatttgctgctcacctgacagttcaatcacaccagatcgtcgcttgctttacctctttttgtacttaacaaatttcgagataagaataaaagaaaattttgatatttattatcatgtttcgcaaaaactcattcgtaatcttccgatacccaaagcccaacacccgaatgttggcggatccattttgtgatcttgcttccaaaaagtcgatagtgaactagacttataagaacacatcacttcggcttcatcggagctcacctactacaaccatatctaactccatctccatgagcccgatcttcgcagcataacctttctcgaggtcttttgaagtggacagctctattttcaacctctcgatctccgcctgaaatcacagtcagttcagaactgtcgtattatcaatagattatatacagacaagacaaaaacggggtatacctggaacgaaacttcgcgttcctgaccagccttcacactcgacgtcagctcccggatgagggtctttccttcttcaagctcgctcgccgaggggacttgactcaaacgctgctcatagagagcaaccagcttattcggggcagctatcgcctaccaaaggcaaaacagaaagttataactagcataagaatggaatcacgaggaggcagttatcggttatacctggccctccttcgccatcatgtcagcataagatgccgccttggccatgttcttcactccgggaatctggctgttcttccctttgatgtggcgtagcaggttcgccaacccagcctcgttctcaacgataggatgatcacagtcgtgagtgtaagaccagtggaaaggcctacttcccgcagaccccccaccagaattggacgactgtctcacttcctgatacctgttcagaccttggaaggaggacctgaccccacctcttgatcctcggcctccgccttgggacctacccgaggaccgcctctcggctgacatagctgcctccgggttagcagccgcaggttccgccctctcctctctaggagaagcgacctcctgatcgatcacgatcagctcagccgccgggcgcacctccggctgggtccgagctctcttcggagaagacggtgcaccatcagaatgaacagccgcagatggctcagaaacctgagcgacctgattgttatccgcttgacctccggtaacagaggtcccggtattgaactcaggaagcgacggatgagaagctgaagcagatgtgctggagatagctagactgttccgagccgcagtcaccggggccaacagatcaccagcacgagcaggagccccggtgtgtgctcgttgaacgcaaagacttggtcgcctcattgttcttcttgaaatgagctgctggaagaacgacaattggacctcgtggatctgttaacagagaagctttgatgtgatccctggtaaaggtcgaccaatcagtttggccacatcaaaacatggttagcagttcgagtactgattccgagagagtgacttctttggtttttgttgcaattgacaaaaaataataacgttattaaacaatgcaatcatcaccaaaaagaagcaatttacgtctactagactggaaataagggcattggatctccatctgaatcaagttgtgggacaaggtccttatcatcttcgtctgaccgaagtcgccaatagagtgacgatccacccaaaaaaataagtatttggctcgtcattttgagtcccggcatgactccagaccacctaagacaagagatccggggggagcgctgatgtagtaggtcccgaggtcgcttcgagcgttggttttgacctgacaatactacagcaagtcgcgacagctgaaccttctgttcaattcccaggctcgggtgaacaacgccaatacatggcgaacaaaattcggggacatctgaggaaaagcgagaccaaggcaatagagcatctcgaggatacatgtcggaattgggaaaaatagctcgcacttctcgaagaagttagcataggcgcaacaccagtcctccagaacgttctcgagcgagagcagtgacctcgagagaatcatatttacttccagcgagacttgacatctcctccagaggtcgactaggtcgttgggcatcatcggcaaatctcccttcttctttttgggagcatccttcttcttgttaggttggtttgccttcgacgatgcttttcgggctcggctaggcccgcctagggttccggcgtcgtctggctcttaccgcgacgatgctgctgacttcaaatctgacaaactctcgttgtagtcgtaactgtgattactctggttctgggagacttcgagttcgctcatctttggatttcagagaagacaaaagaaggagatgaaggaaaaaggagataaagcagatcagagaaaaaaggcagaagagaaagcacgatggagatagcagaagaaagattaaaaaatttctatctctacaaacaaaaattaaacgagtggagatgtgggaagttatttaaagaagccatgatcacgacaattttcgagattgcagagatctcttcatcgcgcctgatctgagctgttagatgcggtgcgctgaagaaacgcttcatcttgatcgtccacgtcaacgacgatttacctcgcgtatctactcaatatctttcggttcgggaatctaaaattaaatcatttttattgaggttatcctcgaaaccaattgatcttatcgtatctaccacctcatcaacaatatttttgcaatcttacctgacttagatgtccgctcatcgacttcacctgggggcaaatgttggagctggattcccctccaggaatccacctgcaaaaataccaagccagcccacaaagcccaccaagcccaccaagtagaggacctacgcaactgatgagcccacaaacgtgaatgggtacttgggccagataagcccagtcacctgatgaagggaaacaagcaaataacaacctaggaacggatgaggagatattcgcggagcggacctgttatctcggaacgtacctgccgaatatccaggaggatctccgcaaatcccgaacggagctaccacgtgcgtagacctatataacaaaacaaggacgacttggaagacacattcaattcagcttacattcaaacacatacttttacacttgtaatctcctttcacattgtaaaagctttgtcataatcaatacaaaaagtccattcgttcttagcaatataactctcaaggtttcagtgaagttctagccctcctttctcataatctcaattacaaatctctagtctggacttcagaacccacatttggcgccgtctgtggggacggaaatagatcattccaacaccgaagctaacacatcaattgtgaccaacgatcatggattccaattcatccaattcaactggatctggcttaccagttcagatcccaaacgacgacgttacggacgggcgccttccaatggatctccctcccggaaccaaggttgatgctgtccataacgctgatgcggagaacatctcccaaaactcgaattcttctggatctgaccaaatcattcctactccgcaaacaaggggcggagaacaaaacgtcacgatacagcctccaaacagagataacccggccaacccgtttaatcaagaccctccgcgatctgtcagcaattggccgagctccgcgtaatgatcatgaacttgatcaacataagcaaaaacacaagaaattgcgcatcggaacc

SEQ ID NO: 1780 - DNA, 15230 bp, Arabidopsis thaliana landsberg
  unsure (1)..(15230): unsure at all n locations
acccattttggggcggttaaaaaatacttattcaactgtttatcctttttcggggcggtttaaatttcatttctgggttctacgttttccaaagtctttcttgcttcattcgaaactcataaaaggaaaactgtcatattttttgtttttcctttttgaaatttcccatttcttggaaaaggaaaacgggaacttccaattggcaattaagtaaattcttggtttcccaattttgggaaatttaagtttttcatcttttcttgtgaaggaaaaagcgagaatttccggatcacttttaagcaaattccaaattccatttccgtgttcagccctataagtacttctttaggcatcaccaattttctcattggcctttcttcttctttagttgcaagatggagagtgttggatcctccttccttgttagcaaaaatgttccaaccttttccaatgctgaagcgatagaacgagggatgccgttcttcaataacattcgtgttccatggacccttctgttccaggcgaggtcagaggcaagacgtgaagcggaagggttcctgtcgtgtgttgaatcgaggcacaaggagtaccgcgagattgtgagctactatgatgaacgcaagtccgacatcgtccataaaatggccatgttggagtcgcacccacgccattggatcaaaaataattttcagtggttggctcccatgccggatgtcctattgtcatactgcaatgattgtgcccaagatgccgttgtcgcctcgaaggagaagaatcccacaattattgctgatggagacttcattcccagaccgcttcctttgttctatcttggatcggctgcttccgacgccgagaccaccgtgtgtcagaacttcattaaccaggtgagaacttcgcaagtttaattattttgcgtgcgatcttcgagatcggcttttgatgacttgttaaagatcttaaagcaaactccgtattgagaatgcaaactttaattttattaagtattatagttgcatccttgagaatgactgcctacgtacccggtgaagggatcaagccattcattgttcgtattacataaatgagattggaagggcgatctgcatatatatctatatatataaatatatattttttttttgttctaaatctagttgtagtacctcttaaagtggactgcgttccatggattttctacttcttccagcttcatggtcatcagcagatagactcccaggtgaagtatgataagtgtgtattttcaatgttttgagcatccatttgtcatcactttagcatcatatcatcactgttttataccatttctgatcatttgacatcactttgcatgtttaggatagttttgcatgcatgttgcatatttgtgttgttttcaggtgattcggagctggtgacgagctaattggaagaagcggacctgatcatgtcaaaccactcgacccctaggtcgagtagacgctttaggacctcaacagaccactcgacccccttgtcgagtaggggatttaacaatttcacctcatccacttgaccatcactcgatcacgccactgtacctggaagtcgagtatcaccatcaccaccactcgactacatactcgatggcgagcttcatagtcttctccattctgcactcaaccagacattcgagcacaaggaagaaaagatgactccagcttatcactcgacctctcactcgaccacctgggtcaagtacagttcttaatccgtcccaatactacgtcattttgagtattagggtttcagattattttactataagtagcatgtactttacattttcgagaacaagtttttatcaaggttttatttcgcaaacactgtgttctagaccttttgtaatccggatttctctttatctattcagtattcagtatttgttcttgattttcgtttactgttgttcatcctgttatcatcttgctattacactgttgtcatcatgttttcattctgttcaacgtttatgttctctacaatgatgtctaagtagtgaataagtttctgaggatgggttagagtattgtagaattctcagtatgctaggtggttcagtttgattgatagatcccttctggattaattgttcttaatgcctattgctttctgatcaactggaatttgagcccagacatttctgcgcccaaaaggtgttcgatgaattgtctgaaccactaattccagagattcgtgaccctgtaccaaggtattggttgtagtgagcgttttggctttaacttgttgattcgtaatgcctgttaggttagctctcgtcaatggtgattgagtctgggactaggttaacttgagggtctctgttgcggtggtacttagatttggttaatgaacttgttgtgtagggttaatttattaagcatgtcaatcacctgtaaactaaggaatcgaaactactcaattaccccatcctcgggaattctttatctcattgaactctttgtttactctattattgtttactgcatcttgttatctgtcgcttagtttctacagttctttcttgttactcgacctcatactcgaccacccagttgtctggcaacagactgtgcagtcgagtatctgtgttatactttctgtctgttactcgacctgtcactcgacctcacccagtgctctgcaaagacctgtgttggtcgagtgttttacagtttctctttgatttctgttttctccatgttcacttaggactgctagaacaaaccaaaacctgttattgcttggcttgacttagtgacttctgatcacatcttgattgttaacatcacacccatttggattgacaaccttcagtactacaacgacatgatagtgctttaggtttaattgacttaaaaacatattatcaatttggcgccgttggcaattgggtgtttttttgttacatttgagatttcagaattgcttagatcaagttctttttcaattttcaatctggttgctaactgtgtgtttttcttgttgtcttcttgatccaggtacaccgctgctatattcaaactcgatcaacaggcaaccagaacctccttttcagcgataacatcgaccgcctagttcgtgaactcagagaaaggagaaacacagtcaaccttatacctcagcaaccactcgaaatggctgacgaacaaaatcaacagaatggccctgcaaacattggtgatggagatgcaccacaggaccaccgtcagaggaaaggaattgtacctcctgctatccagaacaacaatttcgagattaagagtggtctcatcttgatgatttaggggaataaatttcatggtctgccaatggaggatccactcaaccacttggatgaatttgataggctctgcaacctaacaaaaatcaatggtgttagtgaagacggattcaagctccgtttctttccattctccttgggcgacaaagcacacatctgggaaaagaatctgccgcatgactcaatcaccacctgggatgattgcaaaaaagcctttctagcaaaggttttctccaacgccagaactgcaagactcagaaatgagatctctggtttttcacaaaagactggtgaaagcttatgtgaagcatgggagcgtttcaaaggttacattaaccaatgccctcatcatgacttcaagaaagcctctctgctcagcactctatacaaaggtgttctaccacggataagaatgcttctggataccgccatcaatggaaatttccagaataaagatgttgaagaatgctgactcggaccataacagctgactcggatggcaaacacaagaaggagattaaagcgctgaatgacaagctggacaagattcttcttagccagcagaagcatgtgcacttccttgttgatgacgaggagtatcaagtccaagatggggaggggaaccagttagaagaagttagatacatcaacaatcaaggtggctacaaagggtacaacaacttcaagactaacaacccaaacctctcctatcgcagcaccaatgttactaatccacaggatcaagtgtatcctccacatcaacaacaaggtcagaataaactttttgttccctacaaccaaggttttgatccaatgtagcaatttcgggggaactaccagcagcaaccaccaccttggtttgcacctcagcaacaccaaggtcctgctcctcccgacgctgatatgaaacaaatgctacaacagctgctccaaggacaaacatctggctccatggaaggtggactgtagctacaatgatctaaatgtccaggtggagacactgaattccgaagtcagatacctggaggaaaattctgcatctacttccgctctgaaacagtcaagccaacttccaagaaaatcaattcagaatccaaaagaatttgcacatgctcatgctatcaccctgcgcaatagaaaagcacttccaaccaaaaaggaacctaagacagtcactgaggatagtgtatatcaagatggggaggaattcagtctcagtaaagatcaagctgacaaacaacttgagcagccactcgaccatgttactcgaccaccattcctagtaacatcaccaactgcttcgaaaccagttgatgtcaggaataaagaaaagttctttgttcctcctccttacaaaccccatcttccatttccttgccttcacaagaaagcattggtaaataagtatagagttatgtttgccaagaacatcaaggaggttgatcgtggagagaattcaagaagtgcaaggaatagtagtattgagtcacaaatgcagtgctattatacagaagaagataattccaaagaagcttagtgatcctggttcattcactctaccatgctctttaggtccattggctttcaacaggcctatgtgatttaggagcatcagtcagtcgcatgccactctcccttgccaaaagattggggttcactcaatacaaatcttacaacatattccttatcatagctgacagatcagtaaggatctctcacggtttacttgaaaacctaccaatcaggattggagttgtagagataccaactgactttgtagtcctggagatggatgaagagcccaaggaccctttgattctagggagacctttcttagcaactgcaggagatatgattgatgtcaagaaagggaagattgatctaaaccttggcaaagaccttaggatggcctttgatgtcaaagacgcgatgaagaagcctaccatagaagggcaactcttttggatcgaagaaatggatcatttagccgatgaattactggaagagctggcagaagaagatcatcttaacagtgctttaaccaaaagtggtgaagatgggtttctgcatttggaaacattgggataccagaagctgttagactcccataaagcgatggaagaatcagaaccctttgagaaattgaatggaccagcaacggaggtaatggtaatgagcgaagaagggtcaactcgagttcaacatgcactctcgaggacgtactcgaccagccactcgaccttgtctgccaaagaatctggggagccgatcattccaacttcagatgactggtctgaacttaaggcaccgaaggttgatctcaaaccacttcctaaagatctaaggtacgcattccttggtccaaactctatttaccttgtgatcattaatgctgagttaaatagtgatgaagtgaacttgctattatctgagcttagaaagtataggagagcgattggttattcattatccgacattaagggaatttcacctactttatgcaaccataggatccatcttgaaaacgaatcctattctagcattcaaccacagaggaggttaaatcccaatttgaaagaagtagtgaaaaaagaaatttcgaaactgcttgatgctggtgtcatctaccctatctctgattgtacttgggtttctctagtgcattgcgtccctaaaaagggtggaatgactgttgtcaaaaataaaaaggatgaactgatccctactagaactataactggtcatagaatgtgcattgattatagaaagttgaatgctgcatctaggaaagatcattttcctttaccattcattgaccaaatgcttgaacgtttagctagtcatccatattattgcattcttgatggatacagtggtttctttcaaataccagttcaccctaatgatcaagagaaaaccactttcacatgtccttatggaacttttgcctataagagaatgccattttgtttatgctatgctcctgcaacgtttcagaggtgtatgacctctatattttcggatttaatctaggagatggtggaggtcttccatggacgattgtatggtctatggcccctccttctcctcacgtttgttgaatcttggcagggtattgaccaggtgcgaagagactaatcgtgttctcaattgggaaaaatgtcatttcatgatgaaagaaggcataacgttgggtcacaagatatcagagtagggaatagaggttgacaagggaaatatcgaagtgatgatgcagttgcagccgccaaaaactatcaaagacatcagaagtttcgttggccatgctgggttctacaagaggtttattaaggatttctccaagatagccaggccgttaaccaggctattgtgcaaagagaccgagttcgaattcaatgaggactgcctcaaatcctttcacaccatcaaggaagctttggtatcttctcctgttgttcgagctcctaattgggactacccattcgggattatgtgtgatgcatcagattacgccgtaggagctgttctaggccagaaaatagacaagaagcctcacgtcatatattacgccagccggacgttggatgaagctcaaggaagatatgcaacaagtgagaaggagcttctagttgttgtattcgcatttgagaagttcagaagctatttggttggatcaaaggtcactgtctatacagaccatgcagttttgaggcatctgtatgccaagaaggatactaaaccaagactgttgagatggatacttctattgcaagagtctcacatggagatagtagacaagaaaggcattgaaaatgatgcagctgaccatctgtcaagaatgagaattgaagaacccattccgatagacgattcgatgccagaagaggagctcatggttgtagaattctttggaaggagctacagtgggaaaaagttccaccaactgaatgctgttgaaggaggatctccatggtatgttgatcacgtcaattacttggcatgcggagtagaacctcccaacctgaccagttatgaaaggaagaagtttttctgagacatacaccattactactgggatgagccttatctttacactctctgtaaagataagatctttaggatatgtgtctcacaagataaagtggaaggtagcctgctgcattgccatggctcagcatatggtggtcatttcgcgacgttcaagacagtgtccaagattcttcaagcaggcttttggtggccaacaatgtttaagggcgctcaggagtttgtttcaaagtgtgattcatgccagagaaaaggcaacatcagaagaagaaatgagatgcctcagaatccaatcttggaagttgagatctttgatgtatgggggattgatttcatgggtccattcccatcttcatacggtagcaagtatatactggttgccgtagactacatatcaaagtgggtcgaagctattgctagtcctaccaacgatgcaaaagttgtgctgaagctgttcaagaccataatcttccagagatttggagtacccaaggtagtaatcagtgatggaaagaagcatttcatcaacaaagtttttgagaacctcctgtggaatcatggagtaaagcacaaggttgccactccctatcatccacagacgagcgggcaggttgagatctccaacagagagataaaaacaattctggaaaagactgttgggattacaaggaatgactggtctgcgaagctcgatgacgcattatgggcttaacggacagctttcaagacccccattggtacaactcctttcaatcttctctatggaaaatcatgtcacctacctgttgagctcgagtacaaagcaatgtgggcggtaaaacttctaaactttgacataaaaactgctgaggagaagcgattgatccaacttagtgacctcgatgagatccgtttagaaacttatgagagctctaaaatctacaaggagagaactaagcttttccatgacaaaaagatcatcaccaaggatttccaagttggtgatcaggtgctgctattaaactctcgcttgaaactctttccaggaaaacttaaatccagatggtctggccccttctgtatcactgaggttcgtccttatggagcagtcactctagctggtaagagtggagatttcacagtaaatggtcaaaggctcaagaaatacttagcagatcaaatccttcaagaggtgacatcggttcatctctaggagcttcttgatgattaaaggagtaaaggagtcaagccaatgattttaaataagctcacataggaagaagtcccatgattatccctgtaaataaatttttcctttcttgttatttttgatttgttttaattgtgtttttggttctcaggaacaaaagaacaacgtggagatagagtaaaaattcaaaacttttaccctaaagaaggcctggagatcgagtgtatagcccaatggagttgaattcgagtacatcagtcgagtacatcagtcgagtacttcagtcgagtacatgtgatgtttaaaacccaaaaaaaaaaaaaaagttttaaatcatgattatactcgaccaacaggagctacgaagacttgcagggattttgtcaggttacagaagatttcctgaagtttcaaagacaagtcaacagagtgtggaccacgcgctttctccctgaagataagatggagagagaatctcaaactcaatctccaccactcctttttgaaatcgcccacatctttttcactcgaccaatctgtcttcaaggctaccactcgaccgcggtgaagaaaatcacacaaccccttctcaccgtactcgaccgcttcgtcaccgtcaccaagttcactttcgtccctatactcgaccaattcacttcaccgttcatcgtctctttgttctcgccatactcgaccgtctttgcgccgccgcagtcgagtccccacctagtttgccgtcgaagtcccaagagctactcgattacatccacaagactcgaccatcgatttgtggcttcgtccttgccaattccggctcaccgacaaagcactcgaccgtctgaactcaccagctgtaccgacttcctcaacattactcgacctccaaaggtttactcgaccaccggtttctattttgctcgattcactaaagcagaactcggagacagccctgtttactcgagtacaaggctatactcgaccaatgtggtccatttcattgccagttgataacgattatggtttcattgttatctttgagactaacctattgatatttgggttttgagttctaaatcttttgcaggagaatcatgagtaactacagtggcagttcttcaattgatcctgactataacatggataagacagagtcgtcgtcttcaaggccaaaaagagaacagaaagaatatgataacttcaggagaaaagctgagatagctcaagggaagagagcaatgacagagaggtatgagcttatagatgaggatctgaaagccgagtacatgcctgagcatactcgcagagccaccaaacttcttcacgaacctgatgtattgtctgctgaggagtatatcagtttctttaaactgaatgagttctgtagcacaagatatccatgctcgaccacacttgcacaacttggattactggaggatgttcagcacctgtaccagagttgtcatatggacactctgatggcatatccatatgtagcctatgaagaagaaacaatttagttcctctccacactgtaagtggagctttaccaaggtatgacctctgatgatttggaatgcgaaggattgggattcttgcgattctctatgtttggtttccccagtggaacaggtactaagcccaagtatgacagagaagagttgaaagacttgtggattaccattggcagctctgtaccgctgaatgcttccaggtcaaagagcaatcagatacgcagccctgtcatcaggtacttccagcgttctatagccaatgtactctactcccgagagatcacatggactgttactaactctgatatggagatgatcgcaatggccctcaagggaactcttcgccaaactaagaatggtatgtctctccaaggtgaaatcaatgacacacctctctctgtacttcttctgatccatctgtgtggatacaagagttgggctgtcagcaataaccgcaagagagcaggaggcgctctgtgcataggtggtgttgtgacaccgattctgatagcttgtggagtcccaatcatatctgtcggactcgagccgcgagcaatggatatcgagcacctacgtcactgtgaattcctggagtttgcaatggttgacgacttccacaggttcaggtttgagcactctacaaacaggagagctaacatccttctccctagccctgaggttacacgaataatagagggagataatattgattttcgacctgaggttggacgcctctactatgagaacgctccgccattagatgaggaggatcttatagaataagcagcctggatggtttggatgaagacagagcagnggagtttgacactagcgtgtatcattaagatgaacatgtacctccagcgagggagagtaagagcttgagtgaggctcataggaacaacaataagctgcagaggtggtgcaagaagcatgacacgctgctcgccaagtgtttcaagactatcaagtttctgacaaaggttttgggatttgtaaagaaaagaaagagttcttgttagctattgaagatgggcaaaagcccttgcttttagaatgttaaaaacatgaaccttagttgataaagaaatccaaatccgctagatgtatcaaagtgttgagaaagcttctcctagagttaagagaaaagaaaagaatgattagaaaaggggcttaaaagattcatgaatgcaaagggtagagttaagttcttatattgagattggagatgggattactattagagcttcatttgatatactttgggtacatgggatcttatctctgtatgcatagcttgggacttacctttagcattctactaaagcttaatcattttttgagagatccccagttactgaagcctattctgtaagggaccatctttgtctcttgaccttttaccttagccaaatgagttcattgatgatgcattgcttgattcacgttccagaactaatgaatgttaaagggattggtagatttaaaaacatgtgtaggtcgagcatatgagtncgattgattgataatgaggcatggctaacgtttttaagtagaattcaatcatattgcagcttagaactttcaacttggacattgatttcatctggtttatctggtgctttggctctgagtccccgctttcaaacctcacctccagcttgttcttgatggtttgcttgagggcaagcaaagactaagtttgggggagttgataagtgtgtattttgcatgttttgagcatccatttgtcatcagtttaacatcatatcatcactgtttaataccatttctcatcatttgtcatgactttatatgtttaggatagatttgcatgcatgttgcatatttgcgttgatttcaggtgatttggagctattgacgagctatctggaagaagcggacctggtcatgtcaaaccactcgaccccgaagtcgagtaggagtttcaagatctcaacagatcactcgacccccaggtcgagtagaggacatcactacttcgaccacatcacttgaccctgaggtcgagtgtcttcatcccatcacctgaccatcactcgatcacatcactcgaccacgaggtcgagtgtcttcaccttcattgccagaccactactcgatctcataactctacctggaagtcgagtatcaccatcaccaccactagagtgcatactcgatgacaagcttcaaagccttcttcattccgcactcaaccagacactcgagcagaaggaagaaaagaagactccagctattcactcgacctcccattcgaccacatgggtcgagtacagttcttaatccgtcccaatacttcgtcgttttaagtattagggtttcggaatatttggctataagtagcatgtacttcacattttcgcagagaagaggtttttattctagttttatttttgcagacctggtgttctagacttttgtaatccggatttctctttatctattcagtattcagcttttgttctagatttctttgattgttgttcattctgttatcattctactgttacactgttgttatcatgttttcaacttgttcaacgtttatgctttctgttatgatatctgagtagtgaataggtttctgaggatgggttagagtagtgtagaattctcagtatgctaggtgattgagtatcgatatatagatcccttctggattagttgttcttaatgcctattgctttgtgataaactagaatttgagcccagacatttccgcgcccaaaaggtgttcgatagaatgtctgaactactaattccagagattcgtgacccctataccaaggtattggttgcagggagcgttttggctttaacttgttgattcgtaatgcctgttaggttagctctcgtcaatggtgattgagtatgggactaggttaacttgagggtctctgttgcggtggcacttagatttggttaatgaacttgttgtctagggttaatttattgagcatgtcaatcacctgtaaactgagaaaacgaaactactcaattaccccatcctcgggaattctttatctgattgaatcctttgtttactctactgttgtttactgcatcttgttatctgtcgcttaatttctgcagttctttctggttacttgacctcatactcgaccacctagttgtctagcaacagactgtgcagtcgagtatctgtgtttcattttctgcctgttactcgacctgtcactcgacctcacccagtgctctgcaaagagctgtgttggtcgagtgttttactgtttctgtttgattttctgttttctgcatgttcacttaggactgctagaacacaccaaaacctgttattgcttggcttgactaagtgacttctgatcacatcttgattgttagcatcacacccatttggattgacaacctaaaatagtacaacgatatgattggtgttttaggataattgactaaaaacttattatcaatttggcgccgttgccaattgggtgtttgtttgttacatttgagtcagacttgcttagatcaagttctttttcaattttcttttcggttactaactgtgtgtttttcttcttgtcttcttgatccaggtacacctctgttgtatgcaaactcgatcaacaggcaatcagaacctccttttcgacgagaacatcaaccgcatagctcacgaactcagaaaaaggagaaccacagtcaaccttgtaccttagcaaccactcgaaatggctgaagaacagaatcaacaaaatggccatgccaacattggtgctggagatgcaccacgtgatcaccgtcagaggaagggaatttcacctcctgctatccagaacaacaacttcgagattaagagtggtcttatctcgatgattcaggggaacaaattccatggtctgccaatggaggatccagtcgaccaccttgatgaattcgataggctctgcaacctaacgaagatcaatggtgtcagtgaagacggattcaagctccgtttgttcccattctccttgggcgacaaagcacatatctgggagaagaatctgccccatgactcaatcaccacctgggatgattgcaagaaagcttttctatcaaagttcttctccaatgccagaactgcaagactcagaaatgagatttctggtttctcacagaagactggtgaaagcttctgtgaagcatgggagcgtttcaagggttacaccaaccaatgccctcatcatggctttactaaagcctctcttctcagcactctttacagaggagtcctaccacgcatcagaatgcttctggataccgccagcaatgggaatttccagaacaaggatgttgaagaaggctgggaattggttgagaacttggctcaatcagatggtaattacaacgaggactgtgataggaccgtcagaggcacagctgactctgatgacaaacacaggaaggatatcaaagcgctgaatgacaagctggacaggattcttcttagccagcataagcatgtgcacttccttgttgatgacgagcagtatgaagtccaagatgaggaaagtaaccagttggaagaagtaagctacatcaacaacaaccagggtggctacaaaggatacaacaacttcaaaaccaacaatcccaacctctcctaccgcagcacaaacgttgctaatcctcaggatcaggtgtatcctccgcagcaacaacaaagtcagaacaaaccttttgttccctacaaccaaggtttcgttcccaagcagcaattccaggggaactaccagcaaccaccaccacctgggtttacacctcagcaaaaccaaggtcctgttgctcctgatgctgaaatgaaacagatggtccagcagctgttacagggacaagcatctagctcaatggaaatggctaagaaattatcttaattgcaccataagctggactgcagctacaatgacctgaatgccaaagtggaggcattgaataccaaactcagatacttggaaggccaatcagcatctacctctgcaccaaaagttacagcacttccagggaagtccatacagaatccaaaagagtatgcaaccgctcacgccatcaccatctgccaggatcgagaactgccaactcgacctgaccctgatttcatcactggggacagtgatgt

SEQ ID NO: 1781 - DNA, 1047 bp, Arabidopsis thaliana landsberg
cgttttccatcgttgttctaaacgcgcctcacttaactcatcttctcaaattatttcaaattcagcaatttatgaaacgcgctcttgaacgttgatcatgttgttctcaaacgcgctaacgagaccgtttaagtaaattgtaatctatcttgtagaataatcagccctgacctatatagtaccacctcatgtcgtggtagcataaatatacaagcccaaagcaaattttatagatcgaaagtttcactaacttggcccatgtttacttatttatcgctaagcagatggatctcaatcttctttaggacttgatacgacatcagctcccattctattcgccaactcaggattctcgatttagtttgaccatttgagctgctctttgtttgtttcaatgttaaattattggaattgaaaaacatggacatatgaaattccaacaaaactgttacagcttaatcataaagcatatgtaactaaatgattactacaattgattatgagatactaatcacagattatgccaatgagaaacagaccaaagcaccaaacttaataagtaacaactcataatccatggaaatcaaaaacgaaaacactagtctaaagacacatgtaccaaaaattcttcatcaacattgagaataaaaaccaaaaagaaacaacaacaacagcagggaaaagagaaagcaaagactcacgcagagaaaagatgaacgggagtggcgaatttgaaagtcggcgtacttagggttagctgataagagaagcgagccgtcgaagaaatgacggtcgactgttttcagagagagaaagagagaccgaatctaaatatgtaacacaaacctaaaaccctagaatcatacgacgtcgtttgggtcaaaactaaacccagatgattttttccagctcaaccggtcaaccctgatacaatatagcttagggtaaaccggaataaaccggtctagttgttttagcaaatatgtagatttttttttagcaaacccaataaccaaaattgaaaggttattggcagtgcaggtctct

SEQ ID NO: 1782 - DNA, 9305 bp, Arabidopsis thaliana landsberg
ctcggtcggtaattaaggctgttttttcttggtcatctgggcgcataagtatttggttggacccggataatgcatccatgattgacaatatttcgtgtcctgtagtggcctcgaccactctgtcgatatgcgggagtgggaaactgtctttaggacatgccttattcaggtccgtaaagtcgatgcatactctctacttcccatttttctttttaacgacgactgggttggtgagccaatcatggtattttacttcccttatcgatccgatcttgagcaacgggtcgacctcatcgttcacagctttagccctttcaggacctagcttgcaacgtttctgcaatattttttgtggtacttacaatatttttttgtggtacttgcaatatttttcgaggtcaagttctggactctcgtcctcggctgcctcttctattgcgaatagggtatgctgcccttgcgtttggttttcctttttgaagggttttttggttgcaaggggagcgttttgtgttttagattctttgaatcttaaggccagcacaacgagttcctcttcggcttttgcgaagtggagagctttgtaaagcgcatcgtctaaagataccggttgcctaacagtgaggtcctcacggaatctagaggaaatccacaagccgttgcgaagggcggctatggctacctcctcgtttaggttcgcaatctttgatttgattgctttgaatttttcgacgtaagatcgcagggattcgttctgaagttgggtgagaccccagaggtcggcttcagacgtcctgtttacgatgagtaccgagtactattttaagaaagcggcggcaagctggtcgaaggtatcaatagactagcaaaccattcgagggtgtgacctacgaggttctctgcgaagaaacagcaatgacctgcttcgttttcttcgtctgttaggtacgctcgtgttatagcaaaacggaaggatctcagatgagcctttgagtcgctcattccgacgtactctgggaaacggagtctctcgacgtctcggaggcgaaaacaagcgatcctatccgtgaacggggtgcgcctggtttctttaatcacgcgatctatgtcgggagcatcgctcactgctaagtgcattcgagaatgcatttgagccatgttcgcgtttgtttgagctgcgtaattgcggaatgtttccatatccacgacgttacgcggatcgaccggtgtttggggactgttaaggaggtcgcttcctagtatccggggaacggatggcagattagcgatagaggttcgttgttgcgttgagttcccgggaatgcgggaactggatgcggttgtttggtttctagtccacgtgtacctagggggtgaacagcccatcggtaatagaggtagggccggtagccttgggaaggcaggcgttgtgcttgtttcgtttactgttgccagtttttttacgagagcgttcataggtgcctgtaaaaaggcgacctgccggttgataggaggtgagacgtctatcaagccgaaatccagacgagttctcgaagtaggatcggccggggagatggtacctgtcagatctatggggacctaggcaggaatcccagtttcgcagggggggggggggaatctccttacccgcgatgcgcaatttcttagtttttggttaagttgatcaagttcatgatcattgcgcggagctcggccaattcgctggcaggtcgcggggggacctgattagataggttggccgagttatctccgtttggacgttgtatcgtgacgtttcgttctctgccccttgtttgcggagggggagtgatttggtcagatccagaagaattcgatttttgggagatgttctccgtgtcagtgttatggatagcatcaacctgggctccgggagggagatccattgggaggtgcccgtccgtaacgtcatcgtttgggatctgaactggtaagccagatcttgtctaattggatgaattgggatccatgatcgttggtcacaattgatgtgttagtttcggtgttggaatgatctagatcttcaagattatgagaaaggaggaaatgatccatgatcgtgggttctgaaatccacataagagatttgtacttaagattatgagaaaggagggctagatcttcactgaagccgtgagagttatattgctaagaacgaatggacttttgtattaattttgacaaagcttttacaatgagaaaagagattacaagtgtaaaagtgtgtgtgtgccaatgtgaactagattgaatgtcccttccaagtcgtccttgctcccttatataggtctacgcacgtggttgctccgtccgggatctgcggagatcctcctggatattcggcaggtcagttccgagatatcaggtcctcttcgcgaatatctcctcgtcagttcctaggtcattattcgcttatctcccttcatcagctgactgggcttatctggcccaaatacccattcgcgtatgtgggctcgttagctacgtaggtcctctacttagtgggcttggtgggcttttgttggctggcttggtattttcgcaggtggattcctggaggggaatccagctccaacaactatcctgtcgttgtagtattttaggtgtcaattcaatctggtgtgatgcaaacatatgagatatgattagaaagctctaagtcaagccaagcagagagttggatgattccaaaagacctaatatgcaataacagaaatgaaatgaaactaaaatcaaaaatggtaataacaggcagatgagtaataaagcacaaatgataataggcaattaaatggacaaacgattcctaaggatggggtaatcgaatagcgtggtctccctgatcaattcagttggttaacaaatctcaattaagctatccctagacaacatgttcaacaacagattaattcactcccgtgatagaaatcctcaagcatagctagacacagacctaattcccattaacgatctctaactaagcaggcaataagaaccgactgttaaagccaataaccgctctaaacggacaatcccttgggatagagacgattatcactggaattagtagatccaacgttccattaaacgccttctgggcgctggaacgtctgggatcgaattccagttgatcagaaaggaataagcagtaaacacaactaatctagaagggattcaataaatccacacttaaccaacagattcgaccagggttccacaactactctatcccatcctcagaaatcctaatcactactcagacaacatgcttaaagacaataacatgaaaacgaaagatgaacaagcaaatgaaagcaaaatctgaataacttagaagaaaaatcgaaatacaaaattgcaggaatgaaaagcggctgctgaataatagtgcgaaattcgtgtctttaaagtgcatgtctcagggcgaaacccttagagacttatttatactaagataagaaagcgggcttcgagcccacttaacggcccatggacggcgtgatcaagagtgtcggctcaaagtgggcttcctgatgggctttgaatgggcttcgaatgggcttcgaatgagccttctcttctcttctctttccgatgcttaggttgtctggttgagtgcggattgatcagagggtcgaggtgtgatcgaagtaggttggttgacagaatggtctgggctgcttcttggcctctatgatcgagtatctgtgtcagctgtcaggatggactagttcttctcctctgcgatcgagtagaactaatggactggcaaagtggactgcctgctcacctctacgatcgagtagaactgcagaatggactgcctcctctcctctgcgatcgagtataagtatcttgatggactgctgagctgactgcttccctctctgctactggtgatcgagtatgttggtggaaatgtgactttcggttatgtttttcctctttctgagcaccaatagctccaaaacacctgaaacaactcgagaatgcagaatgtatgcaagactagtcctagattcgactaaagatgcaaaatgtacaaaaatcatggtgaatgctatgaaagatggatgaaactagactcaaaatggtggtaaaaggatgtgtaaaacatgcaaattatagacatctcactatagcaccatccttttgtttattagcctcgctgacaatagccattgctaaagctatatcagacttctttagcaagatggttacgatttgcctacgttttgggggtaactgttgatataggtcaaattgccttaagaccactctctcaaataagagatcgattgtagcacttaagggtcgaattctacaaagctctcggatcacacaatagaccaaggttttgaattaagctaagtaagatactaatgaaagtgatagcaaattgtgaagttgtaagacaagaaagtaaaaacgtcaggcttagggtatcctcaggaaactattggttagtagatctaataatagctaggttgttatcgaactattcttaaactcaaactctaattatggaataaccggtggtgttccgcgaaattccctatatctatagctaagattaaccggagaagccgagagatctttaacctaaacatgcattctaaacgagttcaattgttcatcttagtagataggccgattcttattacacacctataaactagggtcatcaaataatagatctaactacaaatacctatggtgggcatacctattgtcaggattcaaattctagttagctactcaagaattagcattaagaacaattaaagatgaagaatcctaacagataacctagcaacagggcaatctactaaataatctaaattcctaatgagaaactataaacctaacaagaaaactactcaagcatgatcatagaagaacaaaacatgattgaataagaaatcaatgaataaaacaagagaagaatagagttaagaagaatcttctgtaagggaatcttcacacggttttgctcccaaaagtacaaaagagatatggaatagcctcccaaagcttaggtctaaacaatgacctaaaaactatatatacaagtctaaaacacgtgattggccttcattaaccaaaggagaaagttctgggtattcgataagttgcgtcttcgaattgccgtcaggtattggtgtcgctcgacaccaggggtggtgtcgttcgacacctacacgcattttagtttctggctttgcttcagcagcataaattctttgtttttctctagaatgctccattatctccaaatgaatcccaaacatgtaaagacctgaaaacgactagaaaagactctagaaataacaattaaactctaaaacctatacctaaaacatagttaaaaacggtaaaaatcgggatatatcatcaggcaacaccacccctggtgttgatcgacacctatgcgaattttggtctcgagatttcttctgcaacataagttctatgttttcttccagaattttccatgatcaccaaatgcatcccaaacatataaaaacttgaaaaggactagaaacgactctagaaataacaaaaagactcagaaccaatgtctaaatcatctctaaaatcagtaaaaattgaggtatatcactagccatcaagcgagacctaccagtcgcaactaatttagttacaactggtaggtcaattagttgcaactggtaggtctcgcttgtttctttcaaagttttcgatggacttgcgtagctctttgtttactgcaattgcctaggaaattttgcaatggatttgcgtgctcttttcttgtagtggcaaatctctagcaaattttgagatggatttgcgatttatttacgtcactgtgtgtttttcatttgcgttagtaaggttagtttatctataattactttcttaatttgatcttaaacttaaatttctatgtaaaaatggatttgaatccttaaactgagattgaaaattgaaattacaagcatattcatataataatctaagaatcccatagttatccattcacgaacattaaattgtctatgtttgtgaccttataaacccaaaacccaaagtaaactttattatagacttagaaagcttgagatggagaggatcgagtggttgccttgagctcggactgcgtcagctcctattctagcagatgtagcagctatggcattgggcacctcaggtgtcgggttggagatgactagtgcagtccttgaaaacgatccggctcgaaagagggcatcaaactctggatccttctcggtaagatagtcaaagtacacatcaaagctagtgatcttcttagcttggtttgcaataagagcttttgagagagtacaactggatcttctcgaggaatatctggagtagtgttagctaaggaggcttctagctgcattgaaccgggcccataaatcctccctttcttctttggagccacctatgagaaactcaaaaccaagaacacaacataattgatatggttcaacttgccttaaactctctctctgaaataagatatcgattgcagtatttaagggtcggagtccacaaagttcctttgttcacacaatgagctaagtgtcaagattaaggtagaagtgtgtaagaaaaatgaaaagaatgtaaagtaagcaaaaagcaggttggttggttgagaaacaagatattaaaacgtcaggtctagaataatctcaggaaataattattagtagatccagatatacctaggttgttaccgaaccgttcttaaacttaaactctaatatcagaataaccggtgatgttccgtaaaactcactatgcctagagttatgattctcggtgatgtgccgtcgaatcctatacttaaagatgcatgctaaacgagtttgataagttcatcttagtagatagaccgattcttataaaccaaactgatctatagtagttctggtaatagatacctatggtgggtatatcttttgtctggattcaagatctagttaattactctagatctagcattaagcatatttaaagatgaagaattctatagataacctagcaaagggggcaatctactaaaccatataaatccctaatgagaaaccctattcctaacaagtagattactcagacatattgattgtaacaaacaacatgattgaataagaaagcataaacacagcaaataagataagggaaagaagcgatctcttcattgtattaagaactggatgaatctctgaaaacaatcgatgaatatcttatgactctcagtaacaaggttttgcaaaaatcttgataataagaacttgataatcaaaactagggtctaaaacaatgtatataaaccttataaaacgtccagggactaataatgcaaataggaaagtcttttggggtaaatttcctcttctgtaaacttgaaagcgtcttgcactctgctgggacgaaactcttggtgtcgatcgacactcctcgctgattcctgaaccaaaatcgtccttagcttcctttttcttagtgtttgctccaaaatgtctccttatctctattgttgtcccattgcatagagtacctgaaaagacactaaaaacactcgagaaataacataaaaactcaaaatcctatacctaacacatagttaaaatcggtgaaaaaagggtataaaatcaactccccccagacttagcttttgcttgccctcaagcaaaacaaaaggttgaatctgtgaaagaggtttgaaaaacatagaaaatcccaatctctctagcttattagcttgatcatacaaaccaaatccatgcactaaacagttctaatcaattcctgaccaccatgtaattctccgctaccccacacaacattctagattccataccaaagcactcaactatatccactaggctatcatcgctgggtctcatcaatcaagtaaatgcttaagaaccttttagactcattcatgtactataccatgataaatagaccattctttatatatatatatatatatttggtgttctttctctccccagacttatttttttagagagtaaacaaaggggaactcgcatactggatcgccaccctcgtcagttttctaacctttgtaattgatcattccgaataatatataataatggggtcataggaaacattgctaccctatacaatatctgaacgtcttctcaatctctcattattattattataatgttattttattttttggggagaggaacactttctttttatcacattagtcgacttatcaggtatgaacaaggagtcaagtcctatgcacaataaccattttgatgaggtaaaaggaagagcagtgagattagctcatgcctttgtggattatgttgggaatggatgtccttaagttcgttggtttgctttctggatttcaattagtcggattgatttgaatatgtagtacttaagcaatcctggcaataaactcgagagatagatcataatttcagacaaaagttttgactcaataaaaacgattatctaagttagaatgacacaactgactcataagaaaataaaagatgaagttagtaactgactcccccagacttaaataacattggccccagatttattaagccataggaatcgaaaggaaaataatcaaaagataaaagttagagaaacgtgagttgccacctgagagtggtgtcgatcgataccatggttgtgtcgatcgacactctggtcggttggcctagctttgcgaattcagctcattgttgtagagccttggttagtgttttcacatggatcctccagttagactgttgaatcactaaaacacctatcaacaggtccaacaaagcataggaaaataagtgcaacaagtttcaaaacaaataacaaatagtctgaaataaagcaaaaacaaagttagaaaacaaagcaagataaggaggatggctagtcctcatgcctagagccggaggtgggtgcgggagagcgacgacgacgacgagtgggagcaacacaaccgcagcgagaaagtgtagctatggcgttccagacgctcttgaaactgtcgacgacgtactgttgaaagacctgtagctccatcaggatgggtggaggagacggcttctgctttgcctgcgcggaagaggaagatccaactctcggacccccagcaaggtcaacgacctcgtcctcggtatgtgtaggcgcagatccggaagttgcgcctctctgtcacctggtgcgtggtgcgccctgttgttggg

SEQ ID NO: 1783 - DNA, 602 bp, Arabidopsis thaliana landsberg
cgaaataacccaatctaaaaccaaatccatatcctattttacttttataatcaaactgttataatgttttgattaggggggaaaataataacgtacaagcacttaactttacaattaagtaatatcttaatttatcttactaatataattttgtcttgtgagtccggatcttaaaatataactatacacgaacgcaattgaattttgatcattactcttaactttataatatctataatattacaaagtttactcataacaaaatattatatatttttaaaatctattaaacaatttatactataatatatatcacaaaataacaaaataatctatattgaatttaaaatatgaaaccccgcacgtatgtgtgggtcaagctctagtgtcttgttaagaatggtttttgcaactttcgtgcaaacttgtgtgcttactaactctaacacatattggaataaacatgttttattaattgattaacatttttaaaaaatatgaaatccttaatcgtttatcataacaaaattacgaactttgttaagacttattattgtaatatattttaaaatgtcttcaggtcggcgtgctaaaacgtttga

SEQ ID NO: 1784 - DNA, 2131 bp, Arabidopsis thaliana landsberg
tatttgtgaacgtgtgcatcctctctttcctatgttgttttcagccccttggaagtctcaagaagatgaatttttcgtgttccaagaatttgaaagaaattccagatctttctttagccataaacctcgaggaattagatcttgctggatgcaaatctttggtgacacttccttcctcgattcagaatgccattaaactgatcaatttagatatgagtgattgcaaaaagctagagagttttccaaccgatctcaacttggaatctctcgagtacctcgatctcactggatgcccgaatttgagaaattccccagcaatcaaaatgggttgttctcaagagagaaatgagatcgaggtagaagattgtttctggaacaagaatctccctggactagattatctcgactgccttacgagatgtatgccttgtgaatttcgcccagaacaactcgcttttctcaatgtgaggggctacaagcatgagaagctatgggaagacatccaggtacattgttaatgctatgctgatttttgtttaccttctgttatataactaattataagtatacccaaaattgttattatggcttgtgatccacggttatgtcttacatgcatacataataatattaaattataattttaaacatatacagtataaaattaaaatgattatcatcgataatgattgaagcataccaatgtttttttcagtcgcttggaagtctcgaagaaatggatctgtcagaatctgaaaacctgacagaaattccagatctttcaaaggccaccaagctcgagtctttgatactcaacaactgcaaaagtttggtgacacttccttctacaattgggaatcttcatagattggtgaggtttgaaatgaaagaatgcacagggctggaggttcttccgaccgatgtcaacttgtcatctcttatgatcctcgatctcagtggttgctcaagtctgagaacttttcctctgatttcgactagaatcgaatgtctctatctggaaaacaccgccattgaagaagttccctgctgcattgaggatttcacgaggctcactgtactactgatgtattgttgccagaggttgaaaaccatctccccaaacattttcagacttacaagacttaagctcgccgactttacagactgtagaggtgtcatcaaggcgttgagtgatgcaactgtggtagcgacaatggaagaccacgtttcttgtgtaccattatctgaaaacattgaatatacatgtgaacgtttctgggataagttgtatcgtgttgcatacctccaggaacattttagcttccgtaattgcttcaaattggatagagatgcgcgagagctcatcctacgatcatgcttcaagcctgtggccttaccaggtgaagaaatccctaagtatttcacgtatcgagcttatggagattccctaactgtcattgtacctcagagctctctttctcaatacgtattgcgatttaaggcttgcgtcgtggttgaacctctctccaagggcaagggtttttatccattcttgaaggtaaacgttggcttcaatggcaaacagtatcagaaatcattttctaaagatgcagacctgcagttttgtaagacggatcatctgtttttctgttccttcaagttcgagtctgaaatgactttcaacgatgtggagtttaagttttgttgctccaataggatcaaagaatgcggtgtacgactcatgtatgtctctcaagaagagaacaaccaacagactacgagaagcgagaagcggatgcgggtatcttttgacttttgatttgattttccaggatcgaaataccatagagacagactatttaatagaatcgatcgtttgatttataatgcagatgacatcgggaacatctgaagaatatatcaacttagccggtgaccaaattgtagccgacacaggattggccgctctaaatttggagctttcgttagggcagggagaaccatcatcatcaacatctctagagggggaagctttgtgtgttgattacatgataactgaagaacaagctgaagaaattcctgtcttgtatcctgtttctggtaactgaagcatcttatcattctgtctgta

SEQ ID NO: 1785 - DNA, 1231 bp, Arabidopsis thaliana landsberg
tcttgtttaaacaatctttttgcttaacaaatctctgctgttatcttaaaatccttgatgtcaccaaaaagacacagatttttgtgaatttgttatatgctgccaatgtttacattaaacgattctgttttcatcgagtaaaaaacagaggatcaaaatacaactttttggaaagtgatttgacaatttactttgtttaactctcttgataacatcacttcatagggattgctaacagactgttttatttttcaatgttacagcatctgaataatcttccatttcgttttaaaaaaaacagagattttgatttcttcagtcatctgttcttgagagatcgccttggtggtggtgatgagtctctgaaatagccaaccatatacatttagacaactgccattagaattccacaaggacaacctatgactgcagctttccatgaaaacattgcttctctggctgcttggtctgtgtcgagcatggttcttggatttgcattccacatattttgttgttgtttgcgtaaatgttcggatcgttcaatctgtctagctgaggactctcatggattctacctataagtttgttgttgctcaactccatacattcagctcactgagcttggatagtttctgcgggatttcgcctgagaggttattgtgtgaaaggtctaccttctcaagatttccaaaactttgtgggatcaatccagagatgtcgttgtatgagaggtttaaaagctttaagcttttgagattgcctaaagaatatgggatttctccgaatagcttgttatggagaggtctatcagagtgtagaggcagacgttattgttggcaagaccttgctttgaattcttccagttcactgctaagttatgtattacgatagtgaagctgtatatgaaacgcaaaagcgaagatgaacttacgagagattctttcatgcctgtatcccaggagatgaagggagagatccatcaagattgttctcagagagatccaagaccttgagacttgtgatatttgatatgccttgcttctgttccttaggccaaaatttgttcgattccgcaacttcttttgtcctaggtttgtcacctctgactgattctttgtttatcttaggtacgtggatctcaaggcatgcataactagaattgaagaaaatggatatggagcaaatcatgctccttggctcagctccccaccggataggctgcagacaatgc

SEQ ID NO: 1786 - DNA, 4240 bp, Arabidopsis thaliana landsberg
gatgatggactaaagcaaggtccgtcctatgattctttaaaatcgaatgaaccaacatgttattgatttcataagaagggacattttgctgcaacttgctctaaaaggcaagtagtagatgctacatcactagagctgaaagtgaatgcatctagctcccttgattgtcttgtaaattcatgtttagaaattctcaattctagattaatgcacttctctttgccaaaggttattaatacaggtatatgtcataacatgggtgacacatctaaagaagtagtattcaattaaagatttaggagggtttggtggaatatacgaaaattttgattgaagagatttaagttagttttatagataactctggtggaaatgttatttttcggttcaaaaaactatagataatttataatttgggtgagtattcaaggagatattatttggtggccacataaacaaactcaaatattttttattaaagcgtacacaatagcataacgagattcaccgccgtgcttgacccataaaccaactcaaaattccatctaaatttatcaatttcgcaaataaagctcttttatgttattagcgaagaaacaaacatgagaactaaagatcaaaatggacctagcaacaaattgacgtttacttgtcaaatggttttattcatctatttgaaaccgtttgtgctcctcgagaatctgattgaagctgttcgagacttctgaggatgagaagtaactcatcaccaaactcttttgactttagtcctggtacatatttcgagataaatggggactttgattttaggatctcttatgttatttttcttcaagggatcaagatcgagggagctgaagacgaggatgaagagacactacaagaaaacagtcgttttgcgagggaagaattactcgctaatccctcgcaaacagctatacgcaagggatttgcgaggaaaacgagttcctcgcaaatcgcttctcgcaaatggttatatgtagcaattcccatgcaacacacgcaactacagttctagtacttccctcgcaactgttgcgagggatttgcgattcttttcttttgcgatggatttgctagtattttgcaactgatttcctgatatattaaggcttgattagtggttaattagactctaattacctggttaattagactctaattacctaattaattaggatttgattagagattatttttgcttcttaaataaagacacaagaagaagaagaaactgaaattatcattatctaaaatgtatactacaatgccaatgtttgaaaccatgttctaaaaagattacaaggaaaaaagagaaagacaatgttctcaaaatactaatgatgtagaggatcttgttgcaaggttagctagggcagcagcagcagctgtcttctcattggcttgttgttccggagctgtagctacaggtggttcatttgcgcgaaccggtctagtctgtgtcaaggaaccacatcgaagaatggcagctaaagctggatctttctcagcaagatagtcaaacaggatatcgaagctattgatcttctcagtctgagttgcaatacaagcttcagccacaaccaacttctcagagagtaaagctggatcatcccgaggaaggggtggaccactatgggctgaggatgattcaaactgcagagatccaaccccataaatccttcgtttctttctcggagcaacctgcaaatcagacaaaccaattccgacaaaatgacaaaactcaaaagacaatgcaattcagacatatcagacaaaaacagaatcatatgtaagtggtaaaacatataaacacttaggaattcagacaaaatgacgcaactcaaaagataatgcaattcagaaaaaaaaagaatcatatgtaagtggtagaacatatatgattaggaattcagacaaaatgacacatctcaaaagacaaagcaatatcgcctaatatcacgagaatctcataccaaaaacacaacagccaaatacaaagcaattcaaacaccatacacaaaacgcaaatacaaagcagttaagacaataaattcaattaatccaacaaaaactataatgaattaaaagacaaagcttacatgggtataaatcatgttcatggcttgaacagacaatccacctgaagcaatgctctctgaactctccccagaacacagctgagtctcttcctctgctatcctggatgacacttccttgtagatctcttgggactttccatcaatgaaagtcctatcagcttttctgtgtgtctcatctaagagcacaaggaaatcaggagtcgtttcttcggtcttctcacactaaagcacatgaaaaatataaggtcagttatcattataacattgcagattaagaaatggtatgagacttgagacttaacttacatgttttcgaatccgagctttgtaagaggtctggccagaacggtgtttagatatgccgaggccctttggatcatgatatcgagcttgccaactttttatactctttaactctgaacttcggatctttccaatacctaacaagaccagcccacacctcaggatcaagccactgcggcattgcctcatctcccttcaccatccactttcccttccagcgacagatttgatcgcagattctattcttcagctttgcttcaaagtctatcctaactctcttgtttattgcacggtcccagttgtatatggtatggttcaaattacctagaactactctctcaaataagagatcaattgcagtattttaggattgaattcacggaaactccttcctctgactcaggctcaggctcaatagtaacttactctctcaaacttcctgtatccctgaccatctatgtagaagactccttcctctaactcattctcaggctcaggctcaatggtttatgcctcagcagcaaagtggacatgcttcttctctgtaagtaagttatgatctgaatccaacttagcattcacctctgccatctgatttcttgaaatagctccagcaatcttcttcctctcaaaatcagcattcttggtactgttgctgcaagcaaggttctctatcagggctgtagcatcagctgggtaacgtgtattgaagttatcattgcttgctgcatctagagccatctggtatctccaatcaactcctctgaagaaggtacctagaagttgtacctcactgaaaccatgatgtggacaatctcgttggtactccttgaaacgaacccaagcagccttgaaagcttcagctggaccttgtgtgaaggtagacagcttctttctcaactccacagactaagcatcactgtagaaattgttcaagaaggctatcttgatgcttctctatgtcttgagagaacctgcatttagttgtttcagccaagaagcggcttccgcagcaagtgaataagggaagagcttcctcagtagatagtcttttgacactccattagctttgctgctcaaaacaaggtcctcaaaacgcttgatgttgtccattaactgctcatgagacaagccatggaaaggatgctggccaagtaaagcaaagtagccaagctaaacatagtcgttcctctgaaaaagtgggattacaatcactgatcgattagcatagaataggtccggcctgttgaaatccccaagagtacgacgtggttccgcagatggaagaataactacaggaatctggggttggtgttgatagacacctctgttgtgtcgctcgacaccaatcgcatcttcgttctggtcctgaaggtgtcgatcgacacctagttggtgtcgctcgacactgagccctgctgcatctctggcagctaattgtgcattgaggcgcgcctgatcctcattggcgtcctcagggtggataagtacatgatcatccaatctctgacaagcctcattgtaggcttgcccatcctcatctctcaaactccttcctcatcagctctgatggctctgttagccattgctaatctctgagttttgttgttggtgcgttcgagttttcccaactcaagaacagacaagttgatcaactccttctattgtgtgctccttgtttgcctaggcattgacctgaaacatagaaaacaagaaaacaagaaacgcgtgagtaacaaaataaaagtaaaaagtagacgaaatctctaaactaaactcaatgataattcccaagaactttggcaactccgcca

SEQ ID NO: 1787 - DNA, 5284 bp, Arabidopsis thaliana landsberg
  unsure (1)..(5284): unsure at all n locations
ccaccctactgaggtgacaaatgtgttcaggtcaaccagtccttcaaataagctaacttaattttgctgatgtggggagtaggtacttctgagatgcgtgaagtgaaacaagaaccttacgtgtcatcgaacaacttatctaattctagtgccaagctgacggcgcgatgcatcttggatgacatatcctacaacttcgttcgtcgttgtcggagctcccgatcgcgtgcactgatatcattgtcttctgttcagcgtgttcaagtattgacgtttggcatgttgtcacggttcagcatgtttttgcgggtgtgctcgtcgatggacccaacgacgatggaagtcggcatgttgcgtcgattcactagtctttccatgattggagttcgctggaatagaattgcttcgttatcactgagctatcaaatggctcgaactgcgaagtactggagttgctcgatctaattctgcgagtccttctaggcagcgacgattgcgttgatacgtttggcagttcttgcatcatgtaggtcgagtcggtcgtggaaggatcgaatgacttcgtcgagatcggttccttgtggtgttgtttttttgagttcagcgggaatacgagaggagctgcgactagaggtggtgtcgttggccgagctggcggtgcggcatgaggtgcgctggactagactccttgttcgttcgaggttttcgtcagctcgtcgtagctttccgagattactcgcaacattgtatctgatcgtcaatagaaaaagaaagttttgcctaggcccacggtggacgctaattgtttgtactgaggttgtaacaataaataactaaggggttttggggaaaacagagcagcttctttattaatgatgaacgagaatagtaattaacagaacagaaaaccgaaagtacagaacggagaaccaggaaatatagaacggaaaaccagaaaatacaaagccgacaaccaaaagtacagaacagataaccaaaagtacagaacggagaaccaaacgtacagaatggaaaaccagaaaataagatataaagagttaggcagcaattctctcttaaattcttcgagtagtgtcttagggtctggacctataggcaaggagctgatctagggttctctttgtctctcttacgatttctcctttccgcccttctgaatttaacgggctaggccgagctgtgatggcccgagatgacatgtcgttgggccgagcagtctttatttgggacaagccgtcagtctgatgggttgttgttctgatgggtcgttctttcttgtttggagctgataataggttttttagtcaattatcttaaaacaccaatcatatcgttgtagtattttaggttgtcaatccaaatgggtgtgatgctaacaatcaagatgtgatcagaagtcactaagtcaagccaagcaataacaggttttggtgtgttctagcagttctaagtgaacatggagaaaatagaaattcaagcagaaacaataaaacactcgaccaacacagctccttgcagagcactgagtgaggttgagtaaaagacagaaaataaaacacagatactcgactgcacagtctgttgccagacaactgggtggtcgagtatgaggtcaagtaacaagaaagaacttcagaaattaagcgacagataacaagatgcagtaaacaacagtagagtaaacaaagaattcaatcagataaagaattcccgaggatggggtaattgagtagtttcgtttcctcagtttacaggtgattgacatgctcaataaattgaccctagataacaagttcattaaccaaatctaagtgccaccgcaacagagaccctcaagttaacctagtcccagactcaatcaccattgacgagagctaacctaacaggcattacgaatcaacaagttaaagccaaaatgctccctgcaatcaataccttggtacagggtcacgaatctctggaattagtggttcagacatttcatcgaacaccttttgggcgcggaaatgtctcagctcaaattccagttgatcagaaagcaataggcattaaaaacaactaatccagaagggatctatcaatcaatactcaatcacctagcatactgagaattctacactactctaacccatcctcagaaacctattcactactcagacatcataacagaaagcataaacattgaacaagttgaaaacatgctaacaacagtgtaacagcaggatgataacagaatgaacaacagtaaacgaaatcaagaacaaaagctgaatactgaatagataaagagaaatccgtattacaaaaagtctagaacacaaggtctgcggaaataaaactaggtaaaaaacttcttgtcttcgaaaatgagaagtacatgctacttatagccaaatatcccgaaaccctaatactaaaaacgacgaagtatttggacgggttaagaactgtactcgacccaggtggtagagtgagaggtctagtgaatagttggagtcttcttttctttcttgtgctcgagtgtctggttgagtgcggaatgaagaaggctctaaagcttgtcatcgagtatgcagtcgagtggtggtgatggtgatactcgacttccaggtagagtgatgaggtcgagtagtgctctggcaatgaaggtgaagacactcggcctcggggtcgagtgatgtgatcgagtgatggtcaggtgatgggatgaagaccctcgacctcggggacgagtgatgtggtgaagtagtgatgtcctctactcgactagggggtcgagtgatctgttgagatcttgaagctcctactcgaccttggtggtcgagtagtttgacatgatcaagcccgcttcttccagatagctcgtcaacagctccaaatcacctgaaatcaacgcaaatgtgcaacatgcatgcaaatctatcctaaacatgcaaagtgatgacaaatgatgagaaatggtataaaacagtgatgatatgatgcaaaatacacactggtcaggaacctaggtgaaaagagagatgagaaagacaaactatgaagcttctaggaggcagaatgacagcgtcaatacagagacaacgaagaaactcgccgccgatgacaatccgagacgacgaatacgattcaccggaattaagttgctggaaaaaatttgagcgttgtggttttattttaatcgggtaggggaataattcgattgaagaaaaggatatagagggttgtatgaaagactcaaatccatttagcgtatttaggttttttgtttttttttctatttctatttaaaatatgtaaatagactaggatttaacccgtgatacaccacatgtcaaatgttttattcatatatacaataaaattaaattttatggttttaatttagtattaaagttatataattttatattaatattgtaattaaaaaaattagtgatgataaaataataaaataaatatttaacatgtgttatatcaatccaaacccgcctcgctgtatttcatatcaatccaaacccgtcctgctatacttctcgtctcatgatatttagatttttttatgtttaaatattaataatgtttcataaagttaaaatatatcaataatattctttaaaaatagtaattgtttttgactttagtgtaatgccattctttgtaaattcttactttactaacacaaaagtactttaaaaaggtacttcaaatttttaatatatataatgttaatttttggtaaaaattattataaataaatatttagtttaatcataatttgggattgatatacttgtttttgactaactattttttattttaataacctaaattttgtcattttgttaatattatttgaatcaacaatatcaacttaatacatgtacaatttatttatcccagaaaaaaagaacaatttttttttgtacaattgcaaatttaaaacgaaaagtatggattgagaaataatttgggtttcaaatttttattacgtaattaaatttttaatgaaaatattaaagcatatattgtaatataaaatttgatttattttattaactgaaaataaatgatttaaaacgaaaatcagggtgattaatgctaattgaaaagatttaaacgtttttgtgatttgttgttcagtttcgtacgttttagcaacataacagattgttatatttagcttctaaaaataagtctagtaacacaatcaatgttaatggcatgtcattgtaaatgagtgtcaagtaggggccttattggttaaagtggctacaagcatgtatatgtagatagacatcgaacctcaagaaattaacaaaaaaaaataggtacttcaaggtataaaaggttgaattgagtttgatggactattagttatgaaagcttgtggtttgggattaaagaaagatcagtacccatgggttcaaaacaatgttcaaggttagctatggaaccatattaagaaagaaagtgaccattcgggtcaacaaaagagtgttaaaagagaataagatggatcgaatagtaaagtaaaattatggtcaagtatcacaaacccctaatgagaaagttaaattcattaaaagtctaaaattcatagaattgctttgaaagtcatgctaatttcaattaaggtagaaactttcaaaagtatagttccaaacaacgatttttcaaactttcttagtgcaatatcaatgaattagcaatgatatgaactttattataatcttgattatttttaggaaaaatgtcgaaaaaacgtgaattttcgaatttggaatgaaaaagcataaactttcgaaaggccataaaaatcttaaactttggtttgactttttgaaaaatgagcaaaattttgttgactaggccatttcgggcatgacgttaaatttttgttaacagagtttactttctgttaacagtctccattgaaccaagcaacatcgttttatattcactcaaagaaagaaagaaaacatatactctgaggatcgaacccatgacctcctgatgataataacaaacttgcaaccattttgcttctttgatccatattnnnnnnnnnnnnnnnnnnnnnnnnncatttatgttttcaccatatttcataacacatcttcttattctaacaccaagagaaaaaaaggatagtctcaaatctctagtcttggtacttcatttaatggtggtgcgcttggtaattcataaaaaatcccttatactttctcgttgtcataagaacatccatgatgcttttaac

SEQ ID NO: 1788 - DNA, 915 bp, Arabidopsis thaliana landsberg
ttatgcccacaaacccaataagagtatgcaatttaaccaaacttgaagtaatccatcgatttggcaccaaatttaacatcgacacaagcgtagaaatcaatctaaccaaattttctgaatattatacacatcccaaaaattaccaatttcacagaacatgaacttaagaacaagctccactaataagcgaaacaaccatcaacaagctcctaaacgcatagattaactagattaattggtcatggttctcaaaatcatctcgaatcctttgtaaaaaaaaactaatctgcgaaatagaagtgaagagaatcagagctagatcaacgtttgagagtacaaacgtcctcttgatggagatatgattgttggagcggcgaagagatgggtccagaacttcgagagaaagagagaaacgtaatttgcccaaaaggtttaacgatcatggaatcgaaatcgaaagagagaatgtcgatggcgttgttgtaatttttgaggaaacttccgcagaaattctgtgattggagactttcacaggttttggaatcagatctagtggagaaaggtggatttgagaatatatttgaaataaatctccggagaggaagaagaagagagcaatagattgttgataaatagggaagatgatgataaaccctaagaaattcagttttgaatttgattttgaataaagattggattttttatttctggaaagagagatgaagaacaagatagaggccaaaagtgtttttgtattttaaaagaagagagatgacgaatagatgttgaggaagagatagttagggtaatgctgtcaattcatatataaagagtgcctaattttttcaaagtgtctaaacatgtaaacactttaaaaaaagtgtccaagagtgtaattatctctaggagtattta

SEQ ID NO: 1789 - DNA, 7361 bp, Arabidopsis thaliana landsberg
  unsure (1)..(7361): unsure at all n locations
gatgagatatgatcgaattttctttaaaaacgatagccatgggtcattatcaatcaatttgattcattaggttgacctacccatggtttcaaattttcccattccctttaccttccttagttttggaacgtgaatcaaaccatggcttcataaataaatcctttgggtaaggtaaaaggtcaagaacaggggatctctcaaaaaatgattaagctttagtagaatgttaaaggtaagtcccaagctatgcatacagagataagatcccatctacccagagtatatcaaatgaagctctaatggtaatcccaactccaatcctaatataagaaaactctaccctttgcattcatgaatcttttaagccctttttctaatcatttttttcttttctcttaactcaagaagctttctcaacactttgatacatctagcggattaggatttctttaacaactaaggttcctgtttttaacattttaaaaccaagggcttttgcccatcttcaatagctaacaagaactctttcttttctttacaaatcccaaaacctttactagactttttctgcttctttagcttacttcacctagagtcttttaccttttttatcaatgaatcaacacccttttttttttcttttaaacacatcccaatccaaagtataagcgcccacctagtcctatctagtccggataacgcgaactagaactacatgagatactatctttgtcgttacaaacctaacactttctaccaagcttaatcgaaaatagacctcacaacactcacaagtgatatatggcttgaaagaacgcttatgttagggtatggggaaactgctctaaaggtgagagacagctatttggatcaacaagagtggtgaaatgaataagaagatccaaatattttaagggtgaccatgagtttcacaaacaatgcatagtatgataattaaaagtcaaatttatggttcaaattgatagggaatagcttcaaatcacagcaagtttcgactaaggaaagatcaaatatatgaattcaaaagatggtgctgttttacttcaagatcaatcggttaagcactagacaactaacaacaagggcattgaaactatctagtgaacattgcaaatttacaaggctatgatcatcattatcccctatgcaagtgcaaaatgcaacaacctatatgataacattcttaaaacagccctattaatgcaaatgcaaactacatgacactctatttttttggaatcattttcgaaaattttcaaatttttatgggttttctatgccttagatgatgcaaaaatttgaataagaaaacatgaaacaatgttagatacatcttgaaccctcccccaaacttaaattacacagtcccttgtgtaataaaaattcaaagaagaattcaagagaaataaccacacaaagcaagaaataaaagaaatgcaatgatatgtacagtgaaatggagtgatacctcaacatttagacgaagaggttctggacaaactcgtccaggcggtcttgtgtgtactcaggatcacgtgtggaggtgttggggttgttggggttgtactcggttgaccggtcgagcatgtatcccgagtagtactcctctcggcttgggtcagcgttcagaaccaactggttcactggaccgggtgggcggctgttgaaacggcgatctgaaaaggtggagctcctcccgagctcgtagtttgaggctcttggcgggtcgaaacgagcgtcccttcgcggcgccacacttgttgagttacttctcctgaactcgggtcgaggtggtggtgannnnnnnnnnnnnnnnnnnnnnnnnnnnnnnaccgccatgccatccgttgctctcttcatctttctcaccttcttcttcaacccactgaacaacttcctctgaagcttgcccagacctttgagcattcccaacttcttgtgaacttgaccgggatctctctctggatcggactcagcataatcctcaaagaaaaactgctccgctgcagcttcgcacgaatcttcttgtttatcaaactgttcagcttgactgaactcagcttgttcaaactcgtcctggccatactcggcctgctgaaagttactcggccgagtataagcttcctgctcagcttcttcttcattccactctgctccttcttcttgagactcacttcctatgctcggctctgcttgtagaggcgcaaggacattgactaagatcgattgaggaggatcaaagtcaatgttgttcccaatcctaatggtggtgaacttcttgcaagggagtgctagcctagagagacctagcgtggagtgcttgaacttgaagtagagttgatccgctggagcagacctgtccaagtagcacttcctcttcaaatactccatatcgatgtaggttgctgtgtgagtgggggtatgaagaggaactccagcggctattaggatgggcgtgatcactcctccagcacataagcttcctccatagccggattggtggattccggctgcatactccctaaaaccaatcaagtgatcaatcaacaccaccgaaagggacgtatcagccctatccccttccatctctatcccattccttgtgcgtcccaaaatgaagcataaggtgagatcaagcaacttcagctctccctcattaacatggccggttgtcttcttcgagaagaaggcacttgcaatgcaaaggtggagatacctaagcatcgggctccttatcaacgaactcttgcccctagatgacttgtaggggagtggaccggcgattgtcaaccatagatcaaggagctcgtccttgctgaagttttggcggattccatacttggtggggaacttgaaaacaacatccaactgcctaatgggaaccgagtattgaattccaaacaccatgaatgtgatatagccaactcccttatgcagctctctctcccttttttcagcatagaaatgaagcttcaaagtggctaggaattggcagctctcagttttgtacccttcacacttgtaggagaaaaaggtctccagcttggccatctccatgaggtagtcaacatccctacatatccccaaagcttgcatggtaggtctatggggatatcttgtcccctcaaaactcagctccatgagatattggtagtgctcttcaatggtaggttctttctttctcctcatggtgttccttcttctccttgtaggaactatcgggacctcttcatcaacttgcgcatcttcctcagatgcttccttctctatctcaggcacttcttcttctgcaactggctcggactcccagaccctcttgcctcttgctattttctcttgagcagccgcaaaacgacccatagaagaatnnnnnccatactcggccattgtactcggcctgtcatccgagtaaaaccaggactcgcagcttcctgattctttgactgattcttctcattaatcatctcaaaccctcttgccacggctcgagcagaggctctccttcttgattcctcgggattcatgatcttgggatgatttactgcaggtagtcaccacaaaattgccaaaggtaggtcaaagtagaagagaaatttatgtttaagaatgaacaaaggttgcaagagaagttttgaaaaggtttgtaacaagagattttggcaaagtttctgagaaatctagagaagtgagagtaaaaacttgaaatgtttggagagaagaagtaaaactcgaaatttttgagcaaagagagagtgtgagtgacttagcttgttgagtgtggttttatagacaagaagatttgatcctagccctccaaacaccttggatcatcacccttcatttggtcaaggggacatgtctcactttttgcagcagactctttgaagggctttggggagcaggatttgattggtggggcccagcaaattcgaatttgaattgtgttgacctcgcacgtgtgaactcggccgacatactcgacgcgcgtgtcgagtacggtgttgggcctgatgggcttctttttctgactcggcttcgggccgagtgctgcatcttgttgggcctttgaacagtgaggtccatactcgaccttgggccgagtggtgtgggccgagtactattcaatcttgggcatttggtcaattgaagcccacactcggcctgtagccgagtagtacggtcgagtgtggcctgaaattctctagaagtctttttccctgaaacacttaaccaaaaacatcaaaaataacaagaaagcaatatatacaaagatagacatgggacttcctcccaagtgagcttgtttaaagtcactaagcttgactctcacaatgtttaggtagagaaaagccgagtggcttggtcttggtcacatagctcggctctaggccgagtggaaaagccgagtggcttggtcttggtcacatagctcggctctaggccgagtggcgtggtcgagtagcttctcttcatccttaagtgcacaactcggcctagagccgagtgccttggtcgagtaggctccttgttcttcacgtgtgctccactcggcctccagccgagtacataggccgagtatacttcaaatccttccttaggtcccccgaactcgagtctgtccatcctttgtgctagaaacctccaagttgagtccaaaagtacctaattcatctgcaaaacactccaaatgcaagtatgctatgcaatgcaatgcaaaatgtgcaaaagaaggaaaagagactaagaatgcataaaaaggggcatgaaactaagctaaatgcatgaaaaacaagggcttaaaaaggttaaaatctagtgttatcaacacccccaaacttagctctttgcttgtcctcaagcaacaatagaactaggctaggagtgaggtttgaaggtggggattcagaaccaaaatatgcatgtaaaatagatagtctcaatgtccatgttgctagttctagagtgctaggttgaatgatctctacttaaaaactttagccatcttcttcacaacacaacctaatctttcacttagtctattcaagccttcaaatcagcaaattccctttaacatttattaagcaagagtcatggatcatactacacaatgcatattaatctcatttggctaaggacaaagggtcaagagacaaagatggtcccttaaagaataggctttagtgactagggatctctcaaaaaaaatgattaagctctagtagaatgctaaaggtaagtcccaagctatgcttacaaagataagatcccatctacccaaagtatgatcaatgaagacctaatggcaatcccatctcccatcctaattaagaacttgactctacccttttgcattcatgatcttttaaactctttcttaacccattcttttctttttctcttaactctaggagaagttttcttaattctttgatacttctagcgagattggctttctttagcaacttaggttctgttttaaatctcttttaatcttagggctttttacccttcttcattagctaacaagaacccaatctttttctttaaccatctcaaatccttcactagactttttctaacttctttagcttacttctcctaaaattcttttcccttttcttgtaaacaatgaattcaaccctttttctcttttaaactcttcccaacccatagtataagtacccacctagtctaatctagtccggataacgcgaattaaaactacatgaggtactatctttgtcgttacaaacctaacactttctactaagcttgatcgaaataagacctcacaaacactcacaagtgatatatggcttgaaagaatgcttaggttagggtattggaaactgctctaaaaatgagagttagctacttggattaacaaagggtggtgaagtgaataagataatccaagtatgtatatggtagccatgagttcacaaacaatgcatagacataatagttgcaaattcagttcaggttctaatagatagggaatgacatcagattagcgagtttcgaatcaaaccagtatagtcaagttctaaattcaaaacagggtgcagtcttactttagagaaacaatcgtttatgcaacaaagaactaacaacttgggcattgaacttacttccctggatcaaaacatccttaacggtttgaaatcatcattatccctatgcaaatgagcaatcctaaatgcaagcactttatatacattcctaaaatgaaatgcaatctacatgacactctgtttttgatgaaatcattttctgaaaaaatttcaattttttctggttttttctatgccttagatgatgtaaaatttgaaataagaaaagagaacacaatgtcaaacatgtcttgaaccctcccccaatctgagaaagaattcaagaccaaaacaaagaacgaacaaagaaaaataaaaagctatggtatatacaatggtggtagtggtgttacctcaacggttaggtgaagtaggcggagacaaagtcatccatgctctcctttgtgtagctccagggagcgggttgtgttgtacttggtttagctagatgctcgaccctttgcttgggttgttgatcgagtggctcctcaagtggtgcggtggagtggcttgccccaacatccgatttccttgttcttctgcgctttttcaacttgctcctcctttcctcttctctaggttcgaaggatgattgcctcagtggtaaaggtacaactggtgttcccttggctcatatgaaaattttcttggtgacaaaggcggatcgtaattcataggctcatggctagtggatccgcttctcccaaaaggcatgtctcgtggcattgttgtggtagaagaagaacatttgaacttgagttggagagcgttaaacttcttgttgagtgctgtgaaagccttgtcttgaagcttacaccagctttggaggaaaccaaggcgcttgtgaatttcctttgagtctttgctttgccttggcgcggagtactcctcaaagtaaaattgttgtgttgcataagactcgtccataggttctgcctcattatttgaatgttgaattggagcttcatcatcattcactccttccatcggcacaacttcatctccggagacatagagggcttatattggtgggcaaaactctatgttactgccttctccaatcgaagtagaggcagggtttgggaggagaaagacagattgtcctgcttcagggtgatcaaacctaaatctatataggtcattcttctgctgcgaccaaaagctctttgaattgataaggtgctgcaaatcaatccatctcggggaaatcggctttgaacgtagagg

SEQ ID NO: 1790 - DNA, 14206 bp, Arabidopsis thaliana landsberg
ctagaggatcccccgagtctcaccctaaccctaactgtacccatagagaatcctaatgccgtctctaaggaagaaaattaggttaaagaggaggagaggagtaggaacgacggaggagccgacaacaaagccaatcgatgggggaacgatggaggagccgacaacgacagaggagccatcatcgacggagcaaaatccaaaattgagggaggaagagttgaagaacaatcccgaccatcagtccggttttagaggcaatggaagaagggaagtctgacaagaatgaggaagaagagcgtgaagaaaatcaagctttcaactcggttctatattcacgaagtgttgactacattagataagttgcagcctgcaatgagcaagtccgagagggaatggtttgagaaccatccgagtttccaacacatcttccacatgccaagagacccaaaccacctacttattgggatgtggatgctccttcttcgcacggcgcgcattgaaaggaagaaagaagcgtggttcatcgtcaatgccggtccaatccgatatgttatattggaacacgcattgatatcgggcttcaattgcaagaactatacacttgggtataaaaatacgggaaatttggatttcaagaagaagcatttcaagaatattgttgtgaaacgcgaagacgcgagaaagaaactcataggaatggtaccggcgggtgaaagatcaaaagaaaggttgaggatgatggtcttgtatttcttaagcagcattatcatagcgcctatcaagaccggagataaggcacctcaagtggatgaatttttcctcaaggtgatgagtgatctcacgttctgtaggaattttcagtgggggaggtattctttcgattacatgttaggaaccatctcacacacggtgaatcattttaatggttcagtcaccaacaacgagaagtacatatggccggttccgggtttctgtcttccgatggaggttagttacaacttatagaataggtgattgtttgcaatactgataatactgggaatactatttgtgatttaaaattgtttttttattctgtagcttcttgcattcgaggcaattccacagttgagggaaacatttattgaggaaattgcagaagcagatccgggatgtcctaggatgtgcaaggtgaggttcaagaagaaccatttgaaaggctttcctcttgataccatttatgtagaattgggtacaactcaggttagttatcttagatatactgtttcacaaacgaatgttattctattttgttataataattcattcataatgttgatctttacaagtcattgattctatcgtcacacctggaattaaggagcacaaactcatgaaagaaatcactgaagaagaagacgacgttgacgtggcttatatggtggttgaaagttgggagaagcgtcgtaaagtgggccgtgtaatcaggtttgatgagctctacaagcatgatattcaagccctgcagatcatcgcaggtccaaagattgcaggtgcggaggatattcccgcagtaggtggacaagaactcccgagtttggtttctgtggttgagatgattgaaaacttggataagaagatggtagaccagctgaatgaaattataacaatgattttatgatttgaaaaaaagagttgaatcgttggaagcattcaaggatgagcagaaagcagaggagggaaaggtacgtattgataattgcgtaatactgagtaacactgtgataactagagtataattgcgtaatactaatataacttcgttcaattgcagaatcaagatgagatggaccaagaggaggctggtgatccgaaagagaaggatcaagaggaggatgttgttcaagagaaagatggtgatcaagaggaggatggtgtcccgaaagagaaggatcaagagaaagatgatgtcccgaaagagaaggatcaagagaaagagaaggacccgaaagagaaagagaaggacccgaaagagaaggatggagatccttcaaaacccgtggaagcaaacgtcacaagaaggatcactcggagaaccaagaattgaatttggttgttcttgttaggatttgaacttggttgtacttgttaggatttgaatttggaatgtttggttttagaatttgaatttggaatgtttggttttaggattagaatttggtattcttggttttaggatttcaatttgccttgtttggatttgaatttggtatgcttttttttggatttcaatttggatatgaattggaatttgatatgttaggatttaatgataatacacaaaatacaagggaaaactaagatttaacaataatacaaagaatacaagggaaaactaagacttaacgataatacagataatataggggaaaactaagatttaacgataataccaagaatataagggaaaactgagaatacaatggaatactgagaatacaatggaaaactaagatttaacgatgataccgagaatacaagggaaaactgagaatacaatggaatactgagaatacaatggaaaactagatatccataatactgggagtactagagaatactcaataaaagtcttacaaaacaaaggcagaaattaagttcacacaaacccaataattcctcactctccacaacaaactctccacaaagtccccatctttttttggatctcatcaaactccgaacgcacttcttggttagagtactccaagctttgaatcttttggtgatggttatcaacttgctttcttaacctattcacctcttctaccatagctttatcccaaagtttctgaatgtgtaacccatcattctacaaaacatgaattcttattgcttaatcaattattctaaaacaagattgatgatatcttcaatttaccttataatcggtgcattcatagtatctttttcctttgtcaccgtctttctcagagattatgtcaaggatgcgtccaccacaaggacaaattatcggaattccttccatcattgcgacttcttctagttgttgcattatcctcttagcgctcttcatctcatcataccatgggtcactctcacacaatcgatccatagctgattgaaggaatttcgagagagagagaatgatttgagatcgagagagagagagagaattttgacgagagagagagagagagagagagagagagagagagagagagagagagagagagagagagagagagagagagagagagagttcttttagagtaaaggtgatttccacgccggcgccgtaacttatacattcgcgccgttgttttagatttagctgtaccctagttattagttgtacaaaacgtccacgtagttgtatttttcgtgttttccagtttagacagttttttatatcattcaaaatgatttatctagttgttcagttgagagaaatctatcactattaaattctaaaggtttagcgcactcacatgttaacaatatataaaattgcaaaatttcaatcctaagttggagtttatatcaaaagttagctttaaagtataaggaatatgtaggatagagtctattaacttgtattttgaccaaatattttttctccttatttaattcgtttaaattaatttttaagagttcttcatctcttcatagtctatttaatatttgatgtttcaaacaaacataaattcgaattttaatatccttcaatagttatacttgtattcccagtattatcgtcaaagtcatagtagtcacctgtattctcagtattatcgtcaaatcatagttttctcatgtattcgcagtattatcgttaaacttgaatttccagtgaaataaaatatagttgtacagaaagaaagtctagtgttacatagttgcacaacgcgaataagatttacaatgattaaaatcaaatactatgggtgccaaataacaaccattgcagcggctgcctcaacctccttttgttttcagtcctttgacgtttgggacgtctttctccggtggatggaaacctaagcacttttgttctacccttcttcatttttcgaggcagaggtaataccttcaacgctttgatgtcatccgggatatcccactgtgatctatccgggactaaataaatagtcctataatacgccaatacccacaattccgcccaataatactttgaaaccaattcatgtaattccatacctcgagtccttgttgtatcactttcgaatgcaatgaaagcggctaacgcatgaatacatggatacttttggatatcaaacaccttgcaactacaagttttcaagtgcaagttgaccaaaaattcgttcccttctactccccggacattgtactcgagccggaatgtgtttagctctgtcacttttagtttctcagcatgaacccataaatcatgcaagtagttctccactaaaggcacaaacttattatcattagatcctggagcggcatctttgcgatgttcattaaccaaacagaaattttgggccatgttcgcatctagcatgggtattaaagaatacttccttgcattgagaaaaacagaattcaacgattccacacaattgctggtgtccaaattgtatcgttcccccggaaaacaacacctagcccatttttctttcacggttgaatcctccaaataattcgccgcggtaggatatctcaccttgaatactctatactccctctcaaattctgaccaggtatatatccgacttaactccatgaatctccaagcgagaacgtctctgttgatgttagtggaatgagctttgacattttgggataaatgccaaacacaatacccgtgatgagccgcaatatacgcattacgtatgcccttgatgaggcttgaatttctgtcactcataaataccaattctggagtatcgggtacaacacttagcagcttctcaaagaaccatccccaactagcatcattctcaccgtcgagtacgccaaccgctatgatataatgatgacgatttggatcttgagctgaggcaaagactagaacaccaccatatccgttcttcaaatgtgttgcatccacaattatcacttttctaatcacttgaaagccttcaatagtagctcccaaagctatgaatagatacttgaatttcccgctctcatccaatttcagatttgttattgtactttcatttacccttttcaacatgtacaagtaacaattgatgtctttgtagttatcttccgcgctaccttttaaatcacaaacggcttgcctttcccttctcaatgcggtggaatatgatatcttcacaaataatttaaattgaacaagctccatgataaccttaggaggtggagtttctaaaagaccagaaaaaatatcatcaagaagagctgctactaattcaggggtacatttcctcttcctcatccgtgtacaactcttactaattcggcaacaaatagtgcattttgttgtaccttctaatagagtaaatacttgtatcttgaagacatgaagctcgtatacgccagtcacaattcgcttttgaacactttagaacataccgctccttatcagactttttaataacataaccaaaactgttagcaaatgcacctttgtccaccacttcctgcattgctgccctacttggaaattcttgtcgcaaagtcaaaccgataccgtcttcccattctttcttaaactgactagattctacatgtttcaattgaaaaatatgtgtagtatgacttagttgcactagtattaaccatttacatgtagtatttatttggtatagtagtattacccatttttatgtagtatttatttggtacagtagtattacccattttcatgaagtattattagttatacatgtattatacagataggtgtagtatgactagttatacttgtgttacccagaattgtagtataactagtacatttgacagagtttttgtattgttgtcgtatgatacaatggtggagaaggtgatcatatattttagatgaaaagattgaacgtacagcttgatgatgaatgggaaataactctctctatgttagaaagtaggatttgctcgaaccttggattatatgaaagtaaggttaaattgcaaatgaagtacaatgcagtgatgttgggaccaactcaagagatacacattagtgatgatgaggatgtcggtgtctatatattttcaggtgaaatggttagtagatatcctttgactgttgacgtcatcactccaccagaattgcccgagaaactgtcgagagtggaggtcatcaataaaagttctcttggtaagaactatgctgatttgggttcaaatgaggatgaaatgagagataatgcaaccattgtgatgggtgatatgtctataatttgcatgttttcagtgtccattcatcatcgttttgagtccagtttcgtatcattcatcattgttttatatctttctcatcattcttgcatactttgcatgattaggatagctttgcatacatatttcatttctgagttgttttcaggttatttggagctgtttgcaagcaaattggaagaaacgagctagaaccagaagatatactcgacccccaggtcgagtgcatccaacaccatactcgactaccaggtcaagtaacattgaggccattcttctcacatactcgaccccctggtcgagtatcctcatcgcaggccactcgatgacgccactcgaccccctggtcgagtatcacttcgccacaccacctcacaacactcgaccattcactctaccacgttactcgaccccctggtcaagtatcatcactcaccaccaacaccatcactcgaccaagcactcgatcacatcttcatagtctactcaaatccgcactcaaccagacaagctaagcacaaggaagagaagaggagaagacgaagtgtttggaagcggcctggagctccaccggatcacaaagcccatctcggcccattatcactctatgggccgggcgattaggtaactggcccgtctactatcattatatttcgttttttataaataggtgtctgagggttttgtcctgggcatctagtcgacattgagtttttgcttcagttttattttctgttttactcttgttgcgccgctttgctctacaacttgtaattcgagatttttccaagttattcagattccgcatttgatttcgtctatcatcttgtttctctactctttatctttttacttatgcaatatacttgtttatctacgattatgtctttgagtatgttgtctgagtagtgacttagaattcttaaggatgggatagaatggttgtggaatccatagtctgtagaatggttaagttttagaattgattgaatcccttctggactagttgtgtttactgcttgtttctgtcggatcaactggaattcgatccaaagcattcccgcacctagaaggtgttcgatgaaatgcttggtagaagatgtttgatggagtgcttgatccactagttcctgagatactcgtctctatcccaagggattggccatttagagcggtagttgactttatcagtcggttcttattgcctacatagttagattccgttaatgagaattagtctgggctagctttgcttaaggatttctatcacgggagtgaattaatctgttgttgaacctgttgtcaagggatagcttgattgcgcttgttaaccatccgaataggctaggataccactcttttcgattaccccatccttaggaattgcttgggatctgatttctctattttatcgttgtcacttaatcgttctcattgcctgtttcttagtttttgcaattactcgaccaacttactcgaccacacccagtatctggcaacagactgtgcagtcgttttcagttgtcttattcctgtctgttactcgacctgtatactcgaccacacccagtgtctggcaacagactgtgcagtcgagtacggttgtctcatttcctgtttgttacacgaccacatcttacttctggcatcagcctgttgtggtcgagtgattttagtaattctgttttctgttttctgcatgttcgcttaggactgttagaaaccccaaaactgttattgcttagcttgacttagtgacttctgatcacatcttatctcacccatttggattgacacctaaaatactacaacgacatgattggtgttttaggataattgactaaaaacctattatcagaaacactaacaaatctatttagtgcttcttagcaatgttttgttggttttagcctcttttgggagaaaataggtataaatgttgtctaaacacccctaatccatctgtaactcatataattagtcaaatgcattgtattgtgataaattttgaccattggttttagcctcttctagaggaaaatgggtataagtgttgtctaaacactcttaatccatctctaactcatataattagtgaaatgcatcagattgtgacacattttgaccataaaaacactaacaaagctatttacagcttctaaacaattttctgttggttttagtctcttctaggagaaaatgggtataagtgttgtctaaacgctcctaatctctaactcatagaattagtcaaatgctttggattttaacaaaatttgaccataggtatgagtgttgtctaaacgctcctatttagtgtttctcacccattttttgttggttttagcttcttttgagagaaaatgggtataagtgttgtctaaacactcctaatccatctctaactcttataatttgcaaatgcattggattgtaacacattttgaccatagaaacactaaaaaaactatttactgcttttaagcaatgttttgtttattttagtttcttttagaagaaaatgggtataagtgttgtcaaaacacccctattctatctctaactcatagaatcagtcaaatgcatggtagtgtgacacattttgaccatagaaactgatatgtctataatttccatgttttctgcattattcatcatcattttgggtctactttcatagcattcatcattgtttcatatcatttctcattattcttgcatactttgaatgattaggatagctttgcatacatattgcatttctgagttgttttcaggtgatttggagatgtttgcgagcaaattggaagaaacgagccagaaccagatgacatactcgaccaccaggtcgtgtgcatccagcaccatactcgacccccaggtcgagtgactttggagccattcttcccacatactcgacccccaggtcgagtgactttggagccattcttcccacatactcgacccccaggtcgagtgactttggagccattcttcccgtccactcgaccaccaggtcgagtaacctcagctcaggtcgagtatcacttcgccacaccacttgaccgcactcgaccattcactctaccacgttactcgaccccctggtcgagtatcatcactcaccaccatcaccatcactcgaccggacactcgatcacatcttcacagtctactcaaatccgcactcaaccagacaagctgagcacaaggtagaaaagaggagaagacaaagtgtttggaagcggcctggacctccatcggatcacgaagcccatctcggcccattatcactctatgggccgggcgattaggttattggcccgtctactatcattttatttcgtttggtataaatagatgttttagggttctgtcctgagacatccagtcgacattgagtttttacttcagttttatttttctgttttaccctactgcgccgcttttgtttctgcaacctgtaattcgagatttttccaagttattcagaatccgcatttgatttcatctgtcatcttgtttctctactccttatctctttacttatgcaatattatcgtttatctgcgtttatgtcttttagcatgttgtgtgagtagtgacttacaattcttagggatgggatagagtagttgtggaatccgtagtctgtagaatggttaagatttagaattgattgaatccccttaggactagttgcgtttactgcttatttctttctgatcaactggaattcgatcccaagcattcccgcacccagaaggtgatcgatggaatgcttgatccactagttcctgagatatgcgtctctatcccaagggattggccgtttagagcgtttattgactttattagtctgttcttattgcctgcatagttagattccgttaatgggaattagtctgggctagctttgcttgaggatttctatcacgggagtgaattgatctgttgttgaacctgttgtctaaggatagcttgattgtgcttgttaaccattcgaataggctaggataccactctattcgattaccccatccttaggaatttttcgtctatctgatttctctgttttatcgttatcgcttaatcgttctcattgcccgtttcttagtttttgcaattactcgactaacttactcgaccacacccagtgtctggcaacagactgtgcagtggagtacagttgtctcgtttcctgtctgttactcgaccagcatactcgaccacatccagtgtctggcaacaggctgtgcagtcgagtatagttgtttcatttcctgtgtgttactcgacctgttactcgaccacatcctacttctggcatcagcatgttgtggtcgagtgattttaggggttctggtattgtttctgttttctgcatgttcgctaagaactgttagaaaccccaaaattgttattgcttggtgggaaaagtcgtttcctcaaggctctatcaccttcttggctaagtttttctcaaactccaggactgcgagactaaggaatgatatttccggtttcacacagacaaataatgagactttctgcgaagcatgggagcgcttcaaaggttaccagacacaatgtcctcatcatggtttctccaaagcttcacttctcagcaccctctacagaggtgtccttcccaagatcaagatgcttcttgataccgcttctaacgggaacttcctcaacaaagatgttgaagaaggatggaggctggtagagaacttggcttcatcggatggcaactacaatgaagagtacgatagaagcatctgcaccaactctgattctgatgagaagcaccgcagggatatgaaagctttgaatgacaagctggacaagttactccttgtgcaacagaagcacgttcattttctgggtgatgatgagacgttccaagttcaggatggggagactctgcagtctgaagaagtcagctatgtgcaaaaccaaggatgttacaacaaaggtttcaacaactacaagcagaatcatcccaatctgtcttacagaagtaccaatgttgcaaacccacaagatcaggtctactcttcaaagctgtagaatcaacccaagccctttgttccatacaaccaaggtcaggggtatgttcctaagcagcagtatcagggcaccaaccagcagcaacttccaccacctgggttcacacagcagcaaaaccaacaaccttcaccaactccggattcagacatgaagaccatgctgcagcagataattcaaggccaagccataggagcaatggaaatcgttaagaagtttggtgaattacacaacaaagttgaccgacacttcgtcgaacttaacagcaagtacgaatccttgagcaccaggatacgatatcttgaaggcatccccacttcaccatctgttaccaacaacctaggccagcttctagggaaagcagttcagaaccctaaaaaatatgccaccgctcacgccatcactatctgccatgatcgagagctgccaactcgacatgcctctacctctatcactagggacagtgaagttcaacaaggggaggttttcgttcataatgaagttccagctgaaatagcaatagaggagctcatactcgattgcagtaatcgatctcaagctcaagtagtacctccttctcttaaaaagcatgccgctactaaaaccaaggataaagtctttgttcctccaccctacaagcctccactaccatttccagggagattcaaaaagcaactgataaagaagtatgaagctctcttggaaaaacaattgaaggaccttgaaatcacaatgcctctagtagactgtcttgcgctaataccggactcacacaagtatgtaaaggatatgatcacagagaggatcaaagaagttcaacgaacggtggcatcaattcaagagtgcagtgaaatcacccagaagatgattgttcaagaaaagttggaagatccgggatctttctctctaccatgctctattagacaattaactttcagcaattgtctatgtgatttagggacctcagtcagcttaatgccactcaccatcgcaaggaagctgggattcgtccaatataagccatgcgacctatccttgatccttgctgataggaccttaagaaaaccctatggcatgctcgaagatctgcctatcaagattaatggagtagaagtgcctacagactttattgtgctcgagatggatgaaaaacttaaagatcctctgatcttgggaagacccttcttggccacagttggagcagtcatcgatgttaagcagggaaagatagatcttaatttgggaaaggatcttaaaatgaagtttgacatcagagatgatatgaagaaaccaacaatagacggccataccttcttagttgatgaaaagggtcagctagctaaggaactattagaagagcctgcttctaaagatcaggttgaaactgctttgactaggattggtgaagctagacatctccctagtgagactttgagctatgataagtcattagactcacacaaggcagtagtaggaaaagaattctttggatcgaaaacagaggttagggcatcaaacaaggaaatctcaactcatactcgaccactatgctcgaccgtcaactcgagtaacctttcaacttgtccagagaagtcatgttccaccaaacagctccagtcacgcattttgcaatcaaatgataggttagtactcaaggagaagtctatatggcaggacaaagctataagagagttaacacacacggtgagagagctgaagaatcaaatcaaagagcttcatggaaaagcctacaaagcgcctctcgacatcaaggatgtcccaaatgatgaagtaattgctttggttagcaaagaagaatgtgaattcacattcaaacggtttagagaagacgactatcgagatgatcaaaaggaaacttacaagaaaagggacattgagtactcaactacagatttgtttagagagcatgttgagtacattgctgtatccattgaggaagaagaggagatttcaattcctctatatcaccctccttaagcctaatgagtgtgaggagtcaagctagagacttaaaataagctcacttgggagaaagtcccatgactattttttgtaaataaatttttcttttcttgttacttttgatttgttttggttgtgtttgtggttctcaggaacagaggaacgaggtggagatagagtaaaaattcaaaattctactctatctcaaaggtggagatcgagtatatcagtcaagtggagcccaaaaattagaaaattttgattgaacctggaacactgcgatcgagtatcccgcaccagaggaggaagaacaacaacaaggtcctagtattccatgggattacacccagagaggagatggacgactacgtcttcagcgtcttcaactgaggtaccacacccaaccatcattgtatataccattttctgttttcgtttcttttagtgtttcttgaactcttctttagacttctaatacacaagagactatgtagtttaaagtttgagggaggattcaagaagtatttaacatgtttgctagtgagtcttatttgcatcatttgagtcttaacttcatctaaggcattgaaaaaaccataaaaaaaattgaaattttttctgaaaatgtattccacaaaaaaaaagtgttcatatagttgcatcacatttatgattgagtttaggatgtttcatataggattgtcgcatatgcattggggattatgatgagatagtc

SEQ ID NO: 1791 - DNA, 5210 bp, Arabidopsis thaliana landsberg
  unsure (1)..(5210): unsure at all n locations
tgagaagggatgtcacgcaagaccaagcaaggtttaatgggagaatcgatattggtcagactcatgtgaaaatatatttctcctccttcgtcttgtcaatttattactctatctcttgtatttttcaattgttttggtattcacttcagaaaatgactagtcttcgtttttatgtgttgagccattttcatttacatgcatctaaatgatctactgaatatggatatcgaagagatttttagtataatggtttgtgctagatcctttaacaaaaaagtaaatggtttgtgctagtgtttttgttgtattgctaatttgctatccaattcatagcacacatgttgttgccaaacaaatgctaaatccattttaaaagtatcaactagtaaattagcttaacaaattttttgttaacatgtttatgagatgtttttttaagaaaaaaaaaactcatttaacatgattacatttagggtttgattggttgttttaaactgaaaattgtctgtttgcaaaaatgtttggaatgattttctttttgcaaaaatcgacgattattgcgtgacatgttgaagtgttgcaatgctggaggttctgctaactaacaagtaataatcgtataagtgacatgatcttccattttttagagatactaaccaagaattgtaaaaccaggaaaaaaaaaacactaaccaagaattgatgattgtccatctagactaaagtagtatacaaacaaaacacaaaagatattttgttctatttttggaataactcttatccatttatagaaataattagttgtttaatcaaaatatcacatgcaaattgatcgtatgcgattttagataaattgacatccactcagtaataaacaaacaagatactctctgattacaaaataatctctgttttctttcgtgtcatttttctttatcactcatgctattattatatttaaatttaatataaaactgttaccatttactattttatttcactgtttgacgcgaaaaaaataatcagcataagatttacccaaaaaataaaaaataattgggatacttaagcaatgcatgattaggctataatctagagagactaataggatgcttacgtggcagtctagggagcttcgctgctccaaaaaccattcccctaaaattgaagcccatagactattagcgacttcactctttctctttctttctctctctctctctcgctcttctaattttgccctcaaaaccctccaattattacgaaaacgccactgctctctcgtcgggactccggtgaggccgttttggccggaatctgacaagggatatggatgtaggagttactacggcgaagtctatacttgagaagcctctgaagcttctcactgaagaagacatttctcagcttactcgcgaagattgccgcaaattcctcaaagagaaaggtttcttcttcttcctttctccatttttttccggtcttattgtcttcgacggtaggatcttcctcacggattttgctgagaagaatcgtacatagtcaattttttgaaattctctattcttcttctctccgagctttttttttcgctctctggagaatggcggctgacacgtgtcgaaacaggaatgcgcaggccttcgtggaataaatctcaggcgatccagcaagttttatctcttaaagctctctatgaacctggagatgattccggcgccggaatcctccgcaagatccttgtttctcagccgccaaatccgcctcgcgtgagtgttgttcttcgattttgtttcgatttacagagaaaaatctaagttctgaagtagtagagaatcgtttacttggttggtgctgatttagggaaaattgttgttctgtgtgtactgctgttttgttcacaggttacaacaacgttgattgagccaaggaacgagctcgaagcttgtggaaggattcctttacaggaagatgatggtgcgtgccatagaagggattctccaagatcagctgagttttctggtagttctggtcagtttgttgcggataaagatagccacaagactgtttctgtttcccccaggtttacattttcttctatagcgttttgactttgtgtggtatctttcttctgctttcatgcctcaagaagagaactgatgcattgtgacattctgtttgtgatcttagaataagtacttggtttgatatcagtgtcttagacattgaaaagtttctatatgaatcatggttttgatggtggattggtcacacagaatttaggttaaaagagtcagatagatcttcttggttctgtgttactctttactcttctgttttgaggattggtatgatgtgatgtgattattgctagtgaacgataaatcagttacttagtccattagtctatatgatttgtgaattctgcaattactaacaagagttttaggggtagttcatgtacaaagtcttattgatattaggtgcatgttgttttataaacaaattactactccaatgttatttaattaagttgtttaaacacgcttttttnnnnnnnnnnnnnnnnnnnncagctgaaacaaatgcggtggttgggcaaatgacgatattttatagtggcaaagtgaatgtatatgatggagtaccacctgaaaaggtaaatgaatcacataattctgtccagcctgaaaatataaattttgatggtatggttttgatcattcatcttgtgtattgatttgcaggcccggtctatcatgcattttgcagccaatccaattgatttgcctgaaaatggtatttttgcttctagtagaatgatttcgaaacccatgagtaaaggtaagcatttgctaaagtgtctgatctgcttttcagttgaaagattgatgattcagacttgaaatgagtttttttttaatgtataatctaacttgaaaaaatgactagagctgctgcatctcaagatgagtctttctttctttcttatgtcaaacacggcctttcattttgtccaattttgaaaggaggcattgttaaattaccaaagaagcatgtctaaatgctgtaattgctgctacctctactagcttatgtgtctacagatgcctcgtgcccctttttttgaaattgtgatttgattttttcagagaagatggtggagcttccccaatatggacttgaaaaggcacctgcttctcgtgattctggtacaaacagtactcattttaccttaaagatatgaaatcctattattcaatgatgctttaaaacacctgagagcgaaatttggtccacctcttcacctctacatgctacgctaaactacttgcttgttctgcatgatatacgaccatgaaattctgttaatttaactattgttctttttgttggtcttttctgaagatgttgagggtcaggcgaacagaaaagtatcgttgcaaagatatcttgaaaagcggaaagacaggtagttgttgctattatgctgtgtgcttgcttattccaaatcgatgaatactgatacctttctttctgagcagaagattttctaagaccaagaaggctccaggagttgcgtcctctagcttggagatgtttctgaatcgtcagccacggatgaacgctgcatattcacaaaaccttagtggcacagggcattgcgagtcacctgaaaatcaaacaaaaagtcccaatatctcagttgatctaaacagtgatctaaacagcgaaggtatgaacaagcatttatcaaatggttccaatgatctcccttaaaactctcattcgcttttttatagataattaacaaggtgccaaaagaactggagatggtactacgggtcaaaaggcgggaagaacaatttcatgttcttataacatgttagccatgtacaaaaagaaagaaagcaaacaatgaatgttctcgttcattgtggaagaaacatgggttaaagatttgagctggatcagtgcgggtcttgtatggttctgttttttttacgggttgcgtccatcttttttagtctgtagttttgagtaggttagagagacgcgagagagagagaggatgtggcggtttgtattatgtaaatgcttgtcttataatgagagagaccttattgatgataccaatctttgaggtccaagtaacacaacttctttgtgattgatatgtatgagataattaatttgtctattttcatggcatgatgtatgtgatatgtctgagatttgcaacattcttctataaagttgagaaataagggtagtttagtctttttaaccaaagatttttatttatttgatcttttccctgttttaaaaagaagaatcgagtaatcgcgtggttttgaagacgaagaaggaataagacatcacgaggaacacgatgggtgaagcggtcaaggtatgtttttatctttgtctcctctgcttctgatctgttaatgccaatcgataattcctagttttgcgatgcaagcatgaatcgccgattgttatctgagtgatttgattcattttcgacgattttcgaatcatcataactacttcttttgctcaaatctcgcagtcagtttaatgcctattcgtattcaatttagttatgcaattgacgatttctcgaattgtctgaagttttgaagctaaaatcagattaaatataaaatatctgaacattgcctcccaaggaatctaatcccatcttgatgtgcttttgcttaggatgggagagaagaagtgattcaagcttggtatatggatgatagtgaagaggatcagagacttcttcaccacaaggatcctaaagagtttgtatcgttggacaaacttgcaggtctctttgtgtgtttcaattcaatgttgttctctctgcttctctattttgtttcacatgtaatgtttgtgtgcagagctgggagtacttagctggagacttgatgctgataactatgaaaccgatgaggatttgaaaaagatccgtgaatctcgtggttactcttacatggtttgtggtctttatttatttactatcccactagacttgaatgctagatgtttatttttgtccaagtcttaatttaactctctaggggttttctcaatcttggtttgatgattaaaaagtgttcaaaatgcaggacttttgtgaggtatgcccggaaaagcttccaaactatgaagtgaaagtgaagagctgtttcgaa

SEQ ID NO: 1792 - DNA, 1169 bp, Arabidopsis thaliana landsberg
tttaaggaaaactttggagagattgataatgttacacagtttgttttttggagtataaactataaatacagttacaacacaaccataatgccaaagccacacgaatcaaagtttcttcacaagtggatctgtagatgacataatatccaacatgagacagaaagctctctttattgtatgcttagtttatagaaatctgatgcataagactgagaatcctctaggctgacgcgtctatgacaccaccttcattcaccttcacgaaattatcgatgtactctttcctgtaaaatagccgtttcgatatccataaacagcttttctcgtgtcttttcttggatgaacttttgcagagtaagtttttgatgagacaaaaggggaaaacagaacattgtaccttgcagggaggtggtcgtgtgggcgattgtatggtgtccagaccggttcacccacgaaaagccgcattgcctgctcaacaagatatttcaattttctaatcaaccaaatatatatatgatgaattaaccactctgaagaagctaacattgcaccttgatatagttgtctgagtctacggtgaagcgatgatatattccagcaggtaagactatcatacctcccttctttacccatactctaatccaagcttcattgcgatccctcacatcaaagtaaccttttcccaaggaaatgaaacgttgagaatatagataccgacttaaatcaagtaaagcagccaataaaagtacttaccgcttcctgcaacgcagtaacggatctcttcatcagtgtgcaaatgttcttcgaaaaagctcttcactttcacttcatagtttggaagcttttccgggcatacctcacaaaagtcctgcattttgaacacttttccatcatcaaaccaagactcaagcacataaaacaatttgcaaatcatcaacgaattttcctaaatacattcagtagagtaagtgttacaattgagtaaaaccctagagagttaaaacaagacttgttcaaaagtaaacatctagcattcaagtctatataaacaaaccatgtaagagtaaccacgagattcgcggatctttttcaaatcctcatcggtttcatagttatcagcatcaagtctccagctaagtactcccagctctgcacacaaacattacatc

SEQ ID NO: 1793 - DNA, 3051 bp, Arabidopsis thaliana landsberg
caagttttcttacaataacagctatcacttgagcatcgatatgtcgccatttgaagtgatgtatagaaggcgatgtcgaactcctctttgttggacgaaagtaggagagaggacgagtttaataatcggttgatcgatgagactacagagaaaattcagttcatccgaggtaatatgaagaagctcaagatcaacagaaaaatgctaaccgaaagaggcgtgaagtggaattccaagaaggcaacatggtttatcttaaggtaatcgcgttataagggaaagatcgctttggaaaagttggaaagcttgcggtaagatttattggtccatacaaaattgagaagagaatcagagaagtagcttaccgtttgtatatgcgggaagaaatgagattacataaagtttttcatgtgtcgcaactacggaagcatgttccggatcctaatgctatcatacctgagccgatacaagagttgagaacaaatctcacctatcccgaaggacctcttggtattggtgaaagacgaatgcgggaactaaagaatagaaggattccgcaaattcaagtgttatgggaaaaaatcgtaaggttcctacttgggatgatgaggagaggttctcgaaaaatatccacagttttttgaaccaaaaaacgtagaggatgaagccggaccatctaatctttttggaattcgggatgaattctattaaggggggagggggagaatgtagtgactcgcgtaaggacatcgggcacggacaagagtcctaatttaagaaagttgcctgaatgcatggccatttgaccctaggtgcccaaaactcaatagcctatcataggggaagtttgtacaagaatgggctcgtatgagcaagtttgggtaagatcgtccgtgccgcgtgcgaagtttgccccgctaggcgttgaccgcatggcacgactaacttggggcccaagcaaagttgcttggagccaaatttgagttgtgtggagccgaagtttgtgtggccacgtgttgctcatcttctaaagcggcgagcgtgtcatcacgggctgataacacatggattactgactcgcccatgcgcttgacatgtggacatgctgactcgcccttgccttgcctatataagcccaactcgaccccaaatgatttgtgaaaagaaagtgaacgaaagtgagaggctgcaaagttgaagaccgtccgtccgattcaagttaaggttttgtagccgaaaactttgcccgaatcgttgcacgcattctgttggttagtgagtgagtttaagataatcgtctaagttatatgaattgtgtgaatggttatattggattgcatatgtgatctttagattcttatgctattgtttatggttgggtggttgtgttgggttattcatgattctatgtgtttgatttaaccatatgtttcataatctctcaaactccggggtctccgcacctggtgcatgtgatagaaggtaaaggccataagcataccaagatcatgaaacgtcagaccttcatagtgaaccgtgttatcgtagggtcttgtaacgattttcttgatcaccatgtagtgccaagaactcagagtaacaggtttagcacacttagttgagtgtctacacgacggtgtagcgtttggtaataatgctccggttgcatacctttgtggttgcaacgcaggagaacacgggagtgtgtgtgtttggtgttgggtttgaaggcagcatatcgggcccttttaaaaacttaataaaactagagtcttaatgcatttgcatttatatgtagtttgcttcggcaagctacatttcgttgccattctctgttgcgtgtttcatgttgggtattcgggttggggtaaactaatgttgttgcagggattcccgagctcactgagtaatcttagattactcatgattctacttgttttgcaggaaacccatagtggggaatagagggcgtggtggacaatgggaaacctggagtagttttttgccttttgtaaaacaagtatctttctattatgtatcgtgcttttggcactaggccttggccataaaacttataaatgtttggtaacatgttatgaaataaaaagggtttcttgtacaactttgcgagtaatgactgataatgacttagtccgagtcgacacaacacttaaatatcgcgagggttggcaagcataaacgatgttctaagtgggagagtggtcatcaatacgccggctaagggttgggattggttcccgaacctcgactaaatgttgatgatcaatctcaatgtggcgtcttcggggcccccgtgacttgtctggttatagagcgactcggggagcgttacagacagtgtgtgttctttcgtcacatatggagaaggctgcgattttgaaacctaaaaccaaaaaaaaaatctaggtttaacgaaaattgtgttcattaagataaggccgaaacatgaagagatgtgatttaacatgaacagagaagatgtacttgcatatcatgttcatatatatatatacatctgataacaagcatgaaattgttatcaaacaccaaattaagaaaaacaaaacaagggtaaaccacttcttacacaatctagcaaaacggatgaatgctactattcctttgctgatttcaaaaaagaaagaaataattaagcttctaggtattaattatttaggaatgtgcaaagaaacataaacagagaaaattaaacgaatcatatcaaagaaggagaaagagtcgtatctaaacactggattagaagaagtttagaaccttaaaagtcacatagaaggagttaaataaacaatgtaaccgtcgtgtcaatatgggagagtagggtatgatttacaagttaagtgacactaattaagcccgacctcacatgcaactcacgtattttgttttaaattcaagagaccgttgcagttactaataggatattcctgaaaaaatgggatatccggttcagatccggattataggattaaaaattcaaatgaaggcaagatatacaaaccaagggacgta

SEQ ID NO: 1794 - DNA, 394 bp, Arabidopsis thaliana landsberg
  unsure (1)..(394): unsure at all n locations
tagaatcacaaaaagattacgaatataatccaagataaacttcggtttaatctttcgaatgcaagatatggggagagggtggagatatggtaatgaactttgattcccctactgtgcgtaggttctaatgtactattattttagagaattttttattttcaatggtgaagacgactactcaatctacatcccacaaggtatcgacaatgttttatctttatcattgcataaacattcctttgtcagaatctgaatctttggttgatttcatgtgtgtagcgaaaacctacaacatcgataattgactcatacgctgcacaatatttnnnnnnnnnnnnnnnnnnnnnnnnnnnntcacacagacgattaaaaagatatttttaagtttaacacc

SEQ ID NO: 1795 - DNA, 2215 bp, Arabidopsis thaliana landsberg
  unsure (1)..(2215): unsure at all n locations
tgtaataactcttccttgcccttcttgtaaggaaacaataaccagctataaaaagcagaacagccactataataggcacaacaatggctatcactaacacctttgaattcccatcttttcctgcatttcaaagattatttgcttaaaaatcagatagaagaaaactctctatattggttttgccaatttcaagaaatcagggcaaaaaaaaaaacagaggaaaaaaacagagctctgaccagatcgcggaggagctgaaactggaggagtagaaattgacggtggtggtggtggtggtggaacggcggattcggtgtaaaacgcgtagatctcgtatcttgaagtacagctcggattaataattcttgcaccaattctgtcagtaggtatttgattgatgaccagttggagacaacgcgaacagtcttgtctcgtgagatcaggtgtgcactgaaccagtccatagaaactctgcaacgcagtaaaattgttttttctcgtaccgaattttttggaactgttcaaggctacggtggcggcttggttcagagtaggcaaaaccaaatcacttaacaggtctagttggttagatgtcacattccgggtgttaaccaagataactccaccggtggttattagtgtcgagagaatattctggttagagtatctaagtacacactcatcgtaataaagtgtggcttctttctggttaggacaccgagttaaggtgtcgttgacggcaaaggtgacgcatttacggcaaacttccggcgagacgtctccccggcagttgaaaagtccggtgaccctgtcaagggcttgtcccaccgtggcgttttggaatccggtggagtaagaggcgttgcgggaagagagagaggacaaaagggttttaagattggtgaagtaagtgctgttacttgagtaagttgttgcatttggacaataataggctaggaaacgaggatcttgagcagaagctctgaagctagtgaggaatgagaaaaggaaaaggaatatgaaagggaagaaagaagacatggttttttctttgagttccttgatttgagtttcacattatgcagcttccatgatactctctctgactagtactgagtaacgtgaagtatacgacggtttgttacgactaagtcagtagtcaatgtaagcgatttttttcttttaaatgtcgtaaattgtgaggaaaagagagattgggactgatctaagtaaagttccttgtttcaaaaaatgactttaaaaatctaatacacagttgtaaagttaaacaaggaagagccctaaaataaaaattcaaagataatctttacaagttaacctgccactgagcgtgttgattgattctgattctgaatcaaactagggttgtgtaattactgtttttacttaataactgttcgtttgttacttgtctgttaaggaagtttaacggtactgtcttattaacccaaagtctcggcgccaagcagaataatcatcaacctattacataatattcaactccaatatttttattttatatctttctcggaaatagattgataggcgtcaaaacttagaaattcaactagtttactttacaacgaaagaaagaaaactttgacgtgttagatggttcacatttcatttatttcaccactttacaaatcatgcaaatcaccatcccactgtactctgttttccctctgttttcaaaatcaaatggcacaaaatcattggaggtatggctaaagcgattcttttgttgaaatgaaccaaactctaatgccaacattctaagtgtcatctccttctcatttaggtaatgaatttttcaatcggtggtgatgctgatagctgagactaaattgattattcttggaaaaaaaatcaaaccaaattacatgtggttttaacaaaccaaatctaaactaaaggatcaacatggttcatcaagtttagaaatatgtaaatctaggcttaatttaacttgatttcaatcgtaagatataataccaccatattcaacgaggatctaaatcagacattgatgaatcgtcaatagatacttgaacaaacttgttggtcgttgaatgatctgaatcaagccggtttgttcaagtctactccaacaaaaaaccctggctgctgaggcgctggtaaagccatngtttactagtgagcatcacggaactggttgacatggctgaacttt

SEQ ID NO: 1796 - DNA, 1331 bp, Arabidopsis thaliana landsberg
  unsure (1)..(1331): unsure at all n locations
ggtttaaactttaaatacatgtatttaccttcaaactttttttttttggtgagattctcaaactatttaatttaagtccagaaaaacgatttatttctccccaaaatatttgtatttcttactggtttgtttgaaacccctttttgaggcctcttggactttacatggcacaaacttggagaagaagcaacacgattagggttttgttccgggtcttgattcttgcactcatcaatcttcaatcgtttgctcaagctggaaatcatcgttgtgctccttagattgtaattaattactcttctcgttctatctctcttattatcctcgacactagcatgagcttcagtggatgtttctcctatttcctcatatgcaaaagctctaaccattctctccctcgctacacgtacaatatctaacgctctcttgtctccctgcaaaccattgaattccctttttcgaacggacaaaggtatatataactctctattaaatatatttttttgttagtgataatctctatatatttttgtattagatttagataatcactaaattacttgcttcttttttagcgtgggaatattttattttttaatttttagtaattgtttgtgtgactaataatatttaaattttttgaaatatatgtttttatatgtctacttattgttaataatttaataatttaaatttctttaattttaaaattaccatggcaaataaattcaatttatatacacaactgtttttaaaaactctaatacaacttttaagtttttacaacattttatcaaaacaacatatttttctttataaggaaacacccataaaaagtggacctatccagttccaaaataataagaaaaccaccagaaaataaatatgaaaacaataatattcaaatccaaataaaattacaaaattaaattaaatacccaagatttggccttctcacatgcacatgcaaacgtgatatttgcggttcaataccctctccttggacatcattatattcttgattagagtcaaatataaagagaaacgtgattgctgatgatagacacgattcattattgtttgctcaacttgatccgttaatttcagtttcgtatcaccacactattgccaaaatctcaagtatccaatccatctattctctctcgcaatctcttgtatcttcaactacaaatccctaataaaatctcgttctcacaaatatattttcactctttagtattgattttcgatttgagttgtgaccaaagagtatcatgagtttnaggttctatgcttccatgaatggatgatcttttggggtgtagtgaaat

SEQ ID NO: 1797 - DNA, 652 bp, Arabidopsis thaliana landsberg
gggagagatgccaagtgccacaggaactacaactgatgggatagctgaggaggaggcagatgggatgccaaatgccacaggaactgttgctgttgaagctgaaacagttagagctgaggaggcagttgagactaaggcaaacaacactggatcctctccatctcttgctttctaaaaaacttgcaacactctattttatttctctcatctagaccctaaaacttgcaacagtattaataatatgggtttaagctatcaattaagttcctaattcagtgctaataccaaaaattaagattagattaacctaagattaaccaaaaattaagattagattaagctaaatagaaaagtaatcacgtttatctaataattaagaacgttgcaaaaacctagcaagtccatcgcaaaccttgcgagggatttgctactacgaacgctggaactagcgagacagctcatttgcagtgaatttgtgacattttatatccgttgcaaattgcaagagtttagcaagacaactattccgtcgcaaattttgcgagggaattgcgactgtttctgatttctcacgtgcgttttgcaaggaagtgtcgttcgacgaaatttcctcgctaatagcgatttgcgagggattagctacggttttgtc

SEQ ID NO: 1798 - DNA, 6410 bp, Arabidopsis thaliana landsberg
  unsure (1)..(6410): unsure at all n locations
aaccgcaacattctctattgttttaaattcaatcgatcgttttttttccttggccagtttttccgttctatttcgggagcgctatcagtcatgccgcctaagacccgtggaggaggtcaagggaaaagaaaggagatagaagcgccggcgcaggcgaagacagaaaaagttaaggcgccggcagagaaagtgaaggagaaggtgccggcgaagacgactgcgacggcacaaacgactgcgacggcgatggcaaccaatgcggcttcaacgacgacggctccaacgacggagagcccgatgcttgatgattctacgttttatgatgctctgaagcaaattcctgctgaagaaattcaagagaatatgcaaactgatgaggtggaagatgaaaatgaaaaagaagaaccaagtgaagaagaagaatcaaggagtagtagccgaaccttgggctccgattccgattcagaggagacggagacaaacaaagaactcgcgtgtgctaatcccgtggaagaggcggagagacaagatgacggcctagccgttatcgaggaggaggaggagaggagctccgcgagcgacgaggacgtcaatgtggaaaagtccgtggaggatgagggacacgaggacgagagagacgatgacgtgatagtggaaaaacccgtggaggagaggaccatannnnnnnnnnnnnnnnnngtggtaagtattccatttcgtaataccgatctaattgggtaataatgcaattgtgaactgtggacagtactagtaacattgggaaatgctatgttgatatttaggcaatattggcggatgtgggtaataccttagagtaatactacaattgtgatttatcagtagttagtactagtaactttgagaaatactatatagtaaaataggagtatctgtgtaatactggtaattacggggaatacttttaggaaatacagagtaataatgtggcagtactatttacaattgagtgatatatgaataggagtatctgtgtaatactggtaattacggggaatactttttggaaatacagagtaataatgtggcagtactatttacaattgagtgatatatgaatgaatgtttgtttctttcaggatatggaggaagcgatggcaatgcagccacttggtatgtacttcccggcgtcggagtataccaagaagatgaagttagcaacgaggtgttatatctcggaggtgttgaagaccttcgctgacttggaacatcctctaacgaatgttgaaaagaattattttatggagcatccgagtttcaagcacatctaccacctgccttccggatatacccacaagttaatggggatgtggatgctttttcttcgaacggcatctattgagaagaagaaggaggtttggttcgttgttaatggagttcccatccgctatggtattagggagcatgctttgatctctggtttcaactgcaaggcctatccagctaattatcagagtgctggtaatatgaacttcgccaacaggtacttcaaaaccggggtaattagacgtgaagacgtgaaaaccaagctaatggagatggaaccggctagatcaaaggataggttgcggatggcggtcctctattttctaacaagcatcattgtcgtgcctactaagactggagaaagggctagtccaattgatgatttctgtgttagggctgcaagtgatcttacgttttgtaagacattttcatgggggagatattcatttgagtacatgttaaaatcgatctcacacatattggatcattttaacggtgtcgtcccgaatactcagtcaccatggtctgttcccggattctgtgtgccgcttgaggtaagtcacatgttttatccttgttacattttcgtaattgaagctaacaattaaatttcatgtgttttgtgtagtttttagcatttgaggccattccatcacttagggaaagattcatagaagaaaaagagggtgcacatgccggttgtccaaggatgtgcaaggtgaatttcaagaggaccgagatgaaagggtttacccttgagcaaatcaaccatgtactcggaacaactgaggttagtatttcctattattccttgagcaaatatgagcaaatatgattttatttctttctaatatttcattgtctattatttccataggtcattgagagtataattagagagaaggctgaagaagtacctcttttggctgaaatcacgggagtagaggatgatgttgataagcacgatgttgtagttgatagttggatgaagcgtcttggtcaagggcgtgaaattagatttgaggaggtgtacaacgaggatgtgcatgcacgaatgaaagccccaaatgaagaggaagttcccacagttgttggaccgagagacccgacgttagttgatgtaatggagaagctccattccatcaatgacaagctgaatgaagctttgttggcgcttatgaaaatggaggaaaaacaagcaacgttcgaagcatttatggatgagatgaaagccaaggtaaatctgggtaataccggatatactgtaccataattagtaatatcgcgtaataccaaggtttaactaaattaacaatgcagatgtctcagaacccaccagatgaggaggaatcaacaatcaaggaaaatgcggctgctcctgttgtgcccaaacgagtgacccgttcaacccgtgcaagatctagtaacgtgtgaaaactattcgtgtaacttctccggatttgttttttgatttcttgtactttgactttgttttaggatttcgcaagtactcgtaaaactatgtttggattcaattaatctattaggatgttttatgatattgttaactgaaatactggaaatacctcgtgctattactactaagagaaatactggaaatatcaaactgaacaaccatagtattaccaatcaaagagaagtcttacaatcgaagagaaagtcttacaaagcatacggaaagtcttacaaagcatagggaaagtcttacaagcaaattaacaataagattaaggaacaataggataacacattacttctttggagccataggattacggaataccactttgctcacgttcacaatctctgcacggtgggctttcaattctttttgcatttcttctatgagatactcatgacttagaactttcttccgattgtaatcaacactctcccttaagctactcacctcttcttccatagccttatcccaaagtttacggatgtgcatacaatcagttctatcatcctacaaagtaccaaatatttatcaaatatagatctagatctacaaaaactagaaaaacttgtgcagtattacttgttctaggcagtattaccaaaacggaaaatactctgaaataccaaatatatctagatctagatctacacaaacttgaaaaacttgtgctctacatcaacataccttaaacttctcgcattgatagtatctcttttcatcctttcgcgtctcgacaatgctaccaccacatggacaaaacttaggaatcccttccatcatcgcaaccatttccatttgctcaatggctctcttcgccactttcatatcatcgtagtaggggtctctctcacacagtctatccatggtaaaaagatgaaagaaagatgagagatgtgagagaattcgagtcgaagagagagatgagagatgtgggagaagagagatgagggagaagagagatgagagatgaaagaaagttgtaagaagagatcgaaaaagaaagaggaaaaagaaaaaagtgaaatttttggttttggagggaatctcaaaatttgttaggcgccaaaaattttggggaaaaaccaaaaaaattaattcatcacgtgtgcgccgttatttttgacatgtgcgcagcctttttacagcatagtatttcctaaggttttggtagtgccaatttctcaaatagtattactttccatatttttcatgtttagcagtatttcctatatttacaatttgtttatttagtagtacactggatgaaactttatcaatatagaggtttaaatattttgtgcaattataaattaaatatatgtagcaatatgaatttttcattttaagttggtgataatattaaaagtgagcttaaaagtataagggatatgttgtattgagtctactaaagataagttaaaaattttaatattaaaatttctaacttaattaagtataaatgattaataatacatttttatctgttaataactcactgtattcattctcattgagttttgaggtaaacaaattcgaactccataacaccaacttaatattaccagtcgtactaatatgaccacaaattcgacagaaacagacatgatattacttgttataactagtattacaaaaaaacaatagagacagacatagtattacagaaaggggaaatacagtattacatagtaagtccataccatataaacattaaatcactgtagaaacaaagtaaaaactcagataggcgtattcccaaataataaccattgacacgattgccttggacgccttttgtttaacgtcctttgtcgttttggccgcttttccccggttgatggaaaccttagcatatttttccttcctttcttcggttttttagacagcgaaactatcttcaacgcctttacttcatctggtacttcccactgcgacctatccggaacaagataaatagtcctataataggccaatacccacaactccgcccaataatattttgtaatcaaatcatgtaactccaaacctcttctccgatcttcatcatccataatgttaatgaaagcggctaatgcatgaatacaagaatatttttggatatcgaaaaccttgcaactgcaagttttcaaaagcaagctcaccgtataatctattcctttgtcgcatgtgactacatattctcggcaaaaacccacaaatcatgcaaataattctcgaccaaaggcaccatcttattttctaaagatccagacgcggcttccatctgatgttcattaaaccaaacggagattcttttgatgatcgcatcaagcattggtattaacgagtatttccttgcgtttttaaacacattgttcaaagattccacacaattgcttgtgtctaagttgtatctttctccgggaaaacaacaccttgcccatttttctttcacggttgtatcctccaaatacttggtcgccttaggatatctcaacttaaacccgtcatacgctcggttgaagtccgccacgacgtagacccgacttaactcctgaaacttccatgcgagtacgtctcggttggtgtgagtaacatgacctttcacattttgggacaaatgccaaatacaatacccgtgatgagccgcggtatacacgttccgtatggcctttatgaggcttgcatttatgcccgtcatgaaaaccaattcttaagtatcgggtacaaccgtttttagcttctcgaaaaagtactcccaactagcatcattctcaccttcgagtacggcaaacgctatgatgtaatggtgacggttaggatcttgagccgaggcaaacactaacactccgccatatccgtttttcaaatgtgttgcatccacaattaaaattttcctcatcactctaaaaccttcaatgctagctcccaaagctatgaatacgtactgaaatttatcattctcatccaacttcagatatgttactgttccttcatttaccttcttcaacatgtacaaataacaattgatatccttgtagctatcttccgcgctaccttttaaatcacaagcggcttgccttttccctttcaatgcggtggagtatgatatcttcacacctaattttgtttgaacaagcttcatgataaccttaggagctggagtttccaacagtccaggaaaagtatcatgaagaagagctgctactaattcaggggtacctttcctcttcctcatccttgtattactcttactaatccgggtacaagtatgcatcttgttgtaccttctaatagagtaaatacttgtatcttgaatacatgaagctcatatacgccagtcataatttacttttgaacacgttaggacataccgctccttatcagactttttaataacataaccaaaactgttagcaaatgcacctttgtccaccacttcgtgcaatgctgccctgcttggaaattcttctcgcaaagtcaaactgataccgtcttcccattctttcttaaactgactagattctactgtagggcgtggttcaacgtattcatcacccctatcatcatcatccctatcatcacgtgaaccaatctcaggatcttgagtatcatcaaacctcactattacctcattttgtct

SEQ ID NO: 1799 - DNA, 2391 bp, Arabidopsis thaliana landsberg
acggacacactgaagtttggagcccatcacaacggatgtttcattgtttcagtcatagaatcgttttgattcttcacagacctgtcagacaacaacaatcctgaaaaggtacatggttcttaatctttaagcaagtaatatttctgcatttgtgtgatatggttgatatatagataatctaagtaacatcggttagaatttgtatatgatagtgtaaactcttagattgaagaagcaaatattcaacgaatattgtagatataagactgctctaataaaaatccaacataagtaaaaaacaaatggaaactaaagattcttaaaaacttctttgaaaactatagtttttgtttgcttttgtggcttaccttcatcatccacaatcagaatctttaatcttgtctttgatgtaactatggatatggcaacataaagttggtcgtgtgaaaagcaaggcctaagtagaaaaattcctactcttttaaaggtagttgtgttcttcgcattctaaatggcaattttgcgtctgatggtgctagcttcaatcttggaatcaatactaaatgaccagctgtgtcaccggttagaatcattgcttgcaaaatgaatggactcatttgcgtgaactgtaaccttgtgtcattcattagaccacctataggatcaatatttctaggcaacatcacaggacaaccaatctttagacgaagcttatggttaggcaaccttgaaactttaacactattcaaaaagtcaggagtcaatgccggattatttctaccaccaatgtcagctgggtctaaactgtctgaacttaggaatgtaaactcctctcctgaaaattaaaattttggttagttacagttaaagaaggaatagcaaatagaaacactatttatataagtaaataaagttacaaatcaatgcttctgaattagtaataaccttggaggttatcaagcatggtctcatttatttggttgacatcttcgttggtgggacataatattgctctttcttggaaaaaaattggatcattttgttcatgtatctttgtaatatctccatatatctctgtgcatatggcttctattggatcttttgctttcgtaatcagaaattcagaaggaatatcgatcaaagcctgcccatcattaggctcaacaattctaccatcacctactgctaatatccactctgaaaactctttaatatctttcgcttcactaacactcaaaccttaagaataaagacgcatattctttgtcagagtcaatactttacaatgactccaaagataagatgaattaagggcagacataactatgtctgccctatcagcaccggggattactggtagaacttgtctgaaatcacctccaaagacaacaaccttgccaccaaacggtttgttatcaccattaccacaaatatctgacaaactcctatccaatgactcaaaacagtgtctgctcatcattggagcttcatcccatataatcagagaagcttctttgactaaatttgccctatctgaaccagctttcatattacatgtagtaaactcattaggattaagaggaattccaaatctagagtgagctgtcctacctccttctaaaaggagagaagcaataccactggaagaaacgttaagaacaatgtcaccctttgacctaagtgcaacagagagtgttttcgaaagaaatgttttacctgttcctccaaatccataaacaaaaactactaccccaacgttttcattcactgcatcaataatgtcgtcgtaaataaacttctgctctggagtaagcatcttaatccatttggcatgtttttctgtcaaattatcacgatcataccctctctcatctaaaatcaagacattagtatcaaacttcggatctctaggtactagtggcatagtcttataatatgtaagtgaacgaccattccttcttaaaatgtgatctatctcttgtagagcatataattgtttctcctcatctgacaaaattaaatctgtaaacaacatataactaaatgagttacaaccaagcaaagcaagtttatgtgaatattgcattgtaaaacaaaatgaattaaaattgaggttttgaaatgatattagatgttacctggtctattgaaatattgcctcttattgttttgaatatcttcagagagatgtgaccacgttgcagcacacacattttcaggaattatcatagcatctaacattattacgaataactgacgtaaataccattcactgctccaaaaacttgatctctttaaatcatcaatgtattcttgatcattatctaataagccttatgcttcacaagcatctttccactcttcatatagcacaccattaactgtcatgag

SEQ ID NO: 1800 - DNA, 864 bp, Arabidopsis thaliana landsberg
  unsure (1)..(864): unsure at all n locations
cttgggagcacacctaaagtttattttatccttctcccacctatgttgcttaatgtttagcctattcttcatagcataatgtaacataacctctttgaactcaaacccagtgaaaaatgttttacctataactaacttatcacctgatgccaacctaattttcctatctttagtgaccacgggatcctaatctgcatcacaactctctggtatttcatcacgccgaatctgaaactcatcaaaccaatttgccacggcttcctctatctcgaactcgaacctctccattatgtcttcttcacacagatctttcgtctcttttctccccgatttcttctctctttgccttgcttcagaatcaacatcatccttctcgccttcatgtcgtttcatgttccttcggctttcatctccatctttttcacccttactttcattgtcggagtcgtctcctccatcattgtcactatcgccgtctccctcatcgccgctttcactttcactgtccgccgtttcgacctcattccactctccggaccctcgaaatcaggatcatctggatcgctctgatacactaaatcttcctcgtgttcataactcgacgaagccccataccagaatgacataatttcaaagaaaacccataaatctcaaaaatccccctttctctctagaaccctaatttttcaatcgatcgaacaatcgattgcgtttgtttttttttgggaaaacaaaacaaaggtgaaacgacgtcgcttaaagaagaatcatgattacttatannnnnnnnnnnnnnnnnnnaacagtgaacgcgattttgtggttaaacccctttaatgactagtttaattggagcatattttc

SEQ ID NO: 1801 - DNA, 1095 bp, Arabidopsis thaliana landsberg
taaaaacctgtcatatagacttttattttgtaatttatttttttataatcttcagaatcctttatcctttgttcagaaacctgccatactagtatacaaaaaattgttgtttctgatttgttcctttttgtgattaggtcttcacttaaattcttgtaaatggtagtggagaacacagagaaggaacacagcgatggaaagaagaaagagaaggaacatatgagcaagggtaaagaaaaggtctatgatcgagagaaccaacgcagggataaggagaaagtgagagacctaaaaagaagtagagaagaggacagtgagaaggagatctctagagatagcgaaaatgagaaggaaaaagacaaggataggtcaagagtgaagaaaatagcgagtaagaaaagacgtgaagatgatgacgaggctcataaagctgcagaaagatatgaacattctgaaaacaaaggtatgaatgaaggtggcgataatgtcgatattgcatcaagtggaaaagaagcatctacgttggaccttcagaatcgcattttgaagtaagtgatactcatatgttatatgacatctagaattacagctagtataggaattaaaagtttatgttttctgatgatgctccttatgctctatcatgcattgcaagcagccgtaagattgaggaaaaactaaatgctgagaagcaaagagcacagcagctctcgacaagttttgaggagcaggtattacctcaattccttggacatcttgtatccttttatttcttcataccttccttttatttgatattttaataaatatatcttatctcatatttgtttaagataatcttaatcaaggtgaaaatgaagatggcgaggatggcggtatgtttacgtttctagttctttcacccctaattttaactcttcaaaggaagtaatcacatattatgtcataccatagaatccctttttctatctgcctttctaaatgtgatgtgttataattgataatgtatgaattgctctaatgacagagagatattcttggaaggcatgtgctcagcttcacctgataataacgcccagatttgtaatttctctt

SEQ ID NO: 1802 - DNA, 1744 bp, Arabidopsis thaliana landsberg
aattactcgtctcttttcaggtgggatgatgatgttgtattcaaaaaccaggcacgtggtgaaatgaaagctcttaagcgcttcatcaatgatacaatcaggaatgacttccacagaaaattcctgcatagatacatgaagtgattgtttgtcaagagtgttattgctacttctttgtatgatgattatgactaaaagcttttattctgtctggaattacgatgtctctgtactcaaacaacaaatgtttttaagctttatatcaaaaacttatgcatttgattttaatgtaatatctcacagattcctgattatctcttattcatcactaacacaatgagacttcaaaattcgaaacagctgtgtgaacttgcatcttacaagtacaagtatgtgtctgaacatcatcaaaacttcaccaatcacatgtttgaagcaagtcttcgagttttattaagagacgccggggatcagacaataatggatacacctaatcaacagcaaccatgttgagcttcagagcacccatggaagtgaaaaagttctgaacacactcagcgacagcagaagcagagcttgaagtagaagccattgtagcgcacctcgatgttccacagtaggaatccatctatgtatgtttctgcgaatctctcaatgtttgggaccatgtctttgaccgttgcagatagtttcttgaagtggaagacgtactcggtttcatattatgaccttgtcaagcttctcagtagctgtgatgatattgatagcgtatcgctctacgaaattctcatacatatctctctcacccttatcgttcaataacttgacctccatctgttaaaagctgaagagctgtatcaagttcaaaatcaataaataccaagttaataaatcacgttaaggttaaggaaaaagaggaatgcagcttaatcatcatatcacaagacatggataatccaagtttccataatttttgtattaagttttgggcctttgaggcccattaacaacattatatttaatgcgtatgtcacgctgtgttcaaaatcctttttcttccctcttttccaaaatcaaaacgcgatttcatggcctccagcaaagattccgatcgtaacctagggtacatgacccgcaaggatgcagaattgaagcttccacggatgacccaggtcaaaaacaagactccggcgccaatccaaatcaccgccgagcagatacttagagaagcgcgagagaggcaagaggctgagttccgtccgtctaatcagacaatcactgactcagctgagctttccgactacagactccgacgtcggaaggagttcgaagaccagattcgccgtgcgagattgaacacccaagtttgggtcagatatgcgcagtgggaagagtcgcagatggatttggagcgtgctcgaagcgtgtgggaacgagccttagaaggagaaaattaccggaaccacacgctctgggtcaagtacgccgattttgagatgaagaacaagtctgtcaacgaagcgaggaacgtttgggatcgtgctgtttcgctcctccctcgagtggaccagctttggtacaagtttattcacatggaagagaaacttggtaatattgccggcgctagacagatactcgagcgttggattcattgttcacctgatcaacaagcttggctctgctttattaaattcgaacttaagtataatgaaatcgaatgtgctagatcgatatacgagagatt

SEQ ID NO: 1803 - DNA, 2045 bp, Arabidopsis thaliana landsberg
atggactcactattctcaagctgagacgaattcaagaattacaattttttctcgaaacccttctccaactgtggggactcaacgtcattactctcttcctatacacaggcgaaacagagtcctatgtaaccacacaaaacagagtttaaatcaaattaagcaatataacccacgaatcaagtgagacagcaaaatgagataaaatatctgcaatctagaaattcaggagattgatagatcaaactacttaaacattgctaatccacaaccacaaactaatgtaataatgattgttttgattcagtttttggaagctttaactaatccatcttttcgtgttcttcctcatcatcttctgctagtatcaccaaccctgaactatgaagtcttcctttgtcctgtctccttcgtatactacaacgtttccgctcgctgacctgaactatgtcgtcaaggctctcggcgacaacaagcttcactggttcgttgttctcagctggaataggttgagaatttttgtggacagcagcttttccatcctagagaaaacattttctttggttaggttatattgatttcatatatacttcttttacataaagcttgtgtgaatgtgtgaaaaagagaatgaaacctggaagtccttgacccatgattcaatctggtcaacctcaacctcgaccatattcatcaccattgatgaaatcaatatcataagtattgacatctttatcaccattgttatagttctcctcatctctgcaaaaactctctaaacgaaaacagagtaagaagatagttgacgaacacactgcttttgtactttgtattagaaaacaagcttaaattagggaagctgcggcaaaacccttaaattaagaaccactaagcaatagagggtttagctctaatcagtttcaaatataacatccttcaaaaccagtaaaggattcattgtttactaaacccaaatctagcattcaacaaaatccagtaaaagactcctctttaatccattccaaacccacaaaagacaaatctaacactgaacaaagaccaatgtagttttcaccttaaatcagttaaagagcctaccattctgacgaaatcaataaaccacaaatttggagactagtcatttagataaaactgatactcttctacatatacagatacatatagtatcaaagtcttcatgcaaagccatttttctagaggtagcattgtgtctttcactcttacgctatctagtatctacagcctgtatgccgttcccattcacttggtgactgcttccttgacccacatgaaccacacttgcactcaattctgaaacaatagttcaaagattaatgtgttggtcaaatctctaaaacaacaagacaatgataacagaaacctaggattaaacacggattttttatcgttttcagagaaaaaatcaatttacgatattgtgctgcatagtcataattcataaacaaataagatcctttctaaatgaagaaattgaaataaggctgagacatctaatacgtacgcatgaaatgctctgatatatgttccttccatgccattacagactacattaatctcatcaggcagctcagtctgtgtcgccttttctgtagaccaatcccaaagaggttgtgaggaaatctcgcatattatagcaatggagaaatgcaaacaataaaatcaggagaacatgagaagttaacaatatacttgaacactgagttctgttcttctaatattgataagctcatgctggactttacagttagggcaatagtaactgttgtgctccagttccttaagatgataaccaaattagtgtgatagttcaacaagcgtgttcattacttagaatcaaaagttaagatgcatgaaggtgtaccttaaagcgcttatataaattattgtcgcacccatacggccatacatcacactcatcacaataaacctaatacatcaaatcaagtcagctaaatagatgtaatcatttcttacaggtctgtatttcaccaaacatgtcacatata

SEQ ID NO: 1804 - DNA, 1732 bp, Arabidopsis thaliana landsberg
ggagggctcttaacctcagtgttgaagaagacacatcacacgctctgcttacagttaacatcagatattcttcaaaaatatggcgtctccaaattgaaagattatgcggaattgtattaaagattaagagagttatgaagaacaagagagtttgtatgtgagagaatatgagaccaaatcatattgatagaattaaattgtatcctttgtgtgtttacaatgcttttaaagacacacaaagagaatatgaccgttttcaattaacgtaagactgaaagagacataagagaagaggttccttggtcttggtgatgagagtgactgatgagagtgactggtcattggttgaccttgttgctaaagacactcgtgagtcctcttcaatggctacaagagatatttgtgtgccttcacctctttctagaagctcttcatagacttctcatatgttcggcccactctcttgtagcacatacccaatactaggcctttctccttatttgtacggatgaatctcttattgaatcttgatcaatatataatatacgtatgaattacctggacgccttcccatagcttctcaagcttgttgttacatctcactgtgaggtctttgagatgttctgggcgaaatttacttggattacatcttctaaggcaatcaagataaccgagtccagggagattcttgttccataaacaatctgctacctcgatgtcaatttctcctctgaaactgtgcataataatctcagggaaatttctcaacttggggcatcgtaggagattaaggtactcaagagattccgagttgagaggagttggaaaactttctagcacttcgcatttacaaagatctagtctctcgaggtttgtggctaaagaaagatctggaatttctttcaaatatttggaattacgcagaatcatcttctttaggcttccaagtaactgaaaacaaggaaagagagaattgtaaatgcttaatgtattgaatattattagagtaggaatgtacatatatatactaaggcacagccctatgattagggattaactaattacaattatgtcctttaagacttcatgtgtaatatactctatacgctccctcaagatggagggagttgacgaactccaatcttggaacgggctgaaaggaaatgtgcacaagagagagacttggtgagtgcatcaacgagttgatcatttgtggaaacgtgtgagactcggagagctcgtgattgaatcatgccgcgaacaaagtgataatccagagctatgtgtttcatgcatgagtgaaagactggattggcacataagtaggtggctccaatgttgtcacaaaaaatggttggaccgtgtggtaatcgaatgtgtaattctgtgaggagagagcaaagccatcggatttcagaggcagcgttggccaccgctcgatactccgactccgtagatgaacgcgagacaccacgctgcttcttagaggaccaggagatggggtttctccctaaatagatgacatacgcattggccgagacatagtcatcagagtcaccggcccaatctgcatcggagaaagcatgaagatgtattggagacgatgaattgaggaagataccatgtgtggtggttcccgcaaggtagcgtagaactcgttttgctgcttgccaatgatcagatgtaggctggtgcataaattgagatagacggttgaccgcgaaggcaatgt

SEQ ID NO: 1805 - DNA, 8289 bp, Arabidopsis thaliana landsberg
  unsure (1)..(8289): unsure at all n locations
accgactacaacattagtcgtttcatagtcgtaaacggaaataatacgactattagacgactaaacagagtagtcgtatatacatagtcgctaagcaacatagtcgtatgttagtcgtaagtttacgactaatttacgactacttaacagtcggcatgaaatagtcgttgattggtcgtaacatttggcgactatatggcgactatgttacgattaattaaactgtatatgggggattattcttttagtcgtaaaattgtcgtacttttattgacgactactttgcgactagtttacgatcaattgtactggactgtggacactattctggttgtcgtatcgtagtcgctaaatagtttacgactattttacgacgcctttacgatcacttaacgactttcttttgttgttagataatagtcggtaatattggtgactattttacgactatgatacgactattggacgactattttacgacgactttacgacgacattttgtttccaaataagaatttggtcttatcttgattttttgttggttggtcatcgattatgagaattcggtttgtttgttgtttgaaatgctataaagtattacaaaaagacaattattattgaaaatcctatcaaatacataaaacacaacttacacttatgttcaaagttctaaaacacacacacacacattattgttcaaagttcaagggaaaagggactgaaatctaaacctattgatcattctgtggagtagctggtagaggctctgtggttgtcgaagattgagaggccatgaagtcaaggaattgcggatctgtttgtcggagatacttctccactaaggacaagtgttcgagcttgtccttttgctcaaccgtgattcgggctgtctcagcttcacgcgcagcaatctcagaatctcgcttctcattgtaggcagcctgctcctcaatcttgcgttgcgcttccttcagccgttcttctaaatctaggaaggatgatgatgattctccagggagattgcggttggaacagcctaatgtatctttgagactgccaagtctataaagattgcctctggaatccctttcggtggactgaaaagaaataaagaagagattagtgacagaataaccataaactcaaagtcaagaggtttagactgcagcattttatctcgagaatgatggttgtgcactcctcatttgtcagctcccgaggtcgtgaagtgccatcagacacagcagaagcttccgcctctagctgtgacaatctatctctcacattctgctcataagtttgagcaatcatctccgccttccgatcaacatacgtaccatccgacttagtatgagtatctacaaacacctcaccaatagtgaccattcttcccaatttctcctcctgcaatgaaaccaacacagctcaaatattcaaaaacatacatgtgaggtaactgaaagaggtaacagaagaacttaccaattcgtcttggatttcctgaaaagactttggcccagagaagtggatgtgaggaccgagaccgttacggtcagagagacgagctttggaataggtccgacnnnnnnnnnnnnnnnnnnnnnnnnnnnnnnnnnnnnnnnnnnnnnnnnatagagtttcaccaatccatggaggctgctctctagttctccttgcggtgctaaccatgtctttcaagcgccgtttacagacctcattgaagtggtactgcacagtccctgttattaagggnnnnnnnnnnnnnnnnnnctacaaaaaattgtagcttgagttagtgaaattcaaaagattaagctggaaagttaagaaagtaagagagatgcatgacagcttaccgcaaactctaaaaataatctttctcttttatcaactggcacacatgaccagttatagaagggagcatcgaatttttgtaagaaaattctagtgatcttcctaaccaagcgagatcctctgtctcgagtaaacctccaaacacatgcaacaaagaaagaagtaaacatgttacaaaagtgaacaaagttattttcccaaaagaaatacaagtcacacacgactataaactatgttccacaatagtactgtctcaacaataaagcatcattcacaatcaaagcatcatcatttgtgtaatatagaacaacataacacgagtttagaactgaactaaactaatgaccaagaactaatgtaatcacaacacaacactcaactatgtttgaccgattcacaacagagcatcaaacaacaataaaacaggcattattacataaactaatgagtctagaactaaacttgactaaatgcctaacccgaaaacactagcaacacaagagccaacaatgtttcacaacacaacagccaacaaggttcacattttcggtttgattcacaacagagcatgcagaacaagaaaacagggaatttaaagtgaacttaccattcggtttttggccggggaatgggagacaacacacaacaccacgcttctctgccaggcacagagagaatgtcattcagagcaaccacggagtcttcttggagctacggcaacactgcaggaatgccctcttggaagttgttgccttgagacgagggatgactgtgagatgcagtttctggatccggcgaaagaggagggtcttgctgagcagtctcttgtggtggcaacggatctacacgctgtggttgattggtggagtgttggaagagttgctgcggtggtgggtagttacggtagtggggggcagaggatgaggcgccagcgccggctcgcttgaggcggaatcgatgcagaaacttgaaccgtcgccgccgccggggtgaaatcgtactgctgcggtagcgaagagggtcttccagcaggcgttgaacctccggctctttgagtcacgtttggtgtggtcttcctctttcgagatcctccacgaccggcgttaggcatcctcttggagatgagagaatcgagatggatcgaagaggcaagggagagtttggcaaagaagagagaatcgagatggatcgatgtattaggatttagggttaagaagaagaagaagaagaagaagaagaagagaatcgatttagggttacgaagaagaagaagaagaagaagaatcgaagaagatcgaggaagaagaagatcgaggaagaagaagaagagagaagaagagaagaatcgaagaagtggctaagtgtttggaacgaaggggaaatgaatcgaattagggttttcaacactggagtagtcgtatatcagtcgcataatagtcactaaatcaattgggtttgggcttcgacgattaaaagcccaataacttacaacgttgtcgctccatagtcgccgaatcgtcaccacgtaaattaggttatgggcttagtattttcgaagcccaacaacatacacaagtgtcgctgtgtagtcgtataattgtcaccacttaagttgggtttgggctttgtgatttcgaagcccaacagcttacaagatagtcgctgtgtagtcgtatattaatcaccacctaagttagtcgcataatagtcgtaatttcgtcaccttatgccttttaaaattatttaataattttttaataattattcaaatacttattcaaatacatcgtatattacaaaatttattcaaataattaattatacatctatttcacacaattatcattcatcttcgtcttctatttcatcttcatccgaggacgataaattacatcggaattcatcttctggttcagcatctccaatatcgtaatcgaggatgattggggttacgtctgctaccggatagtctattacaagatcttcaattgtagtctgcaaaacagcttcatcatcctcggtttgcaacaatgtcggatcagtattttcatattgtccagaaatgtttccccttggattgacctttaaaacactgagccaaatgttctttggtttctttgtatatggatatggaatataacaaacttgatctgcttgagatgctgttcaaacatgttatacatatatcaacaaaaatatatacaatagtatttattaatgaattagaaattttaagtatacttaattacgtaccaagaataaatggctcgtatttattgtatttcctcgtagatagaacatctacaacgccaccatggtttcggcgagttcctctcccgatctttgggtcataccacttacacttaaaaagtgtgatcctcaaattgacgatgccctcatactcgagttctatgacatcagttaaggtaccgtagaaatctgctcgagttctatgaaatcaatatgatcttaaattaaatcacgctagctacaagaaaacagacaaatagttacattcatgaaccaaaattacagtagacttacatattctttaacccatagatgatattcttcagctcttctgacgtagagttctttttcggacaaggatggatatttcgcagaaagataatcctcgaacatactgtctcaacaaacgaagacaaataaatcaaagtgatcttatctatgaataaatcaaagtgattaaaaatacctctcaaatggtttaaaatagtcacaatttcttaaaacatatgcatgtgcattttggtaatctttctctgaaagccattctacatgcattgcaccacttggacgaccaacggaactaaatatattaggtactccaggaacatgatatacaggaacttaaccctcattgaatcttgttgacttgatccaaaagaggtaattcatggttatttttgcgcattgaaaacttgcttggtggagatgtttaattaattactattagttaccttgattttgttcgtttattatcggcgaagtagtgctctgagaaataagaaatctagtcattgatatatgactcaacaattgatccggccgcatatcttttattttttgtttttcctttcaactttttgaaaaacctctcaaaaggatacatccacctgtattggacaggaccgcccaattctgcttcgtaggggagatgtataggcaggtgctccataacatcaaaaaatgatggtgggaagatctcctctaagttgcatatgatcaaaacaatgttctgcttaagaatttgaacgcgccttttctgcaaaattctcggacataagtccctaaaaaatgcactaacccctggaaaaaaaatgcatcatctcaagtgcatatatgatataaagagtaaattatattcttattttacctgataaggcaaggtggacattccggtcaaggagatcaacaaagataaatggaagtagtcgctccataaaaacaagacaatcatgactcttcatgcctgaaaactttccattctccagatctacacaactagccaaatcgctagaataacaatctgaaaatctaacatcatgtttcacacattgaaataaactctgtttggcttcgtctgttaatcaatacgctggaaatggagccttaccattactatcaatatgtaagtctggccgtgaacaaaatttctcaatatccattcttgacatgatattgtcttttgatttacccttaacacgcaagagagtgttcatgatgttgtcaagaaaattcttctctatatgcatcacatcaatattatgtcgaagattgaggtccttccagtaagacaactcccacaagatgctttccttgtgccaattatgttccttcccatagcctcgcatcttcttttcatgaccgttcccaccaacatccttcgtttttggtggatttacactagctaaccgctcgtaataaacttgctcccttgtcaaagactcgggtggatactcgctagaagcatctcttcctttcaaaaagtcttttctattcctacgggatggatgaccatgaggaagaaatctacggtgacaatcaaaccaacgtgtcttccgtccattgggtaaataaaaagactttgtactttccatgcaaactggacaagacaaattaccatgagtagtccatcctgataacatgctatacgccggaaagtcgctaatcgtccacagtagtactgcttttagattaaaattctgacttaatgaaacatcgtacgcatcaactccagtagaccacaactcttttaactcctcaataagaggttggaggaacacatcaagacaacctcgaggatgatttggtccagaattcaaaatggtaagaaataagtactctgtattcatgcacatacaagggggtaaattatatggagtcaggatcacaagccacaacgaatgattacgagacatcccaaatagattaaacccatcagtacacaacccgagataaacgttacggggttctttggcaaaccggggatgtaactcttggaaatatctccactccgctgcatctgaaggatgattcatttctccctcctttgattggtgctcaacatgccatcgcattgccgcaactgtcttatggctctgatacattctcttcaaccggtctccaataggtagataccacatatgactatatggtactttggttcttcgacggtcgtccttaggcttccatctttgtgcgccacaaaatcgacattgatcttctttttcgtcttctttccaaaatagcatacaattgttctgacaaacatcaatcgtatgatatggaagtcctaaattgtgcatcaacttctcggtctggtaatgtgaagtggtagcctggtttccttctggtaaaaaatctgtaaacatttcgcaaacggagtccaccaacttttcactcatattatactccgccttgttttgcaagagtcgagatgctaaggataactacgactgcccttcacgacaaccatcgaacaatggattatttgtaccttctaacaagtcgtagaacttatttgaatggttatggaccggttcttccacattctgataactatcatcatgatgatagttatcatcataccccacgttaaaattaaatgcatcgttcaccatatccacatatggatcttctacaacattactcacttcttcatgattcgaactaaaatacgtcatatccgtgtaagtactcgttcctatatccatattcacttcttctccatgcttataccaaacataataatcaggcataaatccttgactaaacaaatgactattaactcttctagatgatgtgtttttcattcttgcatacactacaaggacaatgaaatttcgggtttcctagcgttcaccactccctctagtttcctctaaggtttcctgcaaaacaaatagaatcatgagtaatctagaattactcaatgagtttgggattcccaagaaacgttagtctaaccccacccataaccccacatgcaacatgcaataagataaatatgcgaacaaacaatcagagatacgaagagaacgtagcaagcaatagacaaaacactcaagaacttacaagttttctcaaagttttaattagggcccgattgttacgcccccgaatcaatcataattcatcaagtaaacatagttatgtcctcattcacttaacctagccatacactagttcatttcattccttaacgttatcaagttgtcaaaatgcccatatcattttaagtttcaagttcaatcttaaccaaaatctgattagttaaacctaagtgagtaagcatgcatatgatctaaagactagctctagaaaacatgtaaacaaacacacaattcaaccacaactcacagattcggtatttgagaagatttctgagtcacgagcaagatcctttgtcatagtcagccggtcgaacactcacggacgagttatcttgctcacggtcgatgattttccctcttacggacgagatccctcgaccacggtcaagtttctctcgattcgggtaaagttttcttggtttaagactattttctatcagtcgacagcctttcggttctctctcgcctcaaaaatgaaaatgggcgaaaaatgaagactatttatagtccgcctaagttggcccatgcagcaccgactaccgccccatgtctggacagctgccgcacacacgggcgacatatgtcacgggggacggcatggtgacaagtgacgacgggtgtcactccaacgccccatcagctttggctccaagactcagccgacctcggcttcaagactagtaactttagccgcacggcaccaagagtgaggtgtccacatggcggtcaaagggcacctctcaggtcaaacggcgctatttcgggcggtcaacttggttccacgggatggccagatttt

SEQ ID NO: 1806 - DNA, 6456 bp, Arabidopsis thaliana landsberg
attgctgataggaagtaacaaaaaacagtgcaaagttttaattactaagttttaattataaatttattttgtttataatttctattttctttatttaggtaaaaaaatattaatataatcctttaatttcgagttttaccatctaattttgaattttgatcgtttagtttttagtaatctgcgagggatttgctaggtttcctcgtaattccgttgcaatatgtgacgcattttaattggttgttcttcccctcctcgcaaaatcctagcaaatttgggagggatctacgacgaagattctatatatgcaaacttaacctagtttgagcttgctcaaacccagccactcttgaaccctaactctgtcttttccgctcttgatccctaatctctaattctctccgctcttgaaccgtaaatctcccttcttcgattctctccgccgtaccaagatcttcgtcaccgcctctaccgtctcttccatctccaaggtaaagtcttcagacgaattagggttttgtttggaccctaatcccttctctcgattatctctctagttctagctagtatttctttattattcgattcttaattagggtttttggttcttaatttatgttctattcatttctctaatcgtttgattttttaaggatgtcattttctgggaatgattgttcaagattccggtcgcaccaacagcaacgtgtacctttgcctcttagtgaagggaacacctcagcggttcatggtagaagccttccctcctctcctccgacgccaaccaatcagaactctcaagcgcatgggacttctcctacacagcaaagtcaatcgcctcaagcttttggtaatcattctaatcctatatctgggcgtttcaacaacctaacaattgacaagttgcttgatgtccttcattctaacactaattaggtttctattctggttttagggttagttgtgtagatgtattgtttggtttagcataacaatctattaaagtgttttggttttagatgattatactaattagtccaattgaatcttttttttaggtttaacgaaagacccttctgttgctggcactgtccgcaacatctttgaaagagatttcaaagaaccacatgctaattggacaatgacaccgcaaccagtgatcactcgttggtttgaaacgtttgcggtaagtgcaatatgtcttgttttctagtgttaatttattgacttaacttttttgttttgtatttggctgttgtgtcaagatgatgtgattatgttttcttgtgttaatatattgactttgttttgtagcaaggatactgatataacccgattttcaccgattttatctatgttttaggtataggattttgaggctttatgttatttctcgaatctttttagtgtcttttcaggtattctatgcaatgggacaacaatggagataaggagacattttggagcaaaagctaaggaaaatgaagctaaggacgattttggttcaggaatcagcgaggagtgtcgaccgatacactcttggtgtcgatcgacaccagtttcggcccagcaaaaaccctagatgctttcgagtttccagaagctcaagtttgctggagaagacttccctatttgcattattagtccctggacgtttttagggtctatatatattgtttttagacctaagtttcgtttattaagtcttttatcaagttctttgcaaaaccctattgtgagagacataagctattcatcccttgttcttcagagtttcattcagatctatatacagtgaagagatccctctttcccattctctatttactgtgtttatgctttttaactcaatcatgttgtttgcttcatccagtatgtctgagtaatctgcttgttaggaatagggtttctcattaaggattcatatggtttagtagattgccccctttgctaggttatctatagaattcttcatctttgattgttcttaatgctaaatctagagtaattaactagatcttgaatccagacaatagatatgccctccataggtatctgtagttggatctattatttgatgagtctggtttataggtgtgtaataagaatcggcctatttactaagatgaacaattgaactcgttaagaaggcatatttaggttgacagtctctcggtttctccgctcactattagctatagatatagggagtttggcggcatgcccaccagttattccataattagagtttgagtttaagaatggtttgataacaacctagctttcattagatctactaaccaatagtttcctgagaataccctgttcctaactctttattatattgtttacaacacaatcaatctgctgtctttttactttgttctctttttttttttactgataccatgctagctgaatctcgacatttaactcattgtttgaacaaaagaactccgtgaattcgatcctaaaatactgcaattgatctcttatttgagagagtagttctaggtaatttgaaccataccaaatttggcgccgttgccgaaattcttgggaatcatcattgagttttgtttagagatttcgtctagtttttacttctattttgttactcacacatttcttgttttcttcttttctgtgtttcaggtgtatgcctaggcaaacaaggagcacaagacagaaggagcttatcaacttgtctgttctggacttgggaaaacttgaacgcaccaaccgaaaaactcataaattagcaatggctgatagagtcatcagagctgatgcagaaggagttttgagagatgaggatgggcaagcctataatgaggctgggcagagattggatgatcatggactcatcctacctgaggacgccaatgaggatcaggaacgcctcaatgcgcaattagctgctagagacaccctcctgtgtcgatcgacaccatacgggacccttttctcagagacgactcaatacgacggtgtcgaccgatacccatccattgtcgatcaacactggatccggactgtaccttgtgatgtgcaaatacctatgcagcccgagtctgtttacactcttcctgtcccatatccgaggaagcgtcgttctaagcaggagattcatgctgctaagtgcacagccataatggagaagatgctctatactcttcctaaggatgcttcagagacatcttctgcttcactcaacaagtatgtcaaatgacttgttgacaatgaaattagctcagatgaagctaagctgcttaccagagacattagtgcaatcatgctgcctaatgccaagaaggagaaggcacaaagagtagacattgctgagtacatccgcaccatcactcctggtcagaccactgagaagcttcccgatccaggtagctttgttcttgattgctctatctccacaagcaggttcagccgttctttgtgtgatttgggatcaagcatcaatctcatgcctaagtctgttgctgagagactaggcatgactcactacacgctgactcgcatcactctcgtcttcgcggattgttccaaacaaatccctgaaggaatccttgaaggaatccttgaagatgttcctgttaaggttggtaattccttaatccctgcttattttgtggtcttggattatggaaaggaacccaaggatcctcttatccttgggcgagctttcctaactacagctggtgctaggtttgatgtgaagagaggaaagatctctcttaacatttgtgatttgaagatggaatttggtatggatggttcagagatcactagggctatcagtagcattgcttccagccatgacacatctccttagactgctcagaatccccaaacaaagctacacacaacgctcccatcagctcagctcgccaatgagagttgcagagcaacggtgtcgatcgacaccatccctcatgtcgattgacaccctcaggtttcacagacagatgattctgcacattctcttcagcccacaccacctgaggatctttgtgataagttctcttctctctcttctcctgctttatcttcaattaattctttagattattcgaagactgcttcactagataacaagcctagagttcctcgaaagcttgtttctcctgttgtttttgcaggtgacgagatgagtgtcgatcgacacacccctgagtgtcgatcgacacatgcagctgctccagaccggttcagtttacacaccgccatggagggggcggaggcaacaacaatcctccaccaatctacccacatcctgaactccgccaagtcaaactattgactcaaaacaagcacttagtgggaggtaacccactggtttgattgttcttttcttttcttttatttttgatttattttttccgccttcttcgaatttgaatgccattggggacagtgtcgtttaagtgtgggggaggttcttaccaatattgcttttatttttgattcttattatttttgtttttgagtttattgactcattttcttactcttaaaaaaaaaaaacgtttagtttagtttagttatgaactattgcctgattgatgagtgttgcaggttcgactcaattcgactattggaaaatctagatggcataccaacagacttgaggatatcctagtttccaacacaaccactaaggccggagctaatctcactgctcttcctttaaactcttcaaacggttagtattcatagatctttactccttgttcatacctgatattgagaccaatgtgataaaaagaatatgttcctctccccttataaaaataaataaataaataaatataatgagagattgagacgactttcagatagtgtataggggtaggaatgtttcctatgaccccattattatacattatttggaatgatcaattacaaaggttggaaaaatgccgaggatgtcgatccagtatgcgagttctcctttgtttactctctaaaaagaataagtctgggggagagaaagaacaccgaaaaagaaaaaatatataaagaatggtcaatttatcatggtagagtacatgaatcgtctagaaggatcttgaatgttggcctgtttgatgagacccagcgatgaaagcctggtgggtatagtcgtggaacttaggtaatggaatctaaaatgttgtgtaagcttgcagagaagtacatgttggttaggatttgattagacttgttaagcatatggaattagtttggatgatcatggcaataggctagagaatgttgggagttcctttgtttaaaaaatctcttccacgggttttgcttttgtgttttgcttcagggcaagcaaaagctaagtctgggggagttgatataacccgattttcaccaattttatctatgttttaggtataagattttgagtctttatgttatttctcgagtctttttagtgtattttcaggtattctatgcaataggacaacaatggagataaggagacattttggagcaaaaactaaggaaaaggaagctaaggccgattttggttcaggaatcagcgaggagtgtcgaccgatacacttttggtgtcgatcgacaccagtttcggcccaacaaaaaccctagacgctttcgagttcccagaagctcaagtttgccccagaagatttccctatttacattattagtccctggacgtttttagggtctatatatattgtttttagacctaggtttcttttatcaagtcttttatcaagttctttgcaaaaccctattgtaagagacataagctattcatccattgttattcagagtttcattcagatctatatacagtgaagagatcccttctttccccttctctatttactgtttttatgctttttatctcaaatatgttgtttgcttctaccaatatgtttgagtaatctgcttgttaggaataggatttctcattagggattcttatggtttagtagattgcctccttgctaggttatctgtagaattcttcatctttaattgtgcttaatgctagatctagattaattaactagatcttgaatccaaacaatagatatgcccgccataggtatctgtagttggatctattatttgatgagtctggtttataggtgtgtaataagaatcggcctatctactaagatgaacaattgaactcgttaagaatgcaaatttatgttgatagtctctcggcttctacggtcactattagctatagatatagggagtttcgcggcacgcccactggttattccataattagtgtttgagtttaagaattgttcgataataacctagtgttcattagatctactaaccaatagcttcttgagaataccctgttcctaccttttttcctaatcgtttacaacccaatcaatttgctgttttcttattttattttcttactatttcactcatacccagctagcttaatct

SEQ ID NO: 1807 - DNA, 5943 bp, Arabidopsis thaliana landsberg
tgcttcaagttgttgcgccaaggattgatttgcctgctcttgatcgttcaccttctgttgaagttgagccatcatacttctcagatccgctagggtcacgagagcagcggcttcaggaacgtttgtctggatcggagggattggttcccctctacatcaactgtgttaccggggatttgattattgaccaccgtgaattggctggttggttctgtgttccgggagtaagagaaatctctcccctccttctagcgccaaattgtgagagtcgaaacttgcacaatagaatttattttaagggtttcttcaaagaacgaatctttgtgagattctcaaagaacaacagaattctcaattaccactgacggtgttctttattgtattaatgagaaagtatcgatttgatcgtacaaatgttctagagtatgaaaataagtgtttttgcctttaaaatcagagcgtttttgatagcctgaagttgagagcgtttttgtttgtgtccttttgtttttccttcgaggtgctttttatagagctcgaaaatatcgcctctcgcgatattctcggaagatttccctttatctttaagttgttgaagtagattgtccttatcttccgaagattctgggaatttccgtattcggtgatatctttgaagattatctcttccgaggtttttggaaatgatgggtttgaacttataccggctaagtccttttttgaaggtttcttcgtccaacccgaggtttttccgagccgtaatttagctggtctcgggtcgtgctcgggatgcttggaccgcggtttttgaggatacgttcccgaggcgtcttggagcccgcctcaggacgaattgccaggttttatgtccgagttgtttcaaggtcgggtcgggggaccatttcacgagaatgctctgaagcgttctcgatatcgcctcggtgtggattcttgatgcaatctccgaggtgttttgtggcccagtttgggataactcctcgatgtctcccgaggcgttgaaacatggttggctctttatcctaggtggaatccgaccccaacatgaagccatattgttccacttacatgcaatacaaacagacgtcaactcaaccttgtgtcagaaaacgtaatgagtactttatagacgtacacggcgcgattatgagaggtacacagcagtttgcttaatttaaaagttactaatatgatgcactaaatatacatcaacgtcacccacccacttacattgatggttattctccccttttaaactcatgtcaaacacacttagttgaatacacgaattcgtcttaaacctcttcatttgaaaaactatgcctttgctacctccgctaacccctccaaccgagttgtacctaggaatccaattgccaaaccccataagcatacttgtcaactacctccccgtcagccagactcccatagagacgctaaggaacttagtctacagttgtgacatcaacacccttgcaatcgatgaattcatgacgtggccgtcgttactccaaccggagtctaccttccggccatactttgagctgcttgtagaacgtggatccatcccggcggtttaccttgaaggtgttcgccaagcgagcaacttcgtgacagtagctcagggcttttcagtcatgacaacggtcgcttttcagtcttcgtgtacgtacactatatagtacattaaacttggtttatcgtacattgagaaattgcgtacacaacataagtataaatctaatagtttttgatgttgaaggcacccaaactaatatacgtacacgatagcgtacagcagaaactatacgtacattgcgagaggatttgaacaataaaacaaggcacgtacataaaacaacaaattagattaaaatttaaacggaaacaggaaacaacaacgactgaaatgtagtttggttcttatggaaacaacaacaacaactgggaaagaaaacttaattgaaatgtagtcttatattatattaaaacggagaataatggttcattccctctagctaaaaaaccaccatcgagatatccgcaacttctgatctgtccggattggcaaccacctttgaaatagcaccatggctctcaagcttcggattagacagttcggttagacgccaaaagctgagtgcgacaacaaaatttcccttacccaaactctgaaagtaaccatccaagtactccgcctgttgattgcgggcttcgcactccaagacttcattgctacgttagaaataaggactgttagcgtttagagtgacattgtaaataaaacaaatgaaaagaacacttactatctatcttttatcttgaaactcagtttgagaccgtaatagtctgtagtcaatgcgccaacatcaaccaacgctccaacgacatctagatgatggagaaacaaagataataaacaaaaaatttcaaaaatgtaataaatgaagcgtcggagttattcctcctcaccgactaaaacgttcttgtaagcagatttctccaaaatgtagtcgaagggagtgaaatcgaaatctggaactggtggtgatctcggtggggcctgaacgacgacggtccgatccataaacagtatgccgtattcatgctttgttgctctgactaagtcagttgacttacggaccaagaaagaggtgatcgtcttccactcattttcaacgaatcggtcttcgtaaaacggagcaaggcgacgatcaacggtggcctcaatacggttattctttacatacagaacatgatagtagacagtttaatatacaagttaagcgaatgaacgagaaaaacacataatgatttaacggaaattaccgcgtaatctgccaggattaggccgagttcgaagacgtttggcgatataaccttcttgaagactctcacgacaaagacataaattcgccacccagtgatcagaggacacaattctgagaccgtatgaaacccctccatctcacggatagcaagaacaagcgattcgaaagactaaatttttttttgtgaatgatataactgccggcacaagaaatgggtttagaatgaggattgtggataaaattaaggaagggaggagacttaaatagaggaaatctggaacggctacagttattaatgcggttacaactacacttgattcaaatttttggtaatagcctggtaaccgtcatatagggtaattataacgttgatttgacaataaacagcaacagttacgtcctttccattaaataccaacacaaccacaatatacccaaccatgtctccaactccgttcatttaagagggggaataagttagattttcaaaaaacttatttcaaattactcaaaatattgagcaaccacctctatgtacccttattacatgaactttaacacgtacacagacaaaaacgttcatagttatacgaacgtagagtttaaacgtacgtacacaacgtacatagttacaggtggattatatataaacttacgtacaccgagaaaacacagaagcgtacactatattggccggctcagaaacttgtcaccggaactagattggatttttgcacgtcttcttgttatgacctgcttgtcgacagcgtgagcactgatttggtaaaagtcttttctgtctctttttctgaagtgacaaagacaggaagttaaaaatctccgcatggtaatactcaaaatacaagtagatgaatgaacgatgttagtacatacccggttttcacctctagatgggatccttttggacagtggtcttcctggtggccgtctactgtatggaggaatgagtatcaaatccactatatgttgtgggatgacaacatcttacggatccgcgataggtagaattggttcttggaaagaatcagaaaacgtttgaaggccataccaccatccgacacaagacttcggatcaattccatgctcgattgcagctgctagagcgtgttcacatgggattcttaacttggtgtacctaagacacgtacacgtacactggtccagaacgacatgaaaatgctctccggatttacttgtcacttgatagctccacggtccagacatcttcacagcgtatttacctgacgcaggcaactcttgtagaaatctctcatcaacctcaggtgtcacagaagatttgcacctagcaactttcttcctcctcgatgcgaaccatcgcattaggacatcccgaatgaactcgatcatgtaaacaatcggataagtttttgcttttgttaacacatgattcatggactcagagttgttgctagacatgatattgtagcgttctcctctacagtgagctcttgtccaatgctcaaatcctatgtcctctaggtattttgcgcatttagcactcttttcccttaacagtccaaaatatttctcgaaatccctgaccctataagctttggcagcgctgaaaaataaagcagacacaccaaacttaccataataggtggagaggtttcgctcaaggtgaacagcacatgctccatgatgcgctctcgggtaaacaacacttaggcctttgtatatagatgaatgtctgtccgagacaatcattaaatcgtcactgtctggaacaatctcagctaacttttcaaaaaaccatgcccaagaagcatcggtctcaccatcaacaacaccaaaagctattgggaatatttggaagttcccatcttgggcacatgcaataaggagacatcctttgtaaggtccgactagctgcgttccatctaccacaactaccttcctcatatatatcagacctttgatagaagcgccaagagagacaaagacatacttgaagcgctgcttaccatcatcttctggtgtatagtgtaggtgtgttattgtacccggattagctaattggagaagatacagataggtcggcaaaaacctgtaatttgctatctcatccccccttacattttccactgcaacctcttttgctctccaagcggtagaatatgaaatccgcacattcagatcatttaggagcagctgtggtaagtcgacagctcgcggcccaccctgcgtagaactgtatctgctcctcacaacttctccgaggagcttataattagcatgtttattgtagttcttccgagagtcgatgttacacgtatgtgtcgtagcatacgaagtgattttgaaactttctgaatccttcacgacgcgagcagtcaattgccatggacaagtctcatcaacgcacaccatcttcaatgttttaggacatgacttaggttgcttgaagcaaaagcattgctttatcgcttgaagagacattgtttgttgcaggacttttctattcttaaaaacacttccaacaaacaaagtttcgcctgtggtgctgatttcaacctgtgtctcatcagctcgaaaattgagtaagtcatcgaacacaggagcagcatcgttaccgagattcgccaactcgccaccatgtaacttaggaaattcattatacacttggtaagcctcagctgcggtaactaccccattatcattttgtgtcccagttgaggaagctccaataccgtcaatcacttcatccccggtgacttcgtctatacaaataagattggaatccctttgcccttcgcagcgtgtaccgtaacccaatggagaaattgtttcttcgccaggtacactaagaccagtgtacgtacacgtttccaagaaacgactgaattcccctgtatctccgccaggtacactaacacccgtgtacgtacacgtttccaataaacgactgaattcccctggatgttgagcagtctgttgagtgagactgacgtcttcctcaacatttccttgtacatattcttctactatcccatcgttccacttgttgtaatcgaaatcttaaacaataccttcactcccgtctgggtaggat

SEQ ID NO: 1808 - DNA, 5484 bp, Arabidopsis thaliana landsberg
gagcttatgcttttcattttgtttgtcatccttgtctatctctggttaaaagaacagcatatactcgaaaagacttacaacttcatgtggatcagaagcaggatttgtggcttctccagttgaaactaaaagaattcagcagtttctttagagcaagcaattttgagataacaaacagaaaataattactgaaactaaagatagagaatactaaaatgctaaaaaccttcatcattttccgacagagatgatgacgttgatgaatcgataccaatccttccatgggagataacatcaaccaggtcactctgcaatatattgtacaacaaaaattagaaaatttctagccattcttattccttgtaataactccatcatgacaaaggctcacatttccatctccgctgagttcacatcttgacggttcttcttttactgggactgcataaaccataattggttatttctattctaccacacacactagcatctgaaaatttggaattctacacaattttcatcatttgtagttgagaactgttctccaagatataatattcctactattaccttcaacatcaataactatgtgttgcaatactttactctccctttgggtatccttcgcaactgcaatagaaagatattaacacagaaataacatcttccttctcttgtgttatcatgttaaacttggggaaattcaatgagaaataagatcttccttcccaaaaacaaaattcaatgagaaattcagagaagaaacactcacagcatcgaaggaagtcatacttatcgatggcgcaggaggttttcttagtaactggggaatcgaatttgcgaaggagtttcttcaacacggtcatcctcgtcagagtaatcgaatacatcaatcggtttccgcttactgcgggattgaactgaccggagagtcatcggcgccagaataatactgagttacagttccgacgggctcgagaaggttcgaagcgtattctgtatcaaagagacgaaattttgaattctgtctggttaggttgacttttgggaaatgaccacagattttcaaaattcaattgtttgtctatccggttcgaccggtcagatccgtcaaaccattaattgttcgtctttccggaaattccaataatgatcataaaatcgttttgttttatttgatgttttggagattattttatatatcatatctttctataaattggtatggtatgtgtaattggtatactttacggtggtaattggtatgtgtaattgtgcatttctaagcttagaattgatatttaaaagttaaaattatagagtacttaacatgtgtacgtattagagttagatggtttttattgttgaactaactttaataaaaatccttgaattgtcaaaataatctattaaacacacattaattagttgaactaacaatagctcaagccaaccataaccaaaaccatatatgatatttgaataaaaggtcttcataaatcataatccatagagactcttgccttgccactatataaactcaatcgcatatctttgaataactcatcacacaaagcaatataagtcaacaaattgagaggcccacttagtcatgttaatatgggctaacccaccccaattaaacccaccccatttaaacccaccccatttaacttcaaacccatataaacccatttatatttgaaccccatttaaccttacccatttaaatttagtaaacccatatgaacccatttaaacctattaagtgagatattgtcttttattaattcattcataaacttgatagataaataacaatagcccataaacattagctaaatctgaaatatttataatttactaaacatagatttcaataacatataataataataatattttcaaatttggcaaaaaataattttttgtgattttggcgggaaaacttgattttacggttttacgggaaaatgtcgtttacggttttggcgggaatacgtaattttacggttttggcggaaaacactttttgtgattttggcgggaaaacgtgattttacggttttggcgggaaaacgtgattttacgattctggcgagaaaacgtgattttacgattttggcgggaaaacgtgattttacgggtttagcgaaaatacgtgattttcaattttggtgggaaaacgtcattttacagttttggcgggaaaacgtgattttacgattttggcggaaaaacgtcggtttacgattttggtgggaaaatgtgattttcgattttggtaaaaaacgtgattttgatgggaaaacgtaattttatgggttttagcgggaaaacgtgattttacgttttgttttaaatatatttagtattttgctctttattttagttataattaagttatctacattttaataaaaataagtaatataaaataaaacataaatgggtttaatgggtacccatttgtttgtgggtaaacccatttattaaatgggtttaattggggtaacccgtttaaccccatttaatattattctctaaatgggtttaaatgggttaattttttttgcacatacccatttaataaatgggtattcaatgcccaagttaacatcactatatctgatgttcattaaaccaaacggaattttttttgatgatcgcatcaagcattggtaataacgagtacttccttgcgttgagaaacacactattcaaagattccacacaattgcttgtttctaagttgtatctttctccggagaaacaacatcttgcccatttttcattcactcttgtatcctccaaatacttggcgcagaaagatatctcaacttaaacacattatactccttgttgaactcactcacattgtatatgcgacttaactcgataaacctccatgtgagtacgtctctgttgacgttagcagcatttggccgtttcacattttgggacaaatgccaaatacaatactcgtgatgagccgcggtatacacgctccgtatgccctttatgaggcgtgcatttctgtcgctcatgaataccaattcagaagtatcgtgtacaactgtttttagcttctcgaaaaaacaatcccaactagcatcattctcaccgtcgagtacgccaaccgctatgatataatggtaacaattagaatcttgagtcgaggcaaatactagcacaccaccatatctgttcttcaaatgtgttgcatccacaattataactttcctcatcactttaaagccttcaatgctagctcccaaagctatgaataggtactaaaattttacattctcatccactaattgtgggttacctttccttttcctgatcctactactacttctacttagccgagttgaagtatgcatctattgtaccttctaatcgagaagatatatgtattacgaatttcagataaccaagaacagctttctttggcacgctttaggacataacgcttcttatccgacttcttaatcacataaccaaaactattaacaaatgcagctctatccaccacctcgtgcaatgtcgccttgtttaaaaattcttgacgtaaggtcaaaccaattccgtcttcccatccttttttaaactgaccaggttctatagtaggcggtggctcaacatattgttcccccgtatcaaaattatccatagactcatcaacggtttcatcgtgtgattcatcttcttgagtctcgtgatcttccactattgcctcaagttgctgttgagtcccttgttcctcttctaataagacgataagtgcaccatcatctactctcatttcatcttcctctgaattcaactccgtatagttcttaccaacagaacttttaccaactctagacaattgctcgggcaattgctccggctcgggcggtttaaagatctcctccacaaccaaaacacttctccggttattttttgcggatgttacataaacaaagacatcctcatcatcacaaacgttcatttcttcctctactccgaacaaccgtggattgtacctaatatgcaattttaccttatttgcatctaatccaagcttcgtcattatcctatcttctaacattgagagagtaatcttctcccctaatgtcttcatcatcacattatacatgcgaccttggaatttaaaatatatgatcacgttctctttcattgtaacctgccaaaacaatacacatactcagtcaatattactagtattaccgattctagtacattttcagtaatactagtactaattctaaaatattacatgtgtgagtaatactattacatatatgaaatactacgtgtctaagtaatattggtgctattaaaacatactatctatataaattacggtactattatagctagttcgaccaatattattttcgcgacaagaacaaatattcgatttgagttcaatttagtatgaatcagcatgtgaaatcaattgcttacccattaacagaccaaatgaaacctaaatctatacttaaacttctaatgtaggtgctaaaacacaataacccaaatctaattggattgaatctcaaaatcctcaaaatatgtaattcaaagcttttgaagctctcttcatacctggacttagtagattgatgcagcttgcaggaggagaaaaacgacaatgcggctcgccggagctcgttggagctcgccggaggaagaagcccgaagaagaaaacgagctcgagctttttttctttcgttttccgtttttttttttcaaaatgttttatagaaatattaattattcattcaaaataaaatacaggggtaaattcgtcttaacacaaatcattaactcaaaagagatatgaagactgtaaagtggttttgcacattatttgtcccacaaaagggacacaagagatgatcattcatttactgcaccagtttggtccggtttactaaaaaacttcggtgatcgattcttattcgatggacatatcaaagtcctttggtggtgatctgtgctcgcgtaccggagaagtctgccgcaggactctgtgaagctttgattcgtcaagtattcgattttactggtaattgatttcctcttagtccacaattcgcaagaaattatgttattctctgttttttagattgttggttcttgctctcgtctcgcattcgaaatatcaaatcttttccacaagattgtggttagaaagctttagggatctttaatttactaactttagcgaatcaattttaggagatggatctggaaactgagaatcgaatcggttcaattctatttagagaagcagcagaattgagaaggaaagctgagaagaaggtgctaaaagcatattgtttacatgttctgtttcttgacttgtacggcaaacaaagcggtagaaccaggagaggtggtagtagccaatgaagcagatggtagtttcatgagaaggagttagataagagatgcacgtcggtgatgag

SEQ ID NO: 1809 - DNA, 3335 bp, Arabidopsis thaliana landsberg
ctttgtaagcgtttaatttctttaaaaggtttgagatgattgtcttgttcattgattcggcttgcccatttccttggggataacgaggtgtagaatggctaagacggatctgccactcttcacaaaatacctcgaattgctcggagatgaactgagatccgttgtcggtgacaatttcataagacaggccgtgcctacaaattatgtctttccagatgaagttccgtacttggacgtgagttatgttggagtaagctgcggcctcaacccattttgagaaataatctgtcagcacgagcaggaagcgtactcctccattgaccatttcataaacggatagggagccgaaaccgtggtgaggagttctgtgggttgaaggataagtggtgcatgcttttgacattgttcgcatttacgggcatatgcttcacattccgctaccagggttggccagtagtaatcatatttcctcactttaaaggccaaagagcgacctccggtgtgatttccgcatgtgccgtcgtgaacctccttcatcacagttcgggtctgttcgccgaagatacacacagtgtcgggagctgagatgatttgtctatagagaatatcgtttgctatgcagaaacgtgcacaagtggctttcaactttcgagttgcccacttctcggcaggaagtgtaccgttgagaatgtaatcccgaattggttctctctagtctgccccccagtcatgatgtggctgatctagattgcgctcattaggactattaacattttcttgatttgtgtcgatggcactaggctgaatttcctcgagatcgtccttatttacgttgagatgttcaggttcgggatcgtccaaccgagcttcgagccgtctgcgcattgcctgagttgtgacgaaacttactgtactgtgatgtatgcttggctggcttattgttttgacagggattatccgcgcaacctttacttcggaagtcgatgccagggcggccagtggatcggcagccgatttttcagctcaaggaaccctagacaactcgaacttatcgaacttacttgacaaatcgcgtactaagtctaagtatgcctccatacggttatcttttgcgtcataatctccagaatattgatttgcaacgagctgcgaatcgcaatgagcttgcaaatttcgcactcctactccgattgcgagacgaagtccggccaaaagtgattcatactctgcttcgttgttagatgcgttgaaagcgagcagaaaggattgttccagcacttctctagtgggagaatttaaacaaatactaactccggagccatgtttcgacgaagccccatcgacgtgaaggatccacggttgatccgtattatcctgttcagaagtagcctaagatatcttgataaggaagtctgctagaacttgagactttaagcttgttcgggctcagaattctagatcgaatttgctcagctcgacagcccatttttccacccgtccgaactgcgttggactgtgaaggatggtgcgaagcgttaatgatgtcaagacgacgattggatgagagtggaagtacggccttaatttctgagcggctgttacaatggttagagctaacttctccatcataggatatctggtttctgcatcatagaaagacttgctgatgtaaaagattggatgctcatcgcttcgctttactcgtaccaggacaccgcttactgcgctttccgaaacaactatataaagaaaaagctgctccctgaactcaggctttgtaagaactgagggctcagaaaggtaagtttttaactgtttaaatgcttcctcacagcgttcatcccaaatgaaaccttttcttactttccgaagtaaggtgtaaaacgggaggcatttatcagttgaccgagatatgaatctgtttaaagcggctactcgacctgttaaacgctgaacttcccttatgctgcgaggagaagtcatcgataggaaagcgtttatctgtcttggatttgcttcgattccgcgctctgtgacgatataccgtagaaattctcccgaaggaacagcgaacgtgcacttcgaaggattcaactttatcccgaactcattcaaaatatcgaaacattgcttaagatggccgaggtgcgaagtagaaaaggcggatttcaccaacatatcatcgatgtacccttccatggttttaccgaagagatccttgaacatcctgtttactaagcgctaataagttgcccccacgttttttagttcgaaaggcatcactttataacagtaggtccctcgctctatgatgaaagatgtcttctcctgatcttccgggttcatcaagatttgattgtaccccgagaaggcatccatgaaagaaaaaagctgatttccagacgttgcctcgactaggcgatctatgtgttgcagtgggtaactgtctttagggcaagccctgtttaggtcggtgtaatccacgcagactctccacttaccgttcttctttttgaccacgaccgggttggccagccattctggatattgttgattctgtaatcaaacaatgaatttgtactaagggatttagacaaattcacttctctcttagctcacgaataatcaaaagagaaaaataaagttgcttgaatataaagttagggtttgctctgtaatagtagtctcttgtcttaggtaggtcatgatcctcttggagagcttgacccccccccccctatttatacaatgggtccaacataccaaaatatgataaacttctaattatcctaagtctaaatcttcattacttctattcttcatgagatcctcttctcttaaatggaagttttccctttacacgacctgagaagccgcctatggcgatcttaactgtcgacctaaatcttctggcgagctcatgacttaggcccattaacaggctagccgggataccccggtttaatcaaattctcgattttattcacgttattccttggtttaaattggtattgtcggaagtgctaattcctgcaccaacactaatcaaaacttttttttttaatgaccatcctatatccaaaacaatattaaaatttaaccatctaataccctcgagttttaacttcaaccagctgatcctccaaaaaatttgttttttttttgttctcaccgctaaaacatgattttttggagccaatgacagcatcgatgccaaatcacatcatatcgacatcaccagtgtttcatttgaaggccacaaagcacatgtataaatttatgaatctcaagcaaatcgagtgactgagtccatcacccgaggatccatgaaccaa

SEQ ID NO: 1810 - DNA, 4747 bp, Arabidopsis thaliana landsberg
  unsure (1)..(4747): unsure at all n locations
tggttagtagctttaacaacataatgcagtagttttgagcttgtcttctcttattttttatagcacttcagtgggagaacagtgagaccacggagagagatattcgatacagcttctgttctggcgactgaaatagatattagtgctatatatagatatgtaggtgacagtgcatttaccaaataccgnnnnnnnnnnnnnnnnnnnnnnnnnntatttgatttttaatttgtttcagttccgcttaagtttactatgtttaccaatgttgaatattcaggtttggtcgcatggaaatctatacaactgtgtagcttatgaaaacaatagatgggtcagacatttttgttctgagatagaggtaaagctttatagacatttttgtaaaagacaagctagtatgttgttgatctatgactgagtgatgtatattgctggttgtccaggttattggagactgggatggtgttctcagcatttttcgagaactgcatattcgacctgagattctattctttgaaaacgtaagctcctttgactgagtatgcatgtttattttgcttatgtgtgtgtgttctcaattccacctacttgaattgcaggctattctaaaggaccagatgttttccgagcagggatttgaagtctgaatagaagaagctttttaaatggtgcaggaaaggaatttgatgtagaagtcaaaaactttataggagtagtatagaacaatgcttttgattgttatgatcattgaatagtagatacttggataccattttatcaagttcaacacttgtataaagatactatcctgataacgttggaagaacatgagagaagcagaagggagccctataaaccaaagcaaagttcttaaacatgaagctttagcagaagatgtacacaacctaaaatttaataacttaaaagatcattaacaaacgcataaaactcaaaattgccatcattgggctgcatgctttgacgaggacgagaggcattatagttgggggggtttcaacaatgatatggcattcttgtttagtacaggactagtgtaactagctgagacattctggattgatctaggatctttgcttctttgcttaggtaggtttgatccaaaaagtgaataaagagagaaagatgttgatttttgactggagagcaataaatgtattcaaaatggtttttgatttctgagtgacatctctaaaaactttgatgttaccttaacagaagaaaagaatgcaaatgttgaatcataaaaatatttcaagaactttaataaactacgatcattcacaaccgcatcaaaagtcatacaaacatacaatagtcaagacatgcatggtagatatttagatatcctaaaaacagagtaggtaagtcatagagtagtagacatggcatggtagatatttagatatcctaaaaacagagtaggtaagtcatagagtagtagacatggcatggtagatacatagatatcctaaacatagatagagcgttaacttcacattcagtttttacgcttaaaacagagtagtcccagactctagagtagtagacctgacatggttgatatcctaaaagaagggatggtttttatgggagtttttaatttcacattcaatctctacctccaaagtcccttcacgatccaagtaagccccctcatttttatcgaaagacatggattgaggaagaccccacgctttgttcgagttcatgagccaacagttaactacagaaacaagcaatacattagttataaacttaataccactagtttatagtcaaaggagtaggacatttgacattttaagttaagaacgcctattgaaaatgtcatcagctttgacaataaccattgacaaatagtaacatcaaatagtttttgacttacggcttcctgttaggtgattggatccacgcgggtctagaaccttcaggtttactcgcacgaaaatcagctcacccttggctaaagtttcaccgtcagctaaatgcaaatgctgaattaacttgtcatctgcctcagagtccccctttggatacaactttagagtcctttgaaacataaccatccacttgttagcaagttaccactaatgcacacatacaacaatatctatcagaaagaaaaaactcaccaatccttttctcccatgtgaaaggttttggatacgtaatcattctgttccagaagagcgaaatcacgaatagtccaagagaatttgtgaaaagggagatcttcaccaaaagaggcgggtcgtgaaacaatcttcacatgagcaccgaactcatgttcttcaccgtacaagataaatccctttgcacggtctttgagtgtttcaaccggaagagcttttgacaatccccaaaccgtttttgaagaattgaaacgcttcacttcaacatctacatgtataaacacatattagagcttcattcttatatatacacagagaaagagagagataagagcatacgaaccttgaaaagagaggtacttcttctcttcctcgctgaagacaaagaaagtgagataggcaaacacatcaatgggtggtgttgtcgatgagaggcattccacatacatagacacaaacccacttccattgtccgcttcgtttccttttgggtgaacaaccaatctcctgatttttacaaaaaggacaagatttcttacttatatatgtatacagtgaagaaagatgggaactttagtgaagaaaaatgtgaactttagcaaagaaagatgagaactttagtgaagaaaaatgtgaactttttagcgaagaaagatgagaactttaagtatagaacaagatcacataccagttgtgtgcaccagaagagaaaggaggggactcgtatttctcgttagcaagctgagaaagtctgacaagagtagaggaaggaggattccttctccaagtcttcaacactgcaggatctgacgcatttgaacccattttctctacacaacttacacaagagaagatttttttagaattccccaaacaacagagagatctatagaaatttgtgtgctttattctcttaagagactaaagaagttgaaagcttaaagaaagaaatcgacgaaccttgacggagatggaaagagccttgacggaattctgcgtcaccttgaagcaaagagagagattgaaaaaggagagagcttttaagggattcttcgtcactaacaagtaagaagagattttctagggtttagatattattttcatacaacgggcctaaagctacaagactggcccggctcgttttttattttagcttcttctgcttcaaaacgttgacgtttcaatctccaaaaaagtgttttaagattttgataatatgtactcgaagagctatgtaatgttgattaaagcttcataacaatttttggcgcacaattcttaatatatatcacgtgaggatcacgtaaacaaactaacagactctaaccctattaagtcctcgcctaatcgcctttggtcttctcttcaacttttcccattttctttctctgccgtttattttctcgagaaaactcagaaagaaaatctccattgttgtttttcttgggaaaatctgccaaagaaagaaggtattgccttcgatcattgagatggatccatcaaacgttcaagaagtggagaagctcgaagaaatagatccgtaagtagtttaaatctcatcctccgagtatatatttatgcttttctcatacattttcgacttggtgcttatcttttgtttagagatctctcactaacgcaagacgatgcagaggaacctatagggaagctaaacgccacctgtgtttcagctcttgctatgatactcaaggtttcgcaaacttcacaaacctaaagaatttgtttttctcgattttgtttatttaagttttcaagaatgtggatttgtgcagtctatatggaacattaacgttttcgcaagctccagagaagatgaatctgtttttcatgagttccttctcaacgatctaagtctcaagcatcctctggtctaacctctgatctttaaaaaatctatgttaccaattacttctttctcaagacttgatgttttcttgttctctacgctttaggaagcaaatggtgtttttgacctgtttctaaacatcttggaggctctgcctaactggggtttgtactttgaagtatacgaagtggctaaaaagatttgcaatagatgcaaactggatttggaatatcctgctgaacgttcttttcgtcttatcatcagtgctagttcacttagagaagtcaaggcaagtctctttttttcccttatacattgaaagtagaattcagtctcgtgaaagtgttttggttatttgcagtctgcattcaaggattttacatttgagaatatcattaaggtcatcaagatgaacttaaagatgccttgtgataaggaaggatgtgggaaacaaagctatgttcaccgtatgataaccaaacttccatctgttttcacaattggtaagcctatggtataagctattaagttaatttgttagtagagatcacaacaaaatgcagtagttttgagcatatttttttctctcgtattgtttagcacttgagtggacaaagaatgagactgcaggagaaatattcgatacagtttctgttctggcgactgagattaatgttaatgtgatataccaatgcgaaggtgacattcgatataccaagtaccg

SEQ ID NO: 1811 - DNA, 2610 bp, Arabidopsis thaliana landsberg
cgcacatcattcaatctccccctcgaaacatcttcttcagaagatgattttcaatcaaatacaatatctcgttggaattaataaccataatcttaatgatcaaaattatatggttttcaataggcttataaatatcattatcttgtgatattttatcatagattattgtcatcgtattacttatgataactctgtaggagttttaatgattttcaaaataaatattagtttgattaatatattttgacaaatgtgagagtcgaaactcgcacaatcgaaattgtatttagggttccttcaaagaacggatctctgtgatattctcaaagaacaacagaattgttgattaccggggatggtgttcttgattttattattgagataatgttgatttgatcgtacaagtgtttcgaaatatagataataagtgtattgccttcaaagtcaaagcgttttttgatggcctgaagttgagagcgtttttgtgcgtatcccttttgtttgttctctgaggtgcttttatagggtccgagaatatcacctctcgcgatattctcggaagattcctctttatctttatcttgttgaaggagattgtttttatcttccgaggattctgggatttctgtatccggtgatatcttcgaagattatctcttccggggttttcggaggtgaagtgttttgaacttacatcggctaagtcttttgaagtttttcctcgtctaacccgagacctttccgagccgtgattaagttgtcctcgggtcatgatcgagatgctcggtctgcggtattcgaagttacgagtctgaaacggagataacgctggctaatctgagaaattttctcgagatccggcgggtgccaaaatccgaagtggaccggtactacatttccccctctaagggaaagaaaattatcgatgggttccagagcaaagacgagccatataccgatcacttcttctttgtagccattgaagacgcttcatcttcttcacgacgtttcttgtcctactagctcggagtcttccgaccatcgcactcaatttttcgtagatatgcaatcgacaaagctttctttgcaggaggtctatgccaagaagaaagaggataaggagaggcgattggcggaggcgaggcgccttgttaatgcgggattgatctcgccgcgggccgatcctgaggcgacccaagatgggaatgttattcccgatgctgccgcgccggttgatgcggggttgatcttgccgcgggctgctcctaaggcgtcccgagatgggaacattattcccgatactgccgtgccggttgacgcggcacccgctgaggctcagggaactaagccgtctattggtgcgcccgaggcggttgtggtgttacctgtaagtgacaaagtggcgggtaagcgcgttcgggttgacgatgaatcgtcaaagaagaagaagaagaaaaagaagacatctggctccgaggcggagaaaatactcccgatcttcgaagatcgtactgcctcggccaatctgctcgggggatgtgttggccccttgcttcctcctccagatactcttcttgaatctcggaagtatgccgagacggcatctcattttctgcgggtatgagctttgttacttgtaacttgttttggtgttgtcattgtaaatctaacttttcccatttccagctgtcgcttcgatgaaccggatggtacattcgtatgattcggctatgcggagcaacatggaggtggctggtaagttagccgaggcggagtctcggattcaggccatcgagcgagagaaaaacgaggcactctgcggaactgcgcgcagcggaggctggaaaggcagcaggtcgagagagatgccgctttgtgaatgaagagaaatggaagcaagatgagtcagcataatctcgaggcgaagtgtgagatcgtccgtcgtaagcggagtgtatccgaggagagagggcttcgtgacagcgaggtggctcaggccaggtaggcgacgaggcggagttgccgagacctgatattgccaaaataaggaccgccgagcacaaagtatcgctccttgatgagtcaatgaccgattcatgtacttgtctcaagcgcgagccaacgcgcagctgatcgaggcgctcgaaggtggcggagttctggagagagagagggagcaggtcgatgagtggttaaaagatttcgctgatgctgaggttaatcttaatcgcttcatggccgagctgaaagatgatctcaaagctccagctcccgagtccgctcctctgagtccgggtggtcataggtcggtcgagtcattaaccgacgaggcgggaattacagagcaagctggatcgctcctccctgccaaggataaccgcccatctgaagatctcgattatggacctgaggcggtttttgttttcctcttctctttctgctcgattataatacttatgcttggatggctttatccgatggtatgtagaacctgtgcctggacggctttatccaatttaagtcactttttgaaatccaaaagttatggtttattagtcccgaatcgttttgaaatccaaaagttatggacgattataatatctcggttgg

SEQ ID NO: 1812 - DNA, 4629 bp, Arabidopsis thaliana landsberg
cccggatcctttttatccaatttttaaaagtcggatactcgcgtataatcctggccattgaattgaattgttattagccgttagattttgtagttttattttgaattatcatacattttaaatacgatcctcatttttaaataactacttttacggtaaaagctaaacattctcctataattatgagattcatcttattcactaaacttgaattccacgaaaaaatattttgcgcatatttttctgacataagaaaatagggaatgtgccactaataggcacttttaggaaaacttattccgtttgaggcacttttcagggatgagacactttcctttgtttttggaggataaaaggacaattctatccttcccacattaaaccatcaattgattaaccggttctagggattttgtttgatttggtatctaataaaactaactgaacgtgtcaaaaaaatatttttcgttttccattttcgaaaatctctcaatcgttcgttcttacagacttattcatggaggtcaaggaagagaaactgatggaggagaagcaacgattgccggagaagacgatccctgtgttcaccgttctgaaaaacggcgctattctcaagaatatcttcgttgtgaacagtcgcgatttctcgtcgccggagagaaacggttccactgtaagcgatgatgacggtgaagtagaagagattctcgtcgtcggtcgtcatccagattgtgatattcttcttacgcaccctagcattagcagattccacttagaaatccgctcgatctcttctcgtcagaaactcttcgtcacggatctatcctctggtatgaatcatctctaactcatgtttatattcctctcgcgagattgttgttactgtggaattggatctcgattatatgtgtttctgattgttgattggattgtgttttttcgatttagtgcatgggacttgggttagggatcttagaatcgagccacatggttgtgttgaggttgaagaaggtgatacgattaggattggtggttcaacaaggatctataggcttcactggattccgttgagccgtgcgtatgatttagacaatctgtttgtttcaccacttgatgcgtctacggtgttggagcaagaagaagagaatagaatgcttgaagcagaaaatctagaggtagcacaacatcaggttcgatctttgatgttttctcatatttagctgtccttattttgctttaattctatacttatctgatgttgtttgcttagcctgatagtgtaatctgcctttactgcagtcactagagaatactacatcaggtgatgagggagttctgcatctagatgtcacgtcagaaggaactggatcatcagttcctagtgaggatgaggatacgtatgttacgacaagggagatgtctatgccagttgcgtctccaagtgttttgacgctagttagagattctgtcgagacacaaaagctacaattcaatgaagatttgcagacttcaccaaagtgggacttggatgttatagaatctgtagcagagaagctaagtggcagctttgtccctagtacgcagcagagtggtggcgacgtggagggattaggttgttctgaactttttgatgctgcagaggcggatgaatgtgatgtcagaggagatggaggcttgcatctgaatgtgatatcagaaaagatggagtcatcagtgcctaatatgattgaagcagaaaatctagaggttgcacaacatcaggttcgggcttctctcatatgtttctggcttttagtgtttgagacattgttttaagtccctcgctgcagtgatcatttgttgttagtttagttgtccatattttatttatctgatgttatttgcttagtctgaaagtgtaaactgatttcgatgcagtcactagcgaatactgcattaggtgatgatgaagatctacatctggatgtgacgtcagaaggaactggatcatcagtccctagtgaagatgaggatacatatattacgacaatggagatttcggttccacttgcatctccaaatgttttgacactagctagagattctatcaagacgcaaaagctacaatccactcaagattttcagacaccgacaatgtgggacttagatgttgtagaagctgcagcagagaagccaagtagcagctgcgttctaggtaagaagctgagtggtggctatgtggaagaattaggttgttttgaactttttgttgctgcagaggctgataaatgcgatgtcagaggagatggaagtttacatctgaatgagatatcagagaggatggaatcatcaatgtctaataaggaggaggatccatttctagctgcaaaggagacttcatcgcttccactctcaacagatttcattaatccagaaacactatggctcgtggaagatgttcaggcttcaccagagttttgcacaagtagtgtaaaagccaacgctgaaaatccaagtagtggctgctccccaagtacggagcagattgatggctgctttgaaacctcaggttgttctgcatttgacttggctgcagaggttgagagtcttagccttcatcaagaagtcagtgaagaaactgaatttgtcacaaaggaagtaatgggagtatcttctgaaccactaggtaaagctgatattcggagtcacgaagagaatggagaaagtgaggactcaaggcaagttattgaagtatctgctgaaccagtcgctaaagctgatattcagagtcacgaagagaatggagaaactgagggctcaaggcaagttattgaagtatctcccaagtccttctctgaagctgagccaactatagaaattttaactggagaagcacaaggcatcataggttctgaattccctagtgaacttgcagtagagactgaaagtgagaacctactacatcaaaagagcataggagaaacaaagaatgatattcagagtcacgaagagaatggagaaactgagggctcaaggcaagttattgaagtatctcccaagtccttctctgaagctgagccaactttagaaactgaggattcaaggcagcaagcccgaggcctcgtaggttctgattctgaattccagagtgaagttgccatgaagaccgaatgtgagaacttactaaatcaaaaacgcaatggagaaaccaaggtcagttcaaggcaagccagtccagtatctgattgtttgtccactccaaaagatcgtctttcaagtatcaatacagatgatattcaaagtctctgctcgagttcgcagccaccttccgagagtgaagtgaatcctgccactgaccaggatcaagaatcaggaataatcagtgagactgaaaaacccaaaacagaattgttaattggttctgggagatctgaaaaatattacagcctaagcgaaatagagggtgaagaaaatactgacattggaagactctctaggtgtccgattccttcggccttggctgcaaaaacatctgaggatacaaaattgattgaagaactgtcttcttctgattctggaagtcaagaaaaccagaccccggaaacacatgctgttagagatgatgtattgtgtgatatggatagctcaagtacatgcaacatttggtctaggagggggaaagctgcttctgttcttaagatacggaccaacaagagtcaaggaaagcaaaaacaaactgggagacaaccaaaagacaagttgcatagaaaacaggctctaagtgacaagtctatttctctgactattcatcatggtgcagagattctggaaccagagatctttactcctgacaaggagaacctcaccccaagttctcatatgttgaaaagattacaagatattggtgacgtgaaagatagcaagagctctttaaagctttcaggaaaatcatgctcgtcattggttcattccagtattgctgttcttgcttcagaggcattcacagaaccagaaatctttaccccagataaggagaatcttaccccaagctctcacatgctaaaacgtttgcgagaatttggtgatattaaggatacaaaaggctcctcctctaaagcaacacgtaaaccattctttgatattcgtatggaagaaaacgtgatggtggaacaggaaccagaagatctacacagcctgggcagcaaatctaagctgaagcatgagcctctggcaccaaagaagaaagctgagcgggcgccttttcaacctctacttgaaaaatcttctttccaaagtcagtcatacactgaggcttcttcaactgcatcagcaaggaataatatttctaggggcattcgttcctcttctgtaagtcattatgattttcctctattgagtctttgtgcagttcttatactaacaattagtttactgtgttttagaatctttctgatgcaaagagcaagatgaagtggaccattgttttggatacttcttcactcctcgacaaagagtctaggaagccactgcagttactacaaggtctcaaggggacacatctggtcgtcccaagaactggtaaaaaccctacaaacattaaatagtttcaatcttcacttaaagctctaaatacaaaaccgtagggtcttt

SEQ ID NO: 1813 - DNA, 1315 bp, Arabidopsis thaliana landsberg
actaaactggacaaataaataatttttgtcatattaccaaacaattcaaactatcttatatacactacaatcttatctccttcattattgtgaaaacatgattctaaacaaagtaaatataatacaaaaaaaacataatatgacacaaattctcaaaatttatattataacatttttacttcaaaaaacaaaatttaaaatttattgaatgaaaatatttggacatgtgctgtaatacggggcttatgatctattttactataatagttatttccctccgtatcaactcgaaaattcatgtttagaaaactcattcttttcccataattttaccaatatttataaaatttaaaacttcataaaattttaaagttattaatatttaaaactttttataaagtttttaatatataatattttgaaacttttaaagttttagttatttaaaatatataatcggagtaaaccgaataacacttttaaacaatttttcaattattttggtctttttataatatgactctaaacaatttttcaattatttaagcaatgtgagaccttgtaatagatatgaattatatgtttgagtattatatgtttaaaaaaaaaatatgaattacatcgtacgcagaaaaatctaatatttaattaactatatgtattttatatataaagtcaaaataaattagatataagaacaaatatagtgacaaaaaaattataaatttatatttaatgtcgatagaaagattttaggaaattagcgttaatcgaatatagtttaataaagaaagatttaactaaggataaaaatttaggttaaagttaattcaggtatttaatgcaaattaacgatttgtaagtttttagaaataaaaaatttggttgaaataaaattttaagggcttgtatgttattagtaaatagtatagggatctttggggaaaaagtctacaaaaaaatatgtatatgtagatattattaatcgtccgataacccaatctctcatttctctgaaaaatcttttagagagagaaagttgatgaattctcttgtcgtccgaaggtttttccggtttccatatcccgagtatgcgggcttatcgtctggcagctcctcactcttttagtggtgttagccagctctcgtccgtcatcgatggctttcaaagcggcgatggtcggcttcttatcggcttttttgccgtttgcttcttcatatttactgtttttgtttcgggtgcgatttctctcatggcttgctttgttggatctgccgcttcgtcgttgtcctaaactcaagaagagtttatggt

SEQ ID NO: 1814 - DNA, 4457 bp, Arabidopsis thaliana landsberg
  unsure (1)..(4457): unsure at all n locations
attacattattgtccctctcatagaatacgtgaaaagactttataagaactatataaataacaaaaattttcaattacctatatcgaaaacatagctaaaaacagtaaaaataggaatatataagtagtaataattagcattccaccatatgcaatcttaaggtggattcaatccataatgatcactttttaatgactcggaagcctttaatggaaactccaatacaaagaacaattacttaaactatagtttctcatcaacttccaacatataaaattgtaacaggattcatcttctttaacatgatcatataggaatattgaagcataaacctttcttctgaagtacctcgaatatcatttccaactttttttcttcttctcgacgcggtggaatatgacccttgcacaccaaatcatcattgaactaaatcaatgagatttttttactattgacgtgccaaatttactctggtaattttcagccaaaaaaggaagcaacttaatttggttgagctttttcttctgcgccagcatgtacttatagttgttcgagattatgtataaatacttttatgagtttgtatagagaaaaagtaagacgcattactcctcagagctcgtatataatacttgtagcattccaataatttgtatgtattttatattaaaaatcctaacggaaaagagttattcttaatggataaatcatgatccttagccaaatagttttccctcatattgattatgggctttggcaagtatcagagggcataactggtgaacattaagagtaaaaataaaaagctaagtagctgaaaataaaggaaacaaaacaacagtacatgtgaatgtcggattcacatactcaaatatttatttgtttagtgagaaggattattcttgaggacaaaaattgaatagaaagagctaagtattatggaaaaaactatgagttggtatgaaaaatgtgtatggtaagttttcacaaaaatgtgtgtgtcttccatggcttcttgccctaatacttatactcacaaatgacattaaattccttattacacacaattatactctcttaaatgtgtccgtttcggtcttcgaattcattgctcaaacgtttgaatttgaattgactctgatcttcatgggcctcgccttttaaccgacaaagcccagcccatccttgacttcgactttgcccccacctcgcggtgtgatcatttcgcccataactcgccttcttcccaagtatcttatgggccttactccttgtgggcttacttttcatctacatggcaatcttttgtaggtcccaaacttcggtgcgggatccgacaccaacaattagcccccaagtcttctcgaagtgcttgtccaattcggaagactttattatcttaatggacaaagattgcgctaaatgacttttttatttcccaccaaaaccttttttactcctttgattccggcattgtccgtatttacccgtatgacatctatcaccattatgaccgcatcttcagtactactattaaagcgggaaaactcttccatttcccccacaaatcccgaggcgatttcatcatcaccaccatcttgcgtgaggtaaattcattttatttctttcttacttttacgctttgcctttagaaagaaaattttctctcttttttctctgcaaaccttctcttcttcaagtgctcgatttttccactctcttccatgtccttcgatgagggggttctagcagcgacagatgcactcgcccaaacaatatctccgggccacactatatatctacttgcacccttcaatccctaaaacgactgaaggatctctgccggattccgcttgagattatggtggaatcgaaaatgccttaccccttagagtccctggaggaccatcttcccggttattattgcgtttatgagatctattttaagggctgcgggttgacctttcctcttcccgaagccctagttcgttacctagaggctcttggaattgccctacagcagctaacccccaaccttctctaaaactatcttgggaatcataactattgcggcggaagccagatatgttatcggggtccccgaactgaacgagcttctcagcgtgagaagttcatcgaacaaaacggggtatttctcggcgtacccaaacgctaatagaaacctcatctagcatctcctgaacaaggatgaaaactaacatcatccttggtttttgattaagaaaacccctacttcaatcagaaatctttccgatgcactcccatcgaagtggtctgtgaagcctggtagaaattaggtcacacataccttctctattcacctttatttttactgaccaaatctgatgattcacttcgtagctgtcatcgatcaaactctcccgaccgaggaagtcatcgaactcttcaaaatcgtcttcgaaggggaaaccctctggaattccttcaccctcgaccggtttatagaggccaatcacaaactcagaatgagccctcccggacagcttcatcaacttccgccacctccttccctatctcaaggaacatcagcccgtgctcttgcttctcggtgcaaggtgctatcaaagccgaaggctgaggcttgcgaggtaaagaaggcgttccttgcgaccaccattgataacaaggaatatagcagaaccttgctagttgacaatggtagcgccgaaggggccagatcggccgatgcgtttaggtcaacgcgctttagaacgtaatcacgtacaaaaaaaggtctgcttttgattttggaattgtaatatcgagctgctgcctgctggtaattctaaatccggatcaaggcttgttctcacctttcgttgatagtatctaatgaatcatcgagcattgctgagttttccttttcgtttaggggagcctctgttcggcgaagtccaggcacgttgagctcggccggaaccactgccttcatcctgtacaccaaagaaaatggagtttcctcggtagaacgcctaagagttgtgcagtaagccaataaaaccggttggagctcatcgtaccatcctcccttcaaatgactaaggcgcttttttaggttacgtaggattgtcttgtttacggcttcggcttggccatttccttgtgggtacggtggagttgagtaactaactttgattccccaatccaaacagaaagcttcgaatttgtgtgaaatgaattgtggtccgttgtctgtaattatctcgtatgggacactgtgtcgacatataatgtttttccaaatgaaggtttttaccgccgagtccttgatgctcatgtatgcttcagtctcaatccattttgaaaagtagtcagttaggaccaagagatactgtacagctcgggttgacctgtgcaatggttctatgatatccatcgaccacctcatgaacgggtatggggcagagaatataatctcaaatcatcacgtaaactcgatcaagtccatattcacttagcctagtcatgcaccagttcaactcatgccttaacgatattaactattaagttcgtgaaatggccatatcattttaagattccagttctaacttaagccgaattctgattagtgaagtctaagtgagtaagcatgcatatgatctaaagactagctctacaaaacatgcaaacaaacacacaattcgaccacaaatcacagattcggtaattcaaaaggttctgggtctcgggcagaacttctcaagcacggtcgtgatcccttactcacagtcaggttttcttggccacaagcaacgattctctagtctcagacnnnnnnnnnnnnnnnnnnnnnnnnnnnttatcgattcgggcaagtttttcttagtttctgtcgagtttttaatcggagagcctttcagtctctctctcttgccttcaaaaatgaaactgggcggagagagctctatttataattcgcccaaggtcagccatgcagcacagcccgctgccacatgtccggacagctgccatgcccacaggcgataggtgtctcggacgacgacgtggtgacacgtggcgacgggtgtcactccaccgccctatcaacttcggctccaaggctcagctgacttcggctccaaggttggtgacttgagccgcaaggcaccgcaagtgaggtgtcctactcatttcggttctgtggccggcggggcaaacttcgccgaggcatgcccaactttttgcatctttgcccattcgtgcctattcttgcccgttctggccctttaatgttttggcacccgtttggacacatgcggtcaattggctttgcattcgggcaaaattttttcatttggtcctttggccgtgcccgtatgccctatatgcgggcactacattctcccatccttaatagaattcgtcctcgaattctaactgcggtcattcccaacttccatgaattctcccaaca

SEQ ID NO: 1815 - DNA, 5738 bp, Arabidopsis thaliana landsberg
ctatgtagattacttaaaaatacccaaaaatatctacaaaatccgagtttatattctgatttttgggttatgcaatttagaacttgttcgagtaatttaaaacttcttagcccaaaaatatattaggtcaggactggttctaggaactttaactgtccaaacaaagtctatttatcataccaatgaacgagaacttacatagttgcattaccatgtctacatgtgagaaagacaatgccaaaattcatagttgaagttgtatcccacatggatgctcaattaacaactaactaattgcatcaccaaattgcatcatatactattatttaggaagtacataataaaaggtaaccttgccttttgtaaaatattactagttttgttttaaaaaaaacattctatttactatgtaatacgggtcaaaaaattagatttgagtagtatatttctagttgactaaaaagcgtgaagcaaactctcccaggcacgactatcgaggagtttccgtctttcaagtttttcgacgccggtggcggggctcttggtcgccagcgttgggatcccaccaccaagagcttgctctacttctgttctcaaccttttctttcctattacttaagtttttttcaatttttttctccgttgttgcaatcctttaaaatcttattgatctcaaccctcctcagcggctatgcttcagtgaccttcaaagagtggaaggagactccggtgaacctcctccctccgactagttccgcaacatccaaacagaagcacccaaaaaccagtgatttacaaaaattagatctagaatccactgaaccaaaaccttctcgagccaaatctcttatcccccatgaagatcactcaccctgggcttcgttgctggcaggagtaatccctcttggattggcagatgcgccaaggggagacgtcgtcggcgcaagacgactctcttcttagggtattttctattttccctggtgctaataagacttcttgtttgctcaactatacatcagaccatgctattcttgtgctcccactgcatctacaatctccaatgaggtcgatccctgcgcaaaaccatcaatttcccgaccagccgccatgagctcaaaacgctggtccccattgcaagattagggtttccccgagtggaacctgaggaccatcctttcatccactgtgttgtttgtggaagaattgtcaacaatctttgatttcacctgtaccaaattactttcaagtgtttggctcaaagctctcaaggaaccattgttgatgtactctatctatttggttgcttatctctttgtggcattggagaatacctagctttgttgtattttaaactttgggatcttagtgtgcttctatccttgtacttgtttttttcttatatgaatgaaatcaagctttcgtcccaaaatattataaaagagtagtatatttcttttaaatataaattagtttaaccaaaagtccgactaagtaatgaatcagaatttgaatatttatatattttttaaatgtatatttttatatacttcaataattttttaaaattttttagtttggagcatttaaaattatgtttacctgttatttttaaagaacatcatcaatatttaatagatcaaaaagttaaaaattataaatataatatttttttaaaataaacggatatattcaaaatatttataatatggggccggttaaatataatgtattatatgatgaatgagttatgatcgttataattatttgaatatttgtatttaattttatacaattcttctttagacgttacaaggtataagaggatctttatctcccaagttttatttttttggtaaggtatttctcaggttctttatgactaatgaaaaagagaagtgacaaggtattagagattttaaatcttcaagaatttaaccgacaaatataagtcttcgatcgttgcttacaaaaactgtcaatttttttaaagagtttcagattcctaaattgaaagaatgaatttcctgttcagacattttctggttttgttttttccatacatagtttttcttttttttgtttcaactcatgatattattttttaaatttaatcaaaactgattatttcaactttgggactaattcatttgcaactgctatatttatgtcatactaacagacaattcaattttaatacaactcaaattatcctatatacactaaaatccttatctccttctttattatgagacatgtattaaaacaaagcaaaaataataccacatttaatccaactaaaaatatcaatttgaaaatgatatgacataaattctcaaaattttatactctaatattgtttacttcaaacataaatatttacaattttatttaatggaaaaaaaattatattcgtgttgtaacatggattatgatcttttaaataaagttttacgtaatcatacatgctcacattcaaccaaaaaaaaatgaaaactagtttccaaaggtttattgtttgttactaatatgcttatgtccttttatgtttttacacagaaacaatagtttgtatattgactacgcaacaattcaaatactattttgttaacaatttagaaaacctaaattaaccactgaacaatcaatttcatctccataatgattattaatagttaagcattagggcggatcatctcttctagacacaattttttctttctcgcccgtttcccttcaaaagctctctcatctggttacatgtttcttgtatcctgctgtttcgtctcttttccctccccttttatccaaaaagcttcattaccgcaccaccttcgaacatgctcttctatggtgatagctctaatcttcccttgttaaggattctcgtgggttatccctttcctcggcttttcttgaagtcaagatcagcacctccttgttcctcaatggatgggagctctgcctcgacacgggagctgtggatgcgtcaaaccatggaagaatcatgttcaacagaccgaacctcatctctcgcaccccttgtttgggtagactagtctcagaagcccccaatgtggtcgccggaaagctcaattccgttctgccgccgccgcttttggtgaggaacagaagaagtgtctggctaaccctaatggtgctccggtttgggcctagcccatgtctcatttgccctccctcaagccctttacccaaagctttgaagcccatggagatttctgctgacttaagcccatatcttctaaggccaaggtttggttttatttcccttttgcacagcccaatctttttgaaactgtcatcgtttagggattgtagtggacgctctcatgtgatggtgatgatggatttagcttggtttagttgctacatttcacaaaacctggtggctagttcttatcgttcggtccgcttgtttctttgttggagtctgattttgcatcgtttggagggtagttcctctttggaatcctagagagttgctgcccatgtcaattatcgctgatctcctgtcaagtttcctcccttcagcaccatctatctctgttttggctggttatggacgccacgcaaacagagtaatgatttaccttgactggaatgataggtacttttgtcgagatcagttactaagcttactatggaccctatccgagactcgcttacccaatcgtagtttgtcgtcctttagagttaagactaccggcatctacggagtaggtgttaacgaagctcttttaactctcaatctacctattctccaattatctagttcagtcatgttttaatctattgcttggataatttgcaaccctctgtttgtttaggaaagtacggcgaccatgtcttcgagaggtggttaccgtccctttttcaaccgcgctaaccagatagccacctccgtggagcaccttttcaaaagctcggatgcattgtttgcaagagccgcttatgaccacttagtggtcgaggatttcgtgaagcccgccttcatggtcgaatccaccaaggcctcaacagatttttcaaaccttgtaaacttttttaaaagtgaacatccctttgcaaaactcataaagccactatctttatttccttgtattatcttagattcaagttttttgaatttccctcttttgaggattaagtgaatggaaaattattgtttaagaaaaaaaaaaaataagatgaggacccaaaagctcatagttcgtcttctgtaacatgctgcatttttcaggcaaagcaatccgactaaaatcaaggagatgtggaggggagaagcttccgcctgataccaacggtaagagctccacatgcggtgtagcgatgcagagtagaaaagggagatctacggcgaagaacgagagagacaagtagatagatctgagaccgaaaattgtggcggttccacgagatctttgtcgatgggggaggtatatttgatccggcaaagcgaagccaacgtcgaaggtctctgttttctattccctactattttctctctttcatgactgagcaaggatctcttcaacaaaaacgagatcggctctcttcctcctcaaaacaactctacagtggcggcatggcaacaaattttggatcaccatctcgtttggctgtcctatttcagcgagaatctgcagttttggacggcggctcgatcatgttttttgattgagattagggttttcaatcttggttagttaaattcggtttgtaaatttgagatggctttagttttgagctgctttgtttattgtattgaagtttgtggattgggtttttgggattttgtatatgctctatctagaaatagcccattagacattatatataacaacaaaaaaaacatgaaaaacactagaaatcatacaatcaaatccgcatacctgaaacttaaaagactggcacattcgctaataatgaaacatgcatcaatggtctctcaagagtcatattatttgcataagttgatttgtccctgcaaattccaatacaaagccttgtggacttaattaagataatagatgtgaaaattcaaacacatgaatctgtttaaaagacaaaataaacgtggcattatatcaaacatcttgtaatttcatatacataaatatcaaattgatatttccctctctttgagaactgtccttacgaattcgtttctaaataacatgttttagatcctaactgtttgtgttcttatgtgatggttttttagggaccggtaggtacaacgtgactcattcttgtgagaatccaagttttgaagtatgatttaaagtcacaatatatggttaccatctcaaagtcaattagaaaattttatgtagagtgcaactttttcttgaattggcgtgtgtttggtcttctcgaacttgcttctactcgctatttcaaacttggaaaattttgattttcactctttatcatcttgtttgttcaatgagattagccgttttctttgtatattgggtgtgtccgattatgctcttttcatatgttacggtttatgaataacttgttgaacattttacttatcatttcactccaatatatcctaaaattgggatatcctcaaatcacacctagatctcatgattcatatttctataccattctttcgattttgatcccgcctctgtcaacacctcctgtagaatatattaaaaaaacaaaatgtatttaaagcccattatcaaaataataaactc

SEQ ID NO: 1816 - DNA, 1458 bp, Arabidopsis thaliana landsberg
gttgtgagagctgatgaccctctcttccgttccctgagaacagaggagatcgacgagcacttgacggccattagtgaacgtgactgatcactttcactggaacattcagtcgggactttgcatctctttctgatgctttaattctatctaagatgattcacgtttcagagaaacgtgtttccattagtcatgagtcgtgtagttttcatttgaatcatctgcttcctcctaataggagttacatgtaagggtgtcaaattaaggtcgaatgagatggtttaaggttttgaattttaaaaggcaatacaaagaaagttatttacaaaaattgggaaatctgcaaaacctggacacttggtctttaacataatctcctaaaggaactctgcattttgatgtccgagtccaactcaatgaacagagcttgactgaaacgttttttggaggtgaaattcctttattcgtaggcttgttaaagagtctacgctatagcttaccctcgacactctgccacccttgattgcgatactgatatagttgagcataaaactcaaaaagtcgtgtgaagaagaattttggtaggatgtcctttgttctatcgcttttgatgtatatgtttttgagttgtgcgatgcatgctgcattgtctttgtacataattgttggagcttttttccttgcatatataccacaatctttttgtatatggtaactatggatcttagccatacacgctaaaatctcgcggctagtttcatgaattgctaaaatctctgaatgattagaagatgtggctgcaacagttttcttcatagaacgccaataaatagcaatacccccacatgtgaagacatattctgtttacgatctaccattatggggatcagataaatatcctgcatctgcaaaaccttatggagatcagataagtatcctgcatctgcaaaaccaattaaatcttctaaattggttaggaaaaagcagactcatgtctttcttaccttggagataacgaagtatatgtttaattccattccaatgtcttcgagttggacatgaacttgcacttaagtatgatatttctggactaagaactccttcattgttttcccgaggacataatggatctttatccacatcaagtgaccttacaaccattgggctactcaaggggagtgctccatccatatagaatcttttgagaacattttctgtatatgtctcttgatgcaccagaattacattatttaggtgttcaatttgtagtcccaaacaaaattttgtttttccaaaatctctcttctcaaattctttctttaaatattctactgtgaaggagatctctgcagaagttcccataatatttaaatcatcaacataaactcccatcataacaaatcatttcccaaatctgtaaataaagatgcatggactaacatagtctttttttgtatattc

SEQ ID NO: 1817 - DNA, 5090 bp, Arabidopsis thaliana landsberg
  unsure (1)..(5090): unsure at all n locations
aagaaaagacgaggcttaagattttattaaagaaacatgttacactttattaaacgaacagaacacattatacgtatacaaatttagagtatagcactttaaaaacatacaacatgactctcatatatccaacacaactctttatttttccacattcaaagagtgataaaaatcggcatgcttcaatcacacatacatgtacggacaggatannnnnnnnnnnnnnnnnnnnnnnnnnnnnnnnnnnnnnnnnnnnnnnnnnnncgtcgatttctttggagacttcgacggcaaactggaggagagtctcaggatgagccacctcctcgtttattttctcatactcgaagtgccaatgcaccacactccctgaacctccatgcttaggagtcacttggattgtgattacgaagctcttgtactctttcatcagatcaccttctataaccctgaacgtgatcaagtttttctctggatccaccgcctcaatcctatcctatcccacccctgcctccccatctgtaccaattatttaacatttcatctttataggttaactttgagacttgacatatatatcgtgactagagtggtctacgaatggaaattttgagattattttcttagacacatatgatctagtcacttcaaaataaacatttgtttgattttcttttttaaaaataaactggttagttatatatatatatatatatatatatatatatatgaaaaatgtgtaataaaatattgacttgccatgaacgtagttccagaagacgatagagccgactgtgccccagtcaccttcgtgcagatcacagctctgaatgtttcctggagttgctttagagacatggtgtggtttcccggcaaacatgtgatggaacttctcagcggaacgtttgatctccacctctgtctcaagtgtctccgcacacatacacacactctnctcggccaaaagatgttcgtcgatctctttcgagacctcgacacagaattggaggagagtttccggatgagctacctcctcgcttattttctcatactcaaggtgccagtgcacaatacttccagggcctccaagcttcggggtcacctggatcgtgagcaagaagctcttgtactctttcatcagatcaccgtcgataaccctaaacgtgatcaagttcttatccggctccactgcctcaatcctctccttagccacctttgcctctccatctgcaccaattatttaacaattgatattatatgtttaactttgagacatggttatacatgaacaagatgtatataacattgacttgccatgaacgtagttccagaagacgatagagccgacttgaccccagtcgccttcgtgaagatcacaaccttgaatgtttcctggagatgctttagagacatggtgtggtttcccggcgaacatgtgatggaacttctcagcggaagctttgatctccacgtctgtctctagctttcccaccaaactaggcgtctctggtgtcttcacctcctcttcctcggccaagagatgttcgtcgatctctttggagacctcgacacagaactggaggagagtttccgggtgagctacctcctcgctaattttctcatactcaaggtgccagtgcacaatacttccagggcctccaggcttaggggtcacctggatggtgagcaagaagctcttgtactctttcatcagatcaccttctataaccctaaacgtgatcaagttcttatctggctccaccgcctcgatcctctccttcgccacctttgcctccccatctgtaccaataacatatcatatttataggttttaactaggtttgaaatgatctcctggttatatctatatgaaaaagatgaatataacattgacttgccatgtacgtaattccagaagacgatagagccgactgtgccccagtcgccttcgtgcagatcacatccctgaatgttgcctggacttgctttgcagacatggtgtggtttcccagcgaacatgtggtgaagcttatcagccgaagccttgatctccacgtctgtctctagcttccccaccaaactagacgcctccgtcttcttcacctcatcttccatggggtgctttgttgatacgtcggccataactgctgctttgattttcttgaggaggtatagagagtgagttttcttggggcttcgatagccctataaatagaggaatgacccataaagattcattaagatttccccctaaaatcttatcttcatttaaatgcgtatttcttagcaaaaaataagatttagcaaaaaatcttcattaagattttgtttttgttaaccaaaataataatactgaattatttgcgtcctttcacgtcactcctttctctgttaacgtttatatgctcagatggatttattattgctagtggtgttttttaattttaaaatattaattgcctagaaaatattacagagaggaactcgtaggacaaataaaacttttaagctcgtttcgagagaccaaacatttggtaagaattgaattttgttagtccgtggaactggaacctcaatgtaaatgctcatgcagttgattgttacatccctaattaaccagatatgagtgtttgtagttgtcaatgaaatctacaagacatgcatgatgagagagaccagattgtttcggtcccaaagatctttacaaacgaatgttggggatcgcgattttccaatgtggaaaaaaaaagtgaagacataataactatttgtctaacaattgggaaaataatagagttgttacaaaattatgaaaagggaggtaaaacaaacgtcaactattgatgcacacacatgattaccattgttcgttaaatactattttctttgaagcacaccgtcattatgcacgcatagttatattttttttacgcttatataaacaatcgaattagatcaatgttgtctacaattcacaactttaattacaaaagaactaataacaaaatctctcattttttcttctttcatgtgaccgcgtgcatagtccaactggaatttaccctggagctatacctccttacttatatcgattgttcttataccattatttctgcggatataaaaaaaaaattatttatagatagagtctaataattgggaaaataataatgagagtaacaaaatgccattttagatcattttggccttcatgctcacttttgtttttggtagactagctaggtgttgaaaacggtgtggtatgagtatgtcggtagacaacacttttcccaacactcgtataacttttgaaaattgtaaaatctttctctttaaaatcaatggattctcgattgaaaacttgaataacacattatcacacgtttatcttgagagaaaataggtaagatcgatacaattttcagtgacaactacaaacactcatatctgaatacgctaaacatgtgtgtgcatcaatagttacgttcttttggtctttttacgtctaatttggctaattaaatattgattctaactttgttttccatatttgtatgctttattaacgagaataacgcgtttttcgaatttgttacatgaagcccccagaactcgctaatacaacaaaagactcaaacaaggaagcaaagaaatggatgattccaacattcatgatatcagaaatggatgattccaacattcaacattcatgatatcagagagacgagccttccacaaacatatctcacaagcttttattaaaaccaaacatgacatactcacatttagagtacaaagcttttatgtatcactcacatatattgggcaactctccttgtttattgtatcatacacaagaacatgcgtgcttcataacatacatatacacatatgatagatactcaattaaagagtactctctattcctcgttcaggagatgttcatcgatctctttggagacttccacacagaaatcaagaaaggtctcagggtgggccactttgtcgtcaattttctcatactcgacgtgccagtgcaccacactcccaggtcctcctctcttaggggtcacttggattgtgatcacaaagcttttatactcttttaataagtctccctctatcaccctaaaagtgatcaggtttttctccggctccactgcctcgatcctttcttttgccacctttgcctctccatctgcaccaaatatatttgtttgggtttgactaaaaaatcggtatgaatattaattcacaaaaatgttataaacataaaatttaattaatctatacttttgtcattacatatctgtggatttgattgtaagaatcgaataaatgttttttgtaatgaaatggggagccaaggatttatgacactgagatgtgcccttggccagaagttcacatcaagtatgcatttctgctcacttttttcatagataaaaatatcaagtttaagaacatattctatgtagatattataacttttttttccgataaaagttaagataactttgcacttgccatgaacataattccagaagacgatagagccgactttgccccagtcaccttcatgcagctcacaaccctgaattttccctggagttgctttggagacatggtgtggtctcccagcaaacatgtgatggaacttcccagctgaagctttgatttcaacatctgtctctagcttcccacacaaacttgacgactctctctttgctaaattcattgctgccccggccattttagtcgccatttttttcttctctttgtttaacttgaaaattaaaaggattttgagagaaaatgagtcccttttgagttctttagcctctttttgtagaggattgagggaggtaacggctgaagaagaaaacaaatcattattaattgcaattttgtatcccttctgatatcatgactctatctttttgtctcacctactgaatttttgtaatggataacggttgaattaggttttgatcatataaatgatctagagatcattcagtataatgcggttcaggttgtacgttccttctgcaaattctcgttttgacatatttgttattggcatgtag

SEQ ID NO: 1818 - DNA, 11108 bp, Arabidopsis thaliana landsberg
tcacacgacccagtacatctgtaacggttactatggtatataaaagatacttgcttgaacatgaataactccctttggtattctacgtacatttttacgtgaaaccactacgtgtatttttacgcgaaccaattcttaatataggttttgccattttttttcatttcacaagaaatatatggatatatccatttcaggtcaaaatagacccttttttccaactctttggaagtgccttttcttttactttagttcctttagtaagattatccttgtctttgtttatgcctcgggttggaacaaattactataattcgtcccctcctgcggattattcgacacttttcacaaattttacgaacggaagcccttattttcatagttgttattccttaattctgtgaatatatttattggtggacgaaaaaaaggtttcttgatatttttgaatcttgaattgtatcttcgtgaaaggaatggttgaaattgaaaaaacacttactcatttgaatacttattatggagtctagaaaatggctgtccccttattaacttatacttaagaacttactcaaaattttacctttttatcctataggtatacctatacaaaaatatgtcgaatcctttcagaagcatgaacgaaaaaaaatctttagtatctaaacaaaatcgaaccatgccgttcggaagtgattaagaaagaaaacttttattaattcattttttctttaatttcattcgaagtaaaacatccgaaacttttttgaacaggggtggtattacacaacccccttttttcacaaattgtaagttacagatatctaatttttatattagaaggattaccatatataacacaaaatttctccgccgattctttttagtcgagcttctcggtctgtcattataccttgagaagtcgaaaggattacaattcctattccgcctaaaattcgtggaattcgttgagagttagaatagattcgtagacccggtcgacttattctctttatatttaaaatcgttttgtaggattctttcttatttcgtctatgtcttagggttaaaatcaaaaaatattggttgttttcgcgatgtttccttacgttttcgataaaaccctctcgtaaaaggattttaacaatactttccgtgatgttagtcgatcctatccgaaccgttccttttctattcatgtcagcatttcgtatagaggttattatatcagcaatggtgtctttccccatgataagttaaaattccttattgttctataattttgatataatcaacatgttctttttcttttatttatatatagatatagacgaattatatattaatatatgaattaaattcttaatattttattattaagggtatatgcgtgatacagaatctattaattaattttatttcaatacctgtttttttaatccgatactaactatcgctatcgatagttagatcttataatacctcaggagctaatgaaactattttcctccctcccccctcccccaactgaaagtacaaaacgtgagttcactcacatcctttagacacaattcatccacttaaggtgccttttccctggtcttgatagacgctataataatgttgtttaagaaatagaggaccatcatcctcaacctttctgtggatctttcacccgtcggtactatatttaagagcttctctcttacgtctttgcatttcacaacagtattcttgaaatgctttgtcttgaactccaaacttcccatattctgatacccaagtgtatatgcgtgtttccatataccatatcggattggaacgccattcacgatgaaccactattctttcttcctttccatgcgcgtcgtgcgaagaaagagcatccacaactccataagtcggaggtttgggtcttttggcatgtggaagatgtgttggaaacttggatggttctcaaaccatgccctcttggacttgctcatctccggctccaacttatcgaatgtagtcaacacttcgtgaatatagcatcgagttcattgcttgattttcttcacatattccgagggcgggaaatacatactcagcggtggtatttgataataggtttttaagtcaattaaacctaaagcactatcatgtcgttgtagtactgaaggttgtcaatccaaaggagtgtgatgctaacaatcaagatgtgatcagaagtcactaagtcaagccaagcaataacaggttttggtttattctagcagtcctaagtgaacatgcagaaaacagaaaatcaaacacaaatagtaaaacactcgaccaacacagctcttggcagagcactgggtgaggtcgagtgacaggtcgagtaacagacagaaaataaaacacagatactcgactgcacagtctgttgccaaacaactgggtggtcgagtatgaggtcgagtaacaagaaagaattgcagaaattaagcgacagataacaagatgcagtaaacaacaatagagtaaacaaagaattcaatcagataaagaattcccaaagatggggtaattgagtagtttcgtttcctcagtttacaggtgattgacatgctcaataaattaaccctagacaacaagttcattaaccaaatctaagtgccaccgcaacagagactctcaagttaacctagtcccagactcaatcacaattgacgagagctaacctaacaggcattacgaatcaacaagttaaagccaaaacgctccctgcaaccaatacattggtacagggtcacgaatctctggaattagtggttcagacatttcatcgaacaccttttcggcgcggaaatgtctgggctcaaattccagttgatcagaaagcaataggcattaagaacaattaatccagaagggatctatcaaccaatactcaatcacctagcatactgagaattctacactactctaacccatcctcagaaacctattcactactcagacatcataacagaaagcataaacgttgaacaagttgaaaacatgataacaacagtataacagcaagatgataacagaatgaacaacagtaaacgaaatcaagaactaaagctgtatactgaatactgaatagataaagagaaatccggattacaaacggtctagaacacaaggtctgcggaataaaactagataaaaacttcttgtctgcgaaaatgagaagtacatgctacttatagccaaatatcccgaaaaccctaatactcaaaacgacgaagtattgggacgggttaagaactgagtttatccggtgaatcaaaatgcttacaaggctatctcatcatcatcccctatgcatatgcaacaatcctagatgaaacactctagactcgatcctaaatgtaatgcaactacatgaacactccttttttgtgaaatcattttctgaaatttttcaaatatttttgttttttctatgccttagatgaatgcagattcaagaatatatacaatgcaacacacacttcctgagctctcccccaaacttaaatcacacagtccactgtgcgaataaacttggaaaagagtactcaggacaaatccaatcacagaaacaaaatgaagaaacaaatcacaacagatgatataatacaatggtgaagtgaggcgcttacctcagtcgaagaatgaacgtagttgctcgtcaatggctgcctgtgatttctcccaggccatagacaaaccgccttgttttgtatcagctccagcatgtgggtactcgacctcatcaggtctgtggcggtcagcaccgctctgaggatactcgacctctctccttttgctgcggccagcaccgcggtcgagtgacctcctcgagtgaatgaggcgtgatctgctgctagatcgagtgagtgtagccttccttcttctcttgtgctcccgggactcgaatgacgaatgcctagccgggacatgtgagactctctgctcgctaagctcacgcctgtgctcaggctcatcaaatctcctcgatggcatctccagaggaggctgtccctgtggaatagcagtggactgttactgaaacttgagagtcttgaaacacttggcgagcagcttgttctgcttcttgcaccacttctacagtttactgttgttcttatgagcttcactcaagctcttgttcaccaaagtgatacatgctagtgtcgaactccactgctctgtcttcatccatcccatccaaagcagcttcttctagaagatcatcctcatccaatggcagagcgttctcatagtagaggcgtccaacctcaggctgaaaatcaatgttatctccctctattatccgtgtaaccttagggctagggagaaggatgttagctctcttgtctgtagagtgctcaaacctgaacctgtgcaagtcgtcaaccattgcaaactccaggaattctcagtgacgtaggtgctcgatatccattgctcgcggctcgagtccatcagaaatgattgggactccacaagctatcaaaatcggtgtcataacaccacctatgcacaaagcgcctagcgctctcttgtggctattgctgacagcccagctcttgtatccacacaggcggatctgttgtatgatagtatagagacgtgccattgatttcaccttcgagagacatattgttcttagtttggcggagagtgcctttgagagccatagtgatgatctccatattcgaattggtaacagtccctgtgatctctcggagcagaggacattggctatagaacgttggaagtacctgatgactggactgcgtatctgattgctcttcgatatagaagaattcagcggtacagagctgccaatggtgatccatatgtctttcaactcttctctgtcatacttgggcttagtacctgttccacttgggaaaccaaacatagagaattgcaagaatcccaatccttcgcattccaaatcatcagaggtcataccttggtagagctccacttgcagcgtggagaggaattgaattgtctcatcttcatatgatacatacggataagccatcagagtgtgcagatgacaactctggtacaggtgctgaacatcttccaacaatccgagttgtgcaagtgtggtcgagtaaggatacctcgtgctacagaactcattcagcttgaagagcctaatatattcctcagtaggcaatacatcgggtttgttcagaagtttggtggctctgcgagtatgctcaggcatgtactcgtcttccagatcctcatctataagctcatacctctctgtcatcgctctcttccctcgggctatctcagcttttcttctgaagctatcatattctctctgttctctctctggccttgaagatgacgactctgtttcatccatgttgtagtcgggatcaacagaagaactgccactataatgctcatgattcccctgtagaaatttagaactcaaagctcaaatgtcaataggctttgttgaattcaagaacaagaagtcgagttactgttgcaggggtcgagtgaattctcgaggtcgaacgagtgcttgtggtcgagttccgttgtcgtaatcgagtggactctaagacttcgacggtgaaagaggaggagtactcgattgcggcagcgcagggatggtcgagtgattctcggaggtcgagtgagctacaagacagggaatctaagtcgagaaacttcttttataagagacggcggttgatgtggatgaattggtcgagtattgggacggaatcaagtgaagtggtctggatcgagtagatctttggacggcgattcgtggtgtagagaaattggagtgtcggtggtgaggtgaagtggtgataggtcgagtggattctgtgaagtcgagtgaagtttcaaaaagagtggctgaggttgacttttagattctctctccagcttatcctcagcgcgtggtccacactctgttgactgagaaaacttgtagaaaatctactataaacagcaggaaatccctgcaagtctctgtagctcctgttggtcgagtacagtgatgttttaaaaaattatgaattttaaacatcacgtatactcgactgatgtacttgaattccgggtcttcagatgcaacataaaactttcaaaattttgtactccaccaggctatacactcgatctccaggtcttctgtagagtaaaacttttgaatttttattctatctcctcgttgttcccttgtccctgagaaccacaaacacaactaagacaaatcaaaaataacaagaaaagaaaaatttatttacagagatagtcttagggtttcctcccaagtgagcttgtttaaagtcattacctcgactcctttactcctttaatcatcaagaagttcctggagatgaaccgatgtcacgtctggaaggatttgatctgctaagtatttcttgagcctttgaccatttactgtgaagtctccactcttaccagctagagtgactgctccataaggacggacctcagtgatacagaagggggcagaccatctggatttaagttttcctggaaagaatttcaagagagagttgaacagcagcacctgatcaccaacctggaaatccttagtgatgaacttcttgtcatggaaaagcttggttctctccttgtagattttagagctatcataagcttctagacggatctcatcgaggtcactgagttggatcaatcgcttctcctcagcagtttttatgtcaaagttcagaagttttaccgcccacattgctttgtactcgagctcaacaggtaggtgacatgattttccatagagaagattgaaagcagttgtaccaatgggggtcttgaaggctgtcctataatcccataatgcatcatctagctttgcagaccagtctttccttgtaatcccaacagtcttttccagaattgtttttatctccctattggagatttcaacctgcccgctcgtctgtggatgatagggagtggtgaccttgtgctttactccatgcttcttcaggaggttctcaaaaacccttgttgatgaaatgcttcccaccatcactgattactacccaagaaactccacatctcgggaagattatggtcttgaatagcttcagcacaacttttgcatcggtggtaggactagcaatagcttcaacccactttgatacgtagtttacgacgaccagtatatacttgttaccgtatgaagatgggaatggacccataaaatcaatcccccatacatcaaagatctcaacttccaagattggattctgaggcatctcatttcttctgctgatattgccttttctcttgcatgaatcacactttgaaacaaactcttgagcgtccttaaacattgttggccaccaaaagcctacttgaagaatcttggacactgtcatgaacgtcgcgaagtgaccaccatatgctgagccatggcaatgcagcaggataccttccacttcatcttctaagacacatctcctgtagatgttatctttacaaagagtgtaaagataaggctcatcccagtagtaatggtgtatgtctctaaaaaacttcttcctttcataactggtcaggttgggaggctttactccgcatgccaagtaattgatgtgatcagcataccatggagatcctccttcaacaacattcagttggtcgacctctttccctctgtagctccttccaaaaaattctacaaccatgagcttctcttttggcattaaatcgtctatcgaaatgggttcttcaattctcatccttaacagatggtcaactgcaccatttttaatgcctttcttatctactatccccatgtcaaactcttgtaatagaagtatccatctcaacattcttggttttgtatccatcttggcatacagatacctcaaagttgcatggtctgtatagacagtgacctttgatccaaccaaatagcttttgaacttctcaaatgcgaatacaacagctagaagctccttctcagttgttgcatatcttccttgagtttcctccaacgttcggctggcgtaatatatgacatggagcttcttgtctattttatggcctaaaacagctcctactgcgtaatctgatatatcacacataatctcaaatggatagtcccaattaggcgctcgaacaaccggagcagataccaaagcatccttgatggtttgaaaggatttgaggcagtcctcatcgaattcaaattcggtttccttgcacaatagtctggttaacggcctggctatcttggagaagtctttaataaatattctgtagaacccagcatgaccaaggaaacttctgatgtccttcaccgtttttggtggctgcaactgcatcaccacttcaacttttcctttgtcaacctctatacccttctctgatatcttgtgacccaacactatgccttccttcaccatgaaatgacacttttcccaattgagaacaagattcgtctcttcgcacctggtcaataccctgccaagattcaacaaacatgaggagaaagaggggccatagaccgaaaaatcatccatgaaaacctccaccatctcctcgattaagtctgaaaatatagaggtcatacacctttgaaatgttgcaggagcattgcataaaccaaatggcattctcttataggcaaaagttccataaggacacgtgaaagtggttttttcttgatcattagggtgaattggtatttgaaagaaaccactgtatccatcaagaaagcaataatatggatgattagccaaacgttcaagcatttggtcaatgaatggtaaaggaaaatgatctttcctagatgcagcatttagctttctataatcaatacacattctatgcccagttatagttctagtcaggatcaattcatccttttcaattttaacaatagtcattcccccctttttagggacacaatgtactagagaaacccaaatactatgagaaatagggtagatgacaccagcatcaagcagtttcaattttttttttttcactacttctttcaagttaggatttaacctcatcttttggttcaatgctagaatatgattcgttttaaagatggatcctatgattggataaactaggtgaaattcctttaatgtcaaacaaagaataaccaatttctctcccatactttctaagttgagacagtaacaggttcacttcatcatcatttaacttagcattaatgatcgtagggtaagtagagtttaaaccaaagaatgcgtacctcaaatctttgggaagtggtttgagattgacctttggtgccttgagttcagagcagtcatctgaagttggaatgatcagctccccatagtcgctgacagtcgcgctcgagtgattggtcgagtatgttctcgagtaagaaggttgagcttgtgttgacccttcttcactcattgccattgcctcggttgctggtccattcaattcctcaaagtgttctgactcttccatcgctttatgtaagtctaatagcttctggtatcccaaagtctccaaatgcagaatctcgtcttcaccatttttggtcaaagcactattaaggtgatcttcttctgcaagttcttccagtaactcgtcagctaaatgatccatttcttcgatccaaaagagtttcccttctatggtaggcttcttcattgcatctttgacgtcaaaggtcatcctaaagtctttgccaaggtttagatcaatcttccctttcttgacatcaatcatagaacctgtagtttctaagaaaggtcttcccaagatcaaagggtccttgggctcttcatccatctctaggactacaaagtcagtgggtatctctatagctccaatcctgattggtaggttttcgagtaaaccatgaaagatccttactgatctgtcagctaggattagggatatgttgcaagatttgtatagagtgaaccccaatcttatggcaatagagagtggcatgagactgactgatgctcctaaatcacataggcatctgttgaaagccaatggacctaaataggatggtagagtgaatgaaccaggatcaataagcttcttaggaatggtcttcttctgtatgatagcactgcattcgtgactcaataatactatcccttgcacttcttgaattctctccacgatcaagtctttcagaaacttgtgagagtctgggattagcgctagagcgtcaacaagaggtatccgcaactcaacctccttaatgttcttggcaaacatagctctatatttgtctgccaacgctttcttgtgacgcccaggaaatggaagctgcggtttgtagggaggagggacaaagaccttttctttgtttttgacagcaactggttttggagcagttggtgatgctgctgggatgacaggtcgggtggttggtcgagtaaccctgtcgagtggtagatcgagtggttgctcgagtgactggtcgagtggttgctcgagtgcctggtcgagtggttgctcgagtgactggtcgagtggtttgtcagcttgatctttctcaagacttagatcctccccatcttgatcttcactgtcctcagtgaccgtctttggttcctccctagttggaagtgcttttccactacgcaaggtgatagcatgagcatattcttttggattctgaactgctttgcccggtagttggcttgtctgtttttgagctgaagaagatgcagaatgtccctctaagtaacggactttggtattcagtgtttccatcttgacattgagatcattgtagctacagtccagcttgttatgtaactcagatatcttctttgccatctccatggagccagaggcttgcccgtgaagcagctgttgtagcatttgtttcatatcagcgtcaggagcagcaggaccttggttttgctgaggtgcaaacccaggtggtggtggttgctggtagttcccctggaattgctacttaggaacgaaaccttggttgtagggaacaaaaggtttgttctgaccttgtttttgctgtggcggatacacttgatcctgaggattagcaacgttggtgctgtggtaggaagaaggttggc

SEQ ID NO: 1819 - DNA, 7543 bp, Arabidopsis thaliana landsberg
  unsure (1)..(7543): unsure at all n locations
gaccaaaataaagagagagggggtagttgtatgtagtgaataagcaaaatgaaagacaagtacttaaaataaacgataagcaataagagagaagcgaggatcgaatccacaaggataaaagtagctcagagagatccttaagaagagagtgaagcttggaccaaaataaagagagagggggttgttgtatgtagtgaataagcaaaatgaaagacatgtacttaaaataaacgataagcaataagagagaagcgtgaggtctgcgagggtttctccggatgtcatcgttcaacaataaggtatagatcccaattgatgagataacatggttaggtttgtttacttccaaattctcggacatacgaaactcattcaagaccagatagccctaacagctagtaggtgaaagccggctattctcactaatacctcgcgtactcaggtgccctaacggccagtaggtgctaacatggtttcgagatacagatcaaagcattaagttcaagttttattctagtccataagtccctatcactcggcgggcgtgcaacgattatagttctttatttagttgagttagttcaagcatttatacaagattctgccaagtataaaatacctaagatcatgtactaggtggcgttccggacatacatgcattaagattaaactcaactagaaagaatagtgtaagcgatcaaacaaaatcatagaaactgccaacctaaacttgatctaaagtccccatgaattcccctttgaaaccccctcaaacccaactagagatctgctcgctcatggcaaaggagctaatcaaaagttgggttaagtaaaccataacaaaaagataaataaaacttaaaaattgtttagagattacttctttgaatgtagaacacaagaggcaaagctccaccttaaagagtcttataaaaaacgaaagagaaagagagagagatggtgatcttcgagctcaagaggtgcggcggcgagttggtagctctcggcgatggctagcgtttgcttgtgatgaaggcacacctatggttagggcttagaataagtatttatacttgatggccaagaattaggtttaggagtaagaacgtcaatccgccggataggtaagtgatcgggccgagtagtgggcttcagggaaggacttgggcgtgacctaatggtcagtggaaagcttctcggatctgcctgggaattgattgtttttttataattttagcttcaaaactcttaaaaccgtcttggctcgtagaatacgtgtttctcctcttcttggctctagaatggcaccaaaagatctctgaaacataagaaaacaatagctaaaaagggctaaaaagctgtggtatcaactcccccagacttagactttacttgtcctcaagcaaacaaaagaacaaatctggtggagagatttgaaaattgcgggaactctcctgttatcagggaccgtgtctcgaatatgtcctacagaccacattaaacaaatgttgcgttagaatggccgctcaatagtcctacacctttctcgtccttgtccatccactttgatcctacagaactctgaattcacgtcagtcaactctttacattctttaaatgttagggcgtggactttctcattagaaggtgtcattcggggtagacggcgcttggtatgaaagtggcttttggtgtttaagtagtggagttaaagtgtttcgggttactgtatagtctcgaannnnnnnnnnnnnnnnnnnnnnnaagagagaacagatcggttgaggtccataatttccaaccatgtcttgcttttaaagacctccttctcctttacttctttcttactttctgttccccagacttagatttttccgagggggctctcttctgtaattggctcatctcttctttaggttttcttgtctttccttggaactatgccaccggactctcttggttgtaatgtttcctttcttccttttcttttcttcttttttttttttgtttttttttgaaggggaaacaaaacttctaaacactaagtctaatgagcataccttttgaattggttccacggaagaataaactcttaggccgtttgttgcaatctcttcttttgcttccttcttctggcgatgtggcgggaaactgtgttgtttctttctctccgacgtttttgcacatatctgccaaatgaaaaaggaaaagagaatgcatgaggctagaaaaaaggatagggtttaagggtaggaaccactaaaaatgagtggccattcaagatcagcagagagtagtaaaaagggataagaagacatgaatgtatatgctcggaaccccgctctaacaccccttcaagagaaagaatgaaggcaaggtaaatacaaccaaataaaatagagttaacgtctaggtcaaacagagtctctgtagtgagaattcaggggatagatacggtagtgggtttctaggtattgtccgtccttgtgagtcctgcaaaacttgtcacttagggtatgagttagcacattgtaatggtcttattaatcatatagtaggttcattgttccctacattgtccttgcccaatggtaccttgaaaagaaataaaaactgaaaataaaagctttttgctttgttagagcgtatcagtgtaaaaagtggataaaggtctcaagtcaacaaaataatgagtagcattagtagtaacggattcattaaccccccatacttacgtcacaccgtccccagtgtgagaatgagcatagggatgaatttgtgagaaagataggttaagaacaatgtcaccttggttgtgatgactaaccggatggtctctctccttgcttaacatcgctcatactcggcttagtatggttgaattccatgatattaatctccattcgcatcttccttgacacaaaaacctaaaacaaccaatagctttaacaaaacaaaataaataaaaagatacctaagatagatttgatcttgttgttgtcaatacggaaacgaataagatcaaattcgtggtgacgagtggtgtgaatggatggcgggcagttgcgggcttggccaaaagggtggagtgggttggttaataaacgaccaggtgttggatggggtcaccggtcgttgggatgggtggaatggtcgcaggttaaacgaatccatcgacgaaccgatcggccgtgtcggtgcaacttctcttacctattcacgtgttggccgtagttggccaagtcttggccggcttcgtttgcgtttggccggaccggtggacaagatgttatttgggccgccaggtggggcaagtcggtgaaggtgtggcacagttcgacggtctttggccagaggatggcgcatatgggcgggctccaaccaaggtttggcactgccgggccggcttctctaggcggtgtcggttactcgggcgagtagccgggccggttgtaagggtgcctagtgacgggttctggtgaccctccttccttctcttttttttgggtttttctatattttatttttcttttttgcttttaaaaagtcttgaaacaaatactggaaagatcaaaagcaaaagtaaagtttaaatcctaaagaaaatatttacctagtgggttgtctcccacatagcgcgcttgtttaacgtcgttggcttgacggttgggtcttactaggcgtagtaagacgggttgttttgccctaggcaagtcctcttgggtatggattcctccggaggtttctttggattgtctctctttttcttgaagattgaccttctcgttttttcgaacacctctcaaactcgtcccttagaaatatagctttccatgaagagtctcttaaccggaaacttctcccatgcttcttcgaacgaagtatcaagtcggatggctgttacgaagtctctaaaggtgcatcgcataccgttttctgagtggtgcggatcatctctttgatctccaaagcttccatcgcttcttcttctgaatcaggataagcttgctcgttctcggaactcggggtgttgcgatcttcttcttttgatttcgaggtatactctcctcccttttgtaagtatccgctaggccacgacactgcagttttacaagggagaattggcttcgggtcttgcccatggtcttgtggtttagcttcgtctcgacccttcttggactctcttcttgagtcctcttctatacatttctcgcagatggcagcacgaaggagtaaagagttgtacttcttatccaatctctcgattgtttcgttaaacgtcgtttccctatatccaagattggactttatcccatgcaacaggtcgagggacttatcgaattcgaaacagattgtctcggctagaattttatagctatcttctagattatgaatcttgaccatggtcgccttagcttcgtcctcgtacttcttcatctgagccgccgaactcatattgttactaaagagaaccttaaaatcaaacatgtgattcttttcggcttctctttggcagtcggctagctcacgaaggagaaagatttcctcatggagcttctcttcgttcttgttggctctctcttcaagttttttagtctttcttccaagatcgcattcttgtcaaggagctctttgactgtcaagtcgtggcttttctttccctcggctgttcggatggccaacgctccgatgttttgagcacttccttggttatgctctagaacctttcctctgctcttttctagagtttggaccttcttggtcaaggcggtaacctctttcgtgagcttgacatccattctcctaaaactcaaggaaagttcatcgatcataccagagagaatgccatcgaccttcctgtctttccagtctctgctcacgactcttttgtctccatggtatgtgagagtgatcttgtagagacaaaatcgggtgacagaagggttaaacggatcggctcaaggtgaacaggtccttccttccttggcttttgctgcccgtgctctttcctcttcacgagggtggggaggtattaggccggggtaacatcatagtttcctctaacaatagtttcttctagggttccgggttgtctgaaaccatagacttcgagagcttcattgtcgggaatcatgatagtcatgcaggagtaaggtgtccctgaatcttgcgaaactggcttcttctcttgaagaatcactgagcccattatgacttcttgggaaatcttcagtccgatctcagggccatcgaactccccacgctcttcttgagtctcgcagctctcgccatcagagtaggtatcggccattggatcttcttcttgagagacggctccttctttttctaagtcttcctcctgctcgatttggtcttgaggagaaacgaaagaggtccaatccctaagggttttatagggtcaggttctccttctgcggaaaaggaaatgaggtcttttcctttttccactaggaattcgatttcctttttcgtttcctcctcataacgggcttgggccttaggaaacccatcttcttcttggaaagattgattgcttctccatttcaaagactcatttgaagtagtgagcttcttctctagctcttcaatcttccaatctagatagctctcaacggtatcaacagtgaagccaatatcagcgattctagtgttttggtcttggatattgtctcgatggttaaggagagtgttgttgatcttcctcatgtcttcttgatgttcatcaacgaagtttcggaagagaccaatgatcctatcttccgcctcggcggcttggtatgtcttattggtttggtaagtatagttgttcggatgaacatctacactcatcacctcttgcaaatatcctcggtcatagccgaaagcttcatgtctggcagctccacaaggatgagaagagttgggccctcccacgtgttgatctccgggagatgggacgcagtggtggaacgggctaaccaagcggttagcttgcggccaattctcaatgaaggcggcggggtgatcattagagtagtgatcggtccggtaagctcctccattagacgggcaaggctgcaaagactcaccatgcatttgggatgcatcgggcgtgtagcggtcaattgagaaatgtgatacgcggtttgacccatggttcacacttgggtaatagctactggagtaatttctcgaattcatccttgagcttcctgaaactaagaaaaacaaaaacaaaaattaaaagcaaagtgtcctagagttcactctatttctcggacttgtggaactaacaatctctccccggcaaaggccttaaaaagcttgatgcgtgttttagttcgcttcaaactattacccgaaagaccacatgactactgcaagtgcacagtatttcgaagtagtattttaggatcgaatccacaaggagagaagtagttcagagaaatccttaagaagagagtgaagctaggtccaaaataaagagagggggttgttgtatgtagtaagtaaccaaaataaaagacaagtaactaaagtcaacagtaagaaataagagagaagcgttaggtctttggaggtttctccagatgtcatggttcaataataaggatagatctcaatctaggtgataaaatggctaggtttgtttacttccaaattctcagacatacgaaactctatcaagaccagctaaccctaacggctagtaggtgaaaaccagctatactcactaatatcttgcgtactcagccgccctaacggttagtaggtgctaacatggattcaaaatacaagatcaaagcattaagttcaaatttgattatagtccataagtccctatcactcgagggggggggcgtgtaacagttatagttctttattcagttgagttaggtcaagcattcaaacgagattttgccaaagaatgaaatacctaaggttaagtactaggtggcgttcagacatacaagcattaagattcaactcaactagaaagaatagtgtaaatgatcgaacaaagtcatagaaaccaccaacctagattttcgatctattagtcccaatgaatacccctttgaaacccccttaaacccaactagagatctactcgctcatggcaaaaggagctaatcaaaagttgggttgaaaccataacaaatagatgagtaaaacttaaaaagggtttagannnnnnnnnnnnnnnnnnnnnnnnnnnnnnnnnagcttcaccttaaagagtcttacacaaaaacgagaaagagaaagagagagatggtgttcttcaagcttcaagaggtgcgacggcgagtgggcagctctcggagatggctagggtttgcttgtgatgaaggcacacctagggttagggcttagaacaagtatttatacttgagtgccaagaattaggtttaggggtaagaatgtcattccgccggataagtaagtgatcgggccgagtagtgggcttcagggaaggagcctaatgacggtggcgcaaaaagggaagcacttgggcgtgacctagtggtcagtggtgagc

SEQ ID NO: 1820 - DNA, 1715 bp, Arabidopsis thaliana landsberg
  unsure (1)..(1715): unsure at all n locations
agaatcatttgctttttgccttaagccagatagcgaaccacgatgcccgccggaggtggctgcagttaaaacagtcggctgccgagttcgatcctcgcatagggcacaccagggttgcgcagcctaggatccttttttttgctggcccaggatcctcatagcttaccaggggaacttactcattttccaattccgggtggccattaaagaaaaaaaccaccttctcagtgtcaccacttgcttgaaccaaaacaatgaaagcatataagcgaatgcatgtatactgttgccgggttgccaaagacgagaacgcccttgcaaatctcaatctggtcagcaacgcaaatcttaaactgggaggaacattgtgatcaatgactaatttgttcaggagttccaggtcagactctgaccgcatgctgacatcaggtacatgaataacttgtaaaccgccaggaagctcacttggtgattcatcagaagcataaaactcaaaaagaagagtacaccctagctggagaaaaagctgatcacaactgtgttctgtggcacatgacgtcaagccaaggccttcctcttttcccccccagccttgtgcaagggaaaatagttttagattcagagaagcatctcttatggagtattttccagtgggccttttcaaaaaggcagctaacgtctgcagacaggcttcaacaacatctgcatcagtagatgcaagtaggagagaaagatgctgctgcagttatgaagaaaaaagtgtgagaattatgcaggtagacatctcagtatatcaagcaacatatctagccgaacaaccagaaatcaacaaagaataagagctgataaacatgaataaagacttgagggcacagatttttacctcataagaagtgtaaaactgtttgttagtgcagttctccaaaacaagtctgataactctgagaacttgaagaacagcatcctttgggaaaggtggatcagattcatcaaattcttcctcaatacgcagatccttccttacttttacgtgcttctcaaaaaaagtgtcaaaatgatagaagaggtccacccaatgatggaagtctccctaaataaaagaaaaaaacccgacattcatcaaaacgagaatatgacagtataaaagattcacaaacaaggagccgaaacacacgaaccttgtcgaattcccagcgaaagcttgcaaggggttcttgtattagctcaagtggaacagaagtaacactattgatgaacaaactgattttggtaggctggtacaagtatgaatataacaagggttaacacagccagtaaaagatacaaaagcctcacaaggtttggcttaagaactcaaaccccattataccaatcaaagatcatctcaacaaccataaacggaaactaaaagagccatgttctctaaattccaaagacaaacagttgattaaggttttaattacttggtttaggaacactcaccacttccgaagctcttctccttcgaagcttcatgatttagaaacaatccagttaggagctccaaaactagaaggattaagcactgattttaaatcctcaacacgatagagaattgatcatttcaccgattgagagaactagtaannnnnnnnnnnnnnnnnnnnnaaatatcgacgagggtgatctggtccaatactttggattgatggagatcggtgaggcagacgaacgag

SEQ ID NO: 1821 - DNA, 8329 bp, Arabidopsis thaliana landsberg
  unsure (1)..(8329): unsure at all n locations
atatgacaaagagctgtatgctttggtgagagcactacaaacgtggcaacattcatctttggtctaacgagttcgtcattcgcaccgatcatgagtccttgaagcatctcaaaggatagcaaaaactcaataagagacatgctaggtgggtcgaattcattgagacgtttcccaatgtcatcaagtacaagaaaggtaaggacaatgtagttgtcgatgcattgtcaaggaggtacgttcttctctcatctcttgatgctaagttactcagatttgagcatatacaatctctttatgcaaatgattctgattttgataagatatattcatcatgtgaaaaaattgcttatggaaaatattatagacatgaaggattcttgttttatgataatcgtttgtgtattcctaattcttctttgagagagctgtttataagggaagcacatggcggaggcttaatgggacactttggagtctcaaaaactcttaaggaaaaaaaaaaagaaaagggggggantcaataccattggcctcacatggtaagggacgttgaacgtatatgtggaaggtgtgtcacatgtaaaaaggctaagtccaaagtccagtcgaacggtctgtatacgcctttgcgtatttcttctcatctttggacttacatttcaatggatttcgtgcttggtttgcctagtactaaaaccggaaaggattcaatctttgtggtagttgataggttctctaagatgactcattgcattgcatgtcataaacccgatgatgcatctcatgttgggggcctttaatgttgttctttaaggaaattgttcgtttgcatgacatgcctagaaccattgttttggatagggaaaacaagtttcttagttatttttggaaaacattatggtctaaacttagaactaagctcttattctctactacttgtcacccccaaactgatggacaaacggaagtggttaatagaaccttaggctctcttttgcgcactctgattaaaaagaaccataggactggggaagaattttttccgaatatagaatttgcataaaatcatgccattcattccgcttctaagttttcattatttcaaattatttatgggtttaatctcacctctcctttggatttaatgcctctacctttgagtgtcagaacaagtttagatgagaaaaagaaagccgaaatggtgcaacaaatcaatgaggaagctcggaaaactattgaagagtaaacgaaaaagtgtgttgaacaagcaaacaagggtcggcgacgcatggtctttgaagagggtgaccaagtatggattcacttaaggaaagaacgattcccagccgaatagcaaacaaatgccaagaatcgacgggtcgtttaccattacaaaacggatcaatgataactcttatcaaattgatcttcgaaataagtataatataagttcgagctttaatgtttctgatttatctccttttcttatagatgaaacggatttgagggcaaatccttttcaagagggagggcatgatatgactattgtcgggcaagactcgcaacttgaaccaacaaagctgtttgtagccgaggagcagcttgtagccgaggggcagcttgtaacggaggagcagcttgtagcggagtaagctttggcggaaccaaccagtcctatgactcgttcgaagactagacttctcaaccaagctgttaaaggaatacttaaccacttgggcaagcatccaaacgaagtcattcaaaccgtttggaactcgatagcagcccaagacgattgggaatgggctatgtgttacttgggtactctttttcccttctaaggttttgtcccaatgagttttccttagtaggtttttaatgaggcaaatgattcacattcaaatcacccatttgttgatcaacatcatggcataactttcagaacttggccccaagaaatatatatcaagtccaagtcattttatgtccattacaagcccaaaaagagcccaaaccaagtggttaatttgatggtcaagaagagtgacgaaaatagaagttcaagggtcatctttgaagccaaagggtcttttctattcaaattctatctttaattattatgttgtgtttctaggcagccttggagtatgttccaagacttgtctctttctcttctcttcttcttctctttataaactcatgtaatctcttatgagaacccatctatctttttatcaaaaactctcttttaaaaatagatcatggatccattttcgtatgtcgaattttgatctttctcgacttatcaaaaggattttccgcatccttttgtggcgtcattcaatccatcatctcgtctttgagtcgtgtgtcgtctctatttcgagaatatccactccagatcttccaagtgccgaaattgggattgattcctcaccaggatcatatcactaacaatcaagatgtgatcagaagtcactaagtcaagccaagcaataacaggttttggtgtgttctagcagttctaagtgaacatgcagaaaacagaaaatcaaacagaaacagtaaaacactcgaccaacacagctctttgcagagcactgggtgagatcgagtgacaggtcgagtaacagacagaaaattaaacacagatactcgactgcacagtctgttgccagacaactgggtggtcgagtacgaggtcgagtaacaagaaagaattgcagaaattaagcgacagataacaagatgcagtaaacaacagtagagtaaacaaagaattcaatcagataaagaattcccaaggatggggtaattgagtagtttcgtttcctcagtttacaggtgattgacatgctcaataaattaaccctagacaacaagttcattaaccaaatctaagtgccaccgcaacagagactctcaagttaacctagtcccagactcaatcaccattgacgagagctaacctaacagacattacgaatcaacaagttaaagccaaaacgctccctgcaaccaataccttggtacagggccacgaatctctggaattagtggttcagacatttcatcaaacaccttttgggcgcagaaaatgtctgggctcaaattccacttgatcagaaagcaataggcattaagaataactaatccagaagagatctatcaatcaatactcaatcacctagcatactgagaatcctacactactctaacccatcctcagaaacctattcactactcagacattataacagaaagcataaacgttgaacaagttgaaaacatgataacaacagtgtaacagcaggatgataacagaatgaacaagaacaaaagctgaatactgaatattgaatagaaaaagagaaatccggattagaaaaggtctagaacacaaggtctgcggaataaaactagataaaaacttgtctgcgaaaatgtgaagtacatgctacttatagccaaatattccgaaaccctaatacttaaaacgacgcagtattgggacagattaagaactgtactcaacccatgtggtcgagtgggaggtcgagtaaatagctgaagtcttcttttcttccttgtgctcgagtgtctagttgagtgcgaaatgaagaaggctctgaagcttgtcatcgagtatgcagtctagtggtggtgatggtgatactcgacttccaggtagagtgacgaggtcgagtagtggtctggcaatgaaggtgaagacactcggcctaggggtcgagtgaagtgatcgagtgatggtcaggtgatgggatgaagacactcgacctcggggtcgagtgatgtggtcgagtggtggtcaaaagatgcagatgaagtcactcgacctgggggtcgagtgatgtggttgagtgttggtcaggtgatggagatgaagacgctcgacctcgtggtcgagtggtgaggtgaagttgtgatgtcatctactcgacgtgggggtcgagtggtctcttgagatcttgaagctcctactcgacctgtgggtcgagtggttttgtcatgattaggtctgcttcttccagatagctcgtcaacagctacaaatcacctgaaatcaacgcaaatacgcaacatgcatgcaaatctatcctaaacatgtaaagtgatgataaatgatgtgaaatggtataaaacagtgatgatatgatgctaaagtgatgacaaatggatgctcaaaacatgacaaatacgcacttatgagtagcctagcttcttgattcttagggtgagggtacatccactgcagttgataccacattgtccctcatgcatgctcttcatgaggtcttttgtttgttgcccataggtgcacaccatgtagggaccagaaacgctgcgtttcatgagccttccttccatgattcagtacctcgcactctgtgctttgagctttctggcctcacacttatcgggaggtgtgatccctcgttcgatgtaaacgatgattgggattctccagtcattgtacggtttaggtttgtacggggcaggttgttcgcgtgtttcgtactctggttcctctttcgttgcacttgccccgcagctgctgcgatgtctctaggtgcggcggtggtgcttcaggttactcgtgtaaatttgcacgttgtcgggggttccgtcccagcatgttttactgttagatcgatgcttnnnnnnnnnnnnnnnnnnnnnnnnnnnnnnnttttgacaaaaggatctaacgtggaagcgagaactgccaaggagtctaccgaggtattttctcctctagggatccttgttagttcaaacgattcaaactgctgggccaaggttttgactagtacgaggtagcttccatgttctcgtctttagctttgtattcccgtggaactggctggtgacgagttggtagtcgttgtaagtatttatttcgcgaatccctatttcttgaggtagcttaatgccaccaatgagggcttcgtactcagactcgttgtttgatgcattgaatccgagatggaaagattgttcgatgacttccccggtgggggaggtgagttgtattcctactctagatccttgtcggttggatgagccatcgacgtggaggagccatttcttattagagttggttccatccaggtcggctaacgggagctcgattacaaagtcggctaggacttgtgctttcaagctggttctggtgcgatattctatatcgtactcgcttaactctatgtcccattttgcaagtcgtcctgattgggtcagactatgcagaatagttcagattggttgggacgtcatcactattatggggtgtgattggaaatatggtcttagttggaaatatggtcttagtttgcgagctgacatgatttgtccagcatgtcgtcgatgtagacctccatcgttttacctatctggtcagcgaacattctgttcaccaatcgttggtaggtggctccagcattttttaaaccaaagggcattactttaaaaaagtaggtgcctcggtcagtaataaaagctgttttttcttggtcatctaggcgcataagtatttggttatacccggagaatgcgtccatgaaggacagtagttcgtgtcctacaatggcttcgacgagtcggtcgatatgcgggaatgggaaactgtctttaggacatgctttattcaggtccgtaaagtcgatgcatactctccacttcccgtttttctttttaacgacgactgggttggcaagccagtcagggtattttacttcccttatcgatccaattttgagcaatcagtcgacatcatcgtgcaaagccttagccctttcaggacctagcttgcgacgtttctgctttataggtcggtaggtcggatcgacgttgagttcgtgtgaggttacctcgaggcttattcctcggaggttcgcacttgagaaaggttatgagatcctcttgtatcgctgggtcgaggtcttgacctatcccaacgcatcgtttgggatctgattcgtctatgcagacctgtgtaatcaatgattttcgaggtccgcgttgagaaggatcagaggatctgactgttttcatttccgcgagtttgtcttctataattagtacttcttgttctgccacccagatcgagttctgcaaagactaggtctatgcgttctctcctagcgggtggaggagagtcacctccctccggtgttcgttcccgtttcttttgtttgggagtttgctcctcctcctgttcgtcgggaggaggggttttaactttggggtttgaaccttttttagttttgcccccagttgcgattaattttttaacggcgcgacactcctcggtggaatgtccttttttttgtggtacttgcaatatttttcgaggtcaagttctggactctcgtcctcagctgcctcttctattgcgagtaaggtatgctgcccttgcgtttggttttcctttttaaagggttttttagttgcaaggggagcgttttgcgttttagattctttgaatcttaaggccagcacagcgagctcctcttcggctttggcaaagtggagagctttgtgaagggcatcgtctaaagagaccggttgcctaacagtgagttcctcaccgaacctagaggaaaaccacagaccgttgcgaagttcgcaatctttgatttgattgttttgaatttttcgacgtaagatcgcagagattcgttctgaagttgggtgagactccagaagtcggcttcagacgtccagtgttcgataagtaccgaatactgttttaagaaatcggcggcgagctggtcgaaggtatcaatagagttcccttctaggttagcaaacaattcgagggcgtgacctacgaggttttctgcgaagaaacggcaatgacctgcttcattttcttcgtctgtcaggtacggaagaatctcaggtgagtctttgggtcgctcgttccgtcgtattccgggaaacagaggctctcgacgtctcggatgcgaaaacgagcgatcctatccgtgaatggggtgcacctgttttcttcgatctcgcaatctatgtcgggagcatcgctcactgctaggtgcatttgagaatgcatttgaaccatgtttgcgtttgtttgagctgtgtaattgcagaatggtgccatgttcacggcgtggcgcggatcaacccgtgcttggggactgttatagaggtaattcttatggtatccggtgcacggatgtcggtttagccatggaggtccgaagatgcgtagagtgactgggctatgggggcactggatgcgggtgtctgggtctctgttctcgagtaccattggggcgattatttttatttccgggatatatgggtttgatttacacatttgaaaaaaaactactactactatagtctttgatttgatgaaaggaaaaaacaaaattgcttctttgttttttttttggttgttgtctatatacataaataaaaaattcaaagttgcgtagattaaaaatagttattagtccgagaagtgattttgagatctgtgcgtagttttgtgtttactaacaattgttaatgaaaagtgattaccgttaatttaattatatgaatctgaagtgtttgagtaataaatatttggagcgtattaattaattatagtagacagaaagatcaataaaagcagaattgaattgatccttcctttattagctgntggtggcatgttggcttataaggtaatgatgggaccatcacaacctaattcgttacatttttcttcttatactaatttatcagcctcgaaacttcgctttggctgtcattgctttttttatataattaatgatgcgtccttggatatgtttttagacattattatggctctcaatagacgaatctgtaaccttacaagtaataacgaatgtagtaccataatgaaaatgtggaaaacaagaagaacaagtcggagtataaaagattctgtagagtttattacccatacaacaaaagttttcatttattcatgaaaaatatactctagagtttaaatagttctcgttagcatgtgtaaagattcagaagtagataaatgtggataataatctgaaatgccgaatataaacagaatcatagccgcaaatgatttatttttatataaccaatgggtttgtaattaatattactcgaatctgtaatattttccctccaccaagtttgaaattgtactaacaatggaatcaatagcacaatcaggtataagaagttttagtcatttgatcgagattaatgttgagtgtagctttgtttgggtcatgttttgggctcttctccatttcagactgtgccg

SEQ ID NO: 1822 - DNA, 6788 bp, Arabidopsis thaliana landsberg
agccaggcttaagctcatagtcgttcctctggaagggtgggggtacgatatctgatcgattagcatagaacaagccaggcctgttgaaatccccaagagtacgacgtggttctgtagatggaggaattgttgcataatctggggttggtgtcgatcgacacctctgttgtgtcgctcaacaccaatcgcatctgcattctgctcctaaaggtgtcgatcaacacccagttggtgtcgctcgacaccgagccatactgcatctctggcagctaattgagcattgaggcgcgcctgatcctaattggtgtcctcaggtaggatgagtccataatcatccagtctctgaccagcctcattgtaggcttgcccatactcatctctcaaaactccttctgcattagctgtgaagactctgtcagccattgttaatctctgagtttttcagttggttcgttcaagttttccgaagtctaagaccgacaagttgataagctccttctgtattgaaaactgaatgaatctctgaaaacattggataaatagcttatgtctctcagtaacagggttttccaaagagcttgataatagaaactagggtctagaacaatgtatataaacaatataaaacgtgagggactaataatgaaaataggaaagtcttctgggcaaatttcctcttctgtaaaattgaaagcgtcatggacttttgctgggctgaaactagtgtcgatcgaaaccaagagtgtgtcgatcgacactcctcttgattcacggatccaaaatcgtccttagcttccttttccttatctattgctccaaaatgtctaaacataaccattgatgtcccattgcatagatacctgaaaagacactaaaaagactcgagaaataacataaagactcaaaatcctatacctaaaacatagataaatcggtgaaaattgggttatatcatcggttagagtagcttcaattttaactttccgatctggcttgtcctcttctaacattatttctttcttcgtgggcttcgttaattgctattggatcttcagacggtggctagctagataacatgtccgagaagcttcttgatctccctgaattgtttttactctgtttggagttggaaatttgatgcattgataatacgtagaggggatcgcctctatttgataaatccagggagtcccaaggatgatcttgtaggctgctggtttatcaaaaacgacaaagtctacgatcttcgacattttaagctaaacatgtacttgattgtccaagagacatggctgatcgctcgggaaaggtaccaaaggagacggaggtccaactacatctgccctactaattccctttctttccaaagtacctagagagatcagatcaaccaaacgacctgtatcgacgagaatttttgacacttcaaagttagccacgtccagcataatgactagagcgtcatcatgaggcctttcaaggtgtcgtgtttctttctcgtcaaatgatattgaagcgccttggtactcaatttcttcgctcaagctcgatttaagtaacacatttagcctatgctttttgattgcactgataccatctcggcaaagtttggagcctccaaggattatattgatctttcgcttcaaactcccaggttcttcctcgttaaacggcctcggtcttttggagttttgaagttcggaattatcccttgcttcttaatatttcttcacgaaatcgtctctattgaatttggaaagatcttcgctggcccatagcttagcgagatgtcttttgaggacactacaatctttggttagatgtatgtcatagtacagactttcatctcgaacccaagtgttcgactttccttttccttggatttgcctgccgacgttggtgttgaaaggctgcgatccaaacttctttggtccttggttttccttgggctcgaacttcttggcagggaaagtgattgccagtgttgcctgtttattcctttttgtaaagctttctttttcgtcttcgacttccatccacttggttgctcggaaaagtgcatcttggattgtgtacggcttgtgaagtattatatcttctttaaacgttgaatcatgccacaatcctttttgttgggcagataatgctgattgttgtgaaatcctttggaactttgaaagtacaactttgaacttggtgataaaaatctgaagtgaatcattcggcccttgtgacagattcgtaagatcggtgtttgaaatgcttttatccataagaataaaatactgtttcaaaaacacggctgataattcgttaaagttattgattgaacctggctctaactaagtgaaccacatcaatgcttgtccgcaaagattctcagaaaaaagtttgcagtaccctgtgtcctcctcagcttcatctaagttgactcgtcttgtggcaattagaaaagctgcgagatagctttttgatcttccaaaccgttgtaaggttctaggttgagtttccgagaatctgtgattctcaaacttgttgtgggatgaaaggtgttcgcttggcttgttcgatgacccgattgatatcaggttccaaactagtggcctgagggaactttgttctcatttctttcagttcccggctaaccttcctcatggttttgaactggacgaggctttctttctcgtgttgatctgcaaatttgtcttcgcccttgagctgtgtttccccatcctccggatgaactaccgtgttagcggcatcaggagttgtttgttcgctggttccatttcgcgcaagggagcttggcgaattgaacatagtacttcggactccaacagggtttcctacattcataaaacgaatacgagattgtatagtgctaacattttgactaagagataccttggttgtttgtagtgtttcaacagccttttccacatccgagaactattgtgacattttcgacatggtttgctgcatggttttgagagtttcggctaatgatgcattgatggcgtcttctccagccattgctgcttatctcgaaaatgtggtatagaaaatctgacgactcaagaatcctccgtccccacagacggcgccaaaatgtggatgtcggattcacacactcaagtatttatttatttagtgagaaggattatttttgaggacaaaaattgggtagaaaaagctatgaatcgatatcaaaatgactatagtaagtttgcacaaaaatgcgtgtgtctttacatggtcattgacccacaaattatactcaaagaatacatttaattctcatttacacacaattattctatcttaaatgtatccgtttcagttttcgaattaactattcaaacgttcaaatttgaattgatttcaaacttcctgggctttatcttctagccctcttgactctccaatccgggcagttttgacctcgatgtcccgttcacctcgcagatccatcacttcgtgtgtacttttgctcaaagaagcccatatgcctttcctattttgggcccctccttcttacgcggcgatctttgaccgatcccgagcccatggtgcgggatccgacaccaacaaagattgctccaaatgactctctgatttcccgccaaaatcacgttactcctatgatttcggaaccacgcataattactctcgtgacatctgtcacaattatgacggcatatcaattatttactattaaagcggggaaaactcttccacttcccccacgactctcaaggccgttccgtcattatcgctagcttgcgtaaggtaaattcactttactttcttcttattactttcacgctctatctttcttttagaacaaagctcctctgttcttcctctctgtactttctctcctccgaaccctcagactattcattttttacgatgaatcctgaaaatgaaaggcctgaatccccatctttcgaagatctcggatctagaaatgacctttgcacccggccaaatgatatcgccggtccccactaccaaaccacgtgcactcttcaatcccttaatcgatagggagagctttgtcggattctggctgagattatgaaagactcgcagatgccggagcccactgaatcaccggaggaccaccgactcgggttcttttgtgtatacgagatctacttcaagggttgcggtttgacttttccccttcccggagccctcgttcgatacttattagccctcgaaattgccttgcccaaattaacccctaacctcctccggactattctagggattattactatcgcgacggaagctggatatgtcatcggggttcccgaactgaatgaacttctcagcgtgaggagttcttcgaagaaagtgggatacttctcggcttatccgaatgccaacaagaacctcatctcgcatcttcctaataaagacgagaactggcatcacccgtggttctttattagtcatgtttactttgtaattaaactaggattcaaccagcggttcaccgcaggcctcggttttatatgatttttttattaagtatttgattatgttttatattcataatttacaaaaaaatattttttatttaatcctttataaataatgattgggattttgtattggttagttgttatttagtgattagaagaatgtattttaatgttttatatgtgtattaactagatttttaacccgcggtataccgcggggacaccttatttttaaagttagtatatataaaattttataaattatatctatctataaaatatttttactttatagtttacaattgttattaagtaacgtccttccaaactcgtcccctacaagaatcatttattttattaatgttgattttgtttatgatatgtttatgaatcgttgtctaaatattttgtaattttgcagtaagtaaatgctatcaaatatctttgcgatttgatgattataatcggattggtatagtcatggaggaaagcaatatcaaaaatgataattctgtagtaattaaatgatattaaatattttggaagttttattttagtaactaattgtctagttaatgtggagagatttcgggaagatagttaaatgtcaaatatttaattcaaagatttactttctaattatcaaaaataattattaaatgtcagtggcagccactgtaaataagtcccaacttgaggatttatttcacaaagtgactgcaaaaatgtatatataaatggttagtgctattacataatgaaacacgtaagacttgtaaaacctcaaatgttttaaaagaccctatacactttgacaaagaaaataggaaaaacaaagaccctagagacttttcaattatgactatagaagttaacaaacctaagcaaagtgtttggatataaacatagaggttaaaaaggatttagataatacttagaaaatgtagtgtattactatcttgttgtagaagaaatcagatataccagtaccactaaaagacataaaacgacacttaattatttagataatacttaaaaagagaagtacctaatacaagatcgtagttgaacatgaaaccagttgcaaatgacaagaagcagttatctcaaagttcaaagatctgtttttctctctgccttttgtctttcaacagaaaccaataaaaccaacaacaaattcccactaattttaaaatgaaataaaatcatgaagcgtattcaaaggcttgtggaggttgtggctcatcatctacggccatagctgaggccgtggttccttgtgcagccgctgctgtaccagttgcaggagaagctgttgaagttggtgcgtcggtcagagagagaacctctggctcgtgttcacgcaagtctttgagaagaacgaaacctgacggtgctagcttcactggtacatatctgctgtcatcaagtaactttatgtatttctcttgagctgggactactcgagctgggttcactaaaatctcaaacgctggctcaggctcaggtgctttcttctcgaccgctgctgggctatcgacctgacagttcgtggagacaagactatcaaatcacagatggtccaaacacacaataaacacccagattaaacattcctttagaattcaccaactttgaaattcaaaatgtctaacgtgtgtgattgtaaaacaaaataaaccttagaattctagcgattaaaggactaatcaggtaatcaataacagaggctattagaagaggctagatatgacaacattacctgcatagagtctccttccttctcagttgatgcttttccttttccagatccactttcattgacaggcttttcagggccagatgttttctcagcaatagctttttgctctgcttgtttcttagccctagctttggctttaactgaagatgagagaacagcggttggaagtttaacggcggtattggctgtaggaaccgtggtgggttttgggtactcaaataaagacgggtttgcatgtgacatgaactcaaactttgggaccttaaggtcatagttcaaaccgatgaaggcggttggtgagaaggccaaactaatgaaatagatcagtgggtaccaataccaaaactggctgaagactgcaaggccgataacagcagtgactttgtcatgtttggtcttagagagcagtcttatagtaacgttcctaccaccagcatacaggataccagaggccagaatcgctgccatcttgctcattgtatcttcgcgctcgacaagaatgatcttctcatgttggcgcctacaaaacatag

SEQ ID NO: 1823 - DNA, 5241 bp, Arabidopsis thaliana landsberg
  unsure (1)..(5241): unsure at all n locations
acaaagtttcacacaacggaaactgattcanacaaacacacagaatttcataaaacaaaaatagatcgggcttttttctttaaatcacaaacacacacaaacacaaacaacaatttcaagtttttttcaaaattgctttgcctccatgagtcaaaccaaaacatttaaactttgctcctaaaggaccttaagaactttatctacccagtaaaattgtagtatgagttgaattatttcagaattagcagatccaatctgataatttcataaacagatccaagctaacaatttcacaaagtaaaggaatcaaaagctaaaaacattttataaacaatcgaggtgaaagttaaaaatccccaattagatccaaaaaaggcgaaattagatcgagagtttagggtttcgcgaaaaatacctgcgagggagaaattgaagctctgcgttgtgagtagagaagacggaaggaaaatctccggttagatgcggtggtgacggaggaatcgagccgatctccggcgaggagagagatttgggagagaggctaattggacctttggatgaaaaagcagacaaggcgaagagataagttttgttattattcaagagacatggaataatcacaatgtcaacaaatcagttggctaagcgatttcggttcgggtagtttccggttaacaaaagttaattcgacccgattaagtcacccgagattgtctctcgtatcctttttttttacagcaaaccggttgaatccctttgagaaacgatctcataattctgaaatgcaaacaacaaatctcttaaatcttttcttttctttttccatgtctcattctcttttaataaaatgtgtatagacgaatttatcccttcttctttctttaatatttattttaaaactaaataacttttaaaaaacaaaaaaaaaaattaggaaaaaaaacagaaacccaactttctctctcctctcctctttctcctttgaagtttgagctcgtcgctcttactcgccggaattcgatttcagtagtcattgttgacatatcttttcctccggcgaattttgtcgagataataagaaaaagtatgtttctagagctgcatagagctcaaaattgaagatttgaacctagaaatttaagatattttctcaattagatttgaaattaagcaaattgtgtttgggtatacacattggaagtttatgcatactgcctgggttaaatagatctgtaaatgagtaagaaatggattacaccaactgaatcatagtaaattgtagttttgaacccgaaaccattccacttgagttcttgtcggaaatacaactggtagaactgagtagaattgcacatgattcaattgaaaaatatatatgtagtattactcgtaactctagttttacccagatgtatgtagtatgacttagttgactagtaataaccatttacatgtagtattacttaggtacaatagtattacccacactacaagaaaacatgcattttgtgatggatattagtcctcgcaaatttgcgacggaattgcgagtcgtttactattaactacgcaacgcgcataaagttgtcgtaaatttgcgagggagacacgcgtcgcaaatttgcgaagaatttgcaagtaattgcgtctactttgcaatgaatactttgtcgttgcaatttcgttacaatattgcgacgaatttgcaaggaagtaggtcccaacatattttgcgacgaatttacaagtattgtgtaaatgaacacgttttaaatgaaagttagtaggttggtgtggtaggtagtgaaattatatcgaaaaaatcttataatttttctctaaatatattttcccttgcaattcccttgcaaaatgttataggaattttctcgcaaaatattttcagggtctataaatagcaaacgtaaatgagtgaagaatcacaactcaaaacgtaaacaaactagatattgatccgcggtacaccgcgggtggatatgttcattagaaagttataaatatttttttataagaattattatttctatataaatattatattcttcacacataatttttatttatgtaaattttgaataattcatgttttatgttctcatatttgttagtttaatagtaaaattcagtatttgtttttttggtttgggtttttttagtcgtaataaagatataaaacttgtattatttagagattgacccgcggtacactggggttaataattttgtcagaaaattagatatttttattttaactaatattatctatatatatatataacatattcaagaggtagatcaaaagcatatatttttattaaataaaaaataatatttttgtctttaatatgatctatagatacgtgttgttggtgtcggatcccgcaccacgggctcgggaccggtcaaagatcgccgcgtaagagggaagggtctaaaagaggaaatacccatgggcttctttgagtaaaagtataacgcgaggcgattgatcagcgaggtggactggacattgatgtcaaaactgcccggattggagagtcgagtgggccagaagatgaagcccaggaagttcggaatcaattcaaattcgaacgtttgaatagttaattcgaagactgaaatggacacatttaatatagaataattgtgtgtaaatgggaattaaatgtattctttgagtataaattgtttgtcaaagaccatgtagaaacacacgcatttttgtgcaaacttactatacacattttcttacaaaactcatagttttcgctataatcatcgatctattttctagtatatttgtcctcaagaattatccttctcaccaaataaataaatacttgagtatgtgaatccgacatccacatttttgcaccgtctgtgggaacggagaattcttgagtcgtcagattttttctatacactacatttccgaagtgagcgacaatgtctggagaagatgctaccaacgcttcactagccgaaattctcaagaccatgcagcaaactatggcggaaatggcgcagaagtttttgaatgtagaaaaaaccgtcgaaacactgcaaacaacccaggtatcactcagtcaaaatgttagtactattcaatctcgcattcgttcattgaatgcaggtaattcctctggagttcgaagaactatcttcggttccccaaattcccttccgcgaaatgcagcaagtgatcaaacgaccccggatggtacaaacgcggacatccatccgaaagatggagaaacacatcccgaagacgacaaccagttcgttaatcagcacgagcaagaaaacttcgatcagttcgaaaccatgagagaagtaagtcgggaactcaaagaaatgaggtcgtaattccatcaagctacaagttcggagccggatatcaaccgggttatcgaggaggctaggcgaacactgttcaccccgcgaattgcgagtttgagaatcagagattctcgaaaactcaacttagaaccatataatagtttggaagatccgaaaggctatctcgcagcttttctaatagcctctggtcgagttgatctaaacgaagccgatgaagacgcagtatattgcaaacttttctctgaaaatctgtttgggcaagccctgatgtggttcactcagttggaaccaggatcggtcaataatttcaaagaactatcggcagtatgtttaaaacaatactcaattctaatggataagagcatttcggacaccaatctctggaatctgtctcaagggccgaatgagacacttctggctttcatcaccaaatttaaaaacgtgctatcaaagctcccaaggatctcacaacagtcggctctgtcggctttgcggaagggattatggcatgattcaaggtttaaggaagatctaatacttcacaaacctgatactattcaagacacactatttcgagcgaataattggatggaagtcaaggatgaaaaagaaagttttgcaaaaagaaataagcaagtaaaaccagcggtcacttttccgcccaagaagttcgaaccccgtgaaaataagggaccaaggaagtttgggtcacaaccattcaataacaacgtcggaaagcagtttcaggggaaaggaaggtcaaatacccggtccgagatgaaagctcgtattacgatatacacagagtcacgggacatctgagtaaagactgcagcatccttaagaggcatcttgcagaactacgggccagtggagatctctcaaaattcgacatggagaacttcatcaaacaatatcatgaatcaagggataatccagagaatcaaaactctaaaagaccaaggccggcgagcgaagagggaccaagaacttcaaagggtaaaatcaatgtgtttctcggaggatctaaactctgtcgtgattccatcagtgtaatcaagaaacatagacggaatgttcatttgaaattaagtttaagtgaggaagtagattttcaaagcacttcgatattgttcgatgagaaggaaacgcaacacctcgaaagatctcatgatgatgcgctcgtagttacgttggatgtagccaacttcgaagtgtcaaggatcctcattgatactggcagttcggtagatctaatctttcttagcactttggaaagaatggggataagcagggcagacgtggtaggacctccatcacccttagtggcttttacaagtgaatcagcaatgtctctcggaactatcaagctaccagttttggctggaaagatctcgaagattgtggattttgtcgttttcaataaaccagcggcctataacatcattcttggaactccgtggatttatcaaatgaaagcggtcccttctacttatcaccaatgtctcaaattcccaactccgaacggagtggaaacaattcggggagatcaagaagctttgagaacttgctatttagctagccaccgattgaaaatccaatagcaattaacaaaacccgcaaagaaaggagtgatcccaagatttcctagcgggcagaaagtggatgatgttgtgatcgaagtaattctagaagcggataagccagatcaaaaagtccgaattggagctactttatcgggcgaagtaaaggaagccttgattgagctgttgaaaaggaacaagaaatcattaaacctggtcggtagcagatatgcctggcatagatccaaatataatttgtcacgagttaaatgtagac

SEQ ID NO: 1824 - DNA, 1492 bp, Arabidopsis thaliana landsberg
tctcacatgctacccgatgcgatacgaggttcagtcggatcataatcgctaaatcacaccttaccaatgtcggatgttcgttgtgaagttcatccaacttcactttttgttccggtgtaagaacactctcgtcaaatgggtgctccaaatatggctcatcatcttcttctatgttactaaacaaaaagaaaaaaaaaatgaaagttagcaaaataaaataaaaatgctctagactaaaaactaatcctaaatctttacgtaacgcaattggtccccggcaacgaactaatgctttggaaaattttcaccttgtaaaaacggaatcaaaaagaggaatttcgaactcatacctttggagatcgggaaaaccaacactagatatagaaagagagctaaaaatcgagtggaatagacaccaaaattgtgaaaatcgagcaacaattgagaaagttatggatttctctctaagtgttcttcatggtcttcaacgaagaagaagaagtggtgttgggtcgattccgtttatttttaagtggcgactccggttcaatctggtctagctcggttcattggtggcgtaagattcaaatcgcgaagttgctgcctggatcgatcgatcggctctttagatcggtcgatctgttgccactagtcccaacgcctcattattggatcgatcgatccagtgctgggatcgataaatccccttcttgcggatgtttttgagagccttacgtcaggactggattgatcgatccatttctgggatcgattgatcccaacctggcggatttctaaactcaaaaacgaatctcacagcaccgtcaaatacagagactctatcgactcaacacctgagtcgataagtctgaactccacagcgaagtgaatcaaaccaaaatcaaagaaaatgaaagaaggaaaagaaagtatatacaataccttgtgggttgcctcccgcgaaacgcttgtttaatgtcattagcttgaccgggttcttgtgaatcaatgtagcctgcaaaactaagggacctaagacaccaaaaatgcaacatatcaatgagcattttctaaaggtagttgaggagaattcaatgttaactaaggagaatctcaagttagaggctaaaattgttgaaacactgaaatttgctagaaaggaagaagaagaagaatcacaagctaaaatacaacttgaagaaactcaaaagaatttgaggatgcttaataatggaacaaagaagttggttcatattctgaatattggcaagaatgataagtgtggccttgaatgtaaaggaaatccttcaaaatcagatctagtgtttgtttatggtggaagaatcacatctacatcaggaagtgtgtcagaaaccgcaactctggcacatattggaattaatggcgagactgcatctgatacaaaaactactacgagaactggtacagagactacatcaactttaaggaaatattcagaattaaaaaatgc

SEQ ID NO: 1825 - DNA, 5043 bp, Arabidopsis thaliana landsberg
tgttgaaattttataaatatattaaatacttcaaaatttgctaccaaaatttcaatgatttgtatgaaataattaatagtacattgtcaaatcatattgaaaaataattaatttggtggtaatatcaaaaaattaaattattataagtttatcacacacgtgttagttagtcggcaatttatctaaaaaaatctagttatacattaccgttatatacggacacaaatatttgtatttaaaagtttctttcagccaattatctttttttttcttaagataaaacattacaaatagttcagtacagtcattcataaacctaaggattaagaaattcaagatgcagtataaagagattcttttaatctagcttccttcgatagggcatcagctaaatggtttgcattccgacgaatgaatttgaaacgaaaatagcttggagctaatgccttgatgtcttctaagtagctttgaatctctgcttgaccaagagatgagtgaccttactttttaagccttttccaaatattggtaaagatggatggagtcaacacagaatgtaacttggcggtaatttaggcgttttagctgacctacagcttcaactgaagctttatcttctgtttcaataactgagtcgatatgctctatggaggaagaactcttgagaagacatcggccatgcacttcagttagaatccaactaatacccgctttgctgttttcgtcaatccatgaggcatctacataacaatacaaagtagagttggagctaggaacttccaatgaggttgtattaactggttccttctttattctctgctttggtgactgattgatcattataatcattacgagcattttgccacaaagagaaattcataagagcttggtttataatatcagatagtgggcatcgtttgttattaaagaacaggtcattacatgctttccaaattctccagtcaatgaatggaaaaagatgcacatggtgctcaagcgttttcttaatgttaagcatgtcatgaacaatacacgtgagagagagagagagagatggtgtcgtaattgacctgggtggatatagaagggggacagctccaaaatttctcttgctatgcggcagtgaattagagaaggtgaatgacatattctgcttcttcaccacagaagtacagtttcttaaaaatttgatatgccttcgagcaatattatcttcaactagcaaagtattgtgtaagatttttttttaccaaaaatgctttattttgggaggaacgttcaaagcccaaatatgtttgtatactttttactgtatacatttattaagtaaagaaaccaactacaaatacaattcaaatttgagaaacttttatgttcactacaccaccaccactagtgtactataaaaatagtgaagtaatatgatcattaattaacatgtatggtttagttttaacaattttttgatcttgttacaaaaccaattattattttgaatatgatttgatgatgttttttctatatgtatcatattaaattcaaatgcgtggatcacacgctataataaacgagcatttgataaggtaaatttatttccagtataaatatctgaaatttgatgtatcttaagtttataaattttatcagtatgtaacaaagataaataactaatactataaatatataccccctctgttttaattgctgttctgccaataatattttgtttataacagttatcgttttagatttttaatgtaaatattggtaaatatttcagatatatgctcattgtttaatgttctaaccaataaaaaaatagaaaatatattaattaaggataaaataaaataatgattgctttttaattactgtacaaaaactttaaacgacaattatctcgttcaaaacagatagagtattaactttaaaatactccaaccttgagttttttctttgactttctcaacaatataccgaaacatctcagatttcttcttatcaaactgttctggtagccccaaatattttccgccacctccctcattgtgtattcccaggagatttctcattcttcgctttgtgtcaatgacaggaatccaaactttgcggtctttaattggctaagagagattgtggcttggaaaacaagatttgaggattgtcgcttcacatgggtccgacgaaattccaacatggcagcagacacattagctaaacatgcactaccttcacatacttcttatcatttttctaattttactcctcatgtaatcaccgacatattccatcgtgactttatctctgcatttcaataataagattgacgttgatggaaaaaaaaaaactattgacttgcgatataactctaaattttatagataaatatgcgatataattattgtcataaaactaatcacttttttttttttatataatttgacaacaaactattacctattttatataagttattaatctttaaaaaaataaatgttcgtctttaatatatacattttgagattttaaaaatgaattataactataatttaaatttgagaaacagttattttccactaaaccaccactaatcacgtctttgtcataaaaatttgacccaaaacaattaaggaaaataaaatatattagttgccattctgtcacgatcttatcgaaactgtgagatttttttcttttttaggtttttacaaatcattttgaaattcactcttcgccttccccaaaatttcaaaacccgcctcttcacttttcgccttcctctacttatttagcctaaatctctcataaatctggaaaacaacattttctctctaaatctctctctcactcgtttcaacaatggcgattgaaactcagcttccttgcgacggtgacggtgtgtgtatgcggtgtcaggtgaatcctccgtcagaagagactctcacttgtggcacgtgcgtcactccatggcacgtgccgtgtctcctccccgaatcactcgcttcttccactggagagtgggagtgtcccgattgctccggcgttgccgttccctccgccgctccgggtaccgaaaacgctcgacctgaatcttccggtttagttctcgttgctgcgatccgtgcgattcaggctgatgagactttacccgaagctgagaaagccaaaaaaaggcaaaaactgatgagtgggggtggtgacgatggtgtcgatgaagaagagaagaagaagttagaaatcttttgttctatttgcattcaattgccagaaagacctatcacggttcgttttcattcttcaaatcaatgtgtttttgagtttattcgctaatttatgtgtttgttcttgtgatttgtgttaatgacttgttagatcttgtgattagtacacataaaccctactagaatcgctaatttatgcttgtgacttgtgttaatgacttgttagatcttgtgattaatacacataaaccctactagaatcgctaatttatgtttgtgacatgtgttaattacttgttagatcttgtgattagtgttgataatagtagtagaatcgcgaatttatgcttgtgatctgtgttagtgtcttgttaaatcttgtgattagtacgcataactgtagtagaatggctaatttatgtgtttgttgttgataaggatgattaatatttgaagtagcacactaatggcttatttgcaaccagtcttatgcttgtgattagtgttaatgccttgttgaatcttgtgattagtacacataagtgtagtagaatcgctagtttatttgtaaacttgataatgatgattagtgtatttaagtagcagactaatggatgtattgtacttgtgtgtttgtagacaccgtgtgggcacaatttctgtttgaaatgtttcgagaaatgggcagtaggtcaagggaagctaacttgtatgatatgccgaagcaaaattccgagacatgtggcgaaaaatcctcgcatcaacttagctctagtttctgctattcgtttagcaaatgttaccaaatgttctgttgaggcaactgcagccaaggttcatcatattatccgcaaccaagaccgtcctgacaaagcatttactaccgagcgggcagtaaaaactgggaaagctaatgctgctagcggtaagttttttgtgacaatacctcgtgatcattttggtcccataccagctgcgaatgatgtcactagaaaccaaggtgttttggttggagaatcttgggaggacaggcaagagtgtaggcagtggggagttcatttcccgcatgttgctggcattgccgggcaagcagcggttggagctcagtctgtggccctctctggaggttatgacgatgatgaggatcatggtgaatggtttctctacacaggaaggtttgattttttacattatatttgtcacctgtttcccttcttattgaagtagcctttttccaatttatcttaatatgtgtgaatgtgtgttgcagtggtggaagggatctcagtggaaacaaaagagttaacaagatacagtcgtctgaccaggcgtttaaaaacatgaatgaagctctaagacttagttgcaaaatgggctatcctgtccgagttgtcaggttagcttttctttgtgcaaagttcttatatctttctcactttctgcagactctcttcaactttatgtgaataagaatagattatctttattcatcgatatactctgagtagatagttatcatgactcttcaatcttcaggtcttggaaggagaagcgttctgcatatgcccctgcggaaggagtgagatacgatggggtctacagaattgaaaagtgctggagtaatgttggagtacaggtttgaatatatagctaacattcctattttgtttcttttatgcagagctggattgttttgttcctgacgtacactcttctgtttctctagggtttgcataagatgtcccgttacccccttgttagatgtgacaatgagccaaaaccatggaaaaggtttgatctttgttttttcccggaaagtgtc

SEQ ID NO: 1826 - DNA, 6056 bp, Arabidopsis thaliana landsberg
ctttaccacccagaagatgaaaaggtgtggtcctaagaggagttttgaaacctgttatgtaagcccatagtgcatcatctaacgtgtaagaccactcctttttcgatttttcaactttcttctcaaaaatctctttgatctgcctgttgaaaacttcaacatgaccgctcgtttgtgggtgatagggagtagcaactcgatgcttaactccatactaaataagcaattttacaagaatcttgttaatgaaatgcttacctccgtcactaatgactatgcgtggcactccaaaacgagggaagatgatagacttgaaaagtttcatgacaattgctgaatcttttttggactagctatagcctctacccacttagagacataatcgacagctactaggatgtagagattcttgttggaaggtgggaagggtcccgtgaaatctataccccaacaatcgaagacttccacttcgaggataaatttctaaggcatctcagtacgcttgctgatctttccccttttctgaaaaggatcacactgcgatatgaacttctgagcatcccaaaacattataggccatcaaaagcctgcttgaagaactttggatactgtattgaaggttgcaaaatgtcgtccatagctagagctgtgacaatgcgatagtatatcaggaacctctgttgcagcaatgcatctcctataaactccatcagaacaatgcttataaagataaggttcatcccaataatatcgccaaatctctcttaggaatcgcttcttgttgtaatctgtaaaattatcaggttccacatctgcagctaggtaattaacaataccagcataccatgggtaatctttctcgactgctgtgagggcgcatttctcagttggtgaccaatttcttgtcgattcagaagggtgtcgatcgacaagcgtcctggtgtcgatcgacaccatcgcgcaacttcgaatgtctacttcctctgaaatgtgagtgtcgatcgacatagtaagagtgtcgatcaacactgaagctatcacgtttgcagtcatcttcttcagttgtatcaatcatgtataagttctcttcaggcaagaaatcgtttatagggacatcatcatcgatcctaatgcgtgataaatgatctgctacaccattctcaactcctttcttatctctaacctcaatgtcaaattcctgaagaagcaaaatccatctcaaaagtcttggcttagcatcctttttttgcattaaatacttcaaggcagcatgatctgtgtgaacaataaccttggatccaacgagataagatctgaattttccgcaagcaaacaccacagctaacaactccttctctgtagttgcataattcctttgagcatcatcaagagttctacttgcatagtagattgcatgaagctttttatccttcctctgtcctagaacagctctatctgtaaaatcacttgcatcacacattacctcaaaaggtaaatcccaatctggtggctgaacaattggtgcgctgatcaaggcctgttttatctgttgaaatgcatcatgacactcctgtgtaaactcgaatttgacttccttacagagtaaagcagtcaatggtcttgcgattctgctaaagtctttgatgaatctcctatagaaaccaacatgtccaaggaaactcctcactgctttgacattatccggcgcttgaagacttgtcatgaccttaatcttagctctatcaacctctataccatgctcagaaatcctgtgtcctagaactattccatcctgtaccatgaagtgacatttctcccaattcaaaactagatgtttctcctcacatcttgctaacactttgcagagattctctaaacaatcctcaaatgatgatccataaactgaaaagtcatccatgaaaacctccatgatatcctcgatcatatccgtgaagatagacatcatacctctctgaaatgtcgcaggagcattacaaagaccgaagggcattctccgataagcaaatttaccataggggcaagtgaaagtcgttttctcctggtcatctggatgaatcgggatctgaaagaatccggagtatccatcaagaaagcaatattacttatgatttgctaacctctccaacatctgatcaataaatagtaaggggaaatggtctttcctggtagcagcattcagctttctgtaatcgatgcacatccgatgtcctgtgattgtccgagtaggaatcaactcgtctttctcattcttgactacagtgacacctcccttcttaggaaccacatgcactggactaacccaatcactatctgaaattggttagatgatcccagcttccaacagtttcattatctccttcttaacaacatctttcagatttgggtttagtcttctctattgcttaactgagggcttagactcatccttgaggtgaatcatatgcatatacaagtctggagagatacctataatatcatcaagagaatagccaagagctttgcgatacttgtgcagcttggttagcaataaagtgagctttgcggtgtttaaagaagcattaacaatgactgggtaagtagaatttgcaccaagaaatgcgtaccttagccctgcaagaaatggttttagatcaactactttaggagctttttctgggctcacgtcgccaactattgctgcttttgtagatgtgcaaattaactcctcttgagcaaccaattgcatcacatgctcagtcctatccagcagcttactatacccgttgggaactttgtcaattgagggaatcagagcatgcttcaaaggatcagcaggtgtcatcttcatgagaaattcgtcagccatagaagagatagtatccacatagaaagtctgcccatgaatggtaggcttcttaaccaccttattcatgtcaaactgcattctaagatcacttacattcaatcctatgttgcccttccttacatcaataatggcaccagttgtggctaagaaaggtcttcctaagattagaggatctttaggttctttctcataagataaaaccacaaaatctgtaggaatgtagctggtaccgacttatacagggacatcgcataggataccatcgggtctacggacagatcgatcagcaagaacaagagtgatttgcgtaggttctaaatttgtcaaaccaagcctaagcgcaactgaacatggcatcaagttgacactagaaccaagatcgcacaagcattaatcaaaactctcgtaaagataccacaattgagaacaaagctacctggatctggaagtttctgtggtagaatcttgttctgaataatgtcgctattctgtgtagacatcgtcatcacagctttctcagtaagcatatccttagtaaccatcctcttcacaaactgtctgatcataggagaagacttcacatcatctataagtggcatctctacaatcaacttatccatcatagctttgcatctagcatcatcatcaagctcctatttggacttcttaggactcttgggaaaaggaaccttgggttttgttacctttgctgcagctgaaatcaggttttggagaattcgcaggtttggactgggttggtgtcgatcgacaccctgttggtgtcggtcgacactgtcgcgttctgtagtgtctaccgtggctggtgtcgatcgacacccagtagtgtcggtcgacactggtgtctagtctgcaaaaactgcaacatcattttcttccaaattgacgattttggctgtaggaagctctcgttgaagcactggatttagctgttttccactccttaactcaatagcacgaacatcttctttgtttgtagtcaattgcttgatccaattgttcaatatttgaatcttcctattcatatcgtcggataatgcaaccagttttgtgatcaaaatctgttgtttgcttctcttgacctttgagaatctgttcgagaagagattcaatcttcctagtggtctcgggtggagggtgaatttgggttgaagaagcatgattctgaatgaagcttgtagtttcctgagccggtttttgatgtatagattgttgattgaaactcatgtatctctgttgatccatcttctctgaagtggctaaactgtcaacctgtgcaacatattgaacttgcgttttccttgcaatgtcaacgcttttggtactaatgctggaagctaagctatcaatcaaaattgttgcatcttctggatatcttcacatgaaattcccattactagctgcatctagagccatcaggtacctccaatcaactcttctaaaaaaggtaccaagaagttgtacctcactgaagccatgatacgggcagtcccgttgatactccttgaaacgaacccaagcggttttgaaagcctccgctggaccttgagtaaaggtagacagcttgtttttcagcgcctcaaacttagcatcatcgtaaaaattaatcaagaatgctatcttgatgcttctccaagtcttgagggaacctgctttgagttatttcagccaacaagggaataagggaagaacttgcacagtaggtagtcctctgagactccattagctttgatgctcaggacgaggtcctcaaacgctcgatatgggttaacactatattttactcattttatacatgtatttatcatcatttagcttagtgatcactcattgtatcatatcattttgcattattttagcttattttgcacacttaggcatatagaatcatattgcatacatattgcatgttttggtgtgtcttcaggtgcacaatgagtttacaaggagtatactagaccctctaccctatcgccccagaggggaaccagaggagcagctactcgaccagttattcattgccccagaggggaagcagcagagcagctactcgaccagttactctatcaaagcagctatagaggaagcagtagacaatcactcgaccctctactcgatcctctactctacctgtcacttgatcaaggccaacagattccacctgacttgttgagcaatcaaagagtctttagatcctcctcattccccactcaaccaaacagctgagcataagaagaggagaggaagaagcaactactcgaccaattaatcactcgaatcataaaggcaaaggcgcaatctttgtggcaccctatcactcaatccccaagggtcgagcattcatccaaactgcctcaagtctcttgtcttctagtgaatttagggttttcgggattttattataaataggtcactttggggtttgtccaaaggaccaagcttttatcctctagtttttctttgtgttttagaatctttgaaccttaattactcgtactcttaagttgtttatcttgtttagatctacattttgatatgtttagagtaatttctaggtttgtgttcttgattatgttgctagagtggtgattacggttattgaggatggattagattagggtaaattcgaggtttgtcaggtggttaaggttaggttagatcccttttggattagttgggcctaatccttatttctttctgatcaattagaattctctccaaggtattccagcatccaaaagatgaatggaatgcttgttctactaattccagagatttgtatattctagcccaagagattggatgtttaaactgcttattaactttaatagattgttgcttaatgcctgctttgctatgtttcattaacgagagttgagattaggaagtggtaaagttatgaggtatttgtctttcgtctgttagccaccttatagaccctagatatgcccatatcaatgaatccatccttaggacttctattcttcttagatttatttgcttatttgccttcacccttttattgcatttcattcacctcttatttactttcatccttttgagttacctgttagtacttgaatatgttgcatgcttggttctactcgaccctatgatcgattagggcactttagttcacatttttatagtttgaaacttgatgtcggattgt

SEQ ID NO: 1827 - DNA, 6240 bp, Arabidopsis thaliana landsberg
  unsure (1)..(6240): unsure at all n locations
aaaaattaaagagtaaaatcatagaatttgagacttaggagttaggataagtgtcaaatatatatagctgaagttatttgggaagtgactgatgatttattatagagtatatacactaaatagccatggattcaaaaagaattaaggaaatagccatgagctacagagttatatcggaaacccatgtatttttatatgtataacattagacatcaaagcgacaagacactgtttgaggagcgtatgattctgggtttgaaatttgaaatcttcggaagctaccattatattcattctctcacatcaagagtaatctatgtgaaaataaaaatcttgttttttcttcacactgcaaaatatcctcccaaaacctagcatcgtcgttggcgattgcgtttctcatcttcttcaatcaaacccagaacttgattgtctctttcaaaccttcttctcgttctcgtcaccgttagcaatccaagtattaatttatgattctcctttcgccggcaaatctagtaaggtaagccattgattttcttttatttatcgtcgatcttcttctatttcttcccctttatactttaattgcatagaaattaacgattgttgccagatctaaagtttggttcttttttccctttatctctatctttttctatttcttcccatgtatacttccataagtatcttgcatagggttcttaccggttgtgtccagatctaagttttgattattttttatttattctctactaaccctcacttttttcttaatctctctacatgaagttagataaggcgagatctgggaatttcctcaaactctttggattctgcttcgtccgtctagggtttttgtttaaaaacaagaggtttgttcatattttgcatgttatttatacttggttcatgtattttatatagataacatgttatgtctactctataatgtgttcttgtataatgatgcttgttattttgactcatttatttctctctatactatgttttcattttaaatttcatgcttttataccttttttttggtagggtcatgcttttataccttttggtctgccattaagtactccgttatttcatttgtttgcatttgttttatagttttttggatgtgttttatatagctgctaatcttttttttccttcttttgccgnttgcgagagaagttttaattcgttctcctcctatccaatttggtattcgccaacgaatctggtaagttcagtcctgagttccgattatttatctttggccgcttctatttcttcccatgtatacttccataagtatcttgcatagggttcttaccggttgtgtccagatctaagttttgattattttttatttattctctactaaccctcacttttttcttaatctctctacatgaagttagataaggcgagatctgggaatttcctcaaactctttggattatgcttcgtccgtctagggtttttgtttaaaaacaagaggtttgttcatattttgcatgttatttatacttggttcatgtattttatatagataacatgttatgtctactctataatgtgttcttgtataatgatgcttgttattttgactcattggtttctctctatactatgttttcattttaaatttcatgcttttataccttttggtctgccattaagtactctgttatttcatttgtttgcatttgttttatagtttttttgtatgtgttttatatagctgctaatcttttttttcttcctgtcgccgtttgcgagagaagttttaattcgttctcctcctctccaatctggtattcgccaacgaatctagtaagttcagttctgggtttccgattatttatctatgtcttcttctatttcttcccatgtatacttacataagtatcctacatagagttcttacctattgtgtccagatctaagttttggttctttttgattaattctctactagcccttaattttttcttaatctctctacataaaattagataaggcgagatctggaaatttcctcaaattttgtggattctttctcgtccgtttaggggtttaaaaaaaaaaaaaagaggtttgttcatattatgcatgttatttataggtggttcatgtgttttatatagataacatactatgtctactctataaagtgttcttatataataatgcttgttattttgagtcattgatttctctgtatactatgttttcattttagatttcatgcttttatacctttaaaaagggatcgagatgtgtttgagttgattttcggatccagtgatataactacacaaatacacatttatatacatgcatatatatacaaaattaaaactggattttttctcaaaaaaatctataaaattggttgcttgggttccctatatattatcttagggtttagtattatgtaattgaaaacgattttaaattggttgcttgtgttcctttttctcatattgacaataatctctatctagtttcctcttaaattcatgtttttctttcaaatttcagtgttttctatctgttgtatgttttggatttttctcaaaaaaatctattaaattggctgcttgggttccctatatattatcttagggtttaatattatgtaattgaaaacaattttaaattggttgcttggtttctctattttcatattgacaataatccatatcgagtttcttcttaaattcatgtttttctttcaaatttccagatgtgaactactttctatagttgaaaaactaatataatggagacatgctttttccagtatatcattttcttaacgttgttgttttacttgttgtttttgtagaccaatgttatctctattcttagtggagaagttaatggtgactcgctgaggagtgcatcatgttgtcctcctttgttatacttataagaaacatgttgtttctacactttctttcaccccttccccaaatgcaacattggaaccagtatataacactgtcgccgcatttaatgtagtaaatacgtatctaatattttccaacggactgttcattttgtcaaattgcaaataaaatgtgtcgacccaattatgtagcaagttgcataatgatgattactgatataaccaaacatttcatgtaatgtatgatacctataaattgatactttgtcgagcttataaccgaatgaataacatcaagcccaatacaaatttccaactcaagcctattgttttcaaattcgtcagtataacttcgtttacataaagaaattacatgagttgttcttatataacgttctattttacagggtactctgtaaaacaaatctatcattaatggcatacctagtattgctgtaacttgtctttctcctttgttgtatacttgttccttttgattttttcaaagaggaagtggtgtgatcgttaaatgctactcatctctcttgttatatagggaatgtctcgataacaagtagggctacaatatactaaaatatttttgggcaacaaagctgacaagcttttaagccacataattttgaataattatgatttccctctaaactctcgcagggctgctaatcgactgaagcagtcgtcatcaaacttataactgaattgtattaaaattgcatgcattacaagaataattcatgttgtttaacactagcacatacgtcatgcgcgacgtgtcgtcaatctggtggatggttagtggttctcctttgttatatttctacgaaacatgttgtttctggcctttgttccaccccttcccccaatgcaacattggaacccgtatataacactatcgccgcatttaatgcaatggatacatatcaaatattttcctacggactctttatattgtcaaatcgcaaataaaatgtgccgactagattatgtagcaaattgcatattaatgattactgctataaccaaacatttcatgtattgtatgatctctacaagttgatactttcgctaccaattagggctacagtagtttaagatatttttccgcaacagtgcttacaagcttttaagccacataattttgaataattatgatttcccttcaaactctcgaagggctgctaatctatggaatccgtcgcttgtgtaaatatcgcatcaaacatataactgaattgtatttgaattacatgcataaccacaataattcatgtgttttaacattatcgcagacgtcatgcgtgacgtgtcgtttatctggtggatgcttagtggttatcctatgttatatttatacgaaacacgttgtttttggaatttttttcaccccttcccccaatgcaacattggaacccgtatataacactgtcaccgcatttaatgcaatagatacgtatcaaatatttttctacgggttgatttacattgtcaaatcgcaaataagatttggcgaccatattatgtagcaagttgcatactaatgattactgatataacaaaacattgcatgtaatgtatgatctctataagttgatactttgtcgagtatattgcccaatacacaatttccaactcacgcccattgttttcataccgcgtctgcatataggaattacatgtgttgtttttaaataacgttctacgttacagttaccaatgaccttttacctgttagtctccattgaataactagtcacatacaaagcaaacatctgtatatatacgttctgtttttggcatatctagtgatataaattagtgtttaaatatcaattgcatctgtgaaatctaaaaggtatgtggtttatagaattaaaaaaaaaaatgaacaaatacatctatatatatcgtgtgtttaataaataaagcgggttactcattatctacacatgtttatgttctcatcggtaattgaaatctataagttatgtggctcatcagaaacaaaaacatatataaatggcgtgtgttttataaataaaacgggttactcattacctatgcatgtttatgttccctacatatagacacctagtgtcggaactcacgagttcctgcctatctttccagattattttggttatttcacacccaaaaaaaggctatttactaaagttttctgacgcatggctattttgctaatttgtgtgtcgaatttggctagttagctaattgactctttattataataggatgatatcaatccttccaactctaacttccacaaaaacaattaaaatgtttatttctgattttcgcagaaggacatctgtgttgaatagtcaacactcaacaagaatttagttatcaagaaagtgtgaggtcgtctcgaaacctttgctcacttgattgaaaaataaagctttctttccgttaattcttagattttgagatgggttggctgaggaagaagaaggagaagccaaaatccgatagagtggccaagagaggggccaagttgttagaagagctcatcgaattcggccatggcaaatccaatcccatcatattcttctctgctgatgaaatccgcaatgccaccaacaatttcagcgactctaatcttgtttctcgaaaagaattttactaccactcgtattcaggtaagaacgggaaccatcccatgattctcattaagaaagatcttggcttgtcgagtctcttcagagtagatcttttgagccgcgacatagcagtttcatcgatggtgagtggtcacaaaaactttttgaaattggttggatgctgtcttgagtttgaagattcagtcaaggtttatcatgatgttaagaaacattacaaattagaaataagtgaacagccatggaaaaggagaatgaagatagctgaagatattgctactgctttagcttaccttcacactgcgttccctaggccctttgtatataggattttgtctcattggaatatcttattggatgaagatggggtcgcgaagctgactgatttctctcactgcgtctcaattccagaaggagaaacttttgtccaggttgaggcagcacagggattctatagttactgtgccgatagctacattagcagtggcgtagtctcagagagaacagatgtctctgccttctggaatgtttatgggtataaggcttctagtaggaaacgaaagcttctccgagcattatcaagtagaagaagaataagaaagtgaaggtggatttgtcagtaacatcaatagacatgctcgaattttcctgacacaaaaaaaggaa

SEQ ID NO: 1828 - DNA, 2202 bp, Arabidopsis thaliana landsberg
gagaagaagcaggaacaaccaaagaactgtaacaatttttattggaaagattatgcaaccaaaaaaacaaaggcaagacaaaagtcacagaacaaaacattttatgcataatattatttgaccttaattcactgactcgtctataaagatgcaaaaatcaaattagaccaaaagaatctgaaacacagtattttgcaacctgaatacatttgatagagagagagacctattacaagctgaactggttcctactagatccttaacacataatgagtatctgacattaaaacctaccatttgttgatgggttcacgaaggctttagtctcgcgtttaggaacttgaagtcccaccgttgaacctgaagacccaccatttgttgatgggcttggtgcttcaacagagtaatgaagctcaggtggtgttgggttttctttatgaaacatgagtttggcaataaggtccgttgaaatatcaatgtcaagcttataatctgctgcaagttcaacgatggctttcaatcttcaaatatgaaagcaattggaagagagataatgaacagatcaatttataccttcaatatttaatcagctgcatcaaaggaacacaaacacgccaaagatgttaacataaaaaagatgcagaagaatcataaagcttcagaaaatcaagcagtgtatcaaaacatagaacaaagcaaatcacataaaagtaaactgaaaagctatcatagaacaatcagtcatctacacaataaatacttttgacaatctatgattagaaatacttacaactacagaatctgatgcaaataaagatctacagagagcttttactttagataacaagtttatagagaatatgaacaaaaagcaactaaagatacaacaaacacaaacccacttcgagatttcaatcttgtttaatttcataagaatgtcatatagatctcattgaatattggtatccgcaggtgatgtgagggagaaagaaatgccatagtttgatcaatttcttaaggaatggccgattaaacaaataattcggttcaaatttaatgtataaccaacccgaataaaccgatttccgaaccatcccgaacagaatttttattccggtctatttggtgggattttcaaattttcaaatttggaacaaaccaatctatccgacttgaacaactcggtttaactcaactcgtgaggctagagtttacgacttcgtcaactcaatatattctattaggggtgggcattttaaccaaccgacctgacccactcgaattcaaactgacccaaaccaaacttaagcgtagactcaaacctgtcagttgcattttgtctcaacccaaatgggtcggctaaggttcggttttaaaccaaaccgaatcaataacccaatgtgtttattaacttaattaattaatgatatgaaaatattgtaaataactataaatatttataggttgagtttttgtaggtttttcttttctggttttgtttgaattatgcaatttaaacatagaatttgatacattaattgattttttgaaccgaattaaaaccgaaccaaactaaaactgacccaaacacaaagcaaaccaaactaactacggttgagtatagttagagttttacgaaactcacataaaccaagagaaagaaaaccaaacccaaaccaaattcgaagttaaaccgaaatgtccacccctatattctataataatcatggttctgttacagcaacaaaaattttgggcatgtttcaagcgatttaaagtatgagagttataagacaagagaaggcaaaacatattattcatattattttatagaaaatcaaatagaaaaacttggctataaaacattaaactccctagacaataatcatttccgcaatggtattattcttcttcggaactttcgaattctttggaactttctgaatttgtcatctcaagatcgctatcatgatcttcagaatcttcacatagtggatcttcgggaatgtcttcaagctgtcctctaggtaaaattagtgaacttagatttaatgtattgactgtcgcggaatattgaagatcgttgttatcctcctgcattgctactcgttgtgtgatgatttcttcaagtattcgtgtgatcactatgaatctgtatgaacacatcttatgagatgatcatgatatcgtatataatccatc

SEQ ID NO: 1829 - DNA, 3653 bp, Arabidopsis thaliana landsberg
ggatgggcctggttctaacgcaaaagttgctgaggggtgtaatttcttctgatgcggatgaaatagttaatggtagttgcttaggccttatggatgttaaagtcttgattgacacttctattatacaagaagcattcctttggagacctgcgactaacatgttcaccattgagaaagttgttggacatatgattgcatggcctgctgttatgtgtgttaccttagaaaaggagctccaacaagaagacattgtaaccgtggtaaagttaattatttagtctcatactcatatatagaataatggtcttctattaacataatcagattttgggtttgaatgtttgttgttgcagaaggacgttggcagacaaaagaacaaaacgcattagtcaatggacttctgatgcaagaattagagctaatccatcatttgatcacttgatgatcaggagttccaaacttgccacgcggaaggtgggatgatgaaggtggtgatctgacacgctggcgatcgcttctctcgtgtgggatcaattcaagggcaaataatggatagaagggtgattgactcgctcaatcagtggaataattgattcactcgatcaatgaacgaatgaaggatgttgaatcactcaacaaacttaatccgcagatcctgaagtacttagtgactcactcacaaagaactacagaacaaatgacaaagactcaaactttgacaagtagaaaacgtttctattacttttaaaatgatcaagggtgctttcaatgaatgagaaatcagcttatatagagctgaatacaacgttctaaggcatcaaagaaagaaacaaaacataaatgaaaatattggacattaattgtagaatatgttcgaataaggcaactgaggtgtgccttgtatcttgtcaacttggggaggaagttgtgacatattggaaggttctggagggtctaaagattctcacataagcgcacaaacaaagaaggaaagagttgttggtaatcgatctcctttggctccatatatggcaagtagtaactcagcgggttcttgtgtggtaagatgtaccaaagttcgtgtggtacaagtgttgtgtggtctagatgttctcctggtttccatatgtagctttgaggtgcgtccaagtgtagaataaggaagatttccttgtttggcttcatttcgtgcggtacttcagaaggtagttcagcaggtagttcagcaagtagttcagccggtctgttagcaagtacatcaaatatatgtacttgtgatatcttcgaatcatttgcttggtaaatgattccttgatgacttgatgttgcctcgttaaagacctttctaggtaaacccattgggacaaaccctagataagggaaaaagagtgcgacggtcatatcccacaatatgctgattcggctcgctggtctttgacccttcttgaatcatcattagtcttcttaggattaatttgctggtgaataattaatcctaggccttgtgcttgattgagactccaattgggcaagagtcctccaaaatgcttctgatcaatcggtttgataaatgtacaggctggtttgttatgctcccggtttggtttaatttggatgtctgcatcatagcctctcccttgaaaaagtttcgacctcgaaactatacaatctgcaccaagagaaagcaagttagctttcatgcgattttgggaggctaaggtcttaccttgatagggttgcgatttgatgatgtatagtgcatctggtggctctccattgagcaagaaagataggatcactcctctgttttgatccggtactttgactcgtggtattgcttgcttaactccttctcggttttgagctttgaaatctggtggttcctctttgaataagcaagagttggagattcttcttgtctccatgatatgtggtgttaacactaatggtgctggttcactgtggtttggactttggttcatgaggttcttcatctctagtaaatctgctttatgatcctcccttgtacctaccatattgttgactcttttggcaaagaacaagtgcattatacttgaagttgaatcattaaaaacagagtacttaaagcaacaatgaagtatgaaattattccaataccgaataagaacataggttccactaggtagtatttccaatggttgcctctcaatgtttatactcttttgaacctcattagccttatgctccatagtgtgacctaaaccaacattctttggcaagagcaagtgtatcatacaagaattggaactttctaaacttgttgaaattacactagcattcggtttaaactcctttgtggttgacttttctatttgcctaattgagcaatttgcagcaaaatgtcctcttctatgacacctataacatatcatttctttagatttagataggttagaagacttaccttgctttaattcagtctgtgcttcagcatgtagttcggagtgtggttcaacgtgtagttcagcgtgtggttcagagtgtggttcaagcaacgtagttgtactcaacttctttttctttacatgagatgttgacttagacttagacttctcctttagagcaggtgtaggctctttctttggcttagggctaaaagcgctctttggtgtagccttcggttttgctagaatccatcttcttggctcgggattagtgtagattcttagattgtattgacgcatactgctagcatcttccacgaactcttcatacataagttgtttcatctctttccaagaagcgtctggttcatcatattcaagacgaatatatgcatcttgttcccaatgcctaagggcagcctcggttagggtatcctccgcataaatcgtcttttcttcctccggaatttggttagatgataaccaatcttccatctcatgctcccaacgcaaataggcatctgatccttggtgatggcctgcaaagtttatataacaaaattcatctctattagtcacacttacgtcttcattcgcttcggtgtaatcttctccggaatcatctcttcctgtctcactttcgactatattctcctcatcaaactcttctttagattctagttcatcaccattgcttgcttgagactcatctaaactgatttgggaatcaatttcttcacaccacggtgtaactccatcatatgatgcatcgtcataatctttgtcgggtatctctcaccatggtctgccatcttcttggtgctcttcctcatggtcggagtcaggtatctcacaccatggcattttttcttggtgtagctcctcttgttcggactcacaccatgatttttctccatagaattcgtcgggattgctctcttggtcagtttctcctccgtaccaaccttggtggctcgtggtgcctcgggatggatctggcggttcgggttcacgttcttccccatctggttcatacccaaattctgagctagaatcctcctcacaccatgatcgttcttcatagccatcatcttctccggttaaggtttggtttatatcttcctcgtattgccaatcaacttcagagatgtaatgatttttgtcctctaactccatttctacctctggttttaggaacgtaccttgcaaacacaaagaacaaaaaat

SEQ ID NO: 1830 - DNA, 3218 bp, Arabidopsis thaliana landsberg
acaccaggcattaactgatgcatatgaatggataccaacacagagtgaatcgacgacaagggctcctagcggacatatgcaatacggatggaagaaaccaaaccatggtttcatgaagtgcaattacgactgcagctaccgtcaagggggactagaaactaacgctggatggatcatcagaaacgaagctggaacttttgttatggctgcacaaagtaaaggtcgacaatgcaactcggacttagaagcggaactacaaggtttattaatggctatgcagcatacttgggtcagaggatacaagaaaatcatattcgaaggtgacaatagaagtgtggcagaatgtgtcaatggaaaaacccgaagttttgagttacacaacttgataagggaaatccaatattggcagaagaaatttcttgaagctgaagtcacatgggtgcctagaacgagtaataaagttgctgattgcttggcgaaatttccattcccaaataatacttctttttctttcttctctttggtcccatattgtacaattcctccatgaggattatacttcttcactataataaagcctaaagtttgaagttaaatttttttttttttatgattttatattttcacttaaaataaagtttcttatgaatagcgaaataataataattcaatatttaattattaagaggcgctctaaacattatttttagagaatagttttttgtattttctttttaatgagattaatatgtttttcataattcaacgaagtttaacttttttcaaagcatttggagaacttatttcttaaaattccgtaaaaaaagaatttaaaatctttatcattattctataaatcagtgaccttagccaaaaacctcaaacaaataagcaaatcattttcaagcagatttacaaattttaaatttgaatttcaatgcacaaaacgaaaaacttgatggatgagacaagtttgaatataatatctattaaatactataattttataaatttagcaaaaattatattttctaatggatctgttagttcatacgtatcttaattagtgtcaaatcatatctaatgattagtgatcaaactagtttgatatctataagtgtcttttaccatttattaattaaatttaacttgaatccttttcttttatatacaaacaactttaatccttcgttaaagtataaatttaaaatattttgctttgattctagttatcggtttatatttactaagttttagttcatgtgcaatttcaaatgatatgcttttaaattttttctagtcatgatagttatatctttaacataaatcttatagcaaaactatacttgatattctaaatttatcaatttgctcttgtgaacctcatattagcctagagaaactttaaaatcctttcaaaaagttctatgtcgaatacagttttactaacatttattagccatttcgattaagattattgttagcaaaaagtttttttttttttaataaaaaaaactatgttttagatacaatgtgagttaggctttaaattttaaaagttaaatacatttatacttaaaaatagttggaaatttaaatttatacataaatatgtcaatttgaaccttatacccattaaatatttggtgttagatatcaaaataaaagaaaattaatcatttgttacttatattgaattggatattgttacatgtatttatgtttttttttgtttaattttgaaacgtttaaatttaagttttgtgctatatttatttgtcgaaaatataattgtcattaaatataacgttaaatttatttttaaaatacgttgttatttttatttcctttataaaggtaaggtaacttcattttttaaataacaaatacaaatcattctttattacgatttgtttagtaaaacaagaatatttcttgtatatttcaatcataagcagatatgtctaaatttaactctcagattactatgctattcattgttttagctttggtgtgagcgtttgttccggctttctccgtcgaagaagcggaagcaaatttattatggaaaacttgtcgtgttaaaattactcctaagtgtgcgttgaatataatcgccgctgtctttgaaaatggaacaatgcatgatccttgttgcaacgatcttgtcagagaaggaaaagtgtgtcacgatacgctcattaaatatattgctgataaacccatgttaattgcccacgaaactgaatacttgaagaagagtgatgacttgtagaaacattgtgtctcaatatccaaaagtgcttgaaatatgtaatattttttactgttttgatcaataaattggttttttctattattgaagttttgttcagtcaaacatttatattttcactttactacaatttcagtcaaagcgaattttgttctaaaaaaatataacataaatttatgggtttttaaaaatccaatgataatgacgattattttggcgattctctttcggctaataaaccgctctttgttcgcctttttggcgacggctccttgctttttctccggagacatggctcgaaatcgacccacctctccgacggttatctccatgacgcccacttgtcctcttatggaccccactattccttcttcaatttccccaattctatataaacacacacctgcaatttccacttctacagttctcgaacaattaattccccttgcgttgctttatccttctcgattctatcatactcttctaaagatggctgataatttgcgacgagcggtccaagatataaaccttggtgtggatgatgtgcctgtagcactctcggctgcggtggtggcccaagcggccgcagaaaatcgttttatcttaatgggacatccggtgatgcctcgtcgacataacctccgatcgattgtggcttccatgcctcgtgtttggggccaagcagggttagttcacgagagaattgttccagggaatcagttccaattcatcttcccctctgaagaatcattggagacagtgatacgccggggaccatgggcgttcaacgaccgcatgctgctcctccaacggtggacaccacttgagaacccgcctttactcaatttcatcaatttctggatccaaattcgtggaatcccttttcactttctcagccgtgaagtcataggtgaaattggtcgtgctattggtaatgttctga

SEQ ID NO: 1831 - DNA, 11704 bp, Arabidopsis thaliana landsberg
  unsure (1)..(11704): unsure at all n locations
gctatcaactgctgcgatctactctcgtcatcccaaggtaatttctctcgatcctccatctcttctaatttcgttatttatctgctaggaatttcaccggaattgcttagatctagaaacgattatggtttgaacgggtgatttctcggttggaaatccttatcgttttcgtagattttcagctgccgatttgaggaattcgccgtttcaccgctgctcttttccttctccaccgatggattcaccgtcaaccactaaattcgttgtcggaaacaaccgcaggttcccagatctccgacgaaaagcgcctccgtgttctttaggtgttcgagacagttcttcatcgagctcttgagtcttcgaggaacagttgcctctagatctttctttttccaataagactaagtctgggtgtttatcatgccgacgaagagaatcctttgctttggtttactcaatagatggtcagttcgggacgtatacctcgtctcaatcaacctcgaggagactcaccttactaaaaggagctcacgggattccaggtcggataaacctgatttcccccgaggcgactgactcgccagagactcccccgcctggtcatgcttgtgctttcgagatcttcttctcggagtgcgggctatacttcccgctccctgacattttgatagatttcatgcatgagttcgggatcgcactaccgcagctctgcccgaacgtaatccgcaccatcctaagtcttcttacactagccgaagaagacaacttccttttctctctgcccgaccttctacagctttacgcaattaagaaaggtcgaacacagggtaccttcttcttatcacctcgcaaaggattcagagtttttgaagattttcccgaaaaggatgagcaatggaggaaatcattcttcttcttccccgttaacgagctcacattcggcgagaaaacgggcctctttgtttcggaatggtctgcccgagctggtagatagtaacttaggaagacatgccatatctgtcatgcttttgttttgtcttttctgatgcgcacgaaattaccaactttgtttttgtttgcagcttcggtggacctacttcctatctccaagacattcgcttcgcacttctccagcttcgttcgtcaagacttgggttgggaatctttatcgagcgaccggatccgagcatcaggaaaaagacttcgctctcggaccgaccttgctatttcctctcctcctttcgaacccagaatcttctccgaagaagaaatgtcagccccctcatatcgtgccaagaaaaagatggaaagggagagggcaaaacaggagaaagaccgcctcaagtccgacaaggtcgtcatgacgggaacccttgaagacagcaaacttcaagctgccaacaaggccaagcagccccgagctgaagaagatggcggcanngacagaagccttccactttggcaagcaaaaacgatgcgcctgccccggattcgagactcattccaaggccacctccagcagagacccctcgaagcgatatgggataagaagaggaagcaatccgataaggatgctcgatctccagcccgctctgtccgggctcgaactgaagagagggatgtggcccgagccagcaaaaagagaaaggcaaaaaggggactctcaagatctcgtggtgctgtcatcccgagaatctgaagctcgcagctcgcagcctcatggaacaccgcctttgccaggttagaaatctattcctctaaatgccttctttctccgagatactgacaacttactcagttatggccatgtttcagctcctccactgccttttgccgacctgatcaggtcgttcacccatgcgggcgcatctatccctccattgaaggagctgaagccgaccaaccaggagaactacctccgtttcgtggagaaactgggcgaggtaaacattcttctgaagaataaaatttaagacttagtttaaattttaacccttctattgtttctttatcagaccgtgttgaagttcaactacgccttcatgagtaatgaacaccagctctcggacaaagacagggagattgagagcttcaagcagatcgagtaggagaactcccgcatggttgatcgggctaacagtgttcttagccggatgagagaagctgaagctcgcgttttagccctcgacatcgccaatactgacttcgctgccaagctggaatcgggcaagaatgcttacttggcggctattgacaacgagaatcgagcccgagctgagctccttgccttcgaggagaaactgaggaagctggaagaaggtcaagctgcgctgcttgcagatgcgaggagggaagagcggagaaaggttcgggctcagtttaaggacttcacgtctaagtatcagagcttctacgcgaaatcagaggaagttgaggcgttgaaaatccgagctgctgaaatgaaggcgaaccgggaactccttgaggagattgagaagggggagatcacaaacacggcgttatgatagttttgcattcgaactaacgcttggttgcgtcgttcgtcgataatatcaatcatatcaaccatcattttgttgttcgcagcctcgttctggggattttgtactcttctcgaactcgggactttgatctcggctgggataactgcttccattccatgaaagagagcgaagggggtctcaccggtagctctcctaggagttgtacggattgcccataacacgttttgtaactctccgaaccaagctcccttatactcatttagtttttttttgaggttcgagatgatcgttttattcatcgcctcggcctgaccattcccttgcgggttgcaaggtgttgaccgactgaggcagatttgccaccctgcacaaaaaacttcgtactgttcggagattaactgaggcccattgtcggttactatttcatacggcatgccgtgcctacaaatgatttccttccagatgaactggcggacttgaacttgagttatattggagtaggcggcagcttcaacccacttcgaaaagtaatcagttagaacgagtaggaacctcactcctcgagttcaaacgtggagtggtccaacgatatccatagaccatttcatgaacggataaggcgcgaacaccgaggtgagaagttctgcgggctgcaggatgtatggtgcatgcttctaacactgctcgtatcgacgtgcatacgcttcgcaatccgctacaattagggccagaaataaccgtactttttgactttaaaagccaaagaacgacctcctgaatgattcccacaagttctatcgtggattccttttataactgtccgggtctgttttctcaaagatacaaatagcatccggagccgaaagaactcttctgtacagaatgccatccgctacgcagaaacgcgcacaagtggccttcaactttcgagcctcccatttatcggcgggaagtactccgttgaggatatagttccgaattggttctctccagtctgcccctaagtcgtgaggtatctgattgtcaggaacctcgggattgttgagaccagctaaatcttcgtcagccgcaggcggggcagcttctggaattttttcctcgtcgtcgagttgctgcagctcgagattgtttgcttgcgcctcgagttgcttacgcattgcccgagtagtaacaaagtttatttcctcaagtcgaaaattgggctgagctatcgtttcaacagggattatccttgtgacagttacttcggatgtagaagccaaagcagctaaggcatcagcaactgaaatttctgcacgaggaactttgattagttcgaacttgatataactcgattttcaccgattttatctatgttttaggtataggattttgtgtctttatgttatttctcgagtctttttagtgtcttttcaggtattctatgcaatgggacaacaatggagataaggacgatttaggttcaggaatcatcgaggagtgtcgatcgacacactcttggtgtcgatcgacaccagtttcggcccagcaaaaaccctagacgctttcgaatttacagaagatcaagtttgccccagaagatttccctatttgtattattagtccctggacgtttttagggttttatatattttttttagacttaagtttcttttatcaagtcttttatcaagttctttgcaaaccgtatttttagagacataagctattcatcctccgttcttcagagattcattcagttttcaatacagtgaagagatcctttctaactcttttctttattgatgtgtttatgctttctatctcaattatgttatttgtttcatttattatgtttgagtagtctggctgttagaaatagggtttctcattagggattcatatggtttagtagattgcccgctttgctaggttatctgtagaattcttcatctctaattatacctaatgctagatctagagtaattaactagatcttgaatccagacaatagatatgcccgccataggtatctgtagttggatctattatttgatgagtctggtctataggtgtgtaataagaatcggcctatttactaagatgaataattgaactcgttaagaatgcattcttaagtggatagtctctcggcttctctggtcactattagctatagatatagggagtttcgcggcacgccctttggttattccataattagagtttgagtttaagaatggctcgataacaacttagctttaattagatctactaaccaatagtttcctgtgaataccctgttcctagctcttttattaaatcgtttacaacacaatcaatctgctattttcttattttgttttcttactatttcactcacaccctgctagcttaatctcgacatttaactcaatgtttgaacaaaagaactccgtgaattcgatcctaaaatactgcaattgatctcttatttgagagagtagttctaggtaatttgaaccatatcaaatttggcacctttgccgaagttcttgggaatcatcattgagtttagtttagagattttgtctagtttttacttctattttgttactcacgcgtttcttgttttcttcttttctgtgtttcaggtgtatgcgtaggcaaataaggagcacaaaacagaaggagaacgttttctttagtctagttaggaatcatgatctttatttctcatgtttattgcctgattgatgagtgttgcaggttcgagtcaatccgactattggaaaatctagatggcaaaccaacaaacttgaggatatcctagtttccaactcaaccactaaggctggagctaatctcattgctcttccttttacctcttcaaacggttagtattcatcgatcttgactccttgttcatacctgatattgagaccaatgtgataaaaaagaatatgttcctctccccttataaaaagaaaaataaataaataacgagagattgagatgactttcggatagtgtataggggtaggaatgtttcctatgaccccattattatacattgtttgaaatgatcaattacaaaggttggaaaaatgccaagggtgtcaatccagtatgcgagttcccctttctttactctctaaaaagaataagtctgggggagagaaagaataccaaaaaataaaaataaaatgaatggtcgatttgttatggtatactacaggaatgagtctggaaggttcttaaacattaacttgattgatgagacccaacaatgataacctagtggatatagctgagtgctttggtatggaatctaggatgtagtgtgggctagtggagaattacatggtggtcacgatttgattagaactgtttagttcatggatttagtttgtatgatcaaggtaataaactatagagattgggagtttctatgttcttcaaacctctttcacatattcaaccttttgttttgtttgagggcaagcaaaagccaagtctgggggagttgatatgtcccggtttttactgatttctaacacactttcagaatggtttttagagtctttctagtcttttcgtacgttttgagtcattccaggtaccctcacacatctgggaactatggagcacaataagggattatggaagcttttcagcaataaagatcttgaaggacgtttttcagaagcttgtgtcgatcgacaccacacctgtgtcgatcgacaccacacctgtgtcgatcgacaccctcgtcggtgccaggagaatattcgttttacaccaagtctttgagaagccctaaagttttccttatttgcaaaatagtccctgcacgtttttagagttaaatacctaattgtttggtcattattagacctagtttttgttcttgagcttttgttacactttagagaaacagaatccaatccctaaagagaggatctgaactgctttgctattattcttaattcatcaatgaaaactattcagattatgatttgtgtttttattgtcaagtctgagtaatcaccttattgggtccagggagtctcaatagggatttagatggattagtagatcgaaaaccccttaggattgttcttaaagttcttcatcttgattattcttaatgctagttttagattgatcacctagaacttgatattagataataggtattcccgccataggtatttgttatttgaaccatcatagatgagcctaggcatttaagaaagaacaggtaggctcatagaagagctctggtttagatactaggtgaactaatcaagcttattaacaatgcatgctttagcataggatttctcggcttctccggttatcttagttgtaagtatagagtgtttcgcggaacgccagcggttactctagaatgatagtttgagtttgagaacggtgcgataacaatcctgatattagctagatctacaatttatttatctcccgagacaattccttagacctgacgctttaatcacttgaatctacaactcatttacatgcttatttgcctttaatattcaattactttatttagcttattaaacaacatcataagtctattgtgtgaacatcgagagctcagtggaattcgacccttaaatgctaacgacgatctcttatttgagggagtaagcttatagcaatttgagctatatcaaatttggcaccgttgccgaagttctcttttagttcaccattagactaggtgtcattttaagtttatatacttcttttctatcacctattcacgtgtttctttatcttttggtctcttgtgtttcaggtaccttcagattgagaatcacgtttcaatgacagactttcacgatagtgtcgaccgacaccatcagggtgccgatcgacaccctttgcagaaccagacagctacaataggcgactttaacagaattgatattttctacaccaaccgatcagcattcaagctacctccatttgaaagagaagactttgctatacaccatgcctattatgatcttgtatcaagaggaaagtttagaggagctcccgatgaatcaccattagatcatttggaagtcttcaaagacatagtgtcctctatcaaagcagaaggtgtaccagctgattaccttctttgcaaactcttcccccactctctcgcgagcagaggaacatcatggttgtgtcaactagaaccaagttcactaaccaattggactgatacaaagaatgcattcatgaatcacttctttgatgaatccgtgacagaagcacttcgtttgcaaatttctttgttcactcaagctccagccgagtcccttagagcagcttggctcagtttcaggtcttatcagggagaatttttccaacatggcttccaagagagccaactcatcaatctattctaaagaggaataaccaagacataccgaagtcaactcgatgcaacaagctactgtaacttcatgacaagaaccactagtgaagcattactcctcatcaccaatgctttaactagtcttttgacacatgaagttgacccagaacaaagactttcagctgagattgcaaccacaagcacagaggatcatgtttcagcaatctctgctcctatccaagcccccccccccccttcgaccctccttagacagccgaatggaatccatgcttgcgcagattcttggcaagtttgatgctgtctacacagatcttaatgggaagatcgacaatctgagctctcacttgaagaagctggatgtacaggtggctcaaactgcacaatctatcaagagacaagagggctttcttcttggtaatcctgatgcaaacccaaggaagagctgtaatgccatcttgattaaagaaggagatgatgtgtgggaggaattggacactgaagaggagttggagcttgcagttgcagagatggtgtcgaccgacactctcctgtgtcgatcgacaccatacgagactctttctctaagacgactcaatacgacggtgttgatcgatacccctctagtgtcgatcgacactggatccggactgccccttgtgaggtgcaagtacctatgtagcccgagtctgtctacactcctcctgtcccctatccgaggaggcgtcgttgtaaacaggagattcatgctgccaagtgcacatctataatggagaagatccttcatactcttcctaaggatgattctaagacatcttctgcctcactcaacaggtatgtcaagcgacttgttgacaatggaatgagctcagatgaagctaaactgctcacacaggacatcagtgcaatcatgctgcctaaggccaagaaggagaaggcacagagagtggacatagctgagtacatccgcactatccaggttagaccactaaaaagctcccagatccaggtagcttcgttcttgattgctctatctccacaagcaggttcagccgctctttgtgtgatctgggatcaagtagcaacctcatgcctaagtatggttcttagagattaggcatgactaactacaggccaactaaaatcaccctcctattcgcggattgttccaaacgaatccttgaaggaatccttgaggatgttcctgttaaggttggcaattccttaatccctactgattttgtggtcctggactacaataaggaacccaaatatcatatccttggaagagctttcctagctacagctggtgctaggattgatgtaaagagaggtacagtgtctcttaacatttgtgacttggagatggagttaggcagggatggtacaaagttaattaggcttatcagtagcatgatctccacccaggacacacctcctcagactgctcagaatccccaaatagagccaccaaaaacgctccttttagctcagctcgcaaatgggagttgtagagcaacggtgtcgatcagtttacatgagtatcgatcgacacctgtagctgcccataccagatctttttacacaccgctgataataggtttttaagatcaattaatcctaaagcactatcatgtcgttgtagtactgaaggttgtcaatccaaatgggtgtgatgctagcaatcaagatgcaatcagagttcacagagtcaagccaagcaataacaggttttggggtgttctagcagtcctaagtgaacatgcaggaaacataaaatcaaacagaacagtaaaacactcgaccaacacagcttgctgccaagcactgggtgtggtcgagtgacatgtcgagtaacagacaaaaaatgtaacagggatactcgactgcacagtctgttgccaaacaactgggtggtcgaatatcaggtcgagtaacagtaaagaattgcagaaactaagcaacatatgacaagattcactaaacaacagtaaactaaacaataaaatcaatcagataaagaattcgcgaggatgggataattgagtagtttcgtttcctcactttacaggtgattgacatgctcaataaattatccctagacaataagttcattaaccaaatctaagtgccaccgcaacagagaccctcaagttaacctagtcccaaactcaatcaccattgacaagagctaacctaacatgcattacgaatcaataagttaaagccaaaacgctccatgcaaccaataccttggtacagagccacgaatctctggaattagtggttcagacttttcatccaacaccttttgggcgcggaaatatctgggctcaaattccaattaatcagaaagcaataggcattaagaacaactaatccagaaggatctatcaatcaaactcaaccacctagcatactgagaattctaaactactctaacccatcctcagaaaccaagtcactactaagacatcattgtagaaagcataaacgatgaatagaatgaaaacatgatagcaacaaagtaataacaagatgataacacgatgaacaacttagtaaacgcaacgaaaaacaaaatactgaatagattaagagaaatccgtattacaaaatgtcaagaacacagtgtctgcggaattaaaacttagtaaacgaaaatgaaaaatgcatgctacttatagcgaaatattccgaaaccctaatactcaaaacgacacaatattgggacggattaagaacggcactcgacccaggtggtcgagtgattggtcgagtgataagctaaagtcttcttttcttccttgtgcttgagtgtctggttgagtgcggaatggagaagactctgaagctggcagtcgagtaaggacgtcgagtgaatgatgataagggactcgaccgtgtggtagagtgattggtcgagtggatggtggtggtagtactcgacttggtggtagagtgattggtcgagtgaatgatgatggtgatactcggccatgttggtagagtgatttgtcgagtgaatgataatggtggaactcggccatgttggtagagtgattggtcgagtgaatgatgatggtgatactcgacctgttggtagagtgattggtcgattgagtgatgatgatgatactcgacctgttggtagagtgattggttgagtgagtgatgatgatgatactcgaccatgttggtagagtgattggtcgagtgaatgatgatggtgatactcgaccatgttggtagagtgattggtcgagtgatgatgatagtgatactcgacctgttggtagagtgattgagtgaaggtgatgtggtgggcatgatgatactcgaccagggggtcgagtgatgtgatcgagtggttgtcctggtggtactcgaccacgtggtcgagtggtgacgtggagtgctgaggtcttttactcgaccacggggtcaagcggtctgttgaagtagtgaagcatctactcgactagggggtcgagtggtttgacatgctcaggtccgcttcttccaattagttcgtcaacagctccgaatcacctgaaaacaacacagatatgcaacatgcatgcaaaactatcctaaacatgcaaagtgatgacaaatgatcagaaatggtataaaacagtgatgatatgatgacaaatggatgctcaaaacatgcaaaatacacacttatcagaaactcagtctcgtaatttgtttggttccgctactctagatgttcgttgtagttcgatatatgaaccatttctccatgaaagccatccacatcctttgtacttcagtc

SEQ ID NO: 1832 - DNA, 1248 bp, Arabidopsis thaliana landsberg
tgcccttgtcatagaacaagtcacttcccagaaccgctcagaaccttttgttgaaggattcaagaaggtcgtctcaaacatagccatacctgacgatgcggctatcggtgatctacaaaacgcgttgagtttgagatcacggtttcgaaaagaccttatcaccgctcggccatcaactttggacgaagccttgcacagcgccaaccgataaatcaaaattgaagaagaaaaggctgcaatggtggaacgccaaccaaagacatctacgccaaaagagaaagctagcgacgaacactatgaaccgcgttagcactatgatcgtgactacactagaaacgataaaggaaagaaaggttcgacattcgccatcaacaatcgagacaaacaacaacatcacaaaccttggaacaagtactaccgcgattccgacacaaaacgttcttattgtgaatttcacaaattcgttgctcattccaccgacgactgccgacaacttcagcttctgttactttctaagtttaagaacggaaatattgaggtctaacacgatcgacaccacctaaattctcatagacacaacgttgaaagaggcggtttcaacgatcacgcgatgatagggaaaacctacaagagcctgcccgtatagagcaagatcgagaagctgaccaacagctaccgggacccccccaagcgaagtcgcaatgcaccagtgcatgatgaagcacccattccccaacaaacgattcacatgataatgggcggtctgatgacatgtcgagattctgtctgttccatcaaaaattatcgatgacaaccggaagtacaacgcacttggatcggtagtagcacatttgcgttcgacaatactgaaccaatcaccttcactaagaccgacagctctgtaaatgtcatctttaaagacgtcttaatactgatggaggtcgatctatgcgcgaccgaacacaatgttcagccgttgacaggattcgacggagacacaataataacagtgggtacgtcctgcttccagtttcattggaggcactatgcattgttttaactttgtcgttgtcgataagcctattgtttacaacgtcattcttgagacgccgtaactgcagaaaatgaagttcttcgcatcaacttaccatcaatgcgtaaaattcccaaccacacgtggaatctacactttgtgtggcgatcctttggttgcacgcaggggatcctctagagtcgacctgcaggcat

SEQ ID NO: 1833 - DNA, 2568 bp, Arabidopsis thaliana landsberg
tgtaacgtgctagttgttcatatttgtaggtggaatatggaaaggggccctgaatgtagaattctcaccaatgatgcgtgaatcatccaaaaagacaaatccggcttggtcgacatcgtagattatgacctggttagagcggagagcgggagggtttccttgttcgtcaagcttgaacaccatttagcttatattttcattttcgcaacaccgttgatgatctgggcggtcttgtacaacgagaccaaatccgcctcgaagagtacatcatctgttattcttttattttccatgtaattcgacttcgtttctaaaagaaaaatcttctcacttttttgagaatttctttctcatactagttgaagttcgccctcaacagttggcgtgccaggtagagagatagcttgaggatttcttccaactagccagacgagcccgcttacagatcaaaataactacgaagggaaccagtgcttgaggagacaatgactctagctcaagagaaggaaccgatacgccacagaccgacataatcctcctcacaagaaggatacactaattagtatcgtagttgcgccgcctttgctacctccaactcccaaaggtaccgcgtttgggataatcatcaagacttccccgccaatgcaggagaacaacgaacaaacatcgccgagcagacgtcgtccgaccaaccttgaaccacacagcagcgtgcaaggtaacccggccgtgtaccgttcgccaacgcattttagagcatccacgaccattttaagcaggcaagatgcaatgagcgacgataagttcgcatccctgacagtcgcgcacgctttttctccagaccaaccgcacaacgaacattcaacaaaccaacctcgctaacgtcttaggcgatacaagggacgcagagatagccgagttgaggtgtgcagtcttggagatgtgctcgaagatccaccgtgctacaagcacggttcccaaactcgaccacgtcctcaaagagacgctacaaactcctttacccgaaggataacatacgtatcggttcgagggtatcaaaagatcaaattggaaagctacaacgataaaggagacccgaaagaatttctgacgtcgttcaatgtcgacataaatcgagtcgaacttaacatcgaaaacttcaaagcagggcaatgccaaatattcatcgaacatctctccggagcggcctcagctaattgaaccgcggtcggctgcctcttcttctccttctgagaagttggactcagaggcctcgaactcccacccatatgaaaatgccgacctcccttgtccagaagactattcctcagcacctccttcatcatccactcctcagatcatgtcggcttcgggccagagtctcagattggaataatccggatcgaactccaattgtattttcccatcactgtgcgatctggtacaaggacgcatattatgacgctacaccataaaaagggagatatgaaagaaacattaacctaatcgacaacgtacctttctttgggagattttgcgtaaattttctaaagaaacgtctaatagctttcacgaatctctaccaaatatatgtgctttgatcacgaatcttctcgagatcatccttgagctggtcgggaaatggtaccagaaactttggatagcaattttaaacaaaaaaacacactagttaaaacaaaaaaaaaaacagaagcatctcaacaataaggcaaaagtaacgagctcaagctaacgggtgaaagtgtcaactctgaacagattgggatctagggattctcaacactcctctgaaaccctaacaaagaaataaccgccaaatcaatcgtaggttttgctcttaccctcatccacttgtctcggggtcgtacctttagagaaacgcatgacaaatctgttgtcgcgtcttccacacgcgtggactccagacgcgcacgcctaagaggtttggtccttgtcagtctccacgcaccacgtaaccgtcgaacttcaagcaaaatcctaattcacgcgagcgggaaactgttaggggaagaattgggtgttaaagttcgctcttaacaaaaattacttataaaaaacgatagataaatatttattttatttattctataactaatagtctaaactataaacacagtttcttctttgttaaacttttaaaacacactttttattaatcaatccaaatatttaatttcttatcaaatgaatttggcgatgtttcgatgaaataatcaatatcaagatgtaattatctggttatatttgtatgatctctcattttgtagtgaatcaattatgtgactatgtgacaggatattatggtctgatgatatgtttacctttaaaaatttctttgggattcatttagaccggtaagtaaatttttctcttcgtttatcaaaagggaaaaatgattatctatatttttgtctctctccctttaatttggtttagcaacgtattcaattaatttcttagcctctctagcctttaaaataaataaattaaaacccgttaaatgattaaaactgcttaaaaggtaaa

SEQ ID NO: 1834 - DNA, 4339 bp, Arabidopsis thaliana landsberg
  unsure (1)..(4339): unsure at all n locations
gccaaaataggtaatttagttcatcattttccaccccaaatctatctaaccttgtcaatatgacacagctatagaagattagtttggtcctaaacataaggtctctgtggttataacagaacatccctcctgaaaacgcatcaagatgtttacagcagcatatagcccaaaactatgaaagcaaagaagaagaaacaatatattgaacgatcacataaacaagaaaatcatgaggcaaaaataagaattgggaaaagtcagaaagaaaatgagggaaaagttattcagagaaaatatctcacaggaaataaatgggaagatgttgatttcaagctgcagataccaatagctgtgtagtctttccctgttggtagaatcttctattgaatgatggatcacatcacacacattatgtatatccaagtgggacacaataaatggaaggagtgtatccaaatatgtcaggtttcccgagattctgtgcttctcggatattcacagatttgaagtatccatcttgtccaatgatgtgagctgtctggtagcggcaagtctcggtctttttacgtccgtctagatcgaaaaccacggcgactttcttctcctcgtcaacaaagaaactcccagcttcaacatgacacttaaagccagtgagtggtctcatatccactttcaaaaacatgctccaagacaccgcactaggctcgatcttggtggtaatccaaatctccaagcatctagcaaagttttgatgtaacacagcgagctgctcctctttgacacagaatagagacacaatctcttcatcatgagagttatcatgagagtgaaacggaagaggaagacgcggtccaaatctctctgctgtaaaatcaaaacagagtagaaaaactggaagatacgttgtatctacgtcgacctcttccattccttctccttccaccgttgctttttcttgagcgtaaaagtaagtatttcccttcaaagatacgccgcgttgattaaacactatctcccagtcgggagtgacatcaagaacactccatgaattagagctaagatggtagattatgaactcatgaaaatggggtctcaaacaagtaacaaaactcaagattttgtgggatttggtactgctattgtatccgagagcatacgaatatgcatctaatctctgaggattatttgtagtctcgatccaccgggtttgtccactatacgggttacaaaccacaagcctagggttgtctttcatgatgcataacaataaaccgtcgcagtgaaagacgtgacagacgtaaatttgatctgaagcgtcggggaaaagaagttcacgttcacgctttatacacaattcaacgttgtcgttaagataaagtattccaatttttacaagtaaatctggcttttctcatagatgtcactggaaccctagagcctccaccaaatcctttggaagattgaacatcaacgttcacaccgagacaacgtaactgaaaacggagaaaccccttaatatataaagaaaatttcaccgtggacacctatttgactttttttcacaaagaggcaaagtgggcttggccaaccaccttttagccattaggcccaaaatgaccgaatttgccctggaacgagaaactgacggaggcggtttagtttcgtggagccggttcagtttcttaaccgtttttggttacgaaataatttaaatatatatttaaaattattaattataaaacttaaaataaatcaaaaactgtcattccttcttcgagaaagcagaacagacgaagtccgttttcgaagaaccagagaaattccaacgaaactgaaacacaattccgattgaggctctgttcgagttcgagtctttgcttaactggaggaagtgttaaagtgtggaacaataagacgatttttgggtttatcgattaactgttcagagaagaactctaatggcagcgacgaggaagagtaatcggcggcgaggagtttcggatattgatgaggcatcggcggcgacgataaatctgggttagttttccctaacttcgtttggagaatgatttgattcaaaatctaggttaattttagagatttcaactcataaattttcaattgaccaaggggttttagtttttttccgccaaaaacagttgattgagtataaaaggtttcggtgtacgtgtatatgaatatcgagtttttgtttagttggtatttggatatagtgtacgtgttaagaacttcttcgtcttgttcaactttcaggaagtacttctaatgatccgggtgaattaccacagaggttgtttgcactcgatcactaccctagcaaggcgaagataaatgcgtactccagaccggagtacattggtcaaatagcagctgcgcttaaggacacaccagaaatgacgttccttctagattctccatttggtgacctctttaggatccctactaacaaggcatccttttctggtaaacttgttcttggattaatatgctgtcagttagttacaaagaaacgttatgagatgtggatggtattcgctggtcatcctattaggctcggattaagagaatgggcacttataactggtttggaatgtggaacctatcctaaagataaggatgtagaaagtgttatgcagcgggaggaaggtgaaaatacagtttgggctactctgtttggagatgataaagctaatccaacagttgaagaattaagggatagattgatttctgaaactgacatgcctgcatggaagaaattagctctcgccctaattatcattgtggatagggtgctaatatgtgacaagtctcctcctctgagaccaaatgagatgacagttgagctgacgaagaaccttgatttctcctgtaaatatccctggggaaggacatcatttctgcttactttggagcgtatcgcaagtttcaaaggagagaccgacgttaaaaaactccggagtggttgcaagcaacattcttatgcactccatggcttcccacttagactccaactccttgcatttgaaactataccgtctattgctagtctcctaccttctgaaggaaataccgccgtctttacagaaaggactattaaaaacctttccaaactgcgtccaatcaagacatccaccatattggcgtgcgagtctgctgaacaggtttgtgcagttgttgttgtacgtacattggtataaaaaaatgaagtacatacactctgaaattaacaatgatcgtctatgtaggtggatatcacatatattgtggacccagcagacagtaattgcccaaaatcttttgtatggaggaaagaaaaagaggacccaagagttgataacattttaaggatgttgaaatctgagcaggagtggaatgagaaaatatgggttggaggcgatgatgcgcctaagaagcaagtccggccctcagcaactggagagagaggtaaccatatcttttttcgtataacttatatcagaattaggttcctctaagagtagtaatgcatgatttaaccgtttaatatagttattttgaagaggcaaagacgggtggcagatccagttgaaaacaaaaaaaggaaaattagtcactctaatgatggtgaaggtggaccaagtggtggtgatggtgaaggtggacccagtggtgctgatggtgaaggtggacccaggggtggtgatggtgaaggtggacccagtggtggtgatggtgaagttggagacgaagcgtttgataagtatgcgggcgaattgaggagtttcttcaagaggcaaacacaacttttggataataaatttgaagatttaaaagtatttgtccgtgaagagatacatgctgctctatagtcccaggaccgaaacgaagaaggcccacgatcatcccacaaatctgattcaccatctgagaaggttgagagggtgaccaaaacttttgagaaggtgaacaaaagggttgagaaggcgaacaaaagagttgagaaggcagctgaacaggtacagagaaaatctgtaaagaaatccaccaaaccaagaaaatttgttcnnnnnnnnnnnnnnnnnnnnaacaatactcccaagaaggctgcaactggtagtcttcctgttgaggtacgtgtacagcatgtaccttgtgtaaatacaatccaaaaaaaggtttttattaagtgtacgtacaaccaaatacttaggaatgcgttatattggtgtttattcacaggaggtaccaggcaatgatggggatggcgaagtttcagcataacataccgtctctaactatgatatggacaacatatatttgggtggagcatcatccactg

SEQ ID NO: 1835 - DNA, 4813 bp, Arabidopsis thaliana landsberg
cagtacaagttgccaaaaataaaataaaaaattcagtagaagtaaaaaaaatttcataaatttatatagtaagtaaaaaaggaaaatacattagggtatcaaatcctataaaagtggttcctcgcttctactactcttttttcactctctctctctctatctcttaacgattccattctctcttattttctctgtagaaaaaaaaaatcctaagaatgctgtcgtctaacgtatcggagacatgcacgaggaggaagagaggaacaaagagaaagattgaaattgagaagcggttcacaaaagaacaacgatccatagcttgcagcaaacgccgtctaactctcttctccaaagcggctgatctatgtcttctctccggagccaacatggtcgttttcgtaacttctccggacgagaactcctacgttgtttactctttctcttctcaggctactcttctgcatctgaaattgttcattgttatctcaacgacaagtctcctcccaagattactcaatccaacgagttagggttttggtgggaagacctgatagtagaggtgtcagacgggccggcccgcgcccatctagcccgccccgcagtgggctttcttttttcgggctgcggcgggttggcccgtttaggaccgcggacaaaattatcagtgtccaagcccggcccgcaaagcccagcagatatacgggtcggcccgcgggcatttctctgctacgcatcaaggattcttcagctgtggcattgtgtgtacaaggcaatatctcgtccagagccgtattgcttgatggtctctcaacccattcgctcattgccacacatgtgtctgcagtacaaatcgaagaaactgcagcaaaagaaatgataacaagcatgacgattgaaactacgataagcgccactctcctacgagtacagaaatgactattatacatttgtttttcaaaatccaaagattctgtaacatatagactgttaggaggagtttgttacacagaatcaaggaaatgtcttatgtgattggagttactagtcgatttctcagtgataatagctatagagaaatccagtttcgctccgatctgatcgatttcagtttgtacatttgcaggtaaaagaacctgaagaactgcagcctgcttggctgaagcaagataatctgagatagctctaagctgcgaaatcgtgctatcagaaccttaacttaaactcaaatccaaaatatcctaaaaggaacaatgtcgtgtctcatcttgcaactcatttgtaaaccttaatctgaacttaaactcatattcaaaccttaattgtaacaagttaaactcaaatgtgaaacagaaattgaacttaagtcaagagaaagacctgcaacttcttaaacgcaaacatgataactgaaacatgaactaaaactcaaatccaaacatgaatatcaaacttaaaataaaatctgcaactcaacatccatctacatcatccacaagcgactggaagaaaggtagagtctcatcttcagcatcaaatttttcatactcctctacaagtatcacacaaactaacaatgttcattcatagactaagattgtgtgactataaaacttatgaaaaacaacttacttaccattttcataagattcaaaaccttttaaccaattgcgactgcatattaatgcttaaatcgttccagacttttgagtattgccttctcttctttggtttcgatgactttccattgtcctcatcatcatcaacatcatcagctccattgtccccatcgtcatcttcttcatcatcatcatcttcgtcttcatcactaatctcaaacactttttttggttttttagatgctttagcttcagacttttttcttctctctgttttagaggcagaagcttcatcacccttgcttcttctttgggtttttgatgcttctggttcacacacttttttcctctatgtcataggtgttcctgtttcatctctcagttttcttttcagctttttagatcctcctgcttcatcattagcttgttgttattcatatctagcttgttccaactcaatgactctccgagattccacgtctaatgatctcaaatactcagcatcaacagaatccaacggatcctatcattaacaaaatacaaaaactagtcaagactagcaaatcaatcaaacaaaagtaaaacatctaattgtttatgtgtagtcacaaataacataccattacaagtgttagatgctctgttttgatctgaaatctgaatctaagaagcttcaatgatcgtaaaaaagaaacttgaagagatagagaatgacttttcagtttccttgttaagcaattgagcgtgaactgctacttttagggtttgaactgcacaagaaactctaatagagagaaaaggtttgaaagcctctatgagaaatgaagggttttaaaagagttggtttttctttcgcaggctacccgcatacccgcagtccgcaacgggcttgtccgctataatccgcagtccgtaatgggcctgcccgcgaggcccgctaatttgtggacaaaaaaatcaacgtccaagcccgttccgccgtgggctacttggacaaagcccgcgggctagcggcccgcttgacaactctagtcacgttagtaaggtgttaatgtggaatcattttgcaaaacctatttcttctactaaactcttaaaccctaaagagtaaagacatttgcactaccccgcgtggtcgacgattcgacgcttccaatgacgtcatctcgcctctatctccgtttcctccgccgcttctccaccgccaccggtatagattctcaaaccactgcttaccccggcgcaatcactatgtccaaagctaaatccaaactccgcaaagtacaagatccagacaaagccttagcgatttacaaatccgtctccaacaattccacatctccactctcctctcgttacgcaatggagcttacagtccaacgtctcgctaaatctcaacgcttctccgacatagaagctctaattgagtctcacaaaaacaacccaaagatcaaaacagagacttttctctctacacttatcagatcttatggacgagcttcaatgtttgatcatgctatgaagatgttcgaggagatggataagcttggcacacccagaaccgttgtttccttcaatgccttactcgctgcttgtcttcattctgatttgtttgaaagagtcccccaactgttcgacgaatttcctcagaggtataataatatcactcctgataaaatctcttacggtatgttgattaagtcgtattgtgactctggtaagcctgaaaaagctatggagattatgagagatatggaggttaaaggtgtggaagttactatcattgctttcactaccattttaggatctttgtataagaatggtttagtcgatgaagcggagagcttgtggattgagatggtgaacaaaggttgtgacttggataacacagtttataatgttagacttatgaatgctgcgaaggaaagtcccgagagagttaaggaattgatggaagaaatgagtagtgtaggattgaaacctgatactgttagctataactatcttatgactgcgtactgcgtgaaaggaatgatgagtgaagccaagaaagtgtatgaagggcttgagcaaccaaacgcagcgacgttcaggacattgatatttcatctgtgtataaacgggttgtatgatcaaggtttaacggtgtttaagaagagcgcgatagtgcacaagattccggatttcacaacttgtccgcatctgactgaaggattggtgaagaataacagaatggaagatgcaagaggagtggccaggatcgtgaagaagaaattccctccgcgtttggtgaccgagtggaagaaactagaggagaagctgggattgtattcaaagggtcatgcagctgctgtttcatcttcttctcaaacttgagaagtgttagatcaagaaagagaggatgatttataaagctcaagaagttgcttagaagatcttatttttgtttgtgcttgcttgcttcagctaatattatggcttgtggaaactgtgatctagcgtgtagaagacaaacgattcccaatttacttgtctatgctttgagccaattactacgcttgcgttgaaagttaaccgtatttttttgttcttttcccccagatcatctgaactatagtctgaattgtgaaaatttcatatcgtttaacaatttaggtttacagttatttgtttaacaatttaggtttacagttatttgtaaaaccaattcccaaaatgattagtaaaaaaaactcaaaatctctagactctaaataggctaaatatcttaatggatataaaatagcttaatgggcttataggcccattagagacggcaccactctaaataaacccctctttcttcaccgtccgttctaacttctagaaaaatcgccagaagtgacgaaattgaaaatctcagatttctcttaatcggcgacggagtaacgaaacaaggagaagaagaagaagaagaaaaatgacgactcgaatcgctcctggtgttggagctaatcttctcggccaacactccgctgagaggaaccaagacgccactgtttacgtcggtggtctcgatgctcaggttttttaacttttaggtttcgtgaaatgattctgaattttctcatcttcctctgtgagttggtgaaattgatttaaatttcctgtttgaatctcagctttctgaagaattgctttgggaattgttcgttcaa

SEQ ID NO: 1836 - DNA, 1483 bp, Arabidopsis thaliana landsberg
tctaagtatatagtccttcataaaaagttcaaactatattttaatgatatggaacaaagagatgctgctaaaaaaaaagaaaaaaacatgacacatgcatgtacctgggctatgattgtataaaaggtcctatcattcaagttctgaagattagcactcatcacttgagctccttcttcttcaaaaacactcacaagcttgtgtaacattactcctttcatgtttagatccataaccagattcatttctatgatcgaatccagtgaacgaatactgagttttggcagaagagacgacccttcagagcgatttttgacttctcctcctaacattctccttttcatctcattcaaatagtttaccttctctttcagttggatcatgtatgataccgcttgatctataagttgaggcactggcaactgttggtgccaataaaaacacacaacctagttacttccatgtcttttgtatgaatttggttataatcgttatatgtattaactaaaatgtaatatatatgaatcatttgttttaactctacactacatataatggtcctagctggcttgtactaaatactgagaaccctagctaaatgctgcactttgattgatctggttcaaatcaagatgattatcccttgatcagctctttgattgatctggctaaaatcaagatgtccataggattttcgcaacatagccctcgcctaagcgtctaggcgcttagacaaaaccaacacatacattacatctacgaaaaattatgtactctgtatatatatacaataaaatacatgtagagagagagagacggaccctacgagtgggagaaacatgagaagagagtatggagaagagatgtttcatgcgcattcgtcgttctttctctctgaggtttcgttgttcccgtaatgacgatgcgcttccttctcctatttctctcgctctttccattcttcttcttttccttttttaggttactatgtttaattccctctttccaaatccatctctccctctataaatataaagagatagagagaaagagccgcgtaattttagatgaaaatgatgtttttcaaagaaagtcatggcttttctggttgcgtccatgagcttacacactacttaatttatacatatatatgcttcttttactttgtaagttccactcttagagatactaaacatgtccaatatgttttttacttacttggtaaggttttgttggacacatttctagaacctagatagtgttacgctaggttttgttctagtgaagcttgtagaaaatgtgcttatcaaaatcatttcagcagaacatagtaattaaattagtcggattatatgcgatgaattcttcacataagtacaatgtttggatcgacaaaaacaacaaggaaaaatttaagttataccatgataattatgttgatcatttgtaataggctagataaaattaaaaatacctttacgta

SEQ ID NO: 1837 - DNA, 4453 bp, Arabidopsis thaliana landsberg
tataaactctaaaatcattgtaaacaatcatagttccttaacactaaatcgtaaaccctaaacattagatactaaattctaaacattaaaccctaactcctaaatttaaaccataaatattagatactaaactctaaaacattaaaccctaattcctaaatttaaaccctaaaccctaaactttaacacatagacagtaagtcgttaaccatatacatataccctacaccatctaccataaacactaagccattggccataaatgttaagcataaatcccttaaccctaaactctaaaccttaaaccctaaaccctgaaccctaaactttaacccatagacattaaccctaaactatatacatataccctaaaccctaaacccatatgaccataaacctaaaaataattataaaacttgtttcatcatattttatcaacatcttttacataacgtaacacttgttttatggatagtattatcaaactacaatcattttgaattatcgaccatcaacacacatccaccaaactatgaccatgtggtcatttcaatcatttcgaattatcgaccattcatgcacattcaccaaactttgatcgcgtggtttgtaggacaaaatagtaatttgtatacatatcatcctttccttgaaatcctagccacctatcactctgctatcatctttttcctccgacctattcaaccaccatgtcttctttgattcatcaaaactatcaccattattattgttgcccataaatgtaaaccctaaacccctaaaccctaaaccctaagccctaaaatttaaaccttcttattgttgcccataaatgttaagcatcaattccttaaccctaaaccctaaaccctaaatccctaaacccctgaaccctaaaccttaaactttaacccatagacactaagcctttaaccatatacatataccctaaaccctaaactttaacccatagacacttaagactttaacctcgagggtaaattggtaatttcaataataaatgtggtaggagttgtaaagaaattagaaatatggtagattttataaaaaaattagaaaaatggtaattgttataactttctctatgtgtaaagtgcccttttttttgggctatattaattggtatgctcagacgatgagaaattaagaaagtatgcatgataacatactgattagtctctctcttcagcgacatatttatttcccgaaaatacccctattaaccgaaataaacgataattgtttctagtgtagctgcagaagcatttaatgctgaggatacactcgaagatacacccgctgacattagaaacataacaaggatattgataatcattgctgatatttttgaggttgcggatatatcgtttgtatacactgggctatttattagcaatatattatcttgcttgtaacaacgaaaaaacttgaagactaaagaccttagcttccgactactttaatgcaagagggagctaaagaaacagagaaatcaaagcaaaaaggtaaaagtaaaagatttgagtatttcgttacttagagttaaatttttggaattctttttttaacttagggtttgggaaattaaacttcatatcggtaacgaatttgttatttctaaaaattctgcagttacgcatggcgtttgtggatggatttgcgttaggagtccgattgcgagagcaggatgggtttgcgaaagttgttatggcggtaaaggaaaagttagcgctgagtgccgaagacgatatcgagttaacatatcaatggccacagtggatgatggatcctgactggagacgcgctaacccgatcgatatattggacgatgaggatatgacactgtttatggcaatacgggcagatctagatgaagtgcatctacgggtgaagatactacgagaagggaatggtcgaaacgttaatagttatcggagtaacctgatataggcggtcttacttcggaagaaatttcggataagtactggaatagcgcggaaacaaagctgtttggggtacggcgttaacaagaatgttgctgcgaaacatatcaggtgaaaaccaaaacctatgttgttcgctatattgtagtaaatttatctgttaatatataaatcggataactttgcttatatcagggttgatttacagctcatatacttagtccgataacttatttatatgctactatatatcttatccaggtgacggtgatggactggcagccatgggaaaggacaacatcatgggcgtacagaaaggcaatgaccaacgaatgctttatggggggggggttatcataagagacaacgtcgagattacagttgggacaagcggtgtgccactaacagacacagaaccagactccattccaatctctaaaggaaaagagaaagttactgatgatgatgagagagaacgggatcgtttgtttgagatgtggtgaactcaacaacaggaagaaatgtggcgagagatgtgtgcaacacaaatgaccctaggagcaactcaaattgacgcaacaaacgtgggcgacactggtaaaactgctagagctcttaacttcggaagtggcgacatttccaagggcaatccacgtgaggacttgcaactcactctagcaagagcagaaacacaagaagtttgcacccaagtggtggcactgtcatcaagcgattcaaccttcggaatgccaacctcgctttccacaagcgtatctttctctagcgatgacctaatggacgtcactgactcatccaacaacaacagctcatcgtgcataggttggttatctgatatttaatatgttatcgccgatagcataatactattaccattcgttcacggtttctgacttttgactgtaggtgacgaaacactgtcacacttttattctgaacttgatggcccactcattatggccccattgcccgtcggaataacggataaaggaaaaggtatcatgatagacgaacgaataaccactaaggagataggtgcgggttcaaccaatacaagagtatcggaggtactgaggaatgagttaatggtgaaagatacaccggttccgacggtgttgtacgatagagatgccccaccatattttgacgacccagggaaagaaggtaaagcatacctatatagcaattttgatataaaaaaaactagttagctctgtattatatatagctaatcatgttcgataagtaattgtttaactcgataactaaacatcttcgctaaaagtattaacagctatgttttctcttcctcgcagatgctcttcataaagcactaaaatatgctgataatgagggagatgatatctacattggtcggatttttaaaagcaaagaggactgcgccacgaaactagcaatccacccaattcaccggaagttccatttcatctacacgaaatcaggaccgaacatcgtggcggttgtctgcgtcagcgacacatgtccatggcgggtttatgctactaagctgccagatagcgactggttcgaggtcaggagcaccacccaaacccatacatgtagcgtggatgcaagaggagacttccacaagcaggcgtcgacggtagttattggcaagttgatgcgtactaagtatattggagtaggacgggggcctcgcgccaatgagctgagaagaatgctacgccaagagttcagcctcaacgtttcctattggaaagcatggcgggcacgggaaattgccatggacaatgctttagggtcagccatgggaagttacgccctaatccaaccttacttcaagtgttttttagagacaaatccaaattctttggttgcaatggagaccgaaaaagataactctggcgtagagaggttcaaatacttgttctttgcgcttgatgcttgtgttcaagggtatgcttacatgaggaaagtcattgtaattgatgggactcacctacgaggacgatatggcggatgcttagttgcagctagtgcacaagatgcaaattttcaggtcttcccgattgcatttgggatagtaaacagcaaaaaacgatgaggtgtggacctggttcatgactaagttgacagaagcgttatcagatgatccggagttggtgtttgcgtctgatagacacaactcaattacgccaggatccgtaaggtaacatggtaacacataatgtatctcatactaattaagttagtcactaatataccatgtttaaaaaaaaatcacattctgcctaaacattatgcaggtttaccccatgtcatctcatgctgcttgcgtcatacatctgaaaaggaacattgaagcatactttaaatatgaacaggtaggttatttggtatccagtgcagctagagcttatcgactaactgacttcaataggatatttgctgaagttcgagctaagcatggaccgtgcgcagactacttg

SEQ ID NO: 1838 - DNA, 1435 bp, Arabidopsis thaliana landsberg
acatctatacatattattattatttcattattcccccgaggactatgtccagcttctaattagtttactttagctccaatgcatatatgttactacacaaagaaacaaaacttcaaataagctgtactttaaacagcaaaagctttgtctcttgaatgcattgattaaacttgaatgaatctcttacttacgatatgttatcttcttgcagcgatgaagttcagattaccatgcttttgaaacgccacttacttgtgaggttttcgacatatgacacaccggttcaaaccaactagaagcctactaacttaactttaatgagtcatgggtacattttatgtgtggctcttacccataaacctccactagaaacgaaaagagtttaaggtttgtctcaagacctctaatttctctctttacatgttcctagatctctatcacattatctaatgaaaagagagagagagagagaatcacgaaaaggaagaagaagaagcatgtaaagatacaaccagaaaagagaagacatgagggatacctgagcgtactactcgtgccgacatgctctgttattgttactacattctaacccctaccaaactttagcaacgtgtaaaattatttagtgctagtaaagggttgaaaaattcatcaatgttacctctcatatgatagttataccgaaaccaatctcagttacataagaaagtggctgctatgtaacagatcaatgcagaaagcagaagcagactattagcatgacatatttttctcacttcaaaatgagaaaacatgaagaaagctgatgcataacataaacctatttaggtacatgaaaggaggaaacatattatattaaatagaaacatatttatgaagcgtaatcataaaagatatctattgaactaagaattgtggagctttaccccaaagggagctcttccagaaattctcagaggcccaagacaagcttaggcctaggagggggtttggaaatagttttcaaccagcaatagacgcgcctcggttaatacctcattagctgcgtcattgccccaagcagaacctatgaagctataatatacttccgatgtgggactttttgtcatatggtttcgatttggttagttcggttaagtataagctattggattctagagtaccatatcggataagtaattgaaatatgaaaacttcagactaacaatgactggtaggggctgcgcgaacgcaaaccccctctgccacaaataataacgcaggctcttcctcaagggaagaccttaggcatagcaccccaacggtatgtgcaatgcggtcactagcctaggccactcgtcttattgatcgcgagctgaccccgtccaggtaagtaatttacttgaacagtccgcttctttatatatactaactgtttaccaacccacgctttggg

SEQ ID NO: 1839 - DNA, 4504 bp, Arabidopsis thaliana landsberg
  unsure (1)..(4504): unsure at all n locations
ttccagacattagtggctatataccaaggtattggctgcagggagcgtttaggctttaacttgctgattagtaaggcctataaggttagctctcgtcaatggtgattaagtctcggtctggtttaacttgagggtctctattgcggtggtacttagatttggttactgaacttgttgtctagggataatttgttgagcatatcaatcacctgtaaactgaggaaacaaaactactcaattaccccatcctcgagagttctttatctgattgatttctttgtttactctgctgttttttactgcatcttgttacttgttgctaagtttttgcatttctctcctgttactcgacctgatactcgaccacccagttttctggcaacagactgtgcagtcgagtatccctgttggcaacaagctgtgttggtcgagtgttttactgtttctgcttgaatttcagtttcctgcatgttcacttaggactgctagaaactccaaaacctgttattgcttggcttgactctgtgaactctgattgcatcttgattgttagcatcacacccatttggattgacaacctaaaatactacaacgacatgatagtgctttaagtttaattgactaaaaacctattatcaatttggcgtctttgccaacacagcttgggggagttgataagtgtgcattttacatgttttaagcatccatttattatcactattgcatcatatcaccactgttttataccatttcttatcatttctcatcactttgcatgtttaggatagttttgcatgcatattgcatatttgtgttgttttcaggtgatctggagatgttggtgagctaattggaagaagtgaacctgatcaaatcaacatactcgaccaatactactcgagttacgtcatcctggacttcctgaaatactcggccacaacctcttcaacacaccactcgacccccttgtcgagtagatgactttatcacttcacaccaccactcgaccccctggtcgagtagttgccttcaccattcctcatcactactcgaccaagtgatcgagtatcaccacatccaattctcgccgtccactcgatcactcccactcgaccacgaggtcgagtactaccacaaccacctacttgaccaatcactctaccacgttgtcgagtcccttgtcatcagccactcgattgtccactctgtcaccaagtcgagtctcaccatcatcctccacttgaccaatcactcgaccaatcactcgaccacctgggtcgagtagagttcttaatccatcccaatatgatgtcgtcccaatacagttcttaatccggcccaataagtagcatgtattttacattttcgaagacaaagttttattccgcaaacactgtgtgttcttgatattttgtaatccggatttctattaatctattcagtatttgcttttcatttcttttactaagttgttcatcctgttatcatcttgctattactctgttgctatcatgttttcattcttatcatcgtttatgctttttgcaatgatgtctgagtagtgagtaggtttctgaggatgggttagagtagtttagaattctcattatgctaggtggttgagtttgatttttcgatcccttctggattagttgttcttaatgcctattgctttctgataaactggaatttgagcccagacattcatggctctgtacaaaggtattggttacatggagcgttttggctttacttgttgattcgtaatgcctattaggttagctctcgtcaatggtgattgattctgggactggttaactgtgagggtctctattgttttgacacttagatttggttatcgaacttgttgtctagggataatttattgagcatgtcaatcacttganaactgaggaaacaaaactactcaattaccccatcctcgagaatttctcatctaattgatttcttgtttactttgctattgtttactgcattttgttacctgttgcttagttttgcaacttttgcctgttactcgacctgatactcgaccacccagttgtctggtaagagactgtgcagtcgagtatccctgttacattttctgtctgttactcgtccagtcactcaaccacacccagtacttggcaacgagctgtgttggtcgagtgttttactgtttctttttgaatttctatttcctgcatgttcacttaggactgctagaacccaaaacctgttatagtttggcttgattctgtgaactcttattgcatcttgattgctagcatcacacccatttggattgacaacctaaaatactacaacgacatgattggtgttttaggataattgactaaaaacctaatatcaatttaacgtcgttgcctattgggtgtttgtttgttacatttaagatttcagacttgcttagatcaagttctttttcacttttcatttttggtactaactgtgtttttcttgttgtcttcttgatccaggtacacctctgctgtatgcaaactcgatcaaccgccaactagaaactccttttcaacgataatatcgaccgcatagctcgcgaaataagagaaaggagaaatacagtcaaccttgtacctcagcaaacactcgaaatgactgacgaaccaaatcaacagaatggacccgcaaacattggtgctggagatgcaccacgggatcaccatcagaggaaaggaattgcacctcctgctatccagaacaacaacttcgagattaagagtggtctcatctcgatgattctggggaacaagttccatggtctgcctatggaagatccactcgaccacttggatgaatttgataggctctgcaacctaacaaaaatcaatggtgtcagtgaagacggattcaagctccggttgtttccattttccttgggcgacaaagcacacatctgggaaaagaatctgccccatgactcaatcaccacctgggatgattacaagaaggcttttctatcaaagttcttctccaatgccaaaactgcaagactcagaaatgagatctctggtttttcacaaaaggctggtgaaagcttatgtgaaacatgggagcgtttcaaaggttataccaaccaatgccctcatcatggcttcactaaagcctctctgctgagcactctttatagaggagttttgtattgttcccttgatagaagatacaaagacaaagactcatacggtttttgactacactatcaatgctttgagaagcaagaagaagcttggttagtgttttggagtcgaatatgacttgttgtcatgtgcatgattgagtataagaacttaaaccgcaactttatcctaaaagcctaagtagtgtttccttgttagaagatacaaagacaaagactcatatggactttggctacaccatctgatatgtctataatttgcatgttttacacatccttttatcaccattttgagtcttgtttgtatagtcgagtctaggactagtcttgcatacattctgcattttggagttgtttcaggtgttttggagcttttggtgctcagaaagagggaaaacagaacagaaagtcacacttccaccaaacatactcgatcaccagtagcagagagggaagcagtcagctcagcagtccatccagacacttctactcgaccgcagaggagcggaggcagtccattatgcaatcctactatatcgcagaggcgaccaggtagtccactttgccagtccaccagttatactcgatcgcagaggagaagaaccagtccatcctgacagccgacacacttactcgatcatagaggccaagaagcagcccagaccattctgtcaaccaacttactcgaccaccacctcgaccctctgatcaatccgcactcaaccatacaacctgagcaacggaaagagaagagaagagaaggcccattcgaagcccattaggaagcccactttgagccgacactcttgatcacgtcgtctatgggtcgttaagtgggctcgaagtccgctttcttatcttagtataaataagtctctaagggttttgccctgagacatgcacttttagagacacgaatttcgcactattattcagcagccgcttttcattccttcaactttgtatttcgatttttcttctaagttattcagattttgctttcattttgcttgttcatctttcgtttcatttcctttgatctttagaagtatgcaatcttcaatcgcttctatgttgttgtctttgagcatgttgtctgagtagtgattaggatttctgaggatgggatatagtagttgtggaacccctggtcgaatatgttggttaagtgtatatttattgaatcccttctggattagttgtgtttactgcttattactttctgatcaactagaatccaatcctagacgtttcaaagctcaaaaggcgtttaatggaacgttagatctactaattccagtgataaccgtctctaccatagag

SEQ ID NO: 1840 - DNA, 1785 bp, Arabidopsis thaliana landsberg
acggctaatgcttattctacacactatcataggttttaccagccaatagcttgcaggctggtttaaatgttgttcgacaaggacaaggcgagtaagcaataatggatgaaaatgatgatgaacgtggaggacaaagatcaagaccctgtgtgggattttcggagagatgccatgcacacactctgattcttcatttgctgaataggcaggtggtgaaggtaatggagtttggagaggagtgtcccatgtttattctcctcggaacacacttggtatgctcaacaacctgttctagatgttatgagacttacttctggagacagttaagatattaagacaatgggctggcatacttgtgataacaaactggccttcgtatgttggttgaggaatatgccaatacgcgtgacagaaaggaagtattcaaaataatgaccagcagttatgtaattttctcatcttataaaaatggatagcaaatatcaactactaatatttgagagtttgcaactatttttaacaaaatctaaggaaatagagagaaagcctaaaaaaaaaacaatggactaatatactaacataatatatggacagacaaaaatagccacttgcgttttctatttctttctcttaatcaaaagctcttccttcttcttaagctttgttcaagcaaacccaaaaccttcattggcttcgtgaattgcaagaagcaggcgttcctgaacttgttccttagattgatactcagggaggtctagttggataaaactgcaacagaaccaatgaaaattacgaccacgtttaactgaaaaaaaaaaagactttgtaataatggctaacacatgaatgagctgatggcagacggtccggagaaccatatgctttgtggatttgtaatctttgagggccagaaataccttgcagtgccttgaagccttccaagggaacctgaatacagaaacaccgcttgtaaaacaaccagaagaaaaactagtacatatcagaaaatgaagctcaagcgacttggacagaagctgcaaatattggttttacctttgatgttccagtgacaaattgaagaaatctagccatatcttctttgctgaaagctttgacaacctcccagaaccaacgaataacaggggaccctaccgtgtagctggtatactcggtatttgcttttagatcatcaactaaaaaacaaaagaaaacagataacaagattgttattataactttaaatgaataagcaaatagatgcaaaaatattgaaaaatagaatgccaacttacaatcaatctcaggcaacccgctgattaggagctcaagctctttatcattgaaaattgatacaagctcacgaggtatcaactcatttaagccttctaggaaagcgttgatttgagggcgaatagcactggtaagtatgtggtcggccacaaggtcaacatattcatgttttgtttcttctgttacccgtatgtttcgtcctccaggtttaagttcatagtccgtcaccttttcatcaaagataaaatgatcaattcaatatactaggcaatttgggataaagcacaacaaaagaaagaacatcaatcagcacacacctcagtcttctcgtaaagaatgtgtttttcctcatctgcgtccatactaaatgtgaggtcgagtatgtcgctcacatcattctgaataaacagaaaaggggacaaatatataaggctcatacagcacaggacctgacttctatctttgagctatgtaataagataaaggtaaataaag

SEQ ID NO: 1841 - DNA, 2255 bp, Arabidopsis thaliana landsberg
tcaaagatttatacgtggtttaagaccagatattcgaattttgttgtcttctcaagtttaccgtagttagtcgggagagcagttaatatagaagaagcaatagctgaagaggaagcggcattgctactaagaaatggtggaagtagttcgagattgataccaggtcaatcaagtaatcggagaaagcttaaagttaacctaaagagtcgaaggtcaagaccaaaaaacatcattgtcggatgttatgtatgtggccagtttgggcatttttatcgggcatgcccaagtgttcgatagaaacgatcatctgtgttatcccacattgtgtggtgaggaaggtcattacaaggaatcttgcccaactacaaatccattccaacaacgcaaccgtcattaacaatgtgtttcccattagtctgcgcctcaagaagatagtcaataaggcaaaggtaaagaaaatcaagattattccttaggattagattatccaaaccttcatgacctgaaaaggttccgtgacaggtaagtaggggttctaacagcacttgtttgattgtgtgtgcattgattgcttgcttgcttgcataattgcttgggcgctttattttaagtattgtttacttagttttgttaagcgtagtatcatatgggtaatggtaaccccaagtgagtgttgctagcttaagtcgtttatttttagtctgagtgagtggagagttaggattagaatcttttagtaacctgaagactttgaacccttagagctaggaatctagagttttaggtaaaccataggtttctaggatgactaccttttacccttttctcggtggtaacttgaggtgtgcggtgtggctaaaggcaaatctgaatgctaggatagtaagcaaccctagcagttctgtgaaaagaaatcccgtttaccaaagtgaagtttaagtggatcaaggtagagcagagtatgaagccgcttaacctactgtgggaagaacccaagtatggttactttttgctgtggctcgcataggagatcaaggtagaaagaaataagaatgaagtttggtccaaggggaggagccaaattcacatgtcatcaagtaattacaagattatgagaagaggaatcagagaatttattcaatggaaaggataagttaagaagagccatatggaggaggcctaaactttacacacaatgggatgtgttataaacttaatacgaagacaatgaagacgaagaaaagagttatgaagggtgtgaaccaaaaggaacggttacactatgttaagcatggaagttgtatgattagtcaaatgggaggagcaataccaagacaaaccttagagatttaggtgaaacccttttagtctttcagtggtagagttgtctcttaatccttagaattcgaggacgaattcttttgagggaagaatgtaatgcccctgaccaagacgacggcttggccgaggaatggctatcgaggaaaacttgatcaggagcgatgagaaataattttggagctgatccaaagtattctaggacaaataccaaagttgtgatcaaggaaaattaaagatggacggagaaaatcagttttggtacgaaagtacagtagacgaccgacggagcagttaacggcagttcacgggtcagtacggacgttacccgtgaacgaacgagtggataaggacgtttaagcctatccgttatggataagcacgttcatgcatatctatcgggataaaatcgttcaagcctatctgatgctaacggataagtacgtctgatcctatctgcatgaggataagacagatcgtgtctatccgtgcgtttggataacgttccggataagaacgatcatgcctatctcgccacctctagcttccaaaccgacctacccaccctataaataccccatttcgtttcatttgcttcctcacacacaaaaatcaccaaaacgctctaaaacctgagagttgtccgtgagagttcccgagtgagtcgttgagcgagtagtcgagagtctaggcgtccgatagtccttagtcgcttagccaaggtaagtttcctatgattaggaactaggtttggttaattactatttaagtaattaattatgacgttaagtaggattagtaatagttaattaggattaggtaaaccatgattagagggactaatacatgattagagtagtgattaattatgcttagtataattaatcagtaggtagtttagctcttagttttagata

SEQ ID NO: 1842 - DNA, 3960 bp, Arabidopsis thaliana landsberg
atccatccctgacatggggtaatgaggctgtataagctgagtgaagtccgctttggtcgcagttgtaaaaaggaactacactgaacctgaacttgtggtagacggaaggcggatcacaagcaccggtctcagcaagtttcgattgcaaccaaaagaacctgaactctgatgtgcattcataaagcgagtaacctctccaacaaaccatatcaatcacatagtatgtttgatccgactgcataaaaaaacagtaacaaatcacctcttagtaagatcaaaactgagggtaaacccgataaatcagtgaaaatgaagaatcttttacctcgtgaaagatacagtctagtatagagtacgagtttgcagggccagaagcgccttttttcctcgcaccaccaggtaatgcagaagggaaaagatgcaaagtggacccatttcgtactctactaacagttgttccatcagatgaaactacaaaacatcttttcccagctggtcttgctaacacatacctaaaaaaccaaccaattctcataatcagccatttatgaaggaagagaagcagcaacaacggattaagaatgagaaagaagcagtaccaatcttggcttaaattatcagggacgtcgatcatccattcaggtaacattagctgctttgcgaaccacttgcgtgcctcaggtcctctgagcctcgaagcttgacgaacgtcaaagctactcgattccgattcggttcctacaagctcaggcacggcttcagatagtatctctgggtcgacatcgggagaggaggattggagcgagattacggaagaggcgaggtttcgggctcgctgctgagcatcactgcgatgctgagtctgacgaataagagaaagctctcggcgtttctgttgatcggagataggtcgtcgcttgaaaggacggcgaatttcatgaggcgccatttttggaagaagagttcgagcaactacgttctattggtcggacccttaaggactggttcgacctaaaaacgctctgagagactctagctttggaatttggatggttgtgcggttcaaaattaaaaccaggtgtgggtaaaactgaaccggatcggtttggttttggttattaagtacaaaattcgattcctaataatactaaacggtttggtttaggtatggttcattaatcaaagtttctctataattttttcccaccgagaaaggcctatatatacaccaatttacataagctctctcatttctttttacgttctctcaaaattcatctctcgcattgattcttcaactctcaaagaatcgcaaatcttgctcttgaaataatcggaagaaagaagagtcatggtgtcaccgggacggagtgattctacctccggcaagaacaataacccgcccgacggaagcagcggcaagagatctccatcttctcccgcagataaatctccatccaaacgccaaaaggtttctgatcggagacattatttcttatccatctttcgagtgccatctggagcttctggtttgaacaattttggcgatttcacttttcgtttcagttggaagatggcggcgatacactacctccttcggattctagtaaatgcgtgttaggcgacactaatccaacctctggagactcccagattgatgcctctgcggcggctgctacgacgtcgcaaccaccacctgttgcgcaaggtccgttgctcttattcttgttcgatctttatgctcttggacccaatttaaattccttttgagattgttttttcaattcgtctttgttttctggtttggattgtatactcaacagcgattttgcaagagaaggcaagttttgaaagatggacatatgtacacagtaggtttgagaacccgtggtgtcgattgctatcacagtctgcacaggtgaattaagcatctattggatcttcctgtctttatttttctaatgcttttgtggatgcaatatcctgacaaaattgagctacttatgaattttcagtatccaagcataaacatttttctatcagtcttcaaattcttagacggagaactcagttcatactcgttcaagatcacaagaattcaggtatttttgtttccttgaatgttacgctcaaacattagcactgctggattttaaactggcctatgcaattcctgtgcgtatgattttttctacttttgagttgtttgtggagatatgtgaactccttattcagtatgtattctcattgtttgtgcacatgttcagcgcaaaggcaatgttttagcggttctagagaccatgggaaacaatggacatatgtggataaacggaaattatgccgaggggaatatcaaccatgtgctaaactctggtgacgaagtggttattggtttaagcaggattgctttcgtatcctcatgtgattccactttttttattatatgcaagaagaaattttccttcagttttgagatgaatatctccataggaatatacataagtttcccccttaatttctatccaggtatatcagcaaatgcctatagttgcagcaaaacctggttcagttcaggttcctgcaggaaagtttctagacctagagagaatgacaggtcattcaattatatcatcgcttgaaagattgatccatgcatccagtaagagccaccaagcgccagagtcgatggtccaagttgacggcatggaaggaattttttctgttaacaaccaagattccaaaatggaggtaaatactctatgtttctcttgtaccctggcgtcatcaacagcattttgcattatattaacaaagctggtatcagatattggatgagaaaaacgaggtgacaagtaattcacaacaagcttcaacatcaggcaatggtctgcaatctgcaatattcagagaagccattcaagctggttttgttagaggcgaaaacatggaagtttcattcaaaaattttccctattatttgaggtatgggaccaagtcagatatattttttcaggtattcatgcagtgttaagatatgtgcatgtgaatcttccattaagaatctgtttatatcatcatagaattttgaggtctaattctgctttcttgtctttggtagtttaggcgctttgcatgtgttctctgttttgtgtatgctgactaaggctttatttttgcagtgaatatacaaaggctgccttattatatgcttcatatatacatctgaagaaaaaagaatatgtccaatttgtctccgacatgacccctatgaatccaaggatattgctttctggtcccgcaggtttgtggtatcttgcttgtgtggttcttgtacttctttagccggaaacaacattttcgctttttggttggagttgtttcagggtctgaaatataccaagagacgttagctaaagcacttgcccgtgacctcgaggcgaaattgctaatatttgacagctatccaattttgggggtaagatattgtatgtgttacttaaatataagctgttttttttttatatgctttttagtttacaagaggaaagtttttgcatctacacttatttgtctattttcctgattacgggtatgagattactgtaagtaattcctggtgcatccgttctgcaatttcctgcaggctctgactgctaaggaagttgagtcactgagggatggacttgcttctaataagtcatgtaagcttcccaatcagagtattgagctcattgatcaagggaaaagctcggatttgtcagccggtggaggagttgcttctagcctttctcctgctgcttcttctgattcagactcacagctacagttggagccggagactttacctcgttcagtgaatcatactttgaagaaaggcatgcccccattacattgtttgcaacagaagattctacttcaatcttcttggattctggtttgcggatacttcatttggaagaa

SEQ ID NO: 1843 - DNA, 7877 bp, Arabidopsis thaliana landsberg
attttgttgagtcgctacttagtgatgacgttattgggactgcgcgccctcgtcgagtacgctcggttttgtagtttgattcaagttttaataatatgggagacaagtctccccttttttaccaaaaaaaaaaaaaaaaatctttaactcgccctcgtcgagtacgctagtgatgatccattgtctgtacttccttttgctgatttatagaagaactgataacttccgtttgaaccgttaaattattgatcccaccgttgaatctttagctgatagtcccacgaagattttgtccgaattttagtcagatcggatattgcctgaggcttctaccgtcttatgaagttgctgtgacaaagtgaatttttcttcctttggctgattcggagatacattaataactttattctgaactgttgatttctcgatcccaccgttgaatcattatctagtagcgtcaagaatcactctgtaaatttatagctagatcggacgtcgtatgtatcttccatgatcctctgaagtcgctacgacaaagtcgtttttttcctgatttctgcagtttggatgattctgggccaactttgaaggtgatttgcagatggagattaacaccaattggtaatccgcttacgggaaatgattccttgtagtgagatcttcgctaagagtacttagttagaccttaggtctttctgatgcgtcgggaaaatgtctcgcaaaagctctagttgcacatcaaatcttgtttcagacttggcacattgaggactattccaattgtttcttgtacaggaagcaagatgaataacttcttgatcttgagtccgtttgacgaacagtcaggtcgggttttcgaccttatctccggcgccggagagcttctcaacctaccatctccactgcttttaaattccttcctttgctatatttgtttttggtttcggttgctccggtagcaacatacgatcctcagtgaatataggaggcagtatccagtgatgcttactctttggctgacttctggtgatctttcttctttacttctctttcctttgaattttcattacacgacatgattttgtgagatctgaacgtcttgtgattaaggaagataaagcagaagctctccaaggcgaggaagggacgatttttcttagatatatgttaagtcgagccgattgtagatgaaagacgagcttgaggccggaagacgatcttgatgtccgaggaagaatagagtttattcgtcttatagctgaaccttgtaaaaggttgcctacgtacccttagaaagggatcaagccacacgtagttcatattatgataaacgagctaggccattactggaggaaggtcgtatggtaggtgacgagccggcagatgtgcgacgagctggatgaaccgtggtagagaggcgaattggacaaaccgagttctgctgaaggtttagacgagctgggcgacgagataggtggactatgctgtcaatggacgaactgccgctaggcgaggaggtagatgagttttgcagtcgaggggtgagttgatagctggacgagttggacgagctgactagctgacagctaggcgaggagatggtcgttaagtgatgggaagagcttgaggacgagctgaggagcttgaggacgatctgatgaacttaggacgagctaaggagcttgaagagcttaaaggcgatctgaatagcttgaagacgagctgagggacttggtgaagggaaacgagttgagaagtttgacgaagaggagcgagctaacgagcttcttgagacggacgagcggacgagctacttgagaatggcgagctacttgacacggacgaactgacgagctacttgagacggacgagctgtcgaccttcgtgagacggacgagctgtcgaccttcgtgagacggacgagctgacgagctactctgcgatggacgtaaaatcggtcacaaaggtggctgatctgatagccgcagacatgcatctttggggtacagtcaggacgtgcttgtcgcagaaaaacagtaataactcttgttagacgtaggcaattgaggcaaggacgaatctgttagaaagataagccttgtagcttcaaaatgatgtgcagatcggctccaggttccttttagatcgtcgggaaatcgatctgaaagcagatagatcgggtgtagacggatttgtgtctcgataaacaacgcatgcttgagagaaaaacctataactctcggaagacagcaccaaatggagcaaaatcgatcttgttggaaagataagcctcaaagctttaagatgggctcttgatgttttctgaatcgttgggagtttgctttctaatccagttgctcccacagttcgaatctgcgatttgacaggtgtcatatgttttattgaaaaagtgataacgcttagtaaacagctcggaattggatgaggtcggtctctattgaaagataagcctcggggctcagttgatacttaggtcgcctcgtgatgccttttagatcgctgggaatttgattccgaggtcaacagatcggatacagatcgatctgtattttgtcagactcttctgcagataaacggcagtatctccgagaaaacagaccctaacgaagtgagctcgggcttgttaaaaagaggagcctcagggctgtaaattgatctgtagatcgtcttctgagtctctctagatcactgggaaattgagcctgagttcggctggtcggatagagacgaatctcggatcgaagcgaggtcgatggtaactcctaatagacatctcggatcgaggcgaggtcggcttctttagaaagctgactcttggggcgatctgtagataggtatatcattgcctagttcatcaggattttcaaggaaaacgatcccgaagctgactggttttatagagttgggtcctatgactggctgcgcttgcttgaggtaaacgtttatatctctcagcatatatcttcgattaaggcgaggtcaacttcttcgaaaagacgactctttgggcgatccgtagatgtattaacccttacgagattccctgtgatttgccgggaaatcggccccgaggcgaactggtctattcggacggatctgttaagaaacagacagcatcgacttcagaaaaacggcgataactctgagcagagatatccgatggagttacggttagattccctggaacgctgatctccggggcaatccgtggaatggttgtacgtcatctggttcattgtatcttgacgggaaatccccccgcaagtagaatgatatgcgaagagagttctttgtcgtccccacagacggcgccaattgttgaaccaaggattcacacaatagatttgtttagagagggaaaacaaatctagtaatttctcttcattaggtattctatccaagactcgattacaaaagatgttctaatctcttatgaaatacattagggttttaaaaaggtatagctgcatccatgatagattgcctacgtaccctgtgaagggatcaagccattcgtagttctcactaggtataaagttatgtgtttcttctgagtatccaaagatccccttttgtgaagtccctgagacactttatatagggtcgttaaaccgcctctctagcgatattcttcggaagattcttatttatccttaggtcggttctagaggataatcgtcctaaggatattctccttattcttcggaggttttggggagatttcctgatttcgacattatcttcaaagattctcctttatcatttccgaaagtcccataaaagatcctattttaccggaaatgatccttggagaatgaacggtttttacaagtctttgcctcgcgtgttcttcacggctcggtggtcgtttgagaggtggcttcggggcaaacggtatgggcttggtacctatatttacacacagtgtgcacaacttaacccttgctcaattttttcagcacgagataatcgatctccgtcccgataatgcaaaggtctactacgctaacgcttgactctgctaaggttctgcgttcgaatttgattcagcggccaaaagccagatctccattgctgatgctttctgcagaaaaggatggttgtcgtagtaatagtgtgtataacccatacaatgatagggtttacgagacgaagagtgacttttcagggtatcgattcctgggaaactcaggtaagtggtttctggtggtagattcccgaatgaaactctatattatagatgtatttagcgagaagaggatcgatcttccaccactagaatcatttaagggtagccattttaagattttgcgtgacggagaggagaatgtcaagcatatgcaaatggctgataacgatccatttcgtgatgaatttcctcatgctgccgaagatctgagaggtcgtttgtgggttgaagacaagaatggaaactacgttgttgtctggcagtttgaaaagaaccaatttctagggttttgcaggacaggggatgatcattaccgcgagattccaacacagctcgaggttcagagggagttacgaggtttatacgatatggtacttaaaggttacaatctttacgtctttgccacccgtgagttcattcgacacttggatttgtctggacaagatgaagatggtttcaaggatgtgtccgagaaacataggcttccaatgtggatgccacgtctgactatgaaggaacgtgaaagtaggaaccaattgaagtgtatcccatctaacaaaggcattgctgttacaagagcaggtcaagttttgcttgtctatacgttcgatttaggtacctctgaaagtcataggatgttccgtttgtacaagagggatcctaaagatcttgacccgaaaaccctcgacacctggcttcttgaggtgcattctctaggtgatgaggccctctttcttgatttgggtattactgtgcctgctgaccatacccttggtattgagcctaactccatttatttcacccgtggtgatcgtatccgtcacaaagaatcgtcatgcctcgacatctgtgtcttcaatcttataacaaagaccatcaaacgctttcacggtctctccaacttcaacttctacgatgctcagtggtttcatccttcttgattcttgccttcctagctcatggttgatcccttgtggtcctgctctgttgtccttataaataaattttaaaatagaaaatgttcatagttcacttgtacgttgatgataacataaacttagtgtccgacagctaagtgtctgctaaggcatttgatgttagagtgttatggattacaagtttacaacgatcatgttgttgggatgccagtttagttttggtaaaccgacttatatatttgttattgctagtttagctttgttaactaacgttatgactttgattatgctttagtgcccatgtaaaggtatcctatcgtacagaagaaaaaaaaacatgagaatatgtctgacatataaaaaaatcaatccactgaaatagtggttgcatgcatacccaaatcacatgtgtgtgcaaatatgaattatgctggttagaagataattacaagattaagcattttactacaattgcgttttttattttgtatgtagagtttgtgaaagtctatagacaacaacatatcacagagttcgccacgcatgtgtgcctccaaacttccacttactattcatatagttcaagaagagatttcacaactcattcttgttgattctgaagtacattatccgagatgtaacttttgtcatatatttttgttgttgttggttgttttcatttgattatcctaatgtattttgatcaaagacaactagaccgtcaagtcgtcaacaatagtgaatagttttttttttgctaacttgtaaatatcataataatgaaagagttggtttacagagcaaacctaaaggttggtttcttggcaaaaaagcttaaaaacaagaaagcaaaagagaggttatgagaggcaacggattagtgcaaccaaagactcattagcctggagaagcgcttgttgagtcgccgggcagtgatgcagttcttcacttcgcggtccacttcgcgaaagaccaccgagggaaggacatagacaagattgtgtagcagattgttccgttgcttccagattgcatagatgaccgattgggcaatgagctttctgagagtaggaggcgaccttctgttacccgacttcagccaggaaagaagctcagcccacaaagtgaagtggataccctgcatatttaacttcaaactaaccgcattccacaagtagagggcgaaatcacaagacagaaataagtgatctctactctccggggagagagagcagaggccacaagtatcctgaatctgaagcccccaagaagagagcctggttttggttgggagacggtccaaagtagctatccacatgttgaaagcatgcttaggaatgtggcctttgaaccaaactgagtcccaccaatcaactatggcagctctaggccgagtgactgcccaagttttagcagaggagaagcctttgcagatcttgttttcgaccacccaatcgaactcatccggcccactgtcatccgaaggtaaggcaatggtggataagtgaatttgcagagacaccccctggtcagatctcgggtttgcaataatccagccctgatggttgcacacatctgaaaccgtcgcatttaatggaacacgcaaggagctaggaccagaggagccaaagcagttgtagagcggtcccaaaggagtccagctatcgaaccagaagctggcgcgcctcccattcccaagactgcacttaatgaaaactgaagcaggttctctcaacctcagaatagatttccaactccatgagtcacctgtactttcaacttggttccaaaagttggtagaagtgctgatattatgatgcttatgccaagcaacccacagagagccactgtttgagaagagtagccaaaccagacgcaaacacatggtcctattccaatccgcaaaccgcctcagacccaaaccaccttctttcttaggtaaacagacatgagcccaagccactttaaccaaacctcttttttcagttccccccgaccacaggaaacgggaacagagagattcaatccgtctaatgcatcccttaggcaacacaaaagtagatatccagaagttgacagtgcctgaaataactgagccaatcagctgagctctccccgcgaaggacagagacttcacagcccaagcgttaaaccttgcagtaattttccctatgagaggctcatactctgaaactttcagctttctactcatcaacgggagccccaagtatctaataggtaacgacccaacagtgaatccatagcttgccaaagcattggattcagtttggctcagacctgcgtagaagagctgcgtcttgtctctgttcatatggagccctgaccagccagcgaagtcatccaatgtttcataaatgccttgaagagaggagcccccaccatcaaagaatatcatgacatcatcggcgaacataagatgggagatttctaattcagaagttctagggtggtaagagatataccccgaagaatacctggactgcagcagaccagaaaagacctccatggctaagacaaaaagatatggggacatagggtcaccttgccttaggccctgggtgcttctgaaatagcctcctgactgcccattaaccacaatagagaagctcgctgtagagatacactgctcaatccaacaaatgagtaatctagggaagttcaatgctctgaggcaggcaataataaagtcccatctaatagaatcaaac

SEQ ID NO: 1844 - DNA, 10079 bp, Arabidopsis thaliana landsberg
  unsure (1)..(10079): unsure at all n locations
aaggagcacaacttttaacttgggggtagcatctcggggctcagattcttcctgttaaggagtcgctctcagatcggtttgctcacctccaggtcgagagaaaggagatatgataacaagagaaggaggggaacccatcgagcgtggtggggaagatgattaaggggaacgatcaatccgagctttcaatttgcccctcctaggggaagagttgctgcgggctggcctctctctctttttcgcatcaagtctgcaatcggttcgctgctcaacctatcccgggaagagggtcgaggagagtcacggcgaggagaacgatctcttcgaggtgagcgactgctacgactttcacggtgaggtgtaggtttgaaagcaccggcagatctcgccccttcagcgctgtcgtcatccactagtaaagttctgctgtactctttcttgtcgacagcagacataagaaacgacttgttcgcctcacaggcttccaccatcggtttggacaatgtcttgcaccgggaagcaacagccctgactgaagttcgttgaggtagaggaggaggcggtggaagttggtgaaactgtctaggtggactcattctgagcttataattagcctctattaaacggtcgagagtgaatgagttccaaagggtctccccttcgataacaatcttgaagaattcaacgaattccgtagtcaagagagtcggagcaatgaaagctgcgaagcgaaaaaccgtaatttcaatcaggtaagtgaaaaataagcaaaaaagacatacatgacctaatttctattaggtttcgcagaccacttcgatgggagcacatcggaaaggtttccgattgaagcaggggttttcttaatcaaaaaccaaggatggtgccaattctcgtcctcgttcggaaggtgcgaaatgagattcctgttagcattcgggtatgcagaaagtacccggttctctttgatgagcttctcatgttgaggagctctttcaattcatgaaccccgatgacaaatctggcctccgccgtgatacttatgattcccaggatagttcggagaagattggggtcagctgggtaaggcaatctcgagagcttcaaggtaacgaaccaaagcttcaggaagcgggaaggtcagtccgcaacccttaaaataaatttcataaacacaaaagaatccaggacggtggtcttccacggattctgtgggttcgggcatcttctattccgtcataatctcaggcgggatacggtagagatctttcagtcgcttgagggactgtaaggtgcaggtagattgataatggggaccggcgatgtcgttggggcgagtgcaaatctcgttggaagaaccaccttcatcgaaagatggggactcgtgtctctcattgtcaagattcatcggaaagaaagaaaaatctggtggtttaaggaaggaagaattacagagagaaaaggaagaggaactttgttctaaagggagataaagattaaaataaatatactttacgcaagctagtgatgatgatggaaccgcctcgagagttgtgggggaagtggaagagttatttcccgttttaatggtaaataattgagatgtggtcataattgcgacagaagtcatgcgagtaattatgggtaattccgaaatcaaaggagtaatgtgattttggagggaaatcagaaatctattttagcgcaatctttgtccattaaagcattaaagtcttccgaattagaatatcactttgaaagacttggggggctaattgttggtgtcggatcccgcaccggaagatcaggaccaaccaaagattgccacgtggacagggaaggcccaaaaggaataagccccacaggtttctttaagcgaagagaagatttcgggcgaggtggtcgctatgcgagatggatgtggtgacgaagtcggaacgtccggtctggagagtcaatgggcgaagccagtgaatctcggagttgattcaaattcgaacgttcaaacaataaattcgaagaccaaaatggatacatttaagatagaataattgtgtgtaaatgagaattaagtgtaattcttaggtataaattaagggtcaaaggccatggaaagacacacgctntttgtgcanacttactatatacattttcttacaatactcatagttttctctataatcatctacttactttctagtatatttgacctcaagaataatccttctcactaaacaaataaatacttgagtgtgaatccgacatccacattttggcgccgtctgtggggacggacgattcttgagtcatcagattttttctgtgcattacatacctgaagtgatcctcaatgtctggagaggatgctaccaacgtttcgatagccgaaaccctcaaggccatgcaacaagctatgacagatatgacgcaaaagttttcaagcgtggaaaaaaccgtcgaaacattgcaaacagaccatgtatcactcagtcaaaatgttagtaccattcaatctcgtgtccgttctttaaatgcaggaaattctagagttcggcgaaccatcttcggacccccaaattcacttccgcgaaatgcaacaagcgaccaaacgaccccggatggtacaaacgcggagaatcaactagaagatggagaaacgcatccgttagatgataaccagttcggtgaccagcatgagcaagaaaacttcgatcagctcgaaaccatgagagaagtaagtcgggaactcaaagaaatgaggtcgaaattccatcaagctacaagttcggagccagacatcaaccaagttatcgaggaggctaggcgaacaccgttcacccgcgaattgcgagtttgagaatcagagattctcaaaaactcaacttagaaccatataatggtttggaagacccgaaaggctatctcgcagcttttctaatagccgctgggcgagttgatctaaacgaagccgatgaagacgcagggtattgcaagcttttctctaaaaatctatgtcccctacccctgatgtggttcactcagttggaaccaggatcgattagaaatttcaacgaactatcggcagtatttttaaataaatactcaattctgatggataagagcatttcgataccgacctctggaatctatctcaagggccgaatgagacacttcgggcttttatcaccaaatttaaaaacgtgctttcaaagctcccaaggatctcacaacagtcggctctatcggctttgcgaaaaggactatggcatgattcgaggtttaaggaagatctaatacttcataagcctgatactattcaggatgcattgtttcgagcgaacaattggatggaagtcgaagatgaaaaagaaagtttcgcaaaaagaaataagcaagcaaaactagcggtcacttttccaccaaagaagttcgaacctcgggaaaatcagggaccaaggaagtttggttcacaaccattcaataacaacgtcggaaagcagtttcaggggaaaggaaggtcaaatacctgggtccgagatgaaacctcgtactgcgatatacatagagtcacaagacatctgaccaaagactgcagtatccttaaaaggcatatcgcagaattatgggccagtggagacatttcaaaattcaacatggagaactttgtcaagcaatatcatgaatcaagggataactcagaggctcaaaactctaaaagaccaagaccggctggcgaagaggaaccaagaactttaaatggtaaaataaacgtaatacttggaggatctaaactctgccgtgattccattagcgcaatcaagaaatatagacgcaatgttcatctgaaatcaagcttaagtgaagaagtagactttcaaggcacttcgatattattcgaggaaaaggagacacagcatctcgaaagacctcatgatgatgcacttgtaattacgttggattcgaagtatcgaggatcctcattgataccggtagttcggtcgatctaatttttcttagcactttggaaaggatggggataagcagggccgacgtggtaggaccgccatcccccttagtggcttttacaagcgaatcgctaatgtctctcggaacaatcaagctaccagttttggctggaaagatctcgaagactgtggattttgtcgtttttgataaaccagcagcctataacatcattcttggaactccgtggatctaccaaatgaaagcggtcccctctacttatcaccaatgcctcaaattcccaactccgagcggagtggaaacaattcagggannnnnnnnnnnnnnnnnnnnnnnnnnnnnagctagccaccgattaaaaattcaatagcaattaacgaagcccgcaaagaaaggagtagtcccgagattccctagcgggcagaaagtagatgatgtcgtggtcgaagtaattctagagcagataaaccagatcaaaaagtccgaatcggagctactttatcgggcgaagtaaaggaagccttgattgagctgttaaaaaggaacaagaaatcatttgcctggtcggcagcagatatgcttggcatagatccaaatataatttgtcacgagttaaatgaagacccgagtttcaaaccggtgaaacaaaaaagaagaaaactcggagtggagagagctaaagcagtaaacgacgaagtggataaacttctgaaaattggatctataagggaggtacaatatccggaatggttagcaaacacctttgtagtcaaaaagaagaatggaaaggatagagtgtgcatcgactttacagaactcaacaaagcttgtccaaaagagagtttcccactttcacacatagatcgtcttgtggaatcaaccgccggaaatgagttgttgtcctttatggatgtcttctcgggatataaccaaatcatgatgaatccggaagatcaagagaaaacgtcatttatcacgaataggggcatctattgttacaaagttatgccattggggttgaaaaacgcaggagcaacttatcaacggctggtcaacaagatgttcaacgaatatctcggaaaaacaatggaagtctacatcgatgatatgctagtcatatcattacaaaaggaagaccatgttaagcatttagaagaatgtttcgcgacccttaaccaatatcaaatgaaggtaaacccggcgaagagtacgttcggagttccatccgcggaatcccttggttatattgtcacaaagcgaggaatcgaggcaaacccaaacaaaattaacgcctttctctaatatgccgtctccaacaaacttcaaggaggtgcagggattgactcgaccggattgcggcgttgaatcgtttcatttcaagatcgacggataaatcattacctttttatcaaattttaaagggaaacaaagggtttctttgggacgagaagtgtgaggagggattcggacagctcaaagcatatctaaccacgccacccgtattgtccaaacccgaagcaaatgagaagctctatttgtacgtttcggtgtcaaatcatgcagttagcagagtcttgatccaggaggaccgcggagaacaaaaaccgatttactacataagcaagtccatgacagatccagagaccaggtatacaaagattgaaaaactcgcaatcgcagtggtaacttcagcttggaaactgcgtccgtatttctagtctcatccaatcgaggtgttatcaaatcaaccgctctgaacaattctccatagcccgaaccaatccggaaggttgacgaagtgggcggtagagttaagtgagtatgatatagagtacgagagacgagtcgccatgaaggctcaagttttggctgactttttaacagaattgccggtacttggagggcaggagcagccagaaaatcagacttggaggttacatgttgatggatcctcatcaaaaaatggattagagtctcccacctcggaaatccttgagcagtcattccggttactattcactgcatctaacaatgaagcagagtatgagcgttaattgttggactcagattggcacaaggagttggagccgatgaagtgatcgcctactataattcgcaactggttgttaatcagttcaatggagactatgaagccaaagattcaagaatggaggcatatcttgaggtggtcaaagatttggttaaaattttaagaagttcgaactcattcgtatacctcgaggagaaaacataactgcatatgcactcgcagctctggcctcaacaccagaccccaaagtcaaaagaatcattccggtagaatgcatttcggagagaagcattaggaggaaaaagagacactcgtcattacaagatcttgagctgcagcccgagatcgcggcgaacctgggattgaactaccacctgtcaagagacgaaaatcaaaaggggcagccgtacctaagctagccgtgcaaaaagataatagggtcgaagaaattgtagagccaatagaagatataggtccagaaaacactgttaaagctgaggccgaaccatagattgacgaagacttcctcgaaccaaatgagcatcttgaaccagaagctcgaatatttcatgaaatcgaccaaattccggctaaagattggggggactgaatggagggagccaataaaacattacattgttacaggagagctcccaaagaatagatggcaggcgaggaaaatgagaatcgttagcgcgtaattttgtctatcgaaagattctttgtatagacgaggtgtaagcgatccctatttactttgcatttttgggcccaaagtcgagatcgttatgagcgaagtgcacgaaggtttgtgtggcagtcattcttcaggtaggctatggctttcaagattaagaggatgggatactattggcctactctgatcacgtactgcgttaagtatgcccagcgatgcaaacgttgccaactccacgcacctcccatccattaaccttcggagttattttctttgatctctgtcttatacccgtgcatgaggtggacgatggacatgaatgtaccattgcacagagcaacccgagcagtacagtatctcttggtcctaactgattactttttgaagtggattgaagccgaaacagatgtaaacatcacggattcggcgtaaaaaccttcattttgaagaatatcataggtaggcacgacgtcccatacgagatagttacggacaacggaccacaattcatctcacacgagttcgaagctttctgctcggattgaggggtcaaagttagttattccactccgcgatattcacaagggaatgatcaggctgaagccgcgagcgaggcaattctacttaatcctaacaaacgtctaagtcatttgaaaggaggatggtatgatgaacttcaatcggttttattggcatatcgcacaactcctaggcgcttgaccggagaaaccccgttctcattggtgtacggaatggaggcagttgttccagccgagctcaatgtgccaggacttcgtcgaacagaagctcctttaaacaaagaagaccgcgatgctagacgattcgctagataccatcaacaagaggcgagatcacgccttgatccgaattcaaaattttcaacaagcagcagcccgatattacaaatcaaaaatcaaaagcagacctttctttatgggtgattatgttttgaagcgtgtgttcgataacaagaaggaagaaggagcaggcaagcttggcaataattgggaaggtccctacattgttaccgaggtggtccggaatggtgtttatagattaaaagatttagaagagagacccgtccaacgtccttggaacatggtgaacttgaagaaattttatgtttaaaaaggtaacgcattttttttacatgaattacggtgtggcttgatcccgaaatgggtacgtaggcagcttgcaaacgagttcagctattaataaaatttattttattcatttgaagaagagttcgactatacgaacaaacggaggaaaagagttcgacggtgcgaacatacaaaacaggaagcaaggttacatttattaaaggcgaaaacaataaaaatagtcgaagtcttaaacacacttcgaactaggaaatctttctcgtcttgtaaaatactttgactcctcggttggcaagatcaaggatgggcatcatacaatccgggatgcgagcaaattcggtgattccaagctcgatccagtccccgggatgcgagttggggtgtgtagctcccttgatatcacggtgactctccgcagcatctggttgattttctttcgaagtttcttcttttttgatgaacgcttttggtgctgagccgcaaaagctttgatgaaggccattgcaatttcttgatctctgcttgaaagatccttgattaatgcacatggagctctgatctgagatctgaaattgcgaagtggggagcgtcctctgtccgacacattcggcatctcctcagtcgatcatcccaaccctggaaaagtctggcatggactccgagcatcgatggttaaaagccataactacacaaaaggaaaaacgaagggtaggtgaagaataaagaaaacacagagaatcaatttatagaaggattcgtaactttcaaagatgcgattccattcaaggccggagtgattcgcggaagcatttacgtcgctctcatcgccctacattcaaagcatatctccaaaacaaatatttgtggaatcaagcaaaatagggaagcttccttaaataaaaatgggtcgaagcccagaggaaagtccatacgaaaataaaaaaaaagagtttcaagtttcggggaacatttagggaagaggctcgggaacaggctccttcatcgccggttcggagttcaaggtagatgccttgttcttgacattcacctcgggttcattcttcacacgcttccaagggtgctgtcctcttcctcgtcatcatccttttcactgtcagacatgatcacttggaccggagcgtttacgggtccggggacttgacctcgagcacggaggtacatccgaagtatgtgcgggatcttcgccacacagtctaagttcctccattcccattggaagggatcgctctccatggccctcaccttcctttcgatacgggcaattcgggcctcgagcgttaatatgagtaggaatcacttcggtaagaaaaagagtaagagacctaccttatccataaaattgtacgcctctttcttatccttcgaggggaagtgaaagcagacgtgaggaaagaggacgccggcgggctcgaagccatcgccggacagaatcagtcggctactagggtcaagaggacatatggtggaggatccttcgttttccattcttgaagtatttaccaagtaaatttctgagatcatattttgggacactaatgacagtttgtgctcttttttatagagagttaaggtttttctcgaaaccacaaaattaattattatagcaattattgccttagaggcgtgaggctttccctattttccgaggaaagaaatggcaaccgtcgcattaaagacaaacaatttattaaataaaagaaaaacgattaaggcccaagcccagtaaataagtcgaattgaccgaacccgagttggggaattcgcggatttaaaacgagttcagactcacattttaagagataggtttgatcagcctataaatctcacaacttggccacatggttaaacaaagaagctatttaaaagatggcctttgcaaatccgtacttaaatattgcagaaaccctcttgggatcacggtcttaaaaaggtttaaaagcctcctcaggcaaaacacttgttcagaaaataaaaagcctacttaggcgatgaaaatagtttgaaaaataaacttcgagtttgttaataaaaagggacaaccccctttaagtggacacaaccactatggatctttggccacctcgagttcaggttgagtcggctcaggatcgactgggtccacggcagccgtctcagtctcatccggttcgtcagcaatgggcagttcggtaggaatccc

SEQ ID NO: 1845 - DNA, 6466 bp, Arabidopsis thaliana landsberg
  unsure (1)..(6466): unsure at all n locations
gacttgttcataggttctgcctcattatctgaatgacggattttggcctcatcatcattcactccttccatcggggcaactttatcacctaaagtatagaggttctccattggtgggcagaactcaatgttgccaccatctattatcgaagtggaagaggggtttgggaggagaaaaatagattgtcctgttgtggggtgatcgaacctatacttatataggccattcttctcctgagacccaaaaactcttggaattgataaggtgttgcatatcaatccatcttggaggaataggctttgaatgcagaggtacattgcatgctctcagaattggagtcacaactagaactgtactgtctgatgctaagccaagcagctcttgcagcgctgtctctatcagctctagttctccattgacgaaggttccattcctttctcttgcaaatagcgcactagccaaggacatatgaaagtatctaaccactggactccttatctcgttgctcttggtcctagaggatgaaaatccatgcttagacccaattgtggccaaaatgactgaagctctctcttgtcaaaacgatgacttgtgtcttttccgcttggaaatccatacatcagctcgaaatgctctattggaagccaatactctacgtcatacacacagaactccaagtatcccaaacttccatctggcctgatttcatcgtcctcttactctccatataagaacaattccacagatgaaagaaactggatggtctcttcctcatactcctccattggccgaaacatgtgaatattcaggctgcactgcttaaacatatagtctacatcatcatagatgccgagtctctccatggtctcgggatgagggtatcgagttcctaaaaactcattgcgcttcagcagcttgtagtactcgtttcgagttgcacacttctctgattccaaatcatcatcgcctcctttctctgtttgatcatcttcctctggtgaaaccatttcttcctcagagtcttcatctacgaggtctaaccttctccccacgggcttctttcctcgagtggtatctgccttgttcctcaagaattcctttgcagaggactcactcgaccttcgggattgagtatttccagcaggagagctaaaagtctcttcttcttgcatcacttcatcctcttggctcgattcactgtgatcgatctcgaaactgtcttgttctctcctgctcgaccccaacggtgatggttcagaaggtcctcgagctgctgcatgcgaagaaggtgttgggtacctcttcgatggggagagagctttgttccgaatccttgacaaaagcgagcgccagttcgtcatcaagaacaaaagtgggagaaactcaaaaccaaaatttagtaggttaggagattgaatgatggaggaaacaaatgaatttgtgaaaagtttttgacaagaaagggaagtgaaggagataaagagagaattgtaaggattcgagaattctttggtatgggaggcggagagatgcggttgttgagttcgggaattgcaatggggggacgaatgctcctctcatttggtcattcaaatcaacgcctcaaaacactcctcctcattctactcgatcaacgtttgagatctttcttgacttggtttgaatttactcgacatttgacttcctcaaggtcactaaaacaaacctgaagcacttaaacaaaaacatcaaaaataaaaagaaaaatagaaatttatatacatggatagacatgagacttccttccaagtgagcttgttttaagtcacgaagcttgactcttacagagcttagtcaaaaaaaggttgaagagaggaacagagaagtcctcatcttcagttgttgaactttcaatgcttgaatcatactctgcatcctctcttgacatatggtaggatgaatactcatttgatttttcttcaaaataagcttttttctgatcagcagagtagtcttcttcttctgaaccaggctccttcgaccaatcctcaatttcaaagttggggtagtccttgaccatttcttgaagttccagaatggtgctgtttaactcttccatcttatgagttaactttccaattgtatcctcttgacctttatatctaacctagagctccaggagttctttagaaacagaatcatgaatcaagtgttcttcttcaatataggggttggtgggctgtttaggcactcttagagaatatgtcggaataggggtttcctcgtcagtcaacaacttgctctctaggcttctttcctctaagtgaactcctttctaatcttctggtgcaaacgcttctgttgtgaaatcttcgttctctttgatagctagagcagtttccatcttctctggatcaataccatttgaaaacttattaactcttttttcaaacatccatgttgatctttcagcttcatcacccttgaagataatttctctatgactctactttgccatttaaatttttttcttatctcatacgagtcatcttttgtaggatcttcagtttgagctaacccttaaaatgatatcttcttgtggtcaaaagttcttttccgcttgctgagttgagaagtatagttaaatcttggtggggttccagctttgatcctgtgtcaacatccatgtcatgaatcccagaattctgacctcctgttgttgatttccttgaggctttgctgatgtcaaatttcatcttgatacctttttcaaggtttagatcaatctttccattcctcacatctatgactgctccagctgaagataataatggtctgcctaggataagggacctcctgttgttgatttcttgaagctttgttgatatcaaatctcatcatgataccgttttcaaagttttgatcaatttttccattcccgacatctatgactgctcaagctgaagcnnnnnnnnnnnnnnnnnnnnnnnnnnnnnnnnnnnnnncttcatctatgtctaataccacaaaatctgtaggtatctcaacatttccaatcttgacaggcatatttactaatcgaccatgagatgtgcaacagaaccagcaactaagagtaaagcttggtcgcagaacttgtattccatgatccctagcctttaaactctagagagaggcatgagactgactgatgttcccaaatcacaaaggcacctattgaaagccaatggtcctagagagcatggtagagtgaatgaaccaggatcatcaagcttttcttggatgactttcttcttgtaagtttcttgggtggtggcacagctaatcatctcttgattctgatttttcgtgagcttttctattttgaagttttttccagaatgttctcaagaacacaaacccagaaattactaaaatcatactaaaatgtagatctaaacaagctaaacaactttacttaaacaatcaaatgcaaaaacaaaatagattaagcgtaattaaggttttaaaattcttaaacacaaagaaaaactgaaagataaagcatagatcctttggacaaaccccaaagtgatctatttatagtaaaatattgaaaccctagattcactagaagacaagagacttgaggcggttggggcgaatactcgatcttggagatcgagtaaagagggtgctgcaaagtccgcgcctttgtgtctatgctccgagtgatcaattgatcgagtagatgcttcttcctctcctatccgtatgctcagatgtctggttgagtggggaatgaggaggatccgaagacgctttgatagctcaataagtcttgtagggatggtcacccttggtcgagtaaatggatcgagtagtggatcgagtaggaggggcgagtagatcaatctgctgcttcatctgaggttgcgttgatcgagtaggagggtcgagtaaactgcagcctcctccatggcatcctggatcgagtaaagaggtcaagtagaatgatgcctcttctgtagctgcctggatcgagtgaatggatcgagtagagtgcttttaagctccttttgcacctgaaaacaagagtctctttgctcacggtggctttctcagctgaaattattcgttctatgtcaaatccctgcgttgaaagacaagttaaagcattggtgatgaggagtaatgcttcactagtagttcttgtcatgaagttacagtagctcgctgcatcaagttcattctggtatggcttgtttattcctttgtataataggttggtgagttggccatcttggaagtcatgttggggacattcacgctgataagacctgaaacggagccaagaagctctaaaagactcggctggagcctgagtgaacgaagagatttgcaaacgaattgcctctgtcacggctacatagaagaagtgattgatgaatgcattctttgtatcagtccaattggttaatgaacctggtcgagttgcncaaccatgatgttcctctactctcgagagagtgggggaagagtttgcaaagaagataatcagcgggtacaccttctgatttaatagaggaaacgatgtctttgaagacttccaaatgatctaatggtgattaatcgggagatcctctaaactttcctctagatacaagatcattataggcagggtgtatagcaaagtcttctctttcaaatggaggaagcttgaatgttgatcaatttgtgtagaagagatcagttcttataaaaatcgcctattgtagccgtctagttctgtagagggtgtcgannnnnnnnnnnnnnnnntgttggttgacacagccatgaattatcaatttgaaggtacatgaaacacaagagaccaaaagtacaaagaaccacgtgagtaggtgatagaaaagaagtatctagacttataaggacacctagtctaatggtaaactaaaagagatcttcggcaacggcgccaaatttcatattgctcaaattgccttaagcttactccctccaataagagatagtcgttagcacttaagggtcaaattccaatgagctctcgatgttcacacaatagacttatgatgttatttaataggctagatgaagtaattaaatgtaaacgacaaataagcaagtaaacgaggtgtagattcaagtgattaaagcgtcgggtctaaggaattgtcttgggagatagataaattgtagatctagctaatattaggattgttatcgcaccgttctcgaactcaaactatgattctagagtaaccggtggcgtttcgtgaaactctctatacttatagctaagacaaccagaggagccgagatatcttacgctaaagcatgcattgttattatgcttgattagttcacctagtatctaaaccatagcccttctatgagcctacctgttctttcttaaatgcctaggttcatctatgatagtacctatggcgggcatacctattatctaatatcaagttctaggtgatcaatttaaaactagcaataaaaataatcaagatgaagaactctaagaatcatcctaaggggttttcgatctactaatgcatctaaatccctattgagactctttaaacccaacaaggtgattactcatacatgataacagaaacacaaatcataatctgaatagtttgcattgatgaattaagaataaaaataaaggagtacagaatcctctctaaaaggattggattcttctctcaaaatgtgtaacaatctctaaaaacaaaacttaggtctaacattgacctaacaattaggtgtattcgtgactaaaaacgtgcagggactactttgcaaataaagaagacttcagggcttctcaaagacttggcagtaaacgagaattcccttggcagcaataagagtgtcgatcgacaccatcttctgaaaaacgtccttcacaatctttattgctgaaaagtttccaaaattccttattgtgctccatagctcccagatgtgtaaatgtacctgaaatgactcaaaatatacgaaaaagactaaaaagactctaaaaaacattttgaaactgtgttagaaatcagtaaaaaccaggacatatcagtctccggtcgcattcaaatccgaaattagcgaaaaagaaattaaaagaaagcgtaaatatagaaaaatcatacaagtggattgcctccaactaagcgcttgtttatagtcaataccttgacttggcgtagttcaagacttggatggaagaacatggaaattgtgctgcaatctcgccttccaaggtgttgtgtaaacagatcagctatgtgctgcatctggtgtcgatcgacactggtggtggtgtctatcgatactcactcctttacctgcaaaatcagaagaggaaacaagctctcnnnnnnnnnnnnnnnnnttccccggtgaagcacacttcgaatattataaaaaagtaatcgaaggataagtaggagaagagatggaggagtacctgtca

SEQ ID NO: 1846 - DNA, 2158 bp, Arabidopsis thaliana landsberg
tgcacatcattttatgaacagagcttgtactaacggaagttgcgagaaacctgagaatgtcatacagtcatagagctatttcaagactcggagtactgtctacaaccgtcagaagatagtccaacgagaaaatcggttttcgattcactaactcctgttgcattccagtgatatttaatccatacacagcttattaccaatacgcttggcactaaccgaagaatcatcaaaaatacgaagtgtgtataggcaaagaagatgtgaaggcaaagactctaaaggagaaagaggatatgagaagttacattgttcataagcttgtcatatggtatggagactcaaaagtaaagtttcaaagatttcgagatgcttttgagttttgatattacttttgatagtttacttaagaaaatcaacagtttggtggtataacattttttgtaatgtttcctctcatggatgtgattatcattacgatttgccccggtccatttttatttgtttatttgatgaacaaaatacgataaaaaaacattttgtagttttttcttgtcggaaacattttgtagtttggtatatatatgatgtgtgtttcaaactttcaaagaaaaaaaaaaatgtgatctcaactgtgctggttaaggaccggttattatttgttagttgtattaatttgatggtgaagactgaagaaggagcatttggcctaaccagccagtttagagaagtctagaaaaacggcacggcgttttactctctattgtggaaacagcaaagctaatttggttcttccccagattatcaccgttctgtttgttcatcagtgttctgaaaactttttccgatacacaaaatcggaggaagaagaagatgaagctcaaagtgtatgcggatcgaatgtcacagccatctcgtgctgtcctcatattctgcatgtaaactccttcttcttcttccttgttaattcgcgatttcagcctttttgtttgttctcttatacatgacctactttttgtgtgaagggttaacgaaatccaattcgatgagatatagatctccttgggaaaacgtcaacagttatcccctgacttcaaaggttcgtataaatagtttggtgatttcggatttggataaaagttgaaacttgaattagtattcattgttatcagatattaacccaatggggaaagttccagctattgtagatgacagacttaagctctttgagaggttctctttaacacaaagttgcttcctttgtatcgaaaccattgtttatgaataatcttaaccgttttcgtagtcacgctatattgatatatctttcctcagcatacccaagtatagttgatcattggtaagtttctctacttcgttttgacacatgcatgttcttgatttcaaaatgtaatcattttaacttttagtgtaatcattttacttttaggtacccgaatgatctttccaaaagagccaagattcactcagttttggattggcatcacaccaatttacgccctggtgcatgtattacattttgatattcataacaatagcgatgttaagcttatggttacgtttctgattacggttatttaacaatctctcagctggatatgttctgaatagcgttctagctccagctcttggtcttcctctgaatccgaaagcagctgctgaagctgagcagttactaacaaagtctctgtccactctagagactttttggcttaagggcaatgctaaattcttgctcggaagcaaccaaccatctatagctgatctcagccttgtatgcgaacttatgcagctgcaggtactcacttaatttcactgttttgtgcgtttttttaattcatcgaaataccaatccttgctatgttttggcttttgattgtaaaatttatgcaattttgtaggttttggatgacaaagatcgtcttagattgctcagcactcataagaaagttgaacaatggattgagaatacgaaaaaagcaacaatgcctcactttgatgagacccatgagatccttttcaaagtcaaagaaggattccagaagcggcgagagatgggaaccttatctaaaccgggtcttaaacccaagatctaagaacttagaacaaaacttggcaaaaccggtttcaggggtcagtc

SEQ ID NO: 1847 - DNA, 791 bp, Arabidopsis thaliana landsberg
tgtattttactcattttaggcatgtgtttatcatcatttagcttagttatcactcattgtatcatatcattttgcatcacatttagcttattttgcacacttaggtatttgggatcatcttgcatacattgcatgttttggtgtgttttcaggtgtagaaggagcttacaaggaatctactcaaccctctacactatcaaaccaagaggaaagcagcagagcaattcatttgaccccttttctcgatccaggaagccacagaggaggcaacaaacactactcgaccccctactcgatcctctactcgaccagttactcgatcaggggcaacccattccacaagacttgttgatcgttcaaagcgtttttggataaagttgtttatcttgtttagatctacattttggtatgatttcagtaatttctgggtttgtgttcttagttatgttgcttgagtagtgattagggttcttgaggatggattagattagggtaatctctaggttagtcaggtggttaagattaggttagatcccttctggattcgttggcccctatgcgtttttcactaactaatgttagaattcgaccctagatatccaacgtccaaaagacgttcaaatggatgcctaatttacgaattccaagagatttgtagattctagcccaagaggttggatgtttagactttttattgacttttgtatattgttgcttaagcctaccttgctatgtttcatcaacgagaaataagattaggaagtagtaaggttatgaggatctcatgtcac

SEQ ID NO: 1848 - DNA, 3765 bp, Arabidopsis thaliana landsberg
ttatatttctgtttaacaaaatttgaattacattagatgcagaaaaatctaatatctgattaactgcatgtatttggtaacaacagttaattgataattaagttatttttatctttgttaaatctttctacaatttctttatctcttgttgttaaaccaggattaacgacaatgatgctgagctgtagatttttaaacccagaatcaagatttgtctctttttaatgtacatttctcttcattacaacttttgtaccactagtacaatctacttccttaatattatcttcttttagacacacattttggtaaatgtttgagattagtttaggtttttgtattaagttgatgggtatttcagttttctcaaaccaaaacaaaattctaaaaactaataattccaaacaaaccgctatttatttttaatttggccgtttaatacctatagttttaaatttagaacaaaaatatcttacttattttttgttgtcttttaaaatcatcgttttttaaattttggtaatttcgaagtggtacttaacaactcgagtggtgaagatggtgtcttccccatccgagtggccagcgttttcaacttatttggaggaattaaagaccgataaggaggaattcacaaggttttctttatcttaaatttctcgaactgcaaatgtaaaggcggacaaattggcacgaaaaattcgtactgaaccgctttgttagatatgacttgaattgaattgggcccttaactttaggcccaatcagtttagggttaattagggtttcttttgtataagtactcttcttaacctaacctccatgtattctgtattcagttttctcaagcaataaaatatgtctctttgcccgtggacgtagccaacaataagtgttggtgaaccacgttaaatctgtgtcatgttctttacgtttttgttatcttgctcacatttgttataacaaactggtatcagaaccaggctacattgttctgtgttcgtcgtgcgaattttttgcataaaaagttttgtacagaataaggttctgaaaattccatgttttgtactctggtgagaaaatgtcttcaatgaatgtcaagattcataagttttctggaagaaacagtttcagtctctggcaaattaagatgcaagccctgttaaaacaacaaggcttgtgggcgccgctgtctaatgacagtaaagggaagagctatgctgctcagatggatgtcatggacaagaagccacactccacaatcatgttgtgtcttgaagactaagtcatcattcaggtttcaagagaaaccccttaaaccaataaatgaaataagttagagaatttgtatatgacaaagtttctacagaacaaactgcttctgaaacgacgcctgtttgcattaaggatgcaagaaggtacaccactcaaagatcacttagaaaagttgaattcagtattactagaactgcggaatattgattttaaagttgaagatgaagatgctgctttgcttctgttggtacctttaccactatcatatgagaactttgttgaatcatttatagtgaataaagttacagttactttggaagaagtcagatctacgcttcacaggatctactgctatagcagaaaatgacactaagtctcaatatgatgttgctcttgtggctgctggaaacgcccacaactctgatgtgtaggttctggatacaaggggcatcatttcatatgtgtccaaggagagagtagttctcaacatatgtacatgtagaaaacggctgcatcaagatggccaacagttctgtctgtcaggttgctggaatcggctctatacagatcatgacacatgatggcagattttgcacactgaacgatgtcagacatgttccgtcgacggagaaaactttgatatcactgagtctgcttgatagcaaaggtccaaaatattctggtggagacagaattttgcaagtctgtcaaggttgttataagtggtcctctgtatatactacatgggttcactgttataggttcaatgaacgttgcatcttcagagattcacaaggaggatatgactaagctatggcctatgaggcttggtcatatgagtgaaagagggatgaaaattttgtccaaggaagatcttttgtgtggccatgaggtcaagagtcttgagttatgtgagcattgtgtgtatgggaagcttcaccgtagtaagttccctaaggctgttcacataaccaaaggcacattagattatattcactctgattgttggggtccagctcgagttgaatctctgggaggtcacagatattttgtgtcgatgattgatgattattccaggaagacttgggtgatcatgctaaaacacaaaagtgaagctttcaagaacttcagggagtggaaacttttgatggaaaatcaaactggaaagaagatcaagaggctgcggacagacaatggtctggagttctgttcatcagagttcaatcagatgtgtaaggatgaaggggttgctcgtcaccacactgtcagagatacaccacagcagaacggtgtagctgaacggatgaatcagacattactggagagagctaggtgtatgctctctaatgctggtttagaaaaacggttctaggctgaagcagtaagtacaacctgctacttgataaatcgtgggccgcacacaggaatcaagtgtaggacacctgcagagatgtggtatggtaaatctgctgattactctaatcttaagattattggctgcacagtttattatcatgtaaatgaaggtaaattggagccaagagcaaggaagggagtatttgtaggctatggatatggagtcaagggattcagggtttggtctccatcagagaacaaagtgattttgagcaggaatgttgtctttgacgaagtttctatgctcagacgttcagaaaagtctacaactacagaagagaacagtagttttgataaacaggtggagctgacagctaatcagaaagctgatttacagaaaccagaagacagtaaggggctacaggcagcagatgggtcacctgacactatcaagcaagaatcaaaaccttactgtatcgctcaaaaccgaacaaagaggattggagttggaccaccgcaaagatacggttatgaggatatggtaggattctgtcttgagaatatggcagggtatgctttacaggttgcagaagaggtagatactcatgagccagccacttatcgagaagttttttctgggattgaggctgagaaatgatttcctgcaatgagagatgagatggaatctcactgtaaaaatcagacatgggatttggtcaaacgaccaccgggaagaaagattgttacttgcaagtggatcttcaagataaaggaagggatatcaccagtagaaggggttaagtacaaggctcgagttgttgcgagaggtttcagccaaagagaaggggtagactacaatgagattttctcacatgtggtcagacacacttcaatcagaatgctgctagcaattgttgcaaatcaggacttgggaactgaacaactttacgttaaaactgcttttcttgctggaatattggccgatgacatatacatgactcaatcaaactggttcccaacttcctataaagggatatcgcttctgtacgttgaacaagtctttgtatggccttaagcagtatccaggaatgggtccaagaggtctgaccactacatgatggaactgggctacaa

SEQ ID NO: 1849 - DNA, 7485 bp, Arabidopsis thaliana landsberg
cttaaaatcagcatccggaattctataaagcctaacaaaatctttttattctagccaactcaacatcaagaagctggggaatattccgatatactcatcgtcccatgtaattaatttctataaaatacattaataaaatactaaacaaccaacgttttaaaattgagcaagtgacaagtatattaccttacgatggctacgtccacctccaccgacatcatcagcacctactgtacctccattaccacaaccttcattagacatcttcatcaaaaacaaatataatgaattagtgatatttactaatggataactttaaaaatatataacggcgatggatcaagagtcgaattaaggaaacaaccataccgtaaattctcaaaagtacttatattttagtaatgagctttgggaacctatatatagctcaaaatttgtgaacgttgcagtagaaaaatatgataaacaaaatcaaataaaatatcaacaactaacgattcacgtggaaaacaaccataggaacgaaacaactttgtttgaaaaagtcaaatcgaaactaatagaatttgaaagaaaatctgttgaccaagttgtttagaaattctcgtggaaaaaataagtagaataaaaaatttaaaaataatcgtttgaattattaaaaaatataactcaactctaactcatgagatttttaatgatgtccaataatcttttgagttaacaatttttcaaaggacataactcaaaattgtaaatcaaccataacacatagtaaatcaaacttaacttcaaaaaaattattttaattcatgattggtaacatttttgagttatttatgaattatgtctataactaaacttaactcaatgataactcatgttaccaatcaaagccataatgttattgctgagttaagctaatattgtggctgagttaattcaacgctaagagtgagttatacgggtaatgttgtggttgagttaattcaacgttatgattgagttattataatgttgtatctgagttaatctacttagtgggcttggtgggctttgtgggttggcttggtatttttgcaggtggattcctggagggaaattctgctccaacatttgccccccagcccattgagtgagtaggcgaactcgatgagcggacatataggtcaggtaagattgtaaaaatattctagatgagatgatagatatgataagatcagtcggttttgaggataaactcaataaaaaacgatttaatttcagattcctgaagagaaagatattgagcagatacgcctgataagtcgatgctgacgtggacggctgagatggagcgtctcttcagcgcaccgcatctgacggtccagttcaggagcggggaacagatctctgcaatctcgaaaaacgtggtgatgatggcttctttaaataacctcccacatctccactcgttttcacatcaagtcacacgactctcaaggtaatttctctccaacttgactatttactgcgtttatttttcgtttttggagatagaaaaatttcatctttcttttgctatctccatcgtttcctttctctgctactctcttctctctcgatttgcccttttcgcttttcccatcatctctctcgtctttccccaccgaaatcaaagatgagcgacctagaggattcccagaacaagagcaatcatagttacggcgacgacgagagttcgtcagccacgaggtcggcggcgtcaccgccgcaagaacaaaggcgagtcctaaccctaggcggaatgggtccaattcgtatgtcgtcaaccagacccgacaagccgtataagaaaaaggctgccaagcaagggggaggcacgccgatgacaaacagtgacctggtcgacctccggaggagatgccaggttccggtggaggtacatatgatactcctatggccgccggtgcatcctgagaacgtgccggtcgggttgtgctgtgcttatgccaatttcttcgagaaatgtggcctatttttcccgattacggcgtgtattctcgagatgctctactgtctcggcctcgcctttccccagatgtgtccgaacttcgtctgccatgtgctggcgttattcacccatgctcggagagtaaacagagaattcagttgccatgacctgcttcagctctgccagggcaagaccaatgctaggagcgaccaagggacgttctacatcagcgctcgtcccggatctctagtcctaggcggtttaaaggcctgtcaggacaccaattggcgatccaagtacttcttctttagagtagatcgtcattcaatcggcaattttgatctcgcgaggatgaggaggacctggtctaccaacctgggtcagatggagacctgagtctcttgatttctatatttttagtttctttcgaatcgttgactgcttttgttgaacgttagtatcgatactaatgttatttttcttttgatggtttgcagaaagaaccaaggaggttactctctcagagacgaaattcgagctgttaacccttctctaacgtggtcagaccgactgggccacttttagcagagatcgtatcgtagctgctctcaccgcagctccagcagattccgcaatcgtccttccagcagtggacgattgaacccttggcttattgaaccatccatgtttccgatccggtcgtttactacgaccgcccacggtttactaaccgtttatccgtccggtctatggtggtcaataaagctttcggcttattgatccatccatacgatccgaactatatccttatcacacccaaggatccgtggattcatccatcggatcatcgtaggctagcccatgaaatccttcttccgtcggccttaggtttgctcacaggtccaacatccattttgtccatcggtttctaccgtggactttctcgttggttatccgtcgagtcaccctttggtcttaccgatctctgatcagtttcaccctttcgaaaggtcacatccgttccttgcatcctttcaaaatgtcacatccgttccttgcatctattgggtgatgctagctagttcatgctagcttgtcctggtttagctcacctagcttaggtagctagttcatgctagcttgtccagctcacctagctggttcagcttgaactttctcattcttccgactaagtattttagtctgttgctcgaccatggtctagttttcccctaaaacaaaccggcctctttatgaacgcgggacgcggtcgttacaagtctaccctccttaaactgaattcgtcctcgaattcggcgtgtgtaagatcttggttactccctaactcgggacacgggcgttacaaggtcgcccttccaagagaggagagggtagaacctgcggttgctaacccggaggaagccatgtccgcagacaggcagtcctcgggtatgtcccaaggcggaggccgaggatcaagaggtggggacaggtcctccttccaaggtccgactcggtctcaggaggtgagacagtcttccaattctggtgggggtctgcgggaagcaggcctttccactggtcttacactcaagaccgtgatcatccgatcgttgaggacgaggccgggttggcgaacctgcttcgccacatcaaagggaggaactgccaaatgagcggagtgaagaacatggccgaggcggcggcttatgctgacatgatggcgaaggagggccaggtaataattgataactgcctccttctaattccattcttatgtcagctctaacctttggcaagtgatagctgccacgaacaagctggtcgctctctatgagcagcgtctgagccaggttccctcggcgagtgagctcgaagaaggaaagaccctcatccgggagctgacgtcgagtgtgaaggctggtcaggatcgcgaagtctcgttccaggtacacctcggttttgacttgtttgtaaataatttgtcgatgattcgatgattctaacctgattgttatttcaggcggagatcgggaggctgaaaattgagttgtccacttcaaaagacctcgagaaaggttatgctgagaagatcgggttcatggaaatggagttcggggggttgcaagccgacaagcagacggcgaggagccagattcatcgcttggagcagaggagggaagagctctccgaaaaggtgatggacctgacttcgtctgcacaaggggcgaagaaggcggttcacgatgctaaggttgagctggctgctgcgtattcgatgctgctagatgggatcaaggagaagtgggtcaccaaaaaggagtacacggtgctggagagtcacgcggctgaggtggaattgaacttggctttgatcgactatatcacaaaggctgccatcgatttgaccgtggagagacctcggctgcaggcagggctggatgacctgaggcgcagtgcaaatcgaaggaggtatcagacatcactctaagcaagttggatctcccgcaagtttcagagatttcgatggtatgtctgatggacgtcgacgagcaagggacgccaattggcttggattagttcgggagcaacaaagatgcgtttctgggaggtctcgcagagggttccggaactgtctttgccacgccagccggggaactgagggagtgatcacttacgctcctcatttgttttaagcttttatgtttttatttcagacctagtgcttgggaaggctttcatcctgtcgtttattgctttttgaacttggtgcctgggaaggcgtttatcctttgttcggttaagtacttggatgcctgggaaggcttttatcctttttagcaagtattttcgtttgagtattgatactttatcgattttggtgtatgatcacctcgctttgttcatgttccggataataattggacttgtttgagtccaagttatttcggatgtgatatggtatgttcttcgtaggttaaaacttgagtaagtttgagttgttttgtctcgggaacctgttgaaatggggtcacacaagggacctgccaaatttttgggagctgggcttgaggtatcttcagatcgacaatgaaaccttcggttcttccttatttagtctgttctgtgttgatactgaatgaaggcgttagatatgattgtagtaggtgagctccgatgaagtcgaagtgatgcgtttttatatatgaagttcactatcgactttttggaagcgagatcacaaaatggatccgccaacattcaggtgttgggctttcggtatcgtaagattacaaatgagttttaaatcatagtgtaaatgattgttttgcgaaacatgatatcgagtatcaaaattttcttttattcttatctcgaaattgttaagtacaaatgaggtaaagcaagcaacgatctggtcgtttggtcatctaggagagacctgctcggtatcgaggggtggtagaactgtcaagtgagcagctgaccttcgttgatggaagatgtgatgtctgttttccttgttgatgtttcgtctctcaaacggaagggttgagatggtagttgcgttcgcggagggaactgcctacatacctggttaggggattaggccattttgtaattcgattgaagtggtggcagcgctcttggggggagctgcctacgtatcctgccaagggatcaagccttatcgtagttcgattgtttttgagtacctattcgtggtatttcttgagatgcatgggattccaagaccgtaactcaggtactccgttgataacttttacgagcttatagacgccgtcacgtaccacctcggtgattcgatagggaccttcccagttagttcccagttttccagggtttagctctctcgtgttgctgaacacttttcgtaaaacgagctctcccacttcgaactccgaattttgatattggagttatagtagcgggcggcagcttgttgataattttgaactcggatcattgcctgatctctgcgttcattgatgaaatccatgttgtcctgtaacatttgcgtgttcaggtccgagttagcaggactggcggtccttctcacgcttggtactatggtttcgacagggattactgcttctaaaccataggcgagagagaacggtgtttcttgcgttgatttgcgaggtgtagttcgatagccccggagaactccgtggagtatgtcggaccacattgatattttggcatcaagtattttcttgatgttgctaagtatagctttgttggcggcttctgcctgtccgttaccttgtgggtaacggggggtggatgtggtaagacggattttccacttgtcgcaaaatgcggtgatttttctcgaggtgaggttagtcctgttatcgatgacgatctcatatggtatgccatgtcgacatacgatattttcccacaggaagtcctcaacttgtttctcggttacgtgttggaaggctttagcctcaatccatttggtagagtagtcggtgaggacccgcatgtttttttgcctcttcttcccaccggaggcttccatgggaccaacatccatggaccacttcatgaacgggtaaggagaagatatcgaggacatttcctcgggaggttgatgcagagtagatgcgtgtcgttggcacttatcgcacctgagtgagtgagctatgcaataagataggattgttggccaaaagtagccttgccttttgattctgagggcgagggtacgtccactatagtggctaccacattgtccttcgtgcatgcttttcacgaggtcttttgtttgttgcccgtaggtacacaccatgtagggacctgcgacgctgcgtttcataagactcccttccacgatgtagtaccttgcactctgggctttgagttttctggcctcccacttgtcgggaggtgtgatccctcgttcgatgtaatcgatgattggatttctccagtcgttgtacgtttcgggttcgtacggggcaagttgttcaggagtttcgtactttggctccttttccgtcgcactttgcctctgcaactgccacaagggctctagctgcggcggtggtgcttcaggttactcgtgtgaagttgccgggggttcagtcccagcgtgtttgactgttaggtcgatgcttgggtattctattcctttgaccggaataattcttttgacaaaatgatctgacgtggaagcgagagcttccaaggcgtctgccgaggtgttttctcctctgggaatcatggttagttcaaacgattcgaactgctaggccaaggttttgactagttcgaggtacgcttccatgcgctcgtctttagcttcgaattccccgtggtactggcgacgggttaggagtcgctataagagtttattttgcggatcctcattccttgagctagtttaatgctagctatgagggcttcgtactcagattcgttgtttgatgcattgaatccttgtcagaataattgttcaatga

SEQ ID NO: 1850 - DNA, 542 bp, Arabidopsis thaliana landsberg
tttgtctgttccacaatagagcgtaaaacgccgtgccgttgctgtttccacaatagagagtttatacttcgtgccgtttttctagacttctcttaaccggctggttaggccaaatgctccttcttcagtcttcaccaatcaaatcataaccggtccttaaccagctcagttgagatcacaaatatactacaaaatgtattttatatttatcgtatttgttcatcaaataaacaaataagaatggaccggagcaaatcataatgataatcacattcatgagcgcaaacattacaaaaaatgttataccaccaacctgttgattttctcaagtaaacaatcaaaagtaatatcaaaagcatctcgaaacttttcaaacttagcattggagtctccatataccaaaccaggcaaaagctgttgaactatgtaacttttcatatcctttttctcctttagagtctttgccttcaatatctccaccacatttactctcttttccttcacatcttgttcgcttatatacactgagtacttccgatgat

SEQ ID NO: 1851 - DNA, 2137 bp, Arabidopsis thaliana landsberg
catggcacttcaaactacagtgtctaaccattatactagttagctactcactgatcaaccatatattttcaaaatcaagatgaattcacattcgcacacaactcttgagtataacttgacgagtaatagcgatagtttgcggacacgacgtttccagctaagtatgaagcttcctagcatccagaccgtacacgtggtgggacatatgaatattataacatatatacatgttttctcgtatgtgatgaatattaagcagttgtagacttgtagtaatcaaccatcgtctcggatcctcttatagtacgacatagatcgtccatattttttttttattattttgaactttagaaatctaccaattattaatatcaaatattattttcagattatctcaattaatgtggcactaattatttataatacacaactcatgattagaaatgcaacagttcatattttgaaagcctttgacccaaaaaaaaaacacacatttattttgtgacaaaaatttgtttgtgcaagaacgtgtgtaaagttttttgaattcatcaagtaatcgatataacctaattttggcacacaaaatcttgatttgcgtccatctgcatcagaatttacgaaagaacagtgtgatacctttacgtacaacaccatacgaataaaaatggatgaatgtctacataatatttttttttaaaaggaaaatgctatgccggtcaatttctaaatttcaaaaggactgagacatacatgttcgattttttctatacaaaatcattgaataatcaaagacgtgtccggccaattcgaattatacaatctactttattatatacatttggagacttgaactcgggttagtatagggcactttttgctggaaaaccatttgagctacctgtattacattgtttagtagtagcttataaaatatttatagaatttagtatcatgcacttgccccacctgcctccaacgtgggtccgccactggttatgtatgatgactaaattatattctgtttaatgaattattatttagacaatagatttactagacataatgagacacccaagttagatatattttttgtgaaaaaaacttagatatatttttctctatatcagaaatcgtttaaaaaataaagcaaaaaactaaatttattttaaccaatcatcattgtttctatttttactttacttgctttataaaaagactaatcatttgtttggttgttttaaaggtgaataatgttttttgtttacagttgaaacaaatgaaatcgaacactgttctacacattgtggaaaaaaataatttattaactcgttaagaagtcaatggttcaagaagcccatgatgagactatggtccgaatgataaccgcgatttttgttgtatggggaaagcgttatttcagtgcggtacagttcaactgcgatacgtgcaagaggaatataggtagtgaatggggacgacataaaagcggaattcaaacaaagttacttcgaaaaccgcattgggtaccaatcagcaagaaaagtacacagtacatttttccagaaaaataataatataaaaagaatacggatttcaaaggtaaataatgcaaggaacgcttatcaaaacgcagtatcctctaatattctgcggtttctggaattctacagtggataatatatataatattttttttttttactagtttcacttgctatatatatcagtagaatctgttggagaaaacacagatacacaagcaattgccatgacaaattatactcttaagaatcccactactagcggtagagagtaaatagttgaaaaatttaatctagcattcaatatggatataacttatggtttcttaaaaaacaagcttgatgaatttaaaaaaatttacaagaggtggaaagctcttacgaataaaactggcagattttgtagatgtaatgacagagattaatataaacaatagagattttgatcatgatttagatggcatagaagcaacagatataacatatggagaacacatggtgcaaataagagacaatattgcaaatatgttatgggaaaatcaaagtaaaagataatatttttttaatgtattgtaccttttttgtgataacat

SEQ ID NO: 1852 - DNA, 2708 bp, Arabidopsis thaliana landsberg
aacggaacgaccgttacacgcgacgcacagcctatgggtggattaacaagatcctgctaatgctagttgactaactaacatgacaacagactcacatgctatcatgcattccatcctatatgaaaaactttactaatcaaacaactaatcgtacttaattactactaatccttgtttagctcaccctaatcatgcttaggaaatactaatcctaattagccattactaatcataattaacaattaataaacctaattaactatcttaatcaaggattaagcaaataattaagataagtaattaaaattaacctcctaagctgaattaaggaaataagtgaattaaatatcctattcacgtgctacttatcgtgacttgagactcacttggattttccgagcggtttaggcttccgaaggtttctcagcgaactgggattttctaacgattttagatctaggaacaaatgggcggaggagggagtatttataaggtcctaaagtcggctattatgtcggccatggaagcacgaggtgaccttggacgaatcaaattgcggcagatgttgtcccacaggcgcttcaggacactaatcggcctctgattggttctttcgagtttttcggataatcatcattcaaaagtggataagctcgaccctaaatggataaggattatcggaatgtagataagcatcggacctaacggataagcttgagccactattcaatcatggccgtccattctctcatttcggcgaaacctactatttatcaccaatatctcaagagggtccgtgaaacaattcaaggcttgcttaggactataatacgttccatgccagaattgaccgagcatgccagctatcgtcactcatccgcattgtccaatcaatcattttgaccatacacgacccactctcatattggactacccgagatcgatttccctcgaccctctaagtttttcccgaccctttaaggtttcctaaaccaaaacaaaggttccttaagctacactagttcttggggtttagcgatagtcgcatcgtagctaagcttggcccgtcagatggagattcattcttttacccatgtacttgatcctattcaatgctccttacccatgacttaccacactaattggcccgactgatcttgccttcccttggcttgatctcgcattttactcgacagaatgcacgttcgaccgtccgggtcatagtcaaggtccgaggcattatacatatggtcatcatatggttaatttttacacactggagataacaaagaggatgaaccatatatattggagtctcaagcaagaatggtatattatgtataagatccttcttagagtgattggaagattgcagttcatatatattccgcatagagacatgtatgacatgggagatatagaacaaccgaatgatgaatttggccctcacaactccactaatgcttcctaagaaaatatttataatgtcggcatatgtggctgctagtaattgtttctccataatcataatatttgtgggatctttaatcaaatgtcatacaaattaggtgtatttaccggaatcttgtagaacatttttttattactatcatatttcggacctatttggtatacccatcgtgaacctactaaacgttacagaaaaaatataattacaaggaatgccattgtcacgtcagcaaacccgcgtcgccacgtcagaaataattgacgtgtattaatgaactcgactgttaggagatacagcgacagttacagctgagtttagggtatgttgcgtttgactaaagacaaaatggctgagttatgacaaaacgacggaattatgagtataatttagccatagttatggctgatttataaaatatgtctaagttatgagataatccagcctacgttacggctgagttaatgaaatttgtctgagttatgagaatttcaagcataacccacacaacgttatggctgagttatgagaaaacggctaagttatttcctcgacacggctaatttatcattttccggctggctgagttatcaaagatgccttagttatgggatgtcgttacggctgagttattttcgagtgtcataaatcagccgtagagagctggattagcggataacttggccttgttaagcctgacttattagcaaaagattaattactataatatcatgcaattacaaccgaattattaaacgatacggctgattagttgagttcgaacattacacggctgacttaccttttttaattactgtaatagtattcatgttgcgactgacttatagatttgcttgatggttgagttatcaaatgttcgtttggtggcttagttgtcacctcatcaattcaaaacgacgtcggatgtaatattccatgtcatcattccatgagagcatcatcaaaggacaaaaaaatagggccaaaatttttcaactcgtcttcttcacttgagttttttacatcaccggaacttctaattcctcatcgttttccttatttttttcaatttctttcatccttctcctgatatggttgatccggttccgtaattgttgtttccgggaattgggtatagaaacacaaaaacatatttaacaccgaggaaagaggagatagacataagcagatagatgcggaaacaacgcacgacaaacttgtgaagttgtcgctcgatgat

SEQ ID NO: 1853 - DNA, 6471 bp, Arabidopsis thaliana landsberg
  unsure (1)..(6471): unsure at all n locations
cgcttagctgtgcagggaaaaactaagatagcatgataacattgttcgatttggagagatatgcaacagatcggacttgcatataacacgagatggaaaattaccggttccgaagtttcgattgactccagagggaaaaaagcgttgttcaaatgggttacatctgaagtgaagttttcagatggatatgtgtcaaaaaaattaagatgtgtagggcaaggccaaaagttctccggtatgaagagccatgatatgtctataatttgcatgttttacacattcttttatcaccattttgagtctagtttcatccatctttcatagcattcatcattatttttgtacattttgcatctttagtcgagtctaggactagatcaccagtaacagagagggaagcagtcagctcagcagtccatcaagacacttctactcgatcgcagaggagaggaagcagcccattcctgacaattctactcgatcgcagaggcgaataggcaatccactttgctagtccaccagtatactcgatcgcggaagagaagaaccagtccatcctgatagctgacacacatcctcgatcacaaaggccaagaagcagcccataccattctgtctaccaacctactcgaccaccacctcgaccctctgatcaatccgcattcaaccagacaacctgaggaaaaaaaagaagacaagagaaggcccattcgaagcccactttgaagcccattaggaagcctgctttgagccgacactcttgatcatatcgtccatgggccgtttagtgggctcgaagcccgctttcttatccttatcgttttttagtataaataagcctctaagggttttgccctagacacccggagacttacagacccttttacagagattttctgcaacttatttagcagccgcttttgattccttcaactttgtattttgatttttcttctaagttattcagattttgctttcatttgcttattcatctttgtttcattccctttaatcttttaggtatgcaatcttcaatcgtttctatgttattgtctttaagcatgttgtctgaggagtgattaggatttctgaggatgggatagagtagttgtggaactcttggtcgaatctgttggttaagtgtagatttattgaatcccttatggattagttgagtttactgcttattcctttctgatcaactggaatccagtcctagacgttccagcacctagaaagcatttaatggaacattggatctactaattccagtgataatcgtctctatcccaagggattggccgtttagagcggttattggctttaacattcggttcttattgcctgcttagttagagatcgctaatgggaattaggtctgtgtctagctatgcttgaggatttctatcacgggagtgaattaatctgttgttgaacctattgtctagggatagcttaattgagatttgttaatcaactgaattgatcaaggagaccatactattcgattaccccatccttagaaatttctcatccatttgattgcctgttatcatttctgctttgtcattcacttgcctgctattgccattcctgcttttagtttcatttcatttctgttattgcatactaggactgttagaaccaaccaactatctgcttggcttgacttagagctttctgatcatatctcatctgtttgcatcacaccggattggattgacatcctaaaatactacaacgacaagatagtgttttagggattaattgacaaaaatcctactatcagcgaagtgaatccagaagggttaatcttaaccacctaacaaacctagagattaccttaatctaatccatcctcaagaaccctaatcactactcaagccatattctcaagaacacaaatccagaaattactgaaatcataccaaaatgtagatcaaaacaaactaaacaactttactaaaacaacaatatgcaaaaacaaaatagattaagagtaattatgttttaaagattcaagaacacaaagaaaaactaaaggataaaagctggatcctttggacaaaccccaaagtgatctatttatactaaaatgttgaaaaccctatattcactagaagacaagagacttgaggtggtttgggagaatgctcaatcttggggattgagttaagagggtgctgcaaagtctgcgcctttgtgtctatgctccgagtgatcaattggtcgagtagatggttcttcctctcctatccgtatgctcagatgtatggttgagtggggaatgaggaggatccgaacacgctttgatagctcaacaagtcatgtaatttggtcacccttgctcgagtaaatgggtcgagtagaggatcgagtaggaggggcgagtaaatcaatctactgcttcatttgaggctgccttgatcgagtaagagggtcgagtaaactgtagcctcctctgtagctgcctggattgagtagagaggtcgagtgaattgatgcctcttctatagctgcctggatcgagtgaatggatcgagtaaagtcctttttagctccttctgcaactgaaaacacacaaaaacatgcaatgcgaatgcaaaataagctaaaatggtgcaaaatgatatgatacaatgagcaaatgcaaagctaaatgatgataaatacatgcataaaataagtagaatacagtgttatgagacatatttcaaatatttaaggttcaaggaagaattatgagttttcaagcaaaaatgagtagtagttgatcaaattccgtttgagaacagtttctgtgcttaaggtgtttggcatcaagccaaggtctttccgatcacggcatcaaggtatcccggtgtcattggaaagctagaagagtcaagattaacgtcgaagtcttattgaaacaatccatcaagccgtttagaagtgatggcccgaagagtgaagacatgttccagaatcgcggtttggaaataatcaatctaaaaccgccgaccatggagacttgaacctgggcgtctcctcgagttttccaccgaccactagggcgcacaaccactccttccccttttcttgccgcggacttcaatccctccttctaccctttaacccaatgaaggcctaaaatactaagtttaggggaaaccctaaagagacccacgaaatttggcagcctcctgcgcctcccttgccgcctcttttgtcgagactctcagctccattggaattctacctcatcgaatcaagctctcaagccgtcgtccatcttactatgtttgtttatcttttctcttcttctcttctctattctctatttgttaaaggatgaagattcatcaactttggatttccaaagaaggtttctaaaccctttatatatactaattaaaacaacccgacccgttttcaaaaaaaaaaaaaaaatattctcataaataatttattaatttccacaatcaattaatttcgatatcaaagtaaaccaccaaattcagcaaaacttattcaacaaataaactacaacaactttccaaaaataagttattaaaaataaatcttaaccatttctaaactataatttaaaagtcgagatttattaaaacaaaccagcaaattatcgataacaatgcaattatcaattctgcatttattcataaataaatcataaaattcgacccacagagaccacgaaaacggagtctttgatcatcctcctctcctcgccatgattccacgtcacattttgtctatacctgcaccaagaaagagatgcatacatattttattaaatacttagtgaggcgatcctcccatctacgagctatacacacaaccagatcaaaaattacataattatgaatcaaacaacccaatgaacattaactcacttacacaaccatcccaagaaataaatatggatctataaaaatcctgcctagatatcacaacaaacaactacataaatccaatcgcttagataagctcatggtcacgcactcaactctgataatgaatgattctggacaaggaacaaaattatacaaccaacgatgacagatatgtcaataatttgcatgttttctgcattcattcatcgtcgtgttgagtctagtttcatgccttcatcactattgcatatcaatttttatcattcttgcatactttgcatgattaggatagctttgcatacatattgcatttctgagttattttcaggtgatttggagctgtttgcgagcaaattggaagaaacaagcctgaaccagaagacatactcgaccaccaggtcttgtgcatacagcaccatactcgaccccctggtcgagttgaatttggagccattcttcccatctactcgaccccaggtcgagtaacctcagctaaggccactcgatgacgccactcgaccccctggtcgagtatcacttcgccacaccacctgaccacattcggtcgttcactctaccacgttactcgaccccctggtcgagtatcatcactcaccaccaacaccatcactcgaccggacactcgatcacatcttcatggtctactcaaatccacactcaaccagacaagttgagcacaaggaagagaagaggagaagacgaagtgtttggaagcagcctggacctccatcagatcacgaagcccatctcggcccattatcactctatgggccaggtgattaggttattggcccgtctactatcattttatttcgttttgtataaatagatgtcttagagttctgtcctgagacatctagtcgacattgagtttttgcttcagttttattttctgttttactctgctgcaccgcttttgcttctgcaacctgtaattcgagatttttccaagttatttagattccgcatttgatttcatctttcatcttgtttctctactctttatctctttacttatgcaatattatcatttatctgcgtttatgtctttgagcatgttgtctgagtagtgacttagaattcttaaggatgggatagagtagttgtggaatccgtagtctgtagaatggttaagttttgtaattgattgaatcccttcaggattagttgtgtttactgcttatttctttctgatcaactggaattcgatcccaagcattcccgcacccagaaggtgttcgattgaatgcttgatccactaattcctgagatattcgtctctatcccaagggattggccgtttagagcgtttattgactttatcagtctgttcttattgcctgcatagttagattccgttaatgggaattagtctgggctatcttnnnnnnnnnnnnnnnnnnacgggagtgaattgatctattgttgaacctgttgtctagggatagcttgattgcgcttgttaaccattcgaataggctaggataccactttattcgattaccccatccttaggaatttctcgtctatctgatttctctgttttatcgttatcgcttaatcgttctcattccttgtttctttgtttttgcaattactcgatcaacttactcgaccacacccagtgtctagcaacagactgtgcagtcgagtacgattgtctcatttcctgtctgttactcgaccagtatactcgaccacacccagtgtctggcaacagactcagtcgagtatatctgtttcatatcctgcctgttactcgatcacatcctaattcgggcatcagcctgttgtggtcgagtgattttagtaattatgttattgtttctgttttctgcatgttcacttaggactgttagaaaccccaatactgttattgcttggcttgacttagtgacttctgatcaaatctcatctgtttgcatcacacccatttgcattgacacctaaaatactacaacgacatgattggtgttttaggattaattgactaaaaacctattatcaataggcgaattggagggacatggaacataagaaaatgaggcaatagtggaggttgatgatactcaagattctgagattggataacgtgatgaatgtgatgataggagtgatgaatacgttgagtcaccgcctgttgtaaaatctagtcagttgataaaagaatgggaagacggtattggtttgaatttacaaaaagaatttccaagcaagacggtattgcaggaagtggtagacaaatgtgtatttgctaacagttttggttatgtttttaaaaagtctgataaggagcggtatgtcctaacatgttctaaagaaaattgtgattgacgtatacgagcttcaaatattcggaatataagtatctactcgattagaaagtagaaaaagatgcatacttgtacccggataagtaagagtagtataaggatgaggaagaggaaaggtacccttgaattagtcgctgctcttcttcatccccctttcctggacaaatggaaactcaagacaaaaaagttatcatggagtttattcacacgaaattaggtgt

SEQ ID NO: 1854 - DNA, 1274 bp, Arabidopsis thaliana landsberg
aaaaacctataattaacaattataatataattatataatcttaaacactaaacaaaattaacaatattaaaaaaaaaaaaacttaaaactttaatttttttaaaacacatttcgattctttcataagatttctctcgcagtactaccatgggtgaaatcttataattgacgggtttgaatcgatattaatatgggatggtgtactacgggtgataatttagaattgactggtttgggttgataataatttgcgatagaattaggagtgaaatcctagaattgacgagcttgatttgatattaatatgggatggtgtactacgggtgaaattttagaattgattggtttgggttgataataatttgcgatagaactaggagtgaaatcctacaatgacaatcaagttattattatataattaaatactagcacgggtgaaatcgtagaattgatgggtttgattcgatattaatatgggatggtgtactacgggtgaaatccgagaaacaacaatcaaaatacaattatataatattaaacatttaacaaaataaataaatacaacttaaaactttaaaatttgagttataaaatttcgtctcgcggtgaattatacatttaaatcaaacaatagcataaatttattaaatcattctacaaaatattcaattattttttaattaatgaaaatatagacccgcagtataccttggattaaaatctaataccgtacatatccgtagttaataatttaaaacagttaatatgggaaggtgtatttatttttctaaaaatggaatgcgtatttactatttaggtattgattaattctcttcttttaaggcttagaaaagtataataaataaattaaattatcaattaaattatttcaatttttaatataagaaaactaacgtccaaaaaaaaaccaaaaaaaaaaaaagaaacaggaaaagaaaagaagtttttaatttttgtcacgcgcttgtgtcgtgacgtgtaaaacatgccccgttgacaaaaagggcaatacgagtaaagtagaaccatcccgtttgtgtagtattaggctttttaggtggggccaaggcttcatttaaatctcttctaaaccatatcccggttttattcactttttatttagggcccttcctttttgaagttctttaaagttaaaaccccttaatttttaaaaaattttccaaaccccccctttttttttttcccttattttcattccagaaaattttaaaaaattattaaaaaaaaccttt

SEQ ID NO: 1855 - DNA, 5194 bp, Arabidopsis thaliana landsberg
aaccgataacggacctcagttcatctccaaacatttcgattttctctgtgtacgtaggcagcccgtacttagggtctgacttgatccccacctttgggtacgtaggcagcccgtactttgggtccagtctcttcattattcaaataaaaacaaattttctttcttgaagcaaagattttttatcaatttctatttccgaaacaagcctcgggtggatatctacacgttcaaaccctcgcttcgaatatacccgaactaagtccgagacttgggattcgcggtcataaatgacctccctactaacactgagtctagctcgttagggaggtcatctttgttttgcttaactcagttttttatacgaagagtaaaccgagctcagctcgtaattcggaaaataaactagctaattcaattaaaataaacggtcccagtgacctccaaaatcaagtacttaaaaacaaaaaggcctccgtgcccaacgtaaagttaagtacttcgaacaaaaggccttcgtggccaaataaagcaaattcgagttttaaaagaaaacaagtggggtccacttcggtccaaaacaaccccattattccgcctgctcggactctttttcaacatcgaccgggaacatagccacgattccagcctccgaggtcgaacccttgttggaacccctttcgttgatcgctatcgcttcatcttgaggagcgctttccgcaatcgtctccgggggagtgtcagctaggagcgaggtaagctcaacagggtcaggtcggggagtcttcggttcggtagctcgttgcacgaactttgcttcgttagcgcgaaccgactcaagctccatagcgatgtcgggaatttcacccttttgaatctcttcgagcaattcccggtttgccctggtctctgctacccggaccttcagcgtttcaacttcttcggactcccggaagaagttcccatacttcgacgagaactcgtgaaaccgagatttgaccttcttcctctcttccttcctggcgacgtcaatttttgtggcttgctcctcttcaagtttctttagcttctcctcgcgaaccttgagttcagctcgggcctggctctcgttgtcgaccgcagcaagataggcatttttacctacttccagtttcgccatgagatcaatattgttcacctcgagttcctggacccgcagctcggcgtctttcatccgcttcagcaccatgctggccctctccaccgtatgagcgttctcgtcttcatttcgcctaaaagctgtcaagttcgctatccttgtcagaaagctgatcttcgtggctgcagaagacggagttgaattccaagattagctgcaagatcaaaggtgacgttagtctcggttttacgtcggatttcctggtaaatcaaacgaggcttttgccttgccgagtttccgagcgaagcgaagttatccttgttcacctccctcatttcgtcgaagggggcgatggcagaactgggggccacgagagtcctcatgatgtcggcaaaggaagacggggtagctacggcaaaagcataacaatgtgagatgccatagtataccgtcatgtcaattcggaataaaaatacgttctgggggagtgctgcgaggttccgacctgcgagcttcagattcccgagacgaaagaacgaggcttggaggaacctgtttcgggtcttctttatttttcccgcaccagtattcttctcctcaagtcggggacgagatgagcgaggcgaatggcgggagtcgtctcacgaagctcgttagctcgtccgtctcaagtagctcgtctgtctcatgtagctcgttagttcgctcctctttgtcaagctcttcagctcgcctttaagctcttcccatcactcagcgaccatctcctcgcctagctgtcagctagtcagcttgtccaactcctcgtctagctatcagctcatccctcgactgcaaaactcatctacctcctcgcctagcggcagttcgtccattgactgcatagtccacctatctcgtcgcccagctcgtctacaccagcaaacaactcggtttgtccaactcgtctctctaccacggttcatccagctcgtcgcacatttgccggctcgtcaactacctgccgacctacctccaatgacggcctagctcacttattctaatatgaactacgtgtggcttgatccctttctaagggtacgtaggcagccttttacaaggttcagctataaaacgaataaactctattcttcgtcggatatcaagatcgttttccggcctcaagctcgtctttcatctacaatcggctcgttcttactccatttatgcttgttgatgaaatcatcctttgtaatccgtccaattcgcctaagtcgcgggctcgtcattaatagaaagattcttcttccttccctagagatcccattttcgtacttgtgtgattcgtgcatcaacagaaaacagaggatattgtttttcttttgcgattgggttgtcttggtagagtcaagtataggagaggtatttatagcaagtgaaagtgttcctctgattgaagcgaaaacggtgtaagttcgtctgcgaggaaaagatgtaacttttaacatccaaggggtgcttacttgaacgatccgttgtcgttatgctctatgacatatttatttgagaatattaagtattgagttggtggtgcttgtaatattagatatataattcgtctgctgtggtttatagtcgagttatttatctgtaattgttatgctaaatatatgttctgtccaggagaacaagtccaaagagaaatgtccgtttgaaatttattataacgaggtgaccaaacttatatgaccttagaggattatcaattggaattcatttatgctgaacgaacaaatttgatgggatttgaccttttcatacgattaaatagtgtataaatgatgtattttaacaaaaagaaaagcagaacatcagaaatgaaaaaggaaccacattgtctttcaaagtttgggactatctgttccattctttgatttgtatcattcatgctctccatacagctccgcccatagggtagatctatagcattcggcagctaaattctcatatgctattggtttgtacattacagctttcaaagcatgtagatttttggcttcaagatattttgtgaagaaatgataataaatggaatgcggcatggaccaccacatgaaataacgagatttgtctatgcggacacaactcagtgtttccttggaatacactgcagccttaaatgctggaccagccataaccaagggtttcaaagcatccacgccatctttggcgacgtagctaacaattttagcaagtattggtgccgggatgaaaatttcagggatagcagcaacctgagataaaaaaaaaaaaacatatgcagacgataagtttttgtttacaatgaatgtaaaacatagaaaaataagtagtttagtttaggctgaacaacctttttgacaccagatggtaatttattcttgtcgtattttgctaacttgagcataatttctttgttttcaagttgaaatggatggaatggggaatggaagaaacttcaacaaatcgtgagtgtttagtaactgtatataattatgctcaacacttgagagctaaccataattatcttatcataataaacgtgataattaaaactaaaaaaaaaagggataatgctctaactataattgttctctaaccataatgtccccggatttgtctcgaaccataataatcccatttttaaacctgattgtgggaatattcacgttatacaacagtatctcaatatttcccgtagaaggaattttagatttgtctttcatggtgaaagagaaagataattgttaatgtatccatattaatccatccacaacataactgtattaattcgtttgtctgattgaataattcactatgactggttttaacgtatttgtaaacataattagctcgaatgatttaccaaatcaacaatagttcaaaatactcaaaattatttattttttcttcgcattgagttaacattttgagtattttgaactattgttgagtattttgagtatacagcaatatagaggtaagattatcaatatggtaaagaacagcaaaaaacatatttatagaatccagagttataagcattcaaagaagggggaatcaacgtttatattacaacaggattgtagggtgacattccataactagtcaaaaacataagatgaatagagtggacatacacatagtttatatatgtccatggcatattgacgcctaaacgcgtcgacgtgtttgtcagtaatttcacttgcctgggtctcgaggaacttcatagcaaccgggccacagtcaccacttcgcaaattcttgtatataccatcaatttgactttagccaaacggttgaagaccgtgattctgagaaagctcaggcgtacagtacctttggatgaggtggggcaaaagattgacaactggctcaatgaatctttttaccttagcgtcgtcgtagaggtctgtatttgggtcaagaatttcaacgctccatatgccaagattaattgaaagtccaacccagtggcaatcattccatatcatgggtgcgtaaatggtatctatgtccttgaaccattcaattttggatcctttgatgaagcgttgcatgttctctgaccaacgaacgcgtgatttcatcttggcagcattgaaggctctgaatttagcttgtagatggcttgtgaactatggatcaacaaaagcagaacgatgattatcaagtgtagttgtaagcctccgagaaagtaatgacaccaaaacctccatctgcttgggaataaaacagttacacattagtatatcttgataaaaggttaatttgtactaggataaatatagtggactacataccagggttgaaacccatttatgaggtttggcaagatcgacgaggaatgagttggaaataaggaatccacacttggtaacatgttcactatgatgtaaaaaagtagcattagtgaagaacttgatgatgaatgttgtggaaataggaaaaatgaatgctaaaccatacaaatttggagtactggagagggttttgacaaactgtgaataattggtttttttaagtgttggtaaaact

SEQ ID NO: 1856 - DNA, 2967 bp, Arabidopsis thaliana landsberg
  unsure (1)..(2967): unsure at all n locations
cctaactatttatttagttggcatcataaacatcatattgaggtaactatattagcatcttgatcgctgatactgtttattttgttagaaaatatacagattaaccaggttaacaggatctatcaaattatctgtttatgttcctattttataaaatttatctttttgcaattcgtacgttcctaataatattagcggataactagtctattatgttgatcatatattcgggtgttctgaattgtatttaaatattagattttcctgtaaacaccaatagcagataactatgctattattgttttatcttactatgtatttgaagattaggttatccttatgtttaaccccaatgtcaatttcttttcctaataacttagtgtttaaccgcatatcataactatttagcattgagtcatcgaatatctaggaattaggggctactactttgtttatcagaatatctgtttggatcgataaaatatgatattataatttaacatttctacttgaaaagtggatgggttcgataatattacatttagcgatcagtagccatacgtatacacatttaaaatttctgatcgcttaaggttccttatttatacacatctccagggcatttcttgttaatcatggcagcatccatcactttcagcgccaaaaaacgtccttgaaccatattttctacggaccctgcactcaaaacagataatataaatattccataatatagtcattaacagataatatttgacataccgatattggtccattgcaggttggcctgttatgtcccaatgacttgcattgtgagcatctttctcttgatgctcgctacaaatggaagcgaaggttacatcctaataatattaccatataaatattttattagctttgatgtcaaatatgttaccttgaattctccttttaagaataatctccgtttccttggtcgcccaggcggtcgacgcacatacggtggagccaattttccacctcctacatcatttggtgaaggagtcagcgtttctgtgtcgggtaccagcattatgagtgcttggtatgaaaatctaagctggggggtcgtgtgatggactctaaccatcgtgtccacgcggagcccttcttctatagccgccgatatggcatgtgagcaggggatagttaggagctggaactccctgtacacgttctctcccataggttaactgcaaatgctgagcctctcttttctataacctcatatagcccatccccaatctttagcacaacacatccagctcctttctcgtaattctcgatcaccatatcgtgcaccttaggcggtaagatattatcctcagttctggcagcttgccacctaagcgcaaaccatgttacgagtgtagtgcgaattgactccaatatagaaattaccgggtaatctcgagccatagttaacacattgtttagcgactctgcaatattacttgtcatgacgttatacctattcccaacaaatagggaccttgtccaatgctcgaacccgataccttccaagtagtctgcgcacggtccatgcttagctcgaacttcagcaaatatcctattgaagtcagttagtcgataagctctagctgcactggataccaaagtacctagctgttcatatttaaagtacgccttaatgttccttttcagatgtacgacgcaagcagcatgagatgacatggggtaaacctgcataatatttaggcaggatgtgattttttagaaaacatggtatattagtgactaacttaattagtatgagatacattatgtgttaccatgttaccttacggatgctggcgtaaactgagttgtgtctatcagacacaaacaccaactccggatcatctggtatcgcttctgtcaacttagtcatgaaccatgtccacgcctcatcgttttcgctgtttactatccgaaatgcaatggggaagacctggaaatttgcgtcttgtgcactagctgcaactaagtatccgccatatcgtcctcgtaagtgagtcccatcaattacaatgactttcctcatgtaagcatacccttgaacacatgcatcatgtctctaaaagacgcttgaagtaaggttggattagggcgtaacttcccatggcagaccctaaagcattgtccatggcaatttctcgtgcccgccatgatttccaataggaaacgttgaggctgaactcttggcgtagcattcttctcagctcattggcgcgaggcccccggcctacttcaatatacttagtacgcatcaacttgccaataactgccgtcgacgcctgcttgtggaagtctcctcttgcatccacgctacatgtatgagtttgggtggtgctcctgacctcgaaccggtcgctatctggcagcttagtagcataaacccaccatggacatgtgttgctgacgcagannnnnnnnnnnnnnnnnnnncctgatttcgtgtagatgaaatggaacttccggtgaattgcgtggattcctagtttcgttgcgcagtcctctttgcttttaaaaatccgaccaatgtagatatcatctccctcataatcagcatcttttaggggacgataagagcatttgcgaggaagagaaaacatagctgttaatacttttagcgaagatgtttagttatcgagttaaacaattacttatcgaacataattagctatatataatacagggctaaatagtttttttatatcaaaattgctatataggtatgctttaccttcttcccctgggtcgtcaaaatatggtggggcatctctatcgtacaacaccgtcggaaccggtgtatctttcaccatcaactcattcctcattacctctgatactcttgtattggctgaacccgtacctatctccttagtggttattccttcgtctatcatgataccttttcctttctccgttattccgacgggctgtggg

SEQ ID NO: 1857 - DNA, 649 bp, Arabidopsis thaliana landsberg
tgttgcttctctagctgcgttaaatgctaggcatgcgcctcgacaaactcagagggattatgatgctcccaatgttgagcttttatgagatatgaaccaacaactccctatcaataggaatgattttgagatgaaaattgggttgttgtctcttgtgaatctgagaatctggtctaccatttggataattttgaggatatatgtgggacgacgaaattgaatagagtgccaaatgttctaatcaaccgtaaattgttctcattctccttggcagacaaaacccatcgcttgtttaagtctatgaatccggagaatctgagaagttgggaagattacaaagctgcattcttgacacagtattttacccagtccaggacagccattatgaggaatgagatctcctcctttcagcaaaccggtactaaatcattccatgaagcttgggagcggttcaaagtttactatagggaatgccctcaccacggatttcgatatgccacattgatcaacactttctacatgggagtcgataaggactacaagatggcgttagacactactagtaatagggactttatgaccaagactgaggaggaagctacacaactaattgagaatcttgcacctagcgacgaccaccacagtgttg

SEQ ID NO: 1858 - DNA, 2228 bp, Arabidopsis thaliana landsberg
  unsure (1)..(2228): unsure at all n locations
acgtgtaactgtctcgttttcaatgctagttcactctataaagtattgttacaacttaaacgtaagagagcatgttcattgttccttgtataagggttaagctctcttctgtgcaccaaccttaatccttttcatagtcaggtaatgaggcaaattcagtaaggtcggagcaagttccatggcgcgccagagatctttttcataagtgaaaagtgaaaacccctggcgcatgttagtagggtccgtttgatacccaagatatagtgtagatagagaacagagtcccatgctcgaaagtattatcatgcgccatttaaaatggtcctaagtcccatctctaaccgattctcatcaatccatcctcttctcacctttttcatattatatgataaagataatttcattttctttgtagatttcttatccatattttaataggttcgttataccatctctgtaaaatacttcaatattgcaattgtgtatgtaggcacaacatcaggtcaagtgcaacatttacacacatacagattttcctctattcttcacgacttagatttagctattaaagcaaaagggtcaccaatcaatgcaaagtgcanactcattattaaaggaaaatcaacatccaaatagtatcacatggacatatgaatattcaatgtcataaacgattatattggaaagaaagaaaaaatgaaaacgataagagagagggagagatctctcacagatcagtccaaatgagtttaatcacataattatcaaacttccgagcacttccgaaactaatgattgacattatgatttcctacttaactttattattctaaaacttgtgtattttagtccaagttgaactcttcagcagatatatcttatataattgattgttctcatattgtttaatataacgttagtataaacaaagactacatcaacttcgcattcgcactatagaaacaggataataattgtatatatcaactaaaatttcatgatattttttctcatctactaagatatactagtataactttctctttctctaacacacatctctatccaaaaatttcaagttacagtcacagagaaacagaaaaaaaaagtcaaaaggtttcaagagtcctaaaagaaattccaagaagagaactcacaatgaagagatactgttcagtggctgatgttctctgttaacgacgacacattcgaatcaagctgtgagagatttgcttgtaagcaaggagatgaagaaagagccacttaaaggagaaataaaccagaaaattgtgacaatcaaagacatcatgacgagatcccaaacatataaacaccaaatgtataaacaagataaaccttcaaatcaactaaagcttcttatgcgtaaaaagtaaagctttcaaagactaaaatgcccaagttaaaatcaaaccttaaacccaaaattgaggccctaaattacaagtatgaaaaaacgaaattcatctaactatgtcttaatctagaatttcaaacacaaacacaaatacattaaaatgaatcaaagagctagatgagttattaagtctacatgcaatcccttaaaattaagagtcaagaaattgaatcctctctacaagtaatatgaattctaagaaattaagacggaccttggcggttttggtggcggagaaggaagggaggttgagatgagtggtcacgacggtgattgaagaagattcaagtgactttggacacgatggcgccgccacagagaaggcaaagaaatcgccggcgacgacgacaacggagatgatcccggagatggcaaagaaatcgcctgcgacatgtggagagtaagttcgcccgaaaaaaaattatagagctgaatgcttttttttttaatcgagtaaaggaggaagagagacaaaagatagggtttgtgaaagactctaatacatttagaggatttaggttctcaaaattttactttaaactagtatttcttttgtataaatagattagaaaattttaattataaaataaaatgagggtaaataagacttattttttttttgaaaaacctatttgattaatttataagaaaaatgaatagatggacaatttatttttagatatcctctagatttaatttccctcataaaaatgctttgtatgtttcatatcatagaggaaatctaaattagatccgtatttacaaatatcaatctaaccgttgtagtaaatgt

SEQ ID NO: 1859 - DNA, 1187 bp, Arabidopsis thaliana landsberg
gcctgaaaattcacagacttccctgatcagaacacattatcttgctgctgcttttttgtcttttcttcgccgtcgattttaaggttttatcttctccgtagtgaaagcactgataatttctccaaggaatttacgaggaggatttggtttgtttctcctgcgtgttagagttttacgatttctctgtcgtttgatttcttaattctatcctctgagagaacgagaatttggttttcgttttcgaatttagggttgaagaagcggtttcgcattgggtttgttgtctattgagccaatttgctaaaggaattgaaacgttgcgagtttttgtttcccggaggtccgaagtgcgaatctgttttgtttaatgaaattaggggtttggaatcggaatttgaatagtcgtttatgttgactacgcgataatagctgagataggacatgattttgaaacggattttgacgacattcgataatctgaatctgaagcggtgcaaaattgattcagaaattgagtatggtagccaaaagggtgagattatggtgtataagaagagacaacgagcaagcgttgatcaaccatgtagcagagaacccggagttctaacaagtagctcaagctccttgaccagtagagaagaatctcaacaagtgtgctctgaccagtccaagtcttcgcgtggcagagttcgagcggttccttcaaggttcagggactccattgttggtacatggaaatccttgaagagtcgcaaggaagagtcgacggagacatgtatctggggaagctcgaaattgcatcgaagcaaagacccgaagctgtttccacgtaaggataacgaagacagcagcgaagtagattgcgattactgggatgctaactttggtatgccgaaaaagtccgacgcctcgcgtaagggcgtgtacaaaccagaggaatttacagtcggcgatcttgtctgggccggctgtggtacaagcgcctgatggggtcttgaaacattgcgtccctggcgcaatacgtgtcatgttttttgggtactctaaatggaaaaaaattgtcaattgtcaaaaagtcgtgttaaatatagatgtattgtacagatctttgactttgaagtacttcatttgctgatcacagcctcatctttatctgttttttttacactgtaattatagattggatg

SEQ ID NO: 1860 - DNA, 4039 bp, Arabidopsis thaliana landsberg
cgctctgattgtcatctctccggctattctctcggagaaattttttattactggagccttggtgattgagtcaggacgagttatttcccgagatgatgcgaggtaatatccctgttggatccaaaaactcaatcagatgaagaaaacagtagaaacagcagaatgatataatctcttttaataatataatcagaaacaaataatataatctcttttagccacttacccggtaccaaatgttaagccatccaagcggaattatgaagaaaacagtaggccaagcgtattgacatgttactatgaagatgctgagaagagtagtatacattgtggccactagtcctatcatgaacgggataaagatatccacattggtctgatcagtagatgcctgcaaaaacatattatagagattactatctttaagttgaaatctccctggttttctagattttaaatggagaaagttatctactaacccgactgagaattcttcccgatggcgtggtgtcgaagaatgacattggtgcatgcacgagactgttgagaatctgtttgaagaagatctgagcagtcttgaggcctaagtgagtgacataaaatgcccggaggcacacaagaacaatagaaacagcagcgataatgacatagacgcggatgaagactgtagcgtcgaatgaaacctcgtttttggctgatgtttcataggcaagccaataatcgctggccattaaagaggcttgccaagccacagagaagaagacaacaagtatcattccccaccagccataagcttctgttgagtagagtttgtaaacttgaaagctcacttgtcctacttctctttcttcttctttgatcagtcttgatccatcttctggtatgttggagccgagaaacgacttgatgctttcatcgtttagctcgcttaaacgaggagactccatcgaagtagttctaagtactcttggagactccattgaagtagttctatgtacttttggtgattttggttgacggggagactctattgaaatacttctctgtgttattggtgatgccattggcacatttgctgcagtggctgatgccgagccagcttcaactagctccattgatgtctcgtgcgctgctaccaattccccaaagtctaaccccgagctcactaattcgtcgtattttcctgactgcacaatcattccatctcgcataacctgtaaaatggaaccactcattagcaaaccactcaacaagttttaatctttacttccatctaaccgtaccaagatgcgatcaacgttgtgaaggaagtctacttgatgagttactagcaagatagtctttccttttaatgctccccttacacatttctgcagaaacataatcacaaagaaacaagattcagcttttgactttgatgaacttaactgataatttaagtgctcaccttgaatatgtctgaaccggtatgagcatccaccgcgctaaagacatcatcaagtaaatacacatctgattcctgataaaccgctcgcgcaagttgtatcctctgcttctgccctccactaaggttaattccgcgttctccgatctcagtctggtctccaaactccataatctgcatatctttttctaaacaacaaaccttgagaacttcattgtacttgcttctattcataggaagaccaaacaagatattgtcttgaaccgttccattttgaatccacgaagtttgcgctacataagcagttgtcccacaaacccgaaccttgcctgaaagtttgtgcatttcgccaagaactgaagctaacaatgaagacttccctgaaccaacggtcccaacaatcgcagcgagctctcctttcttaacttcaaagttgatgttttcaattgcaggctcgtcatcttcatcatcccaactaaagcttccatctttgatctccacagcgacattcccatcacacccttgactcctttccacagtctcttccgatagctccctgctcatcatgtaagcatcgagtcttccgagagagatcatagcctgcgaaagagagatcatagactgcggaaacgtccttatcggttcttgaagaatcttgaaaatcgtcgttgtggtgaaaaccgttcctgcatcaagcttgacacccaagaaaaccacggttgtgaaagttagcgccgagatcaacaccggtgtgctccaaagcacgataatgttaccggcaatcgaataaagaaacttagatagccaaccaaactccatttctctaaacttgagaatcctctcgttgaaatgatcttcccaagcttgaaacttgatcactctcatgtaattaagcatctcattagttgctttcatccgtgaatcacgattcatcatcaaactgaattgatacctattgtttcgtttcgttcccaagagaataaacacgaagattccggttaaaccgataacagtagtgaccacagaaggtccaagagtgttataaagaagcacaatagccacagctacttgcaacggcatgagccagattgcgtgtagctgaagcatcatatcagaaagttgctgagcatcaacggccatgtaattaacgatttgaccaacgccgtgattctgacgagcagagccggttagctttaaacctttcttgtagagagctgttatgagagtggatcttataagcatccctagcttctgtgaattgaaattgaactgatgagtagataacacttcgacgaatttggctattaggaggataagaacgaggtagtaaccctgtgacggcgatgatcttttgccggaagtgaaatcgacgaagctttggatgagaactggtccgacgtagatgacactgagacggatgatggctagaaccgccgtgaatgcgatctctttccagaaacatctgattagagttgtacggacggggtttctcgagttctcttgaggtttgggccatttcgattcgaagagcgtcgcgagcttctctgctctgtgctccggtgatagagtcggaacttggtcgaggtttaatggagatttgtagccttttcttagtaacggattcatccataaccagaaagttttcgatataaacgatgctgatgcgtatagtgaaacgttttcggatttctctacaacgacgtcgtttgatttcgccggagctgtgacgttgctggtggttactacaactccggtggatcctttgatggagacgaggagtagaacggcggttaaagggaaggagatgaacgaagcgacgtcgtctgctcttagactcgcggcggcgggatcgtcggagagaagatggagaattccggagacggtgaagagagttgtgacgacgaaattgaaaacccagtagattcgtaacgttaacggatgagacggagatgcgaatctttttaggtggagaactaaaacggcgatgacgacgttagcatcggcgtggattagccaaaacagagtatcaacgagctttaatttcgtccgagtggtgaaaaaagccgaaacgcagagcacgagagagcaatacgacaggacaatggttaccacgactgtcgttttgaacaaaccggttgttctggttcgtgttcttcttccgagtagaggtttagtgatgtcagcttcaccgttggttcttgaagacgatgaagaacagagtttttggatagcgaagaagaagaggatgaggaggaagaggacatcgacggtggaggagagaagtcgttgtgggcaaggagagagtagaatgaatcttagccattggattggagcgggaagagatgaagaaggttctatgacggacgatgaagagcaagagagatcggagagccacgtagaagaaagccaccgcatcgtctctctctgaagatgataaacttgaagataatactatctctctgaatttattactagtatttatgatcgttcttggtttgttatcaactttaatgttttgtgtgatgcaagaagaacttgtattttattattaattgttttacaagtattaaacatttgaaaagattgagaatgata

SEQ ID NO: 1861 - DNA, 4470 bp, Arabidopsis thaliana landsberg
ggtatggattttgtctccttatgacggggaattcccaacttatgcgctacatatatctttcattcatggcttaagagttagagcttagtatgctggttgcttgctttttaaacatagatttttttgcttatttcagttgatcctgaaagagggcaatcttcaaattcacagcatggtttaaattttactcagcagcctatgaggtcggagtactccagaagtgtattacaagaaccccagcaacccacaaatggttacatgcatgggaatcttgggttgcagacgatgccgaatgaggcaaatgttttgggaatggatgtagagtcgagtagggataagttgtcagagagaggattcactccagatcttcataaaattcctacgaggtttgaaatgggagaatctccagttaattatgatttctttggtggtcaacaacaatcaaacacacagctccctggcatgctccagcctttgccaaggcagcaggtgtcattcaatgatatgcaactactgaagcagcaagttatggttaagcaaatgcatgaatatcaaatgcaacaacaacttcaaaagcaacggctagaggcaaggcagctcaattctttgaatagaaatgcagtcaatggaagttgcgtaagtgataaccaatcacatatgattaatggcatccctcttcagaatgcgtctagtaactggttgcagccagatctcatgacaggaaatacaaactggatgcatcgcggcatctcgccagctgttcaaggttcatccagtgggctcatgattacccctgaccatgggcaggcgaacttaatggctcaacaatttgaaccttccttgtacggtatgcctgttagtgggacaaatgcacctcacaatgccttttcttccagccagatgaacagattagctgcacagcatggttctgcaaacaggacttcctctgtcactaatcaacctacttcatttctgaatcaaggtgatgtacaggatagtcatatgctccctagatccacatacccggagaaattattgttctcccagacatcagttccaagttcaaatagtatgcccaattttgaaagtttacaggaagatgattcccgtgaaaggaacatttcagtccaggcgaaatttggtcagatggagggttctggtccatcagaacaatcatttattaaagcgcctgaaaatataaatgcattgcagaagtcgtcagcattagatcctactgaagaaaagattttgtttggttctgatgacaatccgtgggatgcatttggaagcagcactatattaagcttgcaagaaaaccttatgtccagtagttctgccctttttgatgaatgcccctctttccaaagtggaagttggagtgctcttatccaatctgctgtagcagaaacatccagtgatgacgcaggcgtacatgaatgggctaataacagtactggcccacatgcaaattttcatcgtggtaatatggcccaggatttgggtgcaaagacttcaaatacactaagcgggagagtccacagtgattctactcggacagctgttcaacatttgcaagacagaggaaatagtgttgcagataatggcctgctggaaaattcaatggctcaacgcaatctaatggctgaaaatattttccattcttcaagttctggtgtcgatgggcagaacaattcgtgttctattagaaagaatgagggtgttgaggatagacttggtatctggaaggctgcgtcaaatccaaatatagttgctctgaaggaacaaaatccttcaatgcaaaggacaagctatggatttggcattgctggtgcaggaaacgattctaggcatttggataataactctttggagaaggctatccctcatctgaattctagagacggcagtcagattcttgagtcatattcgagtaataatgctggatcaaatgaaatggtaaatacccgtgatttgtctacgttacctggtgggaaagaaacacaatctggtcatgttggtgttaggccgtcaatacctcgcaaatttcagtatcaccccatgggtaatattgatgtcactgatgaaccttgtcgaggaaaagtttctcgttttgggcagtcacagtctctaggtcagcctgctatgaacactctaactgacaaggtaaattttatcctttggttttcattgtggtttagaaatttgaatccatctgaacattattttggctttcattatgatagggacatgtttcacaaaatgacttaaatcgcacaaataaggcttttaaaggcatgggtccagaaaattcaccgagtacttctgcgtcagccgacagaagtgttgataggtgtaatcaagtgaatagtgcttcgtcaaggtactgttcatttgtaacttaatttatttagtgttgataggtgtaatcaactggcaaagttacctaaaactcaaattttctcattgagatgtaatttctcactcgtggtaattgctacgaatatttgtaatttgtgctttgcaattgtctttctgaaagaaatttcctgtgcaggcttgagcttcttcacaaggtggacccgtcgccggaaaattcctcggaaacaaatgttactgggatccatgaagcaaatgcctttgcagactatggtggtcaattccggcataatcaggcatctgcttcgcaggggtttaatctacagttggcacctccatctcaactagctccctcacctgataacatgcagttttttcggaattctttgcagccattgaattcatttcatactggccctgaaaaaggaggaacaagtcagtccaggtttgctccgtggggatctaatcaatcttttcatcaatccactcatcaaggaccatttcctgcaatcctagggggatccaacatgacttctggtttcccttattccagagggaatcaccagaatcaacagatggctgttggtacccgacaatcagctgctattaattcagtcaattcatcttctgagttgtctacccctgcagtgaaagaaagagatgaaagtagtgactttgatcaacgtggacattcagctgaaggatttcgtatgctgtctgcttctcagcctctggtggcatccagctcgcctcagcagaattcctcttctggtatgatgtctgacccaccagccggtatttcagcaccacaacttcggttttggaaccagcccttgcctcagtcagatattttacggccgcatccatcgcccggcaacaacatggcagttagcttctcaaggcaggagaagacaaatcaattatcctcccaaaatggagacgtgtcattaagtgggagggacatagtgaatatgcatgagttacagagtaaagatatgggtgcaaaacaaacatctaatgttgcttcaatgttctccaaaatggtgcagagcaataatcaatcctttggtcgctctcttccttcaaacaactttccaaaggatagcttacgtcatgatgaacaaatggctggaagtggggagggcgatgcacccaagatgactgtgaagagagttgagaatagtgctattgatcctcaaaaggtagctcccaaaggggagcaacagtcaccttcaaaatctgatagtttagttagagatggattgaatcacagggaatcagtgaaccacatgccgtattttggccaaaatgtaactcagagtttctcgactaagaatcattcagcctcggttggagcagatcatcaacaaatcagtcctcagatggctccatcctggtatagtcaatatgggacttttaagaatggactggtgcaacccgtgaatgatactgggagattcacccccttaaagataggagaacaatcgtctaatgttggaagttcagttgatggcacacactctgttcaattgtcacagcactttaaaatgcagcaaatgtcaggctccacactaggagcagagattccctcatctgagtcattgcctcatggtgcaaccgaacaacttctgaaggttaataaaccaaagaagcgcaaaaccgccacatcagaacttataccttggaataaagaagtcatgcaggggcaccagaggcttaagactctcgggtatgtggcattagcactaatagtcccttttttttctttcaatatcctttaccgtaattaactttctacattattttcagtgaggccgaagttgattgggccagagcaaccaatcgatttgctgaaaaagtaagtttcctcattacatgttttctcacgagtctctttgtacaatcttgttaatacgttgatggcttttgttctcccaggtggaatttgagactttacttgaggatagcccaccaattaaatcaaagagaaggcttgtatatacaacacaactcatgcaacaactatgtagcccgcctccggctagggtgatatctttggttgctagctcaaattatgagtttgttgcatatact

SEQ ID NO: 1862 - DNA, 3137 bp, Arabidopsis thaliana landsberg
gaaatgggtacgtaggcagctccgaaacgagttcagctattaatcgaatttgttttattcatgttaaaaaagagttcgattatacgaacgaatgaaaacaaggagttcgactatgcgaacgaacaaagcaggaagcaaagatagatttatttataaagaaaaacgaaggaaaggtgccgaaatcttatacacacttcgaactaggaaatcctcctcgtcttgcagaacacctcgaccccttgactggcgatgtcaagaatgagcatcatacaatccgggatgcgagcaaattctgcgattccaagttcgatccaatctccggggtgagagttgagggtgtgtaactcccttgatatcacagtgactctccgcagcatttggttgatcttctttcgaagtttcttcttttccgttgagcgatttgtgttgagccgcgagagctttgatgaaggacatcgcgatatcttgatctctgctcgaaaggtccttgattagtgcacacggagctcggatctgggatctaaagttgtgaagtggggagcatcggaagttgattaatgtcctcgtcgatcatcttgatcctcgaaaagtctagcatggattctgagcatcataggttgaaggccataactgcacaagaaaaggacaatactgttagtgaggaatgaagaaaaacctagagaggtaatttatagggaggtttcttagctttcaaagatgcgattccatttaaagccggagtgattcgcggaagcattcacgtcgccttgttcgcccagcattcaaagagtatctccaaaacgaatatttgatgaatcaaggaaagttggaaagtttccttaaataaaatgggccgaagcccaataggtaagtccatgcgaaaataataaaaaagagctttgagtctcagagaacatttagggaaggggctcgggaacagggtccttcatcgccggttcggggttcgaaatggacacctcatttttaacgtccacgtcgggttcattcttcacgcgcttccaagggttgctgtcctcctcttcgtcgtccccgtcttcactgtccgacgggatcacttggaccggagcttttacagtaccggggacttggcttcgagcacgaaggtacatccggagcatatgcaggatcttcgccacacagtcgaagttcctccactcccattgaaaatggtcgctctccatagcccttaccttcctctcgatacgggtaattcgggtctcgagcgtttgcctcttgaggcccaaacgttgcctttcatcgcataagcggcgatgcttgtcgacgacctagaatacgaactggttaaaaacgagtagaatttgtcccgaaaaagagaaagagagaggatttaccttatccataaaattgtacgcctcctttttgtctttcgaggggaagtgaaagcaggcgtgaggaaagagaacaccggcaggtaaaataactcgtaaaacaataataaatttttagtttaagggacaatccctactaagtggacacagccactacatgttctcgggcacctcgggttcggtttgagctggctcaggaactgcggcagttgtctcagtctcatccggctcgccagtagtaggctgctcgttaggaacccccggagtctgaaccatcgtcgtcctcgatgaccactgtctccgagttcgtggatggaggaatttgaggcggagtgactaccgcctccggaactgatgccgggacaataggcactttgggttccacaacaccgctgacacctgaggcaattatctcggattaatataagagtaatttactgtggatcgattttttaaaagaaaaagggagaagagttgagatttaccagcccagtctaaaccagattcactcaaaggaggcgattcggtgaagaactcctcgaactgctgggggttgaacgatgaggaaggaaaggcagctaaacgattttgcttctcttccaggacggctttcaactcgtccctctctcgttcttcagaaaaatcatattcatgagtttggtcaaaaaggaggagattactctcgtactccctaacgtcagattccagctccgctccagccttctcggtttggatgaagacaattgccccttggatcaattccatcccgcgacctttcacctctttcctggcctttgacgtcgacttcgccaactcagcatcccgatagttggccaccctatgtacttaagctgcaattcggagagctggttggacaactcttaggcactagattcggattttgaaagtttgtcccgggaagttgagagttcttcttggaccttgtcgtacgtttggtactgctcctgcagcttgccgttggacttcatgagttcagaggaaagattgtcccattgatcttctagtttttgccttgcatcagttcaggagcggagctcggactcgagggaagaaaacatgtctttccaggccaatacctcttgttccctgtcgagcaacaacctctcatagtattcaatcatgtcgttgagttcgctgtttgcctgaaccaagggttacaaaggtaagttagcatatgagcgaaaaaatggagttaaaagattacaaaaaaaactaacccgagatgagtgataagcgtgaagaaggaatcgctcgcgaattgcagggcgccacctgtcgaaggttggcaggattgtgtcctgccgagtcttgaagcatcggaagacgtttcctctgtttccatcgctgttaaagtaataaagaagatttgaaactcatgtatgggaagttaggccagtgaatagaacaatatagtaagtaagagagtaaatggtaattactaacgtgtgaatgacttggtttgaggaaccagtacggccttaggattgacatctcggggttcaacttcttctcgccgaggattttcactctgaccggtcttttcgctcccaaatttggaagaagatgcgatgactggaggagggggaccaattgagcgaggtgggggagacaatcgaggagaacggtcagttcgagctctcgtcttatctcttttaggagaagaactgctgcgggttgctctttccctctttttcgatacaagtctgctatcggctcgctgcttaacctagtctgagaagcaggtcg

SEQ ID NO: 1863 - DNA, 3372 bp, Arabidopsis thaliana landsberg
aaagccccatctctgtgtatgttggaatacagaggtgtgatagaagcagttaatagcatcaataatatctactatagtttcaacttaaccaagtttattatgagggtaaaccatggttagtttagctttcttggtttggtctatgtctatatataatgtctgagagatttgggagagtttacaaattcctcagtttcatttggaatgcaccaaagatctatgaaatacccttttctataagctactcgtatcaaggtgtataaagatagctaataaattagataaatgagttgtataatcatgggaaacacacacatggcctcaactattccgaaagactgagagtaaaaaacaaatcctcaaagtaatgtattgtgtagactgtagtccaaaaagatacgaattttattcatatgatgcatggatgtacctcttagtggatcttcagcagagtaccactcactccaaggacagtcatcatcccagagcaccttattgcgtgactcagaaccatagtgttctgcagtgtctgatttgtcacccataacctcatccgtatcaatttcctcatcctcctcgtcatatgggaaggtttggtatgttagcctcatcataaaatggactctgaaagtatgcatcgagaagtccactcctgaataaaccttcaaataataaaatgtcatcgatgaatacaatatctagctaaacaatttaattacgtgatagaattgatggctaatgcttaagtttcaggtccattttgataagcaatagccatactaatggacatcactaattaagagccacgaagacttacaaacttagaaacaaacaactcatatagcccttccaggtgcatgagtttcacgggaacttggctgccaacacgatctgcttcaaatcttctagtaaaaacagtgcccatattctggattccaatatatgctttgcgtgaagggtcatgcacagggacaaaggctggccacaagctagataccaaagtagtataaaaattcttaataatcactcaaccaaatatgcgtctaatcattatctacttagcaaagacagggataacacatttctatcaactctgatttccaagacttcggagtaattggtaggcaatttggatcaactcaaagaaacagtgtatcgtaagagattcacttgacgatgcaaaagctaaagtgatgttactggctaggatatcgtacctgccacagttagacaaagcaatagctaccgcactcagaagcttgctagactctggtgtatcaagaagcaccccactggcactttgtggagcaatcaactagaagatgccataaaaatcaataaaatatcatatatgtaaacgggcaggaactatttcaagaaagaaaaaaaagtggatttaaagtgtaccagaaaatccttcaccccaaagcaaagctggagatcatgtgaattactgttccaattaccaattccagctgcatcagtcagatactgaattatgaaacagaaaatacagtttctcccagataaacagcattattttgaaatcatataccttgttggctaccattattatcaatttgaaagtagaactccatacaatagctctttgcaacattcttaagttcgtgtttgaccgtaaacagattctttgaatcctccactgcaacagcacccttttcctgcactcaccaaatgcaggtagcctaagaggtcaagcagataacgaaactaaagtggatttcacaaaacaagactaactccatctttgatcatcaataatatccaaaatagtacaaccagctataacgtccgggaagaagaaaactcgagcattcatgggattctaacgagttctcacttatagaactcgatcgaagatggatgagatcatttggaaaagcaaacgtaccaccaggtttttgggaccatcagctaaccattgacgacaagttgcttcaatgtctgagatgaacctaaaaaagcgacgggattagtaatgacattagtgattgaatcaaagcaattgaaatcgtgaagatgaatacctttcccaggaagaagctagagtgaaatcatcgaaatgttgcacctgcaaaacaattgctgatcattgaatacaaaaacgaacagcagaagaagaacaaaaaagttttaggatgtagtaactggcatacctcttcttcagcatcatcatcttcttcgagatgattcgatttgcttacagaagccataataaattgcgtaacgaatatctctcagtctctctctgagtttgtatgggtaaggaactcttgcagatcctccgatcacacagacgaagagatccgcttcgggaaagaacaacgacgatgatggtaaagttacaggaaaacgtcgtcgtttgaagctgacttgagactttgacaaacggcatgaacaacgcgtgccgtttcgtttgattgaaaaacgggttgcattattgttcgacgattaaaaaggccaataataatgggcctaatattggcccattataactttaatgctcaaatttaagtagtgaagtgaacacatgttaaaaactaaaaccatctccatcaatggtttctcgtctagaaactgttcaaagtatgagagagaatagaattagtctctcaagtaagaaactctgagaaacccataaaaacacttatatatcatctattgatcaaatattattttattgttaaaatttaattatataattaatatttattaaaatactaatttcttttttttactgatgaaggtgccttaatcttttcgttgtcatcctaaattcctaatatctgtattttgtgatcattaaaaacacaattatgttagcagggaccacaatccaccactaagagataattatctgtaagaaattaaatgaaattggtccaacacatataataacaaaattaatgataatttgcaaaattaaaatacaggagcgtagtggatcgagaagagagtgtaaaaatcgtactgctttacataaatgaagtcgtcctcactaaagctaacaaagatgaagaaatccaaaactccctgaaatctgaaagcacaaaacttccattttcatctatctcaagtgctcattgttcattgtcgacgtacaatggctgcagccttggagtgctggtcgagtcgtgccggagatggtggcgatcccgacaacgatctggtcgatcaggtactcatgcgaacgcacgacaggtctgagtccgtaattacgtctctacctgagacgagtttggaggttgaaggttccacgacggtttttgatcagagctcgtcggctatgcagaagcggtttcagagtctcagccgcaacgtgtcagaggcgattgtgtcgcttaaaaacac

SEQ ID NO: 1864 - DNA, 2589 bp, Arabidopsis thaliana landsberg
ttttcacgtttatttttttcaacataattagttaattaatttcaacgtaagactttattaaaaaatgaggaatctcagagaatatcaaagcttcacacactaatcaaaaagcttgaaccaaatcctcctcatcatataaatagatagcgttgcatgctttattgctttatgagatatattcaactaaaaagacagaaaaatggggaacactataatggtgaggagaaacaaggtgaaagttatgaagatcgacggcgatattttccggctcaaaactccggtgacggcgagtgacgccacgaaagagtatcccggattcgtgctgttagactccgagaccgtgaaacgattaggagttcgcgccaaacctctagagccgaatcaaatattaaagcctaatcacacatattttttggtggaccttccaccggtagataaaaggaataagcttccataccggagagttatgtccggtaatatacatgttggcgcaaaggagcgtttagagatgttaatgctttcaaggagaacggtttctgatgttggtgcagcaagatctgacgtagtaggagatgggcctgagcttggacatacgagggtgaggttaaggctgcctaggtctcagataacaaagttaatggaagagagccatgatgcttcggaagtggcagcgaagattatcagtgcttatatggagagttccggtgggatacaaggcggtagggataacgatggccttcgccagagacttggaattgcggagataaacaaccattacaaaccacgagaggtaaatgtccgagataattacatgatcgaaatacatttgaagttatcaatcctaagtttttatatatagcataagtgcataactaaaacaaaggtcttatagcatagctaaatatttgaaattacgttttttttccaacaacatgcattttatccgatttgaatataaatggtgacacatcaacaaagaaactattacaaaccaataaactacatgcaatagtcattaagacattaatatttatgctactcaattgcctaaagtttttggaaccagaacgtatgatgaattatcactatgtatagtatatgatcaaacatcaaatccgcatttaatgtactttgggtttcgttgtttcaaactgtaactcatattttttttacattttttttgccatgaatatatttgtgaaatgaacacgcaaactaaaggagatctctttgtttgtatttgacattttataaaacgttgttgttccaaataaaatgcagaagcatgtgagtttcgcagagaaaggaggaagaggagagatcgttgttctatgaagtacaaagcaagagtagccagcaattacatattgtccactacttcaaaatgcatttgttaggattcttattttttatttgtttttaggactcatatattttaatgggcatatctagctatcatctctactatgatgtcaaaaacgaaatgagacatttaccaccaatttttaatcaacattcagaaagttcgagtcaaatttttactaccgcccatgagctataattttaacatgcgtccaccaatgtctcaattaaatatgcttaagctatccaatcccaatatatatcatagtgtagtagctaattacgctaactcaatcctaatgtatcaaactttattaggctaattagatccggatccaaaattcaatcggatatccggatgcgatagattcgaatctgagtaatagtaaaaatcaaaattggaatatcacggttattggcctactttcgcgctaaaccgaatatcctgatccggtctaatagataaacatcgcacattcacatagtggtgggcttaaaatacagatgatgtacctatctagtaggagattcgagaaaagatggaataggaaagacgtgtttccaaataatcctatgactaacctaactcaaaaattttagggcaaaaaacggaatctgcgggataaaaggggatggcagtctcatgtccccctgccggtggggactctgctcccgggttggtgcccatgtttcgagaagtttaaggcaaatggtgtgcccatgttttgagaggtttaaggcaatttgtaactatatgacattttagtttaaacatatatcccaaacttagagtgtgcctataaaagaaggaaaattgaaattaaggctttaattagttatttttcgttctttaaagaagaagaagagtgaaaaagatatatgttttttttgtaatttttttacttaacactcaattttttgattttaacaaaatatgatttaaaatactagaaaatcattataattagtgtattttacaattttatattttcccaacatgtaacaaaaaaaaacgatttttcttatgtgcatattagtatgtatgtaaagtttcgtaatatagatatacacatctgttttaagaaataattttaaagtatgatattataggagatttcatcatataatctaattatattaattaaaaagtaaataaacaataaatttatatagaaatgtggcctctaaaatgttaataattcgttattcaaaatcgaatatcccgat

SEQ ID NO: 1865 - DNA, 2076 bp, Arabidopsis thaliana landsberg
  unsure (1)..(2076): unsure at all n locations
aaagtgcagagatgatcaaatcatctgcagatggagatcgcctgtttgctgggcaagctctaccatcatcgcttcatcaaagaattttattcccgctgacatcttcgtttattccctgcaataccaacaaattatacacacatacggtgagagcctgaaactgaggatccaaacaaccaaatgagtctatcatataactagcctaggatgtatccatcaaattatagctggtgctacttggttgaagcgtaatcagaaacaaagttttggcatgagcactaaaacaaaggaaataataaatacctttctacggcgggtcttgaccatgaattcccgagctagatgctgaataggggcgggctcaagtgggcgatattggatggctttgtctagagggtctccagggactatggcccaatgatcaaacacagataggcaaaaggcttggccctgagtgtggtacctcagatctgtctcaaacccaaacgactctatcacaggcagaaaagtctgcatcaacaacactcaatgaatcatcatcactcactcaaataacaggaacaaagtaaggaaggagaaagacacacacaaaactaaccttcacgatataagcaggagtaccccgggttgtggaacatcagatgtgacatacccacgtctacaaatttaagaaagcgagaggaaacaaacaaatcttagtaatcagttgcacaacgaaatcacagtcatagagccaaattagagatacctttacttggacctctgaatagagttccctgaggtccttgatgatggaatccaagtacaactcacctgtgcctagaatagtatgttccccagactcctcaactttggtaatcgcaaggggatagcttttgctaattttcctaagcccttccaccattttaggcagctcactaggattcaaaggctcagttgcagtcttgactactgggagggtattaaatttgagagcccggaatatgtagacatcttcatcataacttgcattacacagagttgcagttttcatgatggatgcatctacaccttcaattaaaacccaggaaccgggaggggcactgcttactggtattctatacctagcttgatatatccatagcttcgtgacttcttttatagtcatgtcctcctcatcctcaggtgaatacccttctcctagtacacgtacgctttgccctgtttgaagcctaccactataaactcttccatacacatcaaaaacactagtatctgatttggggtacaactttgtcacattaaccatgagaggtccagatggatcacattctaccattgattcataaatgggagaatctttggttccagtgtatgaatggtccactttcctagctgcagcctctctgggtgaaggaatgtgctttaccaacatatcagtgaaccctgatgccgaaccaaacactgaactacaggctaacctaagtaaaggtctgacgttcagcttatatgcactattactcagagtcactcctaattctgcaagggtggtctctacactcttcttatgttcacctatcacttggctgtatatcttgtatagaggctccagaataaactgaacaaatgctctttctccaccacctactggaggacttgtcttgaataccctagtatcagggtgataatatacatctccccaaagtcgagatgcaaacttatccacgtccatggccacaccatgaagcttggcatacattttagcaaaagattgcaatgtgaaggaccattcggctgtgccaactggcgaaacatacatttccagcttgaggatctataagaggtaagtctccagcatttgttgaagcagcagatatatggttattaatgacttcaattgtatacctcagcttgtagtaagcatcccttggaggtagtttgagctcagttatgagcctatcaacctgttgngcagacaanaagcaaaggtcatgcaaatgtatgaaaatataaaatttcacactttangcatgatgtaccttattgatcacaacaacaatagggagatgatcctggattgcatgccgnatagctctc

SEQ ID NO: 1866 - DNA, 2694 bp, Arabidopsis thaliana landsberg
cgttatccttcgatacgtgaacgcaagaagtaaagaaaccactggagatgttctctgttacgtcgatacgctgctgaatcttgagatcccgacggaggagaaagaaggagggaagaagaggaaactgagtgactcggagatcgtgagtctgtgttcggagtttcttaacgcagctacggatccaacggcgacggcgatgcagtggatcatggcgatcatggtgaagtatccagagatacagaggaaagtatacgaggaaatgaagagtgtgttcgccggagaagaagaagaaagagaagagatcaaagaagaggatttggggaagttgagttacctcaaagctgtgatcttggagtgtttaagaagacaccctcctggtcattacttgtcttaccataaggtcacacacgacaccgttttgggtggattccttgttccacaccaaggtaaatattattctttaacatatatagcccatatgattcttatagcttagtaaattcaacaaatcatccgtaccattaagttatggcccccactaagtccaatcctttttgtatttgattttgtgtcggattaggtactataaactttatggtaggagaaatgggccgggacccaaaaatatgggaagatcctctaacgttcaagccagaaagatttctagagggtggagaagcatgtgatttcgatatgacgggaactcgggagattaaaatgatgccgtttggagcgggacgacggatgtgtcccggttacgcgctttcgttgcttcaccttgaatattatgtggccaatttggtttggaaattcgagtggaaatgtgtggaaggtgaagaagttgatctatccgagaagcaacagttcatcacaatggtcatgaaaaaccctttcaaagcaaatatttatccaaggagaaagtgatatttacttttgttatatacataatcaaaaggcccattgggccaatttgtcgtatgtatattaaaaactttgtctcatatgtgttaaaacaagttgggcctttaatgggtttcaatataaatatgtcaacacttttagttttcgtttccatctttcatggcggagaagtagaacaattgcaaacagaaagaaaccctaaaattttcgaaaatggaggaatcgaagcagcagcagttgcaacaacaacaactcctacttcaaatgcagcaacaacaacaaatgcaacagcgtcaacaacagctctttctgatgcagcatttgcagaaacagcaccaacaacaggcggcgatgtcgatgtttccgccgaacgctgacgctcatctccggccaccggggttgattccgaaccgacccggtaacccgtttcttcagaacgctaaccctaaccctaatttgattcaacaagccaataagtttcagcaacagcagcagcaacagatgatgatgatgatgatgcaacaacaacagcagaaattgatgcgtccgtcgaatcaattggagatacaatttgcttaccaagacgcttggcgtgtttgccatcctgatttcaaacgacctttcgcttctctcgaagacgcttgtgaaaggttcgtctaattctgtttttcccccaattgttttctcatagaattgaattgattttatggattgttcttagaattctgggtatagtgattacttgaaatagttctttgactgaattgatctctctcgtagtcattagtttatagattctgtagaggaatatccaaataaaggccaatgctttatttgtatcatcttttcatcgtaaaggccaatgctttattggagttcttcaacttttttctcgggattgcagaaaaaagttttctattttgaattccatgtgacattgtgtatgttgttgatccatatatgaaatgtttataaaatgtggaatttcactatttctttgtgagatttacaattttctctgtgatttcactatttttttttgcagattgttaccttatcatgttgtagcagattacgaagcagaagaagatgatagtatctttgattcaaacacaacaagccagacgctaccccgctgtcagcaatgggacaacaacattgcagccaaagttgcagaatttacggcgacatttgaggaacaagtccaagctttcgacaggataattcaaaagagaagcgatggagacagagttgaggaaaggctgatgatggaacaagttttgctcaatgacgagagaaacgcatgtatccagctggatagggagatgaaagctcaggatgcgaggttaagaatggcggctttggctcaagcagcaggacaagcaagggcagaagagtctcaacagtctcatgccgagatgatggctcgtaacccgttgagagctaatgcgattgggaatcatggagaacaggggcgtaacatgaaccctaatgagatgatgttgctgatgaatggatgggggaacaataacaacaacaataatagccagaaggaagagaaggaaccattagaagatttcttgaatgatgaagaaaatgaaaatggtgaacatgagaagtggcgaagaagtggggattttgatttgaatattcggtaaatgaaaccatgactcagatttttttttggtttggttatccaaatactcgtagtttggtgatgtagttaaaccttgaaaggtagtgaaaaggtgaaagataaattgacgatgatga

SEQ ID NO: 1867 - DNA, 6081 bp, Arabidopsis thaliana landsberg
  unsure (1)..(6081): unsure at all n locations
tttttttttgggggggataaattcatcgaggtctcttttttggtccggttgtaatgggtgcgacccggaaattccaaggcgagatagatcggggtgctgaaaaggttcaagaaggtgttgatgttttcgacagcatctggaacaaggtaacgtttcctttctcttcacaattctctgtatattattccaataattgattgttttttttttcttcctttctcaattttgttaatcgttgatatcgagaatgcatgaagatctataggaaaataatcactgtgtgtagattcggattgcgattgttaattcatgcattggctcttaatcgatgatacttagattgtgctagataggattggtggaaatgtctgtgatattgtttggtttgttaatcttttgttatttataacttttcgtttgttttgttttgtgaggtaaattttcccagtggaactcaatatcgagctccgtttgttttttatgcagtggaatgtgagcagaatgtttgttttcgaagcagaaaagttttttactggacagaggaaaaactcggattcggacttttttggtgtttcaggtatatgatacagacaattttaacaaaaagtaaacgtttgaggcggactcaaagaaagaaatcaagaagttgcagcggtatagagacctcagatcaagacatggattcagtccagtgagatcaaagataagaaagtcagtggtctttatcttcacagcctttttttttgtttaattgactaatgatgcgacttggatcccttgcattctcttaaattgcacctgcaaaccataatctatggctgtgtgtttagttatctctcctgtttaaagtttgtggtgatgatttcaatattatcatcttataactaaagcttgtctaacatctctagctactttactttggtttcatataagctgagaggagtggcttcatctctgtgagaaagaaaccaagacaagaccaagacaagggatggctgaataatgtggtgagttgttttagcgtattcgtgcctaaatattgattcttgacccctttctttaacaaaaacgtcaaagaagacaaatgtttatggtgtttttgaaatatatgcaacgttatgcaaatgctgtaatttatgctatgtgggtgaggcaatgtcttttggcttgtttttctctttcagactcatcttcagacatctattacaaggcataaggatcacataataaagttggaactgatcttgaggcacaaggatcattttcatttttgtaaagaatcccacttagagaacctaccattggaggatgacaaaattaataaattttctaaggttctaaagcaccctcaatagtgtatcttaggtatatcttaacaaaattttaggattaaaaatgattaaattaaatcaaaaaaacaatctttagctaagaaatgtatctaacataaaatgtttttgcttagctaagatgtgtctatgtgtcacttcctaattggtttaagaaatgaacaatagggaaaacaaaaaaaaaatccaaaattaatcttctatccttaagatacaattgaatcttaaccattggagatcatttatgttaagatacttaacttttagtcttagctttcaaaaggcaaaattttatttttaaataatgctaagattcaaaattattaacttattgattcttaaccattgaggatgctcttaattattgaaatttccaaaaaatagaaataaaatattggtgagggtcaataggtggctctcaccattggagatgctaaatagctacttaacgtaaggtccaccaagccaccatcatgtgcttcttttgtattttttatttttttctattgatatttgttactgaccaccatgtgtttattgtgtctcatcaatatcccacacacaatatgatgcctctatatatatgggtaaattatatacagtagccattgacccacttttattttcagattttgacactgtgggcgggacctttcaattcttagcctttcagccaaaaactgaccaaaatgcccctgacgaaactgaaccaggtttgtacctacggactgcatcgttggaatccaattgaagcgtacactgttcaccgacgggaagtgcattaaatattttctgggtttcggcgaatttgacattatagcttggaattaaaattttaaaaaaatttgttgggctcagatgttttaaatgctaaaaagttttgacaagacaaaaaatcatgattacctattataatagagattatattataagatatttacataattaagattagaattctggaaagaaacgaaaatcgaaattgtgttacggtgaagaatctgaagttttcagttgctgttttacaaagtttgaaggattgaaggggagacaatctgtgttctgggtaagaaattcgtgttaatcctattaattacacttgagaacgtgatatgaaagtaatgatacgttttaaaaatttctgggttcataaattgttttgttggagattctttttgtatttgttgatataaatgaaagctctatgatctgttttgttaaatttataagtacataaattgttttgttagagattctttttgtcttcgttgacataaatgaaagccttcaaaaagatctgatttttttgtatttaatgttgttctgacctgaggaatttatgttgcaggtatggagttacatgtattaattatggttggtgagtggatatacaaagaagaaggtaggaaatttgaagctgaaaaaggaagtttcggacgctgtgtaggtattacagacagaacgacgtacacggatttggcaagtacaatatatgatgtgttcagctatatgtttagtgaatggaatcatataataagttactggatccctggaaagatgtctgatatgatagcaagtaatcgccctccagtatatattgagaatcaaatcagcctggatacaattatgttgattcgtaatggcgatccttctgttaacttatttgtgtctttttaccctatcggcaagggaggccatacagagacagaggttacaaatgttgatgcagctcataatgtttacgaagatataaatgtagatgaggaggatgacatagatgaaggtgatgaggatgaatatgaaaacgaggataatgaagaggacgaagatatggatgtacatgacgatgacaccgatggtgaaagccgtggaagtacactcgaccctacagtagacggtagtgaaggtagtagcgaagattacgattacaataaatggggtgacatgattgtggaacaatatggaaatggtcatgttgaggagggcgtcgtgaatgacactcaacaaaccgtggaacccccaggggaattcactcgtctattggcatcgtgtacgtcgacgggtacacatgcacctcatgtagaacccactggtgttttggttgactgtacaccaacctctgctccatccccgacgtgtcaacatggtttgtaccaatgtacgtacactagattctgtgcagaggagacaagatgcgaaggtgaattagttgagcacacggatgatatagctgagaacgtaactggagatgatggtatagtcgtcctagaaggggtttctgcaagtgggttaaatattgaatctgacgaccgtctagtgacaacaggtgaagcctacgaagtgtataaagggttttctacattgcataatgctgagaatgagttgctcgatactgatgcggctcctgtattcgatgatttagccaatgttcgagtcgatgagacagaagttgaattgagtacgtcaggtcatccgttgtatgtgggaagtgttttcaaaaacaagcaagtcatacagcagactatgcgacttgttgcaatcaaaaagtgcttccgctacaaacaaactcggtcatgccctaaaagattagagatggtttgcttagatcgcaattgttcatggcatttgactgcacatgtcatacccaatttcaaatgtttcaaaatcacagggtatgattccatccatgtttgcaagatcgagagtcgaaaggattatcgtaaacatgctacttacaagcttttaggcgaggttatgaagaatagatatagttctagcaagggggtccgagagctgtagatttacctcaattggtcttaaatgatcttaattttggatctcatattctacagcatggagagctagagaggttgcagtaaactctataaggggtgatgatatggccagttacaggtttttacctacatatctgtatcttctacaattagcaaatcccggtacaatctgtcatctccactccactcctgaatctaatnnnnnnnnnnnnnnnnnnnnnnnattcgtttctctctcggcatctataaaaggttggaaatatatgaggaaagtcgttgttgtagacggaacgcagctgattacactgtattttactcattttaggtatatgtatatcatcatttagctttgcatttgctcattatatcatatcattttgcactattttagcttattttgcatacttaggcatctaggatcatcttgcattcgcattgcatgttttggtgtgttttcaggtgcagaaggagctaaaaaagactctactcgatccattcactcaatccacacagctatagaagaggcatcatttcactcaacctctttactcgatccaggatgctacagaggaggctgtagtttactcgaccctcttactcgatcaaggcaacctcagatgaagcagcaaattgatctactcgccctcctactcgatccactactcgatccactactcgaccnnnnnnnnnnnnnnnnnnnnnnnnnnnnnnnnnnncttgttgagctatcaaagcgtcttcggatcctcctcattccccactcaaccagacatctgagcatacggataggagaggaagaagcatctactcgaccaattgatcactttggtagattgtttcctaaaccctgctctgctatgtttcatcaacgatagttgagattaggaagtggtagagttatgggggtttatgtcacgactgtggattgacccggtttttaaatctatcgtcaagggtatctacctttcacctattagccatctgatgaaccctagaattgcccttatcaatgaattcatccttaggactactattagatttatttgtatcccctgttgattgcacttttatttacatgttatttgtatcccctatttgtatctcttgttgattgcattttagttttgtttgttggttctactcgacctaatgatcgagtagggcttttaagttctcatttttacttgtttgaatcctgacctaggattgttactagaaactcaccttcattataatctggcttgacttagttgtttctatacacgtcttgattgctagcaataacagtggactggattgacaccccctatagctgcatcgacatgttagtgtttgtaggggaattgaactgaacctcacacccttcagcatataagtaggcataagtcctctacccctccatcgaagcgctgaattccaccaagccaagctattgactctaatcaagcgcttagtgggaggcaacccactggtatgatttttctttttcttttccttttgatttattttttccgctctcttcggatttgaatgccactgggaaaagtgacgtttaagtatgggcaggcacttactaattatgctttatagttattgagtcatattcttttattcaaaaataaaataaaaaacgtctttgtttagtacagttaggaatcatgatctaatcttctgtggcctcttgtctggtttatgaatgaggcatgttcgaccttatgcgataattgtacgatccatatggcgtaccaacagactttagtatatcttggtttcccactcgatccattaagtatggagctactagccatgcttttccctttacatcatcgtgtacggttagtgtttataagtctacactacggtgctcgataactgatattagagtttcaatgtgaaaaagaaaagtttacctctcccctgataactacataacgcgt

SEQ ID NO: 1868 - DNA, 3820 bp, Arabidopsis thaliana landsberg
  unsure (1)..(3820): unsure at all n locations
ggggaattcttggtgaccgcatgactgttaaagctttttttttttggggaatgcttgaaactgtgttcaatattgcccctgaaactctgactatatggattacatacaaagcgtatgggacctctaaacgctttgtggtgttttgtttcttctttcttatgagactttgcaggttttgtgtgatagtgtcggcgttccttgtcgaatagtcaaaggacagcaatataccggttcagatgatgtggcaatgaactccattaagactgatgatggcaggtgactttcaaattaaattcaatcgctgtgtaattttaacaatttctctatcatttggagagaaaatatatatatattgtcaccaaatgtgtgcgtgtaaaaaatgaaactatgtgcatatggacttggggtgtgtgtgctatttatagctaactcacatctctgaaaaggttagagcaaatactgaggcttgataaaagtgtaactttctttggtctaagcaacaatactctttagaaatgaaagtacgattaagcatgtttcatgctttgtacagtggttctttctattgttattgcagtctgcagttgcaaattattttccttaacgaatccaaatgtgaatttcagggagtacattgttgatctcatgggagatccaggcacgcttatccccgctgatgcagctggactacaaatggactttgatgattctgtctactctgccagtcccagagatgttgattcatctcatgtagcttcttccagcagtggggtcgagagctcaattgaagaacacacagaatcttggtcagcagaacatcgttctaggaccaagggttcccgggaggaaaaccaatctgcaggtggaggggatctcatgattccaaatattagggaagctgtgggaagtcaaaaggctcctgttcaacatctttccagcaagcctactcattctttcactcatgccagatcaccttcgtggactgaaggtgttagctctccagctggacgcaggatgaaagtcaaagatgtttcacaatatatgattgatgctgccaaagagaatccacaactagctcagaagcttcatgatgtgttacttgaaagtggagttgtagctcctcgaaatttattttcggaagtctattcagagtcaatggaggcaacaggtgaaatcaaatctgtggctgaatccaatgatgagaaagggaaagattttggaacaatccagcaaggaagaaaccagagcaaccttggccctgtgaggtttttgcctcctcttccaagaccgcaatctaaagcaattacccatgacctacgtgaacattcaggatctggactcggtcatttgtctgaacattgcaatattgatggtcactctgattcctcacattctgaaacatctactgactatcccagaaatgttcctgttgccgtagctgcagcggctgttgttgcgtcttccatggttgttgctgccgccaagtcagcaaactcggattcctccactttagaactttctgctgcagctgctgctgcagttatggcgacagctgcagcagtgagcaggcagtttgaactagattcacttagcaacggggatgctggttctggtgggcttcatggggtagattcaggaggagaacgaatatccgacagatctattggcaatgaaagttcaaaatctgatgctgcaattgatgatgtagctgaatgcgagattttgtgggaggaaattactgtggctgagcgtatcggactgggtatatgctctactatatgctttagtgtaactagtgccacaacagtaagtactttatatttatgtcttttgatgcaggatcatacggagaggtatataggggagattggcatggaactgtgagtatctcatatttctttagcttttactaattggctgacgacaagagaaacaatgtaaatttggttattattttcaatatcaatgaaactcttgatttggtaggcagtggctgtcaagaagttcattgaccaagatattactggagaggcactggaggaattcagaagtgaggtataagcctttcattctctggaaattcttgtaccctttcaagtttcacaattcgtaacatctcatttcaatttgatgcaaggtccggatgatgagaaggctcagacaccctaatattgttctcttcatgggagctgtaacccgcccaccaaatctctcaattgttacagaatttcttcctcggtatgctatgatccttttcatgatttaattgttttgacgctctatatgatttgcatatctttgatgataactaccatccattatatgattttcacgctaaacgctttatgttccatccattagtgagcagagctcagactcgtcagtctcatttctgtgtttattaacctttttttttttgcttgcgcagaggtagcttgtataggttaattcacaggcctaataaccaattagatgagcgaaagcgtctgaggatggctcttgatgctgtactattactcttttctctttcgctccttctttacctctactacgtatttgtatcttctagattgtttcttacaaaaaaaaattcaaccgttgtaggctcgtggaatgaattatttacacagctgtaatccggtaattgtccatcgtgatcttaaatctccaaaccttctagttgacaaaaattgggttgtcaaggtcagtaattcttccactcggatttcattttctctcctatgatatctctaatggcttacatatttctcaggtgtgcgattttgggttgtctagaatgaaagtaagcacatacctctcttcaaagtcaacagcaggcacggtaagctactagaagaaattcactgttctccactaggacagttaatgtcaactaaaacaatcctgtagattccagatttactttcctctcgtaatttcatcataattacaccgtcaattatcatcagaaactacctcatatcttactttccagttgattgatctaagcatgagacttgattttgtgtttgctcatttcaggctgaatggatggctccagaagtgcttagaaacgaacccgcagatgagaagtatggtttttctaaagaaaaatagttttatcgtattatattttcccatgtaacgttcccttttaagaacgaggtacataatgtgaaaacaggtgtgatgtgtacagctacggggtcattctctgggaactctttacgttacagcaaccatggggaaaaatgaacccaatgcaagtggttggcgcggttggttttcaacatcgacgacttgatatccctgaatttgtggatcctggaattgcagatatcatcaggaaatgttggcagacgtaagtttgaaaagtcacttaattgttgtatgatgaatctagctctattgttttgttcatgaattaggtgcggttatttggtagggatccaaggttaagaccaagttttggagagatcatggattctttaaagcagctacagaaacctatccagagagcagcagttcccagttcttctgcannnnnnnnnnnnnnnnnnnnnnnnnaacatcatgcttgatgaagaagatgactaaatgatgatgaaggtggggatcattctttacatattaatgttctgtggtgtgctgtccatgtgtattcaccatgttttgtttacaaattgtaaaaaaaagatgaatgcaaaacaaaacaaacaaagaaaaaaagaaaaaagaagttattttgtcaatggtaaaaaaatcattgagaattgaaatttcatatctcttatatacgaaattcaaagtaaattgatca

SEQ ID NO: 1869 - DNA, 2138 bp, Arabidopsis thaliana landsberg
gttttttcctgacattaggcctgcttctgacaaaagggaacaaaatgaatatctagtagcaaaagatctaagagcatacttctcatcagcaggttcgtttcttagcacttctggagccatccattcagcctttataagaccaacacataattagattaacgaactggcaattacaataactgtaaaaagagatgattaagacaggggagactataacttgcttcttaccgtccctgctgttgactttgaagagaggtatgtactgtgtttcatcctagacaatccaaaatcacacacctgatatatatgaaaatccagtatttgttatgcaaacttatagctgttacatacgatataacattatccacttggtaagaaacaataaattttatggagagaatctgaccttcacgacccagtttttgtcaactagaaggtttggggacttaagatcgcgatggacaatcatcggattacagctgtgcaaatagttcattccacgagcctgaatacaagtaatatgttacctcaacactctactgaaagaatcaagaagttacaaacaggtgatatagtaagagaagaaaagactaatacagcatcaagggccattctcaggcgcctcctctcgtctaattggttatttggccggtggattaacctatacaagctacctctgcacaagtttggaaaaaaatattataatgtaaagatccaaaaacgaagcacaaccggattgaacctgttcaaaccatccagattttagaacttaaagcaaatacttgaacaacactcattgatgcaaagaagattttggcatttagaggtcacaaaatagataaaaacagaggcatgcgcatcatgaataaggagatggaaatcgttgtagccatgagaatcatatcaaagtaactgaatcttgcaaagatcatagtattacctaggaagaaactctgtaacaattgaaagattcggtgggcgagtcacagctcccatgaagagaacaatgttgggatgtcttagctttttcatgattcggaccttgtatcacaagaatatataagaagggtttgatatagaactaatcaacatggaaaatcaggtaaaagaaaagattagaagaaaggctcgtacctcacttctgaattcctccaatgcttctcctgttaaatcttgatcaaggaacttcttgacagccacttcctaaagttcaagagtttcgacgatatggaactcaaactaaggaatttctaaactcttttttcatcgagttcaaattcacagtataaattggaaaagcaaatataatactcacagtcccgtgccaatctccccgatacacttctccataagatcctgtatcaaaagaagtaaagtagttaattatttgaagatgtagttacaccaaagcagataacagatgatgataagtcaggtaccaagtccaatacgttctcccacagtaatttcttcccacaaaatctcacagtcagatacatcatcacagtctgacttagaactttcattgccaatagatttgtcagatattctttcccctcctgaatttggcccatgattagagtccccactaccttgaggctcatgcccaccagaaccatcatccccgtcgctattcgagcctaattcaagttgcctggacacggctgcagctgttgccacaactgcagcagcagtggccgtggcagcagctgcagcaggaagttctatgggggaggagtctgagtttgcagacttggcagcagcagcagcaaccatggaagatgcaacaacagcagctgcagctacagcagcagggacggttctggcatattctgtcgaagatgcttcagaatgtgaagaatcagactgacttacaactttgccattatcacgttgatcatgtgcatttgttttagattgcactcttggtaatggaggcaaaaacctcactggaccaaaaccgttttggtgtcttccttcctgagttgtctctaaatcttttcctctctctttcttggcttcagtcgagtttttgctttcaacagttgcctccaattgctggggatagacttcggaaaataaattgggaggagctacaactccgctttaagtaatacatcatgaagcttctgagctaa

SEQ ID NO: 1870 - DNA, 1801 bp, Arabidopsis thaliana landsberg
  unsure (1)..(1801): unsure at all n locations
tgccacctgaatgacgatctactctgaaaaagaagtacttggatcgcccattggtttctcgacaggctttcaaaccgccaaggaccagagatccgggacgtgcactgatgtagtacgtcccttggtcactcctagcattggtcttnnnnnnnnnnnnnnnnnnnnnnncttggcagctgaattctctatttattttcgagcctgggtgaataacgccagcacacggcggacgaagttcggacacatctgggaaaggcgaggccaagacagtagagcatcttgaggatacacgccggaattggaaaaaataggccgcatttctcgaagaaattggcataagcgcagcaccacccgaccggcacgttctcaggatgcagcggcggccttgggagtatcatatgtacctccaccgaaacctggcatctcctccggaggtcgaccaggtcgtcattcgtcatctacgtgcctctcccttgcttggcagcctttttcttcttcggtttgtcggctctgattgacggcagacgaattggacccattccgcctagggttatgccgcgtctttgtactccggcggtgacgccgccgacctcgtctcggacgaacttgaatcgtcgccgtaactgtggttgcttttgttctgagaatcttcgaagtcgctcatctttgggtttcgacggagaaggacgagagagatgaaagaaaagagcgatgaaggcagatcgagaaagagggaatagcagagaaacgaaggagatagcaaaaaaaataaaggcgagatttttctacttctacaaaacaaagcgcagtaaataataaaggaggagagaatttaccttgagagtcgcttgagttgtcgtgacgtcaagtggagaggtgggaagttatttaaagccatcatcaccacgattttcgagatttggactgtcaaatgcgatgcgctgaagagacactccatctcagtcgtccacatcagcagcaacttatctcgcgtatctcctcaaaatctttcggttctggaatctgaaattaaatcgtttttgttgagtttatcctcaaaaccaactgatcttatcacatctatcatctcatcaagaatactttcgcaatcttacctgacctatatgtccgctcatcgagttcccgtactcactcaatgagctgggggcaaatgttggagctggattcccctccaggaatccacctgcgaaaataccaggccagcccacaaaagcccaataagcccaccaagtagaggacctacgcagttgatgagcccacatacgcgaatgagtacttgggcctgataagctcggtcacctgatgaagggagataagcgaataacaacctaggaactgataaggagatattcgcggagcggacctgatatctccgaactgacctgccgaatatccaggaggatcttcgcagattccggatggagctaccacatgcgtagacctatatatgggagacaggacgacttggaagacacattcaattcagcttacattcacacacatacttttacacttgtaatctcctttcacattgtaaaagctttgtcataatcaatacaaaagtccattcgttcttagcaatataactctcaaggtttcattgaagatctagccctcctttctcataatcttaaatacaaatctctagtgtggatttgtgaacccacctcctgagaccggtttgaggacctgcccccacctcctaagaccggtttgaggacctgccaaatctctaatgtggatttgtaaaatcgcctacaaaaaagcaaatttcccaatt

SEQ ID NO: 1871 - DNA, 4865 bp, Arabidopsis thaliana landsberg
  unsure (1)..(4865): unsure at all n locations
ctagtgaagtcatgtatatttcttcttctcatataccatgtagaaaagcagttttaacatcaagttgttcaagttacaggtcctgatttgccacaattgctagcagcatcctgatttaagtgtgtctgaccccaggtgagaaaatctcattgtagtccaccccttctctttggttgaaacctctcgcaacaactcgagccttgtacttaaccccttcaactggtgatatcccttcctttatcttgaagatccactcgcaagtaacaatctttcttcctggtggtcgtttgaccaaatcccatgtctgatttttattgtgagattccatctcatctcccattgcagcaaaccatttctcagcctcaatccctaaaacatcttctcgataagtggctggctcatgagtatccacttcttctgcaacctgtaaagcataccctgccatatcctcaagacagaatcctgccatatcctcataaccgtatctttgtggtggtccaactccaatcctccttgttcggatttgagcgatactgtaaggttttgattctggcttgatagtgtcagctgacctatctgctgcctgtagctccttactgtcttctggtttctgtaaatcagctttctgattagctgtcagctccacctatttatcaaaactactgttctcttctgtagttgtagacttctctgaacgtctgagcatagaaacttcgtcaaagacaacattcctgctcaaaatcactctcttctctgatggagaccaaaccctgaatcccttgactccatctccatagcctagaaatactcccttccttgctcttggctccaatttaccttcatttacatgattataaactgtgcagccaaaaatcttaagattagagtaatcagcagatttaccagaccacatctttgcaggtgtcctacacttgattcatgtgtgcggcccacgaaatatcaagtaacaggctatatttactgcttcagcctagaatcttttttctaaacaagcattagagagcatacacttagctctcttcaataaagtctgattcatctgttcagctacaacgttctggtatggtgtatctctgacagtgtgatgacgagcaaccccttcatccttacacagctgattgaactctgatgaacagaactccagacaattgtctgtccgcagcctcttgatcttttttccagtttgattttccaccaaaattttccactccctgaagttattgaaagcttcacttttgtgttttagcttgatcacccaactcttcctggagtaatcatcaatcatcgacacaaaatatctatgacctcccagagattcaacttgagctggaccccaagaatccgagtgaatataatctaatgtgcctttggttatgtgaacagccttagggaacttactacggtgaagcttcccatacacacaatgctcacagaactcaagactcttgacctcatgaccacacaaaagatcttcctttgataaaatttgcatccctctttcactcatatgaccaagcctcatatgccatagcttagtcatatcctccttgtgaatctctgcagatgcaacattcgatgtgcctataacagtgaacccctgtagtatatacagagtaccacttataacacccttcagaatcacatgagaaccttgatagacctgcaaaattccgtctccaccagaatatttcagacctctgctatcaagcagactcagtgatatcaaattcttttccatcgatggaacatgtctgacatcgttcagtgtgcaaaatctgccatcatgtgtcctgatctgaatagagccgattccagcaacctgactgacagaactattagccatcttgatgcagccattttctacctgtgcataagttgagaaccactctctccatggacacatatgatatgatgctcctctatcaagaacccacacatcagagttgtgggcgtttccagcagccacaagagcaacatcatgttcagacttattgtcatcttctgctacagcagcagatccttgttgcttcctcttgggacagtctgatttctaatgccctttctccttacagtaatagcagatatcatctggcttaggacttttagaaaaaccatttctgcttctgttcttcttagcgtgtcccagcccactgctgccactggctactagtcctgaggcttgataatctgtaactgtaccagccgcctgatgacgcaacactctgctgtgaagcgcagatctgacttcttccaaagtaactgtagctttattcactatgaatgattccacaaagttctcatatgatagtggtaaagataccaacagaagcaaggcagcatcttcatcttcaactttaacatcaatattacgcagctctagtaatactgaattcaactgatctaagtgatctttgagtggcgtaccttcttgcatccttaatgcaaacagacgtcgtttcagaatcaacttgttctgtagagactttgtcatatacaaattctctaacttcttccacagattggcagaagtggtttctcctgaaacctcaatgatgacttcatcttcaagacacaacatgattgtggagtgtgccttctcttccatgacagccatctcagcaacgtcactcttccctttactgtcattagacagcggcgcccacaagccttgttgctttaacagggcttgcatcttaatctgccagagactgaaactgtttctcccagaaaacttgtcgatcttcacattcatcgcaaacatcttctcaccagattacaaacgcagaaatcctagaacctgattctacacaaaactttttctgcacggattttgcacgaaaccttcttctacacagatctgcacgaactttctttaacccaaaaatcgcacgaaacgcataaaaggaaaccttgtgctctgacacgaattttgcacggatctgaaactgcacgaaattcgcacgacgaacacagaacaaagaaccttgtgctctgataccagtttgttataacaaatgtgagcaagataacaaaaacgtaaagaacacgacacatatttaacgtggttcaccaacacttgttgttggctacgtccacgggcaaagagacagattttattgcttgagaaaacagagtacagaatacatgaaggttaggttaagaagagtacaaaataaaccctaattaaccctaaactgattatgcctaaagttaagggcccaatccaattcaagtcatatctaacaaatctctatcttgacttgaatcctccaaacagaggtacttgacacactgctcacagtgttgtaccagacttcctcatcagacagatgtaccagattcagctaccagactgttgtaccagatgcattaacacaatgccagaagtaccaaccaaaagtagcagacagacgtaccagaattcttctttgcctcagatgtcccaccagattgctcctgcaagccaactgcttcgtcaagacatatgcttcgctgagctagatacttcttcagaagccagatgctctgtcgagccagactgctccaccatggagcctgatgcctcgtcagaggccagatgctttgccagaagccagaacgtccgtcaggaccataatgcttcatcagaagccaaaacgcccgtcacgcnatgaatgcttcatcagaagccagaacgccccactggggccagatgctccatcaggagccttatgcctcttcagaggccaaatgtccctacagggacctgctgccccgttaggggcctgttcgcccttcggggcgattaacagcttgagatatttagcaagtctaaacaatgtttaaacttgctctaaggaaccggcttagtgaacatatttgcagggttatcagcagtccctaccttcttcacttgaatcctcttctcatttctcacatcaatatgcttggtcctctcatgatggacctgatccttggctaaacagatcgcactcaaagtgtcatagtacactgtagcctgatcttgatgcaaacccatatcactgaccaatcctttcagccaaataccctctttagcagcttctgtcaaagccatatactctgcttctgtggttgacagcgtcacagttggctgcagagttgctttccagctaatcacagaattacccagggcaaacacataaccagtcattgatcttctgctgtctacatctcctgcaatcaggctaggagcatcacctccatatatgaggccaacatcagacgtacctttcacgtacctgagaatcctcttcacagccagccaatgttcttttcctggttgtcccatgaacctgttgacaacactgactgcatgtgcaagatctggtcttgtacagaccatagcatacatcaagcttcccacaacattagcgtagggaacccgagacatatactctttgtcctcttcagactgaggagcaaacatggtgagaggaatattagcagcaaaaggagtatcaacaggttttgctgataacataccaagcctatccaacgccttctgaatgtagcctttctatgacaagaatcttctttgctgctcccagatccttcatctccaactcagcactcaacaaatctttcnnnnnnnnnnnnnnnnnnnnnnnnnnggcatctattaacatgtcatctacatagagcaccagatagacgtacgattcatctttcagcttgctagtgtaaacacagcaatcatacagactcctgttgtagcccagctccatcatgtagttgtcaaacctcatgtaccacttcctggagactgcttgaggccatacaaagacttgttcaacttacagacgtgatctccctttctaggaact

SEQ ID NO: 1872 - DNA, 3563 bp, Arabidopsis thaliana landsberg
gtcggcggccttctcttctaagtttgatttcgtcttatcatgtatcttcttgatgatttctccacgtctcaaaccatcttggcaaaactgtcatttctcaggcaaaggtactaaatccaatggagacaaggggttaattccatagactatctcaaaaggagatagttttgtaccggagtgaacatcacgattataagcaaattcgataaaaggaatgtaatcaagccatgtgctcatatttttaccaagagtagctctaagtaaagttgagagagttcggattaccacttcggtttgtccatccgtttgaggatgacaagttgttgagaatagaagcttggtacctaactttctccaaatagtcctccaaaagtgactcaagaacttggtgtcacgatcagaaacgatggtccttggaatcccatggaggcgtaccacttccttgaagaacaactctgcggtttgagtcgcgtcattggtcttgtcacacgggatgaagtgtgtcatcttagagaaccggtccacaacaacaaagattgaatccttgtgtttaatctttgggaatcctaaaacaaagtccatagaaacatctacccaagaggcgttaggaataggtaatggtaaatagagaccatgaggatgtgacctggatttggctttgtgacaaacaatgcaacgggcacaaaacctctcaacatctttgttgaggtggggccaaaagaaatgctccattaccatggccaaagtcttgtctacaccaaagtgtcccatcaaacctgcaccttgcgcttcactaagtatcaactatcgcattgaaccttgagggatgcacaaccgcttgtctttgaatagaatctccatcttgtaagtagaatgtcttgtaaagggctttaccatgctctcggtagcattctcctaactcagggtcgtctttgtacaactctttgatatgctcaaaacccatcactttagcctccatagtagctataagggcatgtctcctagacaaagcgtctgctaccacattctcctttcctttcttgtacttaatcacatatgggaacgtctctacaaactccaacaacttggcatgtctcctcttaagccaagtctgacccttaagatgcttgagagtctcgtgatcggtatgaatgatgaattccttggacaacaagtaatgttgccaagtctcaagagctcaaaccagagcataaagctccttgtcgtatgttgggtaattcaatgctgctccacttagtttctcactaaagaaagccacggcctctttatctgatgtagtacagctctaattcccaatcttgaagcatcacactctacttcgaacattacttcaaaatctggtaaggttaagaccggtgcttggccgagcctctccttcaacgtgttgaaagacttatcctgagcttctccccatgagaaaggcacgttctttttgatcacaacagtcattggcgcaaccactgtactaaagtctctaacgaaccttctgtagaaactcgctagtccatgaaaactacggacgtgtgcaatagatgttggagtaggccattcacggattggcttgatcttctcctcatctacttgtagtccctgtttactcactacaaaacctaagaacatacacttgtcagaacaaaatgtgcacttcttcaggttagtatataggccttccttccgaagcgttttgagaattaactctaagtgttgaatgtgatcagaataactcttactgtaaataagtatgtcgtcaaagtaaacaacaacaaatttaccaataaaaaaccttagaacctggttcattaggcgcatgaaggtgcttggtgcgttggttagcccgaacggcattacaaggcactcgtagagaccttgcttggtcttgaaggctgtcttccactcgtctccttctctcattcggacctggtgatagccactcctcaagtcaactttggaaaatatgatggcaccactaagctcatccaacatgtcgtatagtctcggaattgggtgtcggtacttgatggtgatattgttgattgcacggcagtctacacacattctccacgtgccatccttctttgggaccactaggacatgtactgcacacgggctgaggctctctctgatgtaccctttgtctataggtcactcacttgcttttcaagctccttagactcctccggattcatcctgtaggcgggcttgttaggtaaagcagagcctggtacaagatcaatctgctgttctatgccacaaataggtggtagtccgggtggaatctcctccgggaataagtctttgtaccaatctagtacagcttgtacttcagcggatagctcaggatcacctatccctgtactaagacattctttgaaaaccattagtagcacggtgcccttggcactcatggttttacaaacatctttagagcttaaataaagactagaacttcttacctcgtgctccttgttcatgtgaatttgtaagtcatgaacttcaaagggactaagaggggcaaggttgtacttacggtcattaaaggtgaaagagtaatggttggtgcgcccattgtgacatgtagctcgatcaaactgccatggtcgtccaaggagaagatgtccaactctcattggcactacgtcacaaacgacttgatcgtggtactttcccacgctgaatgatacggtcacttgttaagcgagtttcagttcagtatcgtcattgagccacctaagcttgtatggcctcgggtgctttgttttctgaagtcctaacctgtctaccatgtacttgctagcaacattagtacatgaacctccatcaataatcattcgaggttaacgaacacactcaatgtcctgcgaatcacaagaagttctcctacatccggatactcaacgtcctcatgctcatcagaatcctcttgctcatcttgtgactcatagtcaccactaggagtgaggatcatcaccctttggttcagacattctctcgccatgtgtcctctaccttgacatttgaaacaagtaatgtaacgagaacgagattgattagtactagggaacttacctagtttgggcctataggttttaggtgcctcattagacttgttcttgaacctatgatcactctctacggccttgcttttgtccatggctcggttgttgcttgcattccaaggcgtgttgtttctggatcggttgcttaaggatgccttacgcctgatttgctgttcgacttgtaccgctaggtgtagcaactcatggagtccattatattgggctctctccacctttcgctgaatcctctcttgtaatccgtctatgaattgagccatgagagcttcgtcagattcctctaactccaaggcgttcatgagcttctcaaactcctcaaagtactcatcgacggtctttgttccctgagacaacattctaaaatatttttgtaagtctctatgataatggtcaaggacatacctcaaccttaagaggtacttcatgtctccccaagtgtttatgggaccaaatctttgtctcctccta

SEQ ID NO: 1873 - DNA, 2329 bp, Arabidopsis thaliana landsberg
ctgttctctcagtaacggacttaaacattttcaggactactttgtggtcgttggttggtgctgctattgcttccacccacttggagacgtatccactgctaccaggatataagcatttccatatgagggagggttgaacggacccatgaagtctattccccacacatcaaaaacttctacctcaagaattgaattctgtggcatctcattccttctagatatgttcccaactcttttgcatggatcgcatttcgctatgaattcctgagtatccttaaacattgtgggccaccatagacctgcttgcattattttctgagcagtcttgaaggttgcaaaatgccctccataggtggatccatggcaatgtctcagtataccttgaacttccccttcagagacacacctcctgaatagcccatcactcccctttttatacaagtacggctcatcccaatagtaatggtggatgtctctaaagaacttctttttttatatgcatccaaactctgggggatcatactacttaccaaataattgattaaatctgcataccagggcaacttttcttcttcaactgcatatgcttcttccagcatgtcctttgtgtcgaagcttttgttaacaagatcgtagaacataagctgttcttcaggcatagtgtcatctatcgggactgaatcttcaattctcatcctggagagatggtctgcaactccattctcaacacctttcttgtcaatgatttccatgtcaaactcttgaagcaacagtatccaccttagaagtcttggcttggtttctttcttggcataaatgtgccttagtgctgcatggtctgtgtagaccttcactttgaaaccaaccaaatagcttctaattttctcaaaggcgaaaaccacagctaatagctccttttctgtggttgcatatcttgtttgagcttcgtccattgttctactcgcgtagtagatgacgtgaagtttgtcatcaatcttttggtctacgacagctccaactgcataatcgaatgcgtcacacatgatctcaaatgggtggtcccagttgggtgcttgaacgataggggcggacaccaatgcttcctttatcaaatggaaagctttgagacaatcttcatcaaagttgaactcagtttccttgcacaacaatctagtgaggggtcgagcaatctttgaaaaatcttttatgaacctcctgtaaaatcctgcatggcctagaaagctccttatatccttaactgtctttgggggttgcagctgaatcatgacatcgatttttgccttgtcgacttcaattcctttaccagaaatcttatgccctagcacaattcctttatgaaccatgaagtaacacttctcccagttgagtaccaaattggtttcctcacacctttctagaaccctgcacaaatttaacaaacatgaggagaattaaagaggatccatacactgaaaaatcgtccatgaatacctccattatctcctgaataaaatctgggaatatcgaagtcatacttctctggaaagtcccaggagcattacataaaccaaaatgacattctcttataagcaaaagttccataggggcaggtgaaagtggttttctcctgatcattagggtgaattgcaatttgaaaaaaaccactatatccatcaagaaagcaatagtatgggtgattagctaagcgttcaagcatttgatcaatgaatggtaaaggaaaatgatctttcctagatgcagcatttaactttttataatcgatacacattctatgaccagttttagttctagtagggatcaattcatccttttcatttttaaaaacagtcataccgccctttttagagacgcaatgaactagagaaccccaagtactatcagatatagggttgatgacaccagcatcaagcagtttcaaaatttcttttttcagaacttctttcaagttgggatttaacctcctttgtggttcaacgctagagtagaattcgttttcaaggtggatcctattgttgcataaactaggtgacattcccttaatgttggataatgaataaccaattgctctcctatactttctaagttcagttaatagcaggttcacttcatcatcatttaactcagcattaatgatcacagggtaagtagacctttaggaagtggtttgagatcaaccttcggtgccttgagttcagaccagtcatatgaagttggaatgatcagctctctagagtcgctggcagtcgaggtcgagcatgttctcgagtatgcaggttgaactcgtgttgaccttcttcgcttattacca

SEQ ID NO: 1874 - DNA, 3164 bp, Arabidopsis thaliana landsberg
taatcgcattcacccctgattgcactttcatttacctgttatttcattcacctattgattgcatttttagttcttaaatttgtcacgttggttctactcgacctaatgatcgagtagggcccttaagttctcattttagttgtttccatcctgacctaggattgttactagaaaccaaccatcattataatctggcttgacttagtcgcttctatacacatcttgattgctagcaataacagtggactggattgacaccccctatagttgcatcgacatgttagtgtttaaggggaattgaactgaatacacaacacttcagcacataagtaggcctaaaaaccctaaaaccttacttatcatctgtgtaggaatcaacttattcttgtcattcttaaccattgtaaaccacatgcacttgactaacccaatcactatatgaaattggaaagataatctcagcttccaacagtttcatgatttccttctaaagaacaacctttagattctggtttagtctcttttgatgctcaactgagggctttggctcatccttgaggtgaatcctatgcatacacaagtccggagagatacctggaatatcatcaagagaatagccaagagctttacgatacttgtgcagcttgcttaacaataaagtgagctctaccttgtttaaagaagcattaacaatgacagggtaagtagaattgtcatcgagaaatgcgtaccttagccctggaggaagtggttttagatcaagtttaggagctttttctgggctccactcgccaactgttgatgcgtttgtagatgtgccaattaactcctcttgagcaactaattgcatcacgtgctcatttctatcgagcagcttaccatacccgtcgggaactttgtctattgaaggaattagagcatgtttcaaaggatcaacaagtgtcatcttcatgagaaattcgtcagccagagacgagatagtatccacataaaaagtctacccatcgatggtaggcttcttaaccatcttattcatgtcaaactgcattctaagatcacctacattcaagcctattctccccttccttaaaccaataatggcaccagtagtggctaagaaaggtcttcccaagattagaggatccttaggttctttctcataagataaaaccagaaaatctgtaggaatgtagctagaaccgacttataaagggacatcgcataggataccatcgggtcgacggacagatcgatcagcaagaacaagagtgatttgagtaggtgatatgagtcaaattaccctaatgactactctctcaaataaagaagttgttgtagcacttagagatttaattccacaaagttcttggatcacacagtagattaacagttttgaataaagctaaacaaaaaaatattataatagtaaaagtcaagaaggcaattaaaattggttgtagattcagatgattaagacgtcaggtttagggaaattctcaagaaatatcagaatagtagatctagcagtaaattaggattattatcgatccattctagaacagaaatcactcaattaaagtaaccggtggtgttccgcgaaactcactatgcttaatagtattgatcccaactctcttgtaaatccctagaactaagcaagcattataatcaggtttgataagttcacctaagttatggacgctagcacgcatctaaatactaggctcatctaagatagttccagtaatagatacctatggtgggcatacctaataacctaaaatcaagttctacccacttactctagaactaactagacctagcattaagaataatcaaagataaagaattctaaatatattatcctaacagggtttttgatctactaattcatccaaatccttaatgagaatccctaaacccaacaagagaactactcaaacatgatcatagaagaataaaacatgattgaataagaaatcaataatgaaattaagaagagaaaagagtttagaagaatcttctctaaagggagtctccacaggattttgctcccaaaaataaaagagataatgagagttaggtctaaactagactttggagccattcttcccacctactcgaccccctggtcgagtatcctcatcgcaggccactcgatgacgccactcgaccccctggtcaagtatcacttcgccacaccacctgaccacactcggccgttcactctaccaagttactcgaccccctggtcgagtataatcactcaccaccaacaccatcactcgaccggacactcgatcacatcttcatagtctactcaaatccgcactcaaccagacaagctgagcacaaggaagagaagaggagaagacgaagtgtttggaagcggcctggagctccatcggatcacaaagcccatctcagcccattatcactctatggggcaggcgattaggttactggcccgtctactatcatttcatttcgttttttataaataggtgtctgagggttttgtcctgggacatctagtcgacatggagtttttgcttcagttttattttctattttactctggctgcgccgcttttgcttctgcaacctgtaattcgagatttttccaagttattcagattccgcatttgattttacgtgtcatcttgtttctctactctttatctctttacttatgcaatatacttgtttatatgcgtttatgtctttgagcatgttgtctgagtagtgacatagagttcttaaggatgggatagaatggttgtggaatccttaagtctgttctaattgcctgcatagttagatttcgttaatgggaattagtctgggctagctttgcttgaggatttctatcacgggagtgaattgatctgttgtttaacctgttgtctagggatagcttgattgcgcttgttaacctttcgaataggctaggataccactctattcgattaccccatccttagaaatttctcgtctatctgatttctctggtttattaatatcgcttaatcgttctcattgcctgatttttagtttttgcaataattggaccaacttactcgaccacacccagtgtctggcaacagactctgcattcgagtacaattgtctcatttcctgcctgttactcgacaacatcgtgc

SEQ ID NO: 1875 - DNA, 3555 bp, Arabidopsis thaliana landsberg
attgctcacgaaagccggaaaatatgccacctggcttatcccaggactgtttgcttacgctgttctacagccgctcactcgctactttcaaaaccagagtttgatcacacctctcctcatcacctcatatgttgtgttctgtatccacgttcctctctgctggtttttggtttacaactcagggcttggtaatcttggaggagctttggctatcagtttgtcaaactggctctatgccattttccttggatctttcatgtactactcctctgcctgttctaagacacgtgcgccgctctccatggagatattcgatggcattggagagttcttcaaatatgctcttccttctgcggctatgatttggtacttcacttttctctgtgccttttcacttctcaaagcctccacactaaaaattatgttgtgtgttgcagcctagagtggtggtcttatgaacttataatattactctctggtctcttacccaacccacaactggagacttctgtgctctctgtctggtactcctccttgcatcgatcaatttcttcttgttacaattttgaatttgcaagaacataatgttattcacactgtggcagtcttcagacaatttcaacaatgtattcgataccactagcaatcgcggctgcagcaaggttagagctttagtcacactatgcagtacataaatactgaagcatattttctgctcatgacaaggaatcatatggtttcatattcataagcggatgtttatttcttgtgcagcacaagaatctcaaatgaattaggtgctggaaactctcgagcagcacatatcgtggtctatgcggcaatgtctcttgcagttattgatgcattgatagttagtatgtctctactaatcggcaggaatcttttcgggcacattttcagcagtgacaaggaaactatcgactatgttgcaaagatggctccattggtctctatttctctcatgcttgacgctttacaaggggtcctctcaggtctgagacttgttcttctttctttactcacacacaagttcttgtcggatattgtttactcttttcctccacatagtgcaaagacacttcatgttctgtgttttgtcctgagtcaaaagctatcccaaaaatatactcttttctaccacgcctaatcgtcttttgatggttagcacgcattgcaaggggatgcggatggcaacatataggagcttacataaacttagaagctttctatctctgggggatacccattgctgcatctttagccttctggattcatctgaaaggtgttggcctttggattggaatccaagccggtgccgttctgcaaacgcttctgcttactcttgtcacgggctgcacaaactgggaaagccaggtcctacttctttttcgttcttttcttcttcatgactagtttctcttgtgaaataaacatacagatattgaattggatgcatatttgaactgtaggccgataaagcgagaaatcgaatggctttggcctatggaacgtaaggcgctgcagaacagctaaagatcatagtgagcataggttcctccggttttaccagttttgtagcagacgaattgctgtatgttactttgtggttattggaaggtttggttgtaataatactgcacaattttcatcagtagtaataagcatccttcttctaaagaacattcaaatataccttgccacgggaaaagatgcaaaagagtcttttatgtgttcccaagaaagaataatgatcaaattcaccatccaaggagaggcaaagtagtggtagttctagagctagtaaaccaatgcaaccaccacatatctccaaattgacagcatctgatttcctgtcactagtcccacttctcacaagagtaactgaattactcgaacctgttaaagttatcaaaccaattttaatgatcaatcttggggcaaggctttaaaaggcaccctcagtgtcaattagaaacataacatagagtttctactgagtcttggggcaagagctgtccatcagtgatacattcctcaatacagacatgttcataagtctgtccagaagcaaaaaatgattacctactctccatgggcttatatagttaatagaactaaactttgatagttgacaccaaatgcatgaacacgatcttcattagaaccttgaccagtgagggaacatggtgttggacactaagagtcatatatcatccaaaattccacttcagaatagaatggagtattttctcatgaggtatgacaaataattgattccttccggttgtcttctcccacacgtgccttgtgaatgagttctttaaagcacgttgctgtcactgcaagttgtcaaatttcgtcaactgttgcaaccgtgcaatcatccgatcaccaacttccttctctgatatggatcaagcaacaatgtccaaatctgaacaaatcacatatcaaaattagaatttgcaacaaggaactaccagagaccaatttataaattcagaagcaaatatacacgagggcataattaatcaaactggctgcaagagacttataaaccctgaacagttgctaatatcgcatggaggacattgttgctagctcaactgggtctcagatgatgtctgtttcagtaaaaagtaacacataactgcattttatcaatggccataacacacaactttaacaaagcatagagaacaagaccataaaaacataaattacatcaaagaacaagaacagaaatctaaaaacaaagcaagaaggagcgatcacacttcaaataaaccaatgaggtagtggacaaagccctcacctaattccagatcaaaccggcggagatgacgggtgaggggaagtcagcgcaggataaacatgggagggagagagatagtggctaaattccacatgggtgacagagggcgccaaagtatgacttacttggagtgatttggatagaaaatggtgacacgtggacactcaagatatcatttttatctttttcccaaccacttgtgagctgtgtaggagagaagtaatgaacatataagcaaaaacaaatgttgttacaaaaacaagtccccaccacatttactactactagtttgacaaacataaacacatttcccttattaacatttcttgttaaccacacaaagttaataagtaacccaagtttatacagttttaaaacattctctctatctccctggctaggctgtagctgttcgccatgggagacgcagagagcacctccaaaactagcttgctgctcccggtggaaagagttgaaaacgtgacatggagagatctgcgagatggattattcaccgcagaactcaagaggcttatctgctttgccgctcctatggcggctgttgttatcgctcagttcatgttgcagatcatctcaatggtgatggttggtcacctcggtaatctctccctcggtagagactctaatgcctcctccttctgcaacgtcaccggcatcagcttcatcgtctgttttctcttcctacgctcctcttcagc

SEQ ID NO: 1876 - DNA, 691 bp, Arabidopsis thaliana landsberg
ttttcctgtaaaaatcacacctttttctgcaatttggtttgattcatgaatcaattcatatcctggagattttacgtatgtgtaattgaatcaggttgttagggcgaagaagaaggataatggaactgtgtatgccttaaagatcatggacaaaaagtttatcaccaaagagaataaaaccgcttatgtcaaattggagaggattgttcttgatcaactcgaacatcccgagattgtgaaactgttctttacttttcaagacacgcaatcactatgtaggtagtttctattcaactaaagtctagactagaacaaaaactctaaaaccctaaaccagaaaatctcatcaaaaagcttaagccttgtatagttgttgaaagcttgctaaactcccatcatcttcaccatcatcatcgaaaaacccgaagttttcctgcaagtagcggccatattgatccggagaaatttggtcattaaaatgtggctgctggccaatagaattcaagctggatccagtgacggttacattgtcccgggagtaggggtgatattcacccggaggaatttggtcaccaaaaacgggttgctgcccctaaagtgcatgttgcatccagggatggttacattgctctgggagaagtagtcttgataatgatccggaggactttgggcatcaaaatgtggctgctgg

SEQ ID NO: 1877 - DNA, 3256 bp, Arabidopsis thaliana landsberg
  unsure (1)..(3256): unsure at all n locations
aaacgtatcagaaggtatgagcagtacaaatggcaggaaactaaaggagtaaaagaagaaaaccttctgcgtaatctccctaaagacctcaggagagacatcaaacgccatttctgcctcgatcttctcaaaaaagtaagtgcttctagttccaccttatctctttgatcctcaaatttgacatttcattcaaataatcattgatcgaatcaaatatatataggtacctctgttcgagataatggatgagcaattgctagatgccgtgtgtgacaagctaaaaccagtgctctacaccgagaacagctacgcaatccgagaaggagatccagtggaagagttgttgtttgtcatgagagggaaactgatgagcgccaccacaaacggtggccggaccggcttctttaacgccgtatacctaaaacctagtgacttttgcggcgaagatcttctcacatgggcattggatcctcaatcttcgtctcattttccgatatcgactagaacagttcaagctttaaccgaagtagaagcctttgctcttgcagcagatgatctcaagcttgttgcttcacagttcagacgactacatagcaaacagcttcaacatactttcaggtttgcttggtctcttttgactgatctctctgcttctccaatctccggttctgtttagtttaattcggtttaactgtcaggttttattcggttcaatggagaacttggggtgcgtctttcatacaagcggcgtggcggagacattgccggaggaaactagctagatcattaaccgaagaagaagatagattccgaaacgcgatcgcaaaacgcgaacgcgatgcggcgtcttcgtctagcctggttgcaacgttatacgcgtcgcggtttgcttcaaacgcgcttcgcaatctgcgtacaaacaaccttcctttgctacctcctaaaccctccgagcctgattttagtcttcgaaacccttaaaatatctcttacacatgtccacttaccacttgtataatattgtgtcaacgacattaaagcttaaactaattacaaaaatttagaaattttgttatcttacaagaagaaaacatggcttatatggattagataactttaggtaacctaatttttttttttttatcttaaatagctttggagtaaatattacaaatttatttaaaaattgtttttcatgtttaaccaataacatacaatttatcatgttattttatctaagagtaatttttccatatatatatatatttattataagattcaattgtagataatttttacttaataatacatcatttaccatatcatatatagatattagtttggtcaaattgtacaaaaaaaatcgatttctcctgaccgacatagattcagacaatataaagcccagtcataaacccaaaagtgtggataagataataatcttagcccaacaagcagcgagagagagagagacttattattagggctccgtcaaatttccccaatttctctctgattcctctctagaaatcgaacttcttcttcttcgtccaagcttttgaatcgaaaatcgatggcggatcagagttctaagccgttgcagttttttgtgagactactcgacggaaaatcattaaccctaaccttttcctctccgatagcgtgtggcgagcagatcaagcagcggatcttcgagcaaacgaagattccgacgcatctacagagattgataagcggaggattccaaatctccggcgcatccgcgatttctcagtctgacaccaccatgaatcttgtcctttccctccgtggtggtaaaggtggactcggatcgttacttcgtggtgggggtatgaaagctgggcagaagaagacgaacaacttcgatgcttgtagggatatgagtggacggagattaaggcatgtaaacgccgagaataggcttcaggagtggaaggatggtgaagaagggaggaaccttgagaaaaaggctcttgagtacctgaagaagcaatccaataaagttaaacaaggtgttggaaatggagctacgcagaagtatgttagtaagtataaggaagaatctgataagtgtattttggctgttgatttggctttgaatgaatctttcaagaatgggaagagaaaagcgaagattggtgctgaatctgaaaagaagaaacggctcaaaatatggtacgaattctctttacttgattgattgttaaagttgctatttttttctgaaattgtgatgctaattttgttacttgagttcttcatatgtatgtttcttgtcgttgatgatgtgttggtttttataggaaggggaagagagctgttgaagatagtgacagtgatgatagcagtgacgaggaagatgagaaatctgttgttggtggtcaagttgattcagatcataaggatactgatgaaagctcaggctctgttttggatggatcccatgatggtgagaacgactttgtagtgcaccaaagttcagatgtagttaagggagagatcacggttgttcaaagaattaacgaagagaagatggatgattttgctgttgctgatgcaatggatcaacttgaaaaggtggagaaatcaagtggaaacgatgattttgtcgtaaagagaggaggaactgcgaaagaaagagtgtgttgcaaacctgttgaaccgcttaactttgctgagatcaaatcagccacagatatggaggttttggggatggagagattgaagactgagcttcagtcacgcggtctgaaatgcagagggacattgcgagagcgagctgcgaggctatttttacttaaatcaacgcccctcgataagctcccgaagaaattactggccaagaaatgaagaccaacatccatcttcaaaaagattacacccttttgaagttttttggcttgtagttcaataatcatacaagccattatgtaaataagaaatgtgtgttagatgacaaggcctaggagttcaaatgtttcagttatctttggttaagtccctaccgaaatgggttctaagcccaaatgttttaaaaacctatagccttatttgaaaaaacgacaattttcagtcaccaagcctaaacttcctcttattaaagacaagtttttctccttttaaaacaccattagcattaatcatcatcacattgataactagattttacgatattacctttccacgttatgcttantgcatgataanaaatattgtgatgcattcatacgatata

SEQ ID NO: 1878 - DNA, 1259 bp, Arabidopsis thaliana landsberg
cagaacacttcatgaagcatggacttgaggaattgttcagcttcacattattccggtccacgtgtctggtactgtagagtagccaaatcccagcaaagtcacagttaccagaatttactctttcattctgaattgttgtatctttttctttcttttcttttgaactcaaatccttgttatctccctgttgactatctttttagaacaataatgctcattagaagcttttcaactctagttatatattattttccaatgcacaaattataacatttgattcattcattcaaacaattagaacatttcatacaaatccctaacaacagctgagaaatctcaactcccccaattaacaaatctcaataggccatagccgtcacagtctttctgtcacagccatgtgattttgtgaacatcacatatagaccgttggatctgttgtcatccgtatcatcacatcggaaccgtttaatttttatgattgtgaaacgacgacgtaaagttgttaaccgggaaagacgaagaaaaacgcgcgggaaaattgagagactgcatcttaatcatcgtagggattctctattttttggaatctgattcatatgtttggggtttaatagtctcagctcaaataaatctaggttaaactgtgtggatcgattcatatattctccgtcaaaaccaaaaccaaaccgatttgtcataattttttcttatcatccactttcattggctagagggacattgtaacggtgtcgtcgtcgccaaacgatttgcctcttcctaaaggtatgttctttcatttctctcagtgcccctttgcgtatttcagcttcttctttacgatctaattcatttctatgtttctttgattctttgttcaattctgaattgagaaaatggcgattcgagatctatcttttcggtttttcatgtaagaatataatctagctttggtgtttgtattggtttacttgtgggaagaaaagtctttctctttgggactttaaactttaattacttaactccaacatcatcatagttgggttctgtttgcgagattcattctgtttagttcagttctcttatagcagcaataacatattgattgatggcatcaatcttgtgatcgaaccatgggaattcagagttcagggaggattgattaattagaatctcatatttatgagagaataagagaaatgatgtgtgtttcttttcctatgtatgttgtgcactttcctatttcataagctcgcagg

SEQ ID NO: 1879 - DNA, 2121 bp, Arabidopsis thaliana landsberg
  unsure (1)..(2121): unsure at all n locations
ggttcgatcgatgtcatcacatcagtcagaatattgctgtgttttgcttttgcggagtttatcgagaaacaattattatgaaattctcgagattaaaaaaaaatgagttaatagggaaccgcgaataatgattggtttcatagatgcacgaacacgtcaatatttaaaataattcaaccgcgttcgaaattattgcttaactaaaccctgcaataatcaaattttctgtttcgacggggaataaaataacgttacggctgagttatgcaataagatttcgtgttttggccgagttatgagataccatatgttattatgatatatcaaaccagccaccaaattgttggttatattattagcttgaagatgtgcaatttgaaaacagaaaataacttttattttcagcacgtgtcgtttgacaaatcatggtctgtcaaaacctctaggaagtatgttgttggatatagtatgctgttggacaaagtaggatgttggataaagtttgtaggatatgacctagtttcacggttcctctattnggaaagtggttttgattttttaatnactngatcttcgcaactgttggctcaagaaaagcaattacagggtttggccgagttataacaaagtgatggctgagttattcctctattgtggttgagttatgttagaagatctcgattgttcgaactacataagagaaaacnnnnnnnnnnnnnnnnnnnnnnnnnnnnnnnnnnnnnnnggttcgatcgatgtcatcaaatcagtcagaatattgctgtgctttgcttttgctgtgcttatcgagaaacaattattatgttattctcgagattaaaaaaatgagttaatagggaaacgcgaataatgattggtttcatagatgcacaaacacgtcaatattcaaaattattccttaactaaaccctccaataatctaattttctgtttcgacgtggaatcaaataacgttacggctgagttattcaataagatttcgtgttttgtccgagttatgagataccatatgttattaaaaatattctccgctacgccagatacgacgtcggtttgttacagagtctcttttattgaccagatacgtcgtcgttgtgacaaaaaccaaatgacacacttataaatctcctaaacagaaacctaagttttaaaattccaatttctgatttcagatccggagctccttcttgcttttcgtctccgaatttcccagctaaaaattaaagaaatgagtagcaattccgagaactcgattgcgagtacgcaatccgtcagccgttggggacgtgggttaccatcgaagtgtcattgcggattagacgtggtcatctatacgtcgtcgtcagcaaagaaccctggaagaccatacttccgttgtcctacgcgtttagatgtaagtatataattgatttgagggttttatcggtttcgttgttaattgcggatgtgattgaatatgcaggaccatttgtttaaatgggtcgaagatggtacatacgaagtggttgtagacagttggccgaaattgtccgtcatggacaatgagttaagcgcggccaagtccgaggttgctgtcgagctagaagcgttacaggcgatggtgaaagaagtgaaggaagaagtgatgaggagcgaaagggaaaaccagatatggaaattgatgatcaaactttgctgcttttgtcttgcctttactatcattgtcattgtttttgctatcttaatgttcccaaaaatcaacgaacaaaggctttttcttggttactagtttgtcttatgtttgtatgaattgtttgctactggaatctattatgtgtttgatgtttatctcagcgtatagggttaattcgtttttttggttcaagtagtagcttgcaatgaaatggaactttgtcttcggccaagctaatccaatatcgttgacttagttatactggtaatgttgtggctgagttaatatttgttgtgtcttcggaaatataggttacggctgagttattataatgttttggatgagttaattatacgctatgactgagttaatcatacgctatgactgagttatgataaaatttaacaagtaacctcaagcgataacca

SEQ ID NO: 1880 - DNA, 2527 bp, Arabidopsis thaliana landsberg
  unsure (1)..(2527): unsure at all n locations
ttttattaaaaaaaattataattcacaaatcaatttaaagttttcttttgaaatggttatttaattttatagatttcatatgttatatatattctaaatgttttttcgttaaatatctaaatattttaaaagatttaaataactaatatttagttttaataaagtataatattaataaagtcataagatttctccttttaaaaagtaattagaattgatggagaaatattaaataaggaaatggtaataattaggaaaattaattaaataataataattaataccaatggcattccttgtaaatatgttccaacttgaggatttgtatgctaaaatggctgcaaaaatgtatatgtagattcaaataaactataactcagccataaataaacaataacccagccatcaaacataataactcagccatgaaacaacataacttagacatcaaagaacataactcagcaatcaaaaaacataactcaaccaataactatcataacagagtacaaaccttaactcaccaccatgtactgtnnnnnnnnnnnnnnnnnncgattctattgttgcacgggtacggttgccaccccatctaagcaacggaatctcatcctctttgaccacattcccatatcgctctccaatagtgttgattgaatcatacgcccaagcatgtaacacgaaagtcgtaccattgatggtgtacgacttgctaataggcctcaacagttttatagaatcaacaagggcttcaaatgctgaccgaccccatggataaatcttcatggcttcgtcatcaaaaattcttttgacactctcaaatggtatcctagagttaggatgcaagccataaagtcgaatggctagaagagtcaataacccgaaccatctacgcttctcagtaggccatgctgtgcacactactaagcctcgcctaagttcatctaacttaggaccttcaccggttggcacactcaattccatgaagaacgttatgtaatccgcttcaggttcaaacggttctgtaggcaatggatctgtgtttagccccgtgatatgaccaaatgtcattaaggccaaacctgataggttgaccacccactagacaccaaatctccttcttcagtattccccttctggggtaaagtcttggagggtaattccttgcttggtctttagacatctgataaaccataaactagccgtaagcataaataaactcagccacaacataaaataaactcagccacatcacagaaactcagccaaaacataaaccaaactcagcgagagcataagagaaacttaaccaaaatataaaacagaaactcagccacagatgtaaggttaaaccataactcagagaaaacataaaacaaactcaaccacaacatgtaacaaactcagagacagatgcattgataaatcataaatcagtcgacaaacaaacagtaactcagccatcgaatcaaacagatctaacaaatctgccaccatatgtcaatcaacgacggcgaaaagaagtcgaaataagtatcgttaaaaaccatcaataacttcgcgatagtttttggaaaacggttaaaagtcgcgggaatcacttgctattgaacttagatgtcggaatcttgtcggaaaattcaaaatacacttaggatatagacttaccgaaactttgagaagttctgttcaaatgcgacttgatagggatgtgactttactaaactagaaatgcgactccgccgtaagaatttcggtcagaacagacgagagaaagagaaaacggcgacaaaattagggttcaagaatcgttctcgtcgagagagattgagagcgatagtttttttccgctgatggacagtaatgttcaggggaaaactgaaaggtttatgcggtttcagatgacgtggattatgtgtaatgacatgggttgattatgtggataatcaaagttttttaaattaaaaacaaatttaaataataatatttaatgacttgatagggaagttactttactcaactagaaatgcgactccgccgtaagaatttcggccggaacagacgagagaaagagaaaacggcgacggaattagggttcaggaatctttagagattgacagcgatagttttctccgctaatgaacagtaaagtgcaggggaaaaccgaaaggtttatgcggtttcagatgacgtggattatgtgtaatgacgtggattgatgatgtggataatcaatatttttttttaattaaaataaaaataataattatatttaataaaactaatcaagagtgttaactgtaattacacaaatactgaaaacatgtgaataaaaaaaaaaaaattgttctattctaggaataaacatacaattgtgttctattctagtaattatttcgataaagaaagtcgcttataagtctcaatcatagagagaaattttcatatcttctaaacttattcaaaaccctagtttattcttacaacaatacttctgatttagctatggctgattccggcatgaaat

SEQ ID NO: 1881 - DNA, 1951 bp, Arabidopsis thaliana landsberg
  unsure (1)..(1951): unsure at all n locations
atgaacatcaaagttgttaacttagagaattggcatttggattgtataaatggttagataaacgaagtctaacattagtatgtgttagtcttgtaaattcaaataataatcggggtcttggtctatgggacgatgcttcacagtgagattcaaaaggctacccttatcacccaccaacatagagaagccaaattaggtcttttaccaactgtagggtaaagaactgtcttcatgtaatcattataaccaccaccatcttgttatgctttgtttcttcttcaaattccagctttcaatatacaacccggtttacgttctggtttacactttacacgtttcaaatttacaaaattgggccgattgacagatattggacctggcccatcaatctaaaaatgcgctattttgaatcaaagacctatttaaatcttccgacgacgactccgttcacatagcagaaacagtggcgacaaaccctatcacggagccaacccgcattttcctctagctttcgcaccgcctctcgctctctcgccccaccggttcgtctctgacattttgtgcttgatttggccgttacaaaattctgattgctagttcatgagattcctttttgacaggtgacataaagatggatggtagcttgtatggtgagtgtggtaactatattggacctgagattgaatctgacagagatagtgatgatagtgtagaagatgaagatctccaagagcctgggggttctaatggctggattaccactatcaatgagaaccaaaatattgttcttcctgaggataagaagtactaccctattgctgaggaggtttatggtgaggatgttgagaccttggttatggatgaagatgagcagtctcttgagcaacccattatcaaacccgttagagatattagatttgaggtgggggtcatcaaggatcaaacaacaacgtatgtgtcaacactgtttcttatcggcctcatgtctaatcctgcgcttgtgaggaatgttgctcttgtggggcatctccagcacggcaaaactgtcttcatggatatgttggtagagcagacgcatcgtatgtctacttttaatgctgaaaacgacaagcatatgagatatacggacacaagagtcgatgagcaggagagaaatatatctatcaaggcggttccaatgtctcttgtccttgaggacagtagatccaaatcatacctgtgcaatatcatggatacacctggacatgtcaatttctctgacgaaatgactgcttctttaagacttgctgatggtgctgttttcattgttgatgctgctcaaggagtcatggtaactagtctttactctctcttttttcaagtatactatttgtagtactaacgctattaatcttttttcaggtaaacacagagagagctatacggcatgcaatccaggatcatctccctattgttgttgtgatcaataaggtacatcatgcctaaagtgtgaaattttatattttcatacatttgcttgacctttgctttttgtctgcccaacaggttgataggctcataactgagctcaaactacctccaagggatgcttactacaagctgaggtatacaattgaagtcattaataaccatatatctgctgcttcaacaaatgctggagacttacctcttatagatcctnnnnnnnnnnnnnnnnnnnnnnnnnnnnnnnnagccggatggtccttcacattgcaatcttttgctagaatgtatgccaagcttcatggtgtggccatggacgtggataagtttgcatctagactttggggagatgtatattatcaccctgatactagggtattcaagacaagtcctccagtaggtggtgcagaaacagcatttgttcagtttattctggagcctctaaacaagatatacagccaagtgataggtgaacataagaagagtg

SEQ ID NO: 1882 - DNA, 2885 bp, Arabidopsis thaliana landsberg
  unsure (1)..(2885): unsure at all n locations
gaatcttcccattcacatcgtcggataatgcaacaagttntgtgatcaaaatctgttgtntgcttctcttgacctttgagaatctgttcgagcatagattcgatcgttttaggggtggagggtgggcttgtgttgaagaagcatgattctgaatgaagcttgcagtttgctgaaccggtttctgatgtgtagattgctgattgaagctcatgtatctctgttgatccatcttttctgaagtggctaaactgtcaacatgtgcaacatactgaacttgcgttttccttgcaatgtcaacacttttggtactaatgttggaagctaagctgtcaatcaacattgttgcatcttctggatatcttgacatgaaattcccattactagctgcatccaaagccactgataacgtcaatgctctgaaatccaagcggctttaaattcttcagctgcttcttgagagaagatagagatcttccttctcagctcctcagaccttgcatcattaaaaaagttgttaagaaaagcaacctttatttctttccaagttgtcagagatccaggcttcaactgcttaagccaagaagatgcatccccagcaagagaatatgggaagagcttgcagggaaggtagtcagaagaaacaccttctgccttaatactcgaaaccaagtcttcaaactgctcaatatgatcgataggatgatcttgtgctagaccatgaaaagggtgggtactcacaagagtgtatagaaagcagggtttatctcaaaatcgcttctttcgaatgtaggtggtcggattgcagaccgattggaatagaagagacccggtctgttgtagtcatcaagagtcctcccccgaccatctgctctgatttcttcttggtgtccagagacacccagatggtgttgatcgacaccatcaacgatttctggtatcaggtttcactgttcatctattttctgaccctcttcgttgtatgctgacaagctttgtcgcataacactccagcagcatcaagtattactatcagcatcttgagttgcgtttgaattccgtaaacttctgaaacacaagaagaaaaagaaataaaaacgcgtaagtaacaaaagaaaagaaaagcttagactaaattctacacctaatctaatggtgaatcgaagaaaaatccccggcaaatgcgccaaatttaatatgagtcaaattacccaaataactactctctcaaataaagaggttgttataacacttagggatcggatttcacaaagttctcggatcacacaatagactaacagtttcgaatatagctaaacataaaatattataaaagtaaaagacaagaaattaattaaaagtttgttttagattcagatgattaagatgtcgggtttagggaaattctctagagatatcagaatagtagatttagtagtaaattaggaatattattgaaccattctagaacccaaatcactaatataaagtaaccggtggtgtgccgtgctactcactatgcttaatagtattgattccaactcttcttctaatccctagaactaagcaagcattataatcaggtttgataagttcacctaagtaatggacgctagcacgcatctaaatactaggctcatcttagatagttctagtagtaaatacctatggtgggtatacctattatcctaaaatcaagttctagttagttactctaaaactaacattaagaacaatctaagatgaagaattctaaatatattatcctaacagggtttttgatctactaattcatccaaatccctaatgagaatccctaaacccaacaagagaactactgaagcatgatcatagaagaacaaaacatgattgaataagaaatcaatgatgaaattaaaaagagaaaagagtttagaagaatcttcactaaagggagtctccatagggttttgccccaaaggacagaatagagaataatagtaaggtctaaacaatgaccataaaaactatacatatgatctataaacgtgatggaccttctttagaaataagggaaagttatgggccgaatttggaaatcttcaaaacgtcaataaggtgcgtcttcgatttgtcgtcaggtattggtgttgctagacacctacacggttcagcagcataaactctttgttttcctccagaatgctccattatctccaaatgaatctcaaacttgtaaagacctcaaaagactagaaaagactctagaaataaaaaatagactctaaaactactaccaaaatcatagataaaaacagtaaaaatagggatatatcaactcccccgaaaccatggaaaaggtttgaaaacataagaactcccaacattctctagcctattgccatgatcattttaactaaatccatatgcctagcaagtctaatcaaatcctaaccaacatgtacttctctgcaagcttacacaacattctagattccatacctaagttccacaactatatccatcaggctttcatcgcatggtctcatcaagcaagctaatattcaagaaccttctagacttattcatgtactataccatgataaatcgaccatcctttgtatatatatatatatatattctttttttctttggtgttctttctctccccagacttattctttttagagaataaacaaaagaaaactcgcttactggatcgacactctcggcattattccaaacttggtaattgatgattccaataatgtacantaatgtggtcataggaaacattcctacccatatacactatctgaaaatcctgtcaatctctcattactattatttttggttataaggagagagggaacaatgtttttttttcatcacattggtctcaatatcag

SEQ ID NO: 1883 - DNA, 3090 bp, Arabidopsis thaliana landsberg
  unsure (1)..(3090): unsure at all n locations
atttatatattctaaccttgtttattcatactaccttttctttgttcctccatccaattcctctttgaaggcttatgaaagttgcaagtatttttctatgtgtattgaaaacacagtcgaagataagatcattctttaatgtttcagcctcgtcaatgacatatgtgggattcaggtgattggaactgaaacttgagaacaagttttttttcgagattaactaaaaatagagtgcaaagagaaagcttttagaaatcaaacataaaatcgagttcttcgatacaaacatagtttaaccaaaacatgtacagagtactttatctttcttttttcttggttcaaagttcaaacagagtagtttaaccaaattttaaaaacgatattaaaatttggaaaatttgattaccacatgttgtgcacttataaccatgttgtatttttttataaagttcagaatctcatggctaaggatcgtaaaacttataaccatattgcattcaaatattataaccttgtttattcatcccgtaattcatactactttgttggaagataatgcatttttaattcatactatttccaaatccaataaacctattaagagctccacatgctattaattggcaaacacaattactcttggatcggccatggctactactgttcatctcagctcattctccctcttcatccaatccagaggaagaagagacaactccatatcttccgtcaagagtctcaaaaaacgcacaggtttgtctccctcttctgccctcacctcacaaggtggcagagacatgattccaccacacggaaaaagcaatgatcacaactctgcttttgatttcaagttgtatatgatccgcaaagccgaatctgtaaatgcggctctcgacgtttctgtaccgctccgagaacccctcacggtccaggaagccgtgcggtactcattgctagcgggcggaaaacgtgtgaggcctctgctctgcattgctgtctgcgagcttgtgggaggcgacgaggctactgccatgtcagctgcttgcgcggttgagatgatccacacaagctctcttattcatgacgatcttccgtgcatggacaatgccgacctccgcagaggcaagcccaccaaccacaaggtatgttgttaaatcatataaaggctcaaagaaatgctcactagatttgaatcgttcattgattttagtaaatattcactcgtgttggaccaatttttgctcaaacaaggtatatggagaagacatggcggttttggcaggtgatgcactccttgcattggcgtttgagcacatgacggttgtgtcgagtgggttggtcgctcccgagaggatgatccgggcagtggttgagctggcaagggccatagggacaaaagggttagtggcagggcaagtggttgacctaagcagcgaaagattgaatccacacgacgttggattggagcgtctagagttcatccacctccacaaaacggcggcgttgttggaggcagcagcggttataggtgccataatgggaggtggaacagaggaagaaatcgacaaacttagaaagtatgcgagatgtattggactattgtttcaggttgttgatgatattcttgacgtaacaaaatctacagaggaattgggaaagactgcaggaaaagacgtaatggctggaaagctgacgtatccaaggctgataggtttggagagatcaaaggaagttgcagagaaactgaggagagaagcagaggaacaacttctagggtttgatccaagtaaggcggcgcctctggtggctcttgctagctacatttcttgcagaaacgactgatacttttcatggacttatcagatcttcaatgcatatgatctcctaacaagtacatttagttcgatctctgatctttttttcttgtgaaccatatatgttgtgatcatctctctcatagtgaatcttaatgtcatgtttaaacaaatatcaataagggtttctcatgggaactaaatcatagtgtaaggattcagataatttagaacaagtgtgcggaagatttcaactaaaacagggtacgactcctgccactatatttgtttttgttattgaagtagtagcacgaacgaatttcggacccaaaaagttatgttcaaagtgtgcctctccttattaagaccagccttcatatgtagacggaccaaaatcacagtcgaccggaaatggttttttgttgcagaacatgatactgtacttacaaacactgctatgtcgtaacttggaaggaatttaatgccattgagaaagagagagagagagagagagagattatttttttggtgagtgcccgggagaaactccagggtttattgaaatatacagaaactaaattacaaagggactagtcgtgagcgtaaaactccatcgacgtcttcccgcaaaatcgaaactacttctacaggtactgaagcaaacgcgtgaaagcccaaaagcaaagagaatgcatggttagtcaacccatctgtaagccggttagccttccgatacacatgagacactcggactatcgagtcctttctaagaaagccatgacacaagcgtacaaggatggacagcggattagtttcctcaatttcctcaatccctgtcgttaaaaacccaactactacctccgaatccacctccacttctaaacgcataatcttcttttcccaagtaagatacaacccataataaactcctcgaagttctgctagagagatagagattgaacattgattgtttggattctcaattaattcgatcatattaaatgattgtctaagattttccagtgattgcttttaaatttttaatgttcacatatgtgcccagcccaagaaaacaacaataaaataaaaacaaatcatccattnnnnnnnnnnnnnnnnnnnnnnnnnnnnggttttaatacaacaatactactttgataaacactggttacctcgtgaagaaatttaatgcttcgattccccatgaaattatcaaattaaatcatcgtctaacattctttctcgcaatgtttcccggttcaaaaaaaaaaaaaat

SEQ ID NO: 1884 - DNA, 1994 bp, Arabidopsis thaliana landsberg
acaccagaatttcttcctctcgcttactacttagtcttttgcattagggacttgttttgaatatgattttatttaccttcttctgcagatctcgtttcaaatgtggacaacccagatgtaggaatctctcttttcaaagaagcaaggggacttagctttccgatccaaagattttacaaccgcaatcgattgctaccctcaggtaatatctctaaatgcaacgtacctctttaattacatgccaagagccatcatagggctagacattcagtcatcatagggctacacataactggaatgattcatgggtcgaaaaggatgaaaaaagtgtgtatggttccttgtattgaaagacatctaaatacaaaaatttgatttttgtcccttatgaaccttaaccattggaggactatttttataagatactctcattttgttcttagcttagaaataacaaaattttaatagaaataattgttaagatccaaggttaaccgttagagatgctcttagtttacatatctaatctgggatccaaagtagcaaaaaaaaaatttaaagcttgtaattgatttcatttaaagaaaatttcatgctttatttattaattacactactatatgatttaatttaataattatgtcaatcaaattgaagttacatcaaaagagggaccagagagaaagagtttcgtgagcagctaaaaaccaaagtggggaagtcttctttcttagtcgtcgttactaaaacacaaatagtttattcggcatttgtgtttaagtaaagatgaaagatcttatatatgtgtcattaatggctaaagttagacgattccacaacggcagccaaaaatctttgaaattttccgattcttccgtttcaagtcaacgttttccttcgctccctctcaccttcttcttcacaaaaacctgaactttaatttgaatttgcccatatttttagatccacatttattcattgatttgctctgagtttgtattatctcaaagttttatccttttgttgaatcttgatctctcgattattccccaccaagcaccaagtgatcgatcttttgtctcactgaactgggttatgcttgagatttgatctgacaactaagagtttcctactttggcgtttttagttttgtttttcatggcgtatcatccagtttataacgagactatgtctatgggaggagggtcaagcaacgagtttggccagtggcttgacaagcaactcgtgccgtttgatacaagtagtggctctttgagggttgaattattacatggtaacttagacatttgggttaaggaagctaaacatcttcctaacatggatggtttccataacacccttgttggtgggatgttttttgggttaggtcggaggaatcataaagtggatggtgagaattcttctaagatcacaagtgatccttatgttactgtctctatctctggtgctgtgattggtagaacttttgttattagcaatagtgagaatcctgtgtggatgcagcattttgatgtaccagttgctcatagtgctgctgaagtacattttgttgtgaaagatagtgatattatcggatcacagatcatgggagctgttggaatcccaacggagcagctgtgttcggggaataggatcgaagggctctttccgatacttaatagtagtgggaagccttgtaaacaaggtgctgtgttgggtttgtctattcaatacactccaatggaaagaatgagactttaccaaatgggtgttggttctggtaatgagtgtgtaggagttcccggtacatacttccctttgaggaaaggcggtagggttactctgtatcaggatgctcatgttgatgacggtactcttccgagtgtacatcttgatggtgggattcagtatagacatggaaagtgctgggaggatatggctgatgcaataaggcaaacaagaaggttgatttatatcacaggttggtcagtttt

SEQ ID NO: 1885 - DNA, 1762 bp, Arabidopsis thaliana landsberg
gattcaaaagctacagagacaaaaaaaaaaacaacaaatcgaaacctacagcacaagcttttgcagtttccgacaacgacgcaatccctaagttacccagaacgtacctgcgaggaagaagaagaagcggcggcgtcaaaaatcgaagaagcggcgacggaactgatcccccttttttcagacgaagctaagcggcaacgcaatccctaattgcttatctatataaatataggttttccattaatgggccctaacattcgtcgcattttgttgggcctatttccaattcagtaaacaagaatatgaaggagaacacagcgacatgtattggaatagagagtacgcagatggtgaagatggtgagatgtcgtggttcaacgctggtgtgggaattggtcttggtgtctgtgtaggtttttggcattggggttggcctgctggttcgcacctatcaatcaaccaccagaaacttcagaaggaggattatctagtttcattcaaattgcctactctctctctctccctctaggctctaactccaatccgttgcacatcacttttgactgcagaactctaagctatatagtctaagctaatactgctgtctagtataatttttgttttatgtacttttttttatctctttgtgccttcaaattttgaaagaattcattttcccttcttcttgtgtttggtcagattcagattgaaagaaacaaagcttgttgctggtaatgtgaatcttattttctgcttcctgttaataaaatgcttatgagtgtaaagagtttttggattcacttacaagccttgcaagagttactaatacacacacacaacccctctttattttattcaaatgctatgtctaaatcatacaacctctctagttagcatcaagagctaagattcaaaagtgttggttataacaatacattgcctttaaaaacagtcaagggtgtgtttggactggctcaggggcaatctcagctccagaaaacccgttgctcgcgtgcagctggttattgttactgttacacaatccccaaaagtttgcagttttaacatcgtcttggttcatttgcttggagaactcttcatagttatattgcaacaaagctttccctccaaattcggttgggattttcctcgtcgaaaaatgtgctcataagctccacgctttcctggttctttgggtaaacaaacttcaccttgacgaatgtctttgcatgttcctgcacatatagacgaacaaaacacacacaaagttgtcttaaccaaaccaatgtattgtctaactatgagtcatagatgaagtgattcgtctaaccttccagaatgcctcaaagagtcttggaggattatagaggaaagctacagctagtctctcagggtagtgattttgcagtatgttaatagtttctctggcagatttaataggcacactaatgctcattgaccaacccgtgaagtcaataagccaagacatctgttcttgatcctctggcagattcagaatagcattcgcaatgagatacaatgattttgtgttctacaaaaaatgtcaatgaaaatggaagttttagcttgtgctttgaagttaactcattaactaagaaaaatgatcattagattcctgcaagccgggtctcagtataagaaccgttcttccatgcctgtcatggaatccagctttgtaaactgtaccagtctcaccttcacctgaaacttcattctagtaataaagcaaaacgcaacgggt

SEQ ID NO: 1886 - DNA, 2476 bp, Arabidopsis thaliana landsberg
  unsure (1)..(2476): unsure at all n locations
ttttgaagcgcacttggatatattcgacgaagttgaagtcggggtatgtaactagttttctttctcatacgatttatccagaagcaaaagggggctggtgtattatagatgaccttcgttttgtttgtaaggctcaaacttggtgtcacgtttcatttgcttcttatttgtaggtacgagttcaagccatccgcgggcttccattgttctgcaaggatactcctgattttatatctaagataattgatgttcttgtacaatgtctaaatactggtaattctgtttttttttatcatttaaccttgatctgaatactttgttttcaccatttgactatgaaatttgatccaaatagaggaatttgtggagcgtgatgctgtgcacaaggctcttatgtcattatttcggcaagatactaagggtaattcaatttcttctgcattcatcttcattgtctgaagatgacaattcatcttatagccgcgatgctactttgagaaaattagtaaatattgtctttcagtcgtatggtgttactcactccatcttaataaatacagactgcatattgtggcgtgttcaaaacctaagatatatactatgttggtattagtaactgtattgcttcttatgtttcattatctttacctttttggtgtagcatctttgactgcattgtttaaacatactgaggcgactcttagtactgatgagcaaattcgtatcagagataaggtaagagtcttctctatgtctttttctatttttgagattctgctatatcttagctcgacttaacttaaatgaaattatcttatctcattttaatagattttgtattttcatgtaggtgttccctcttgaaggagaactgttaaagcctcaacaggaagtgaaaaaacatataaccgatttaatcagaaaggtctttgaccacatggagtcttctttgtttctatttttctgactttcatttcctatccctttggtgacattctttggatattttcagagcctaggggatgtaacaagaaaagaggtcaatatgtttatggatttcctgacaagtttgagtatatatggagggaaagctcctcaagaaataatgcaagaactgtttgaaggacaggccgatttggattcacactttagtgtaagtttctcttgtcaattcttctggggatgaacgaacataagtttcttgcttgaatacgatgatagtaatgattatacctcccaagatgtttatcgagtttttaggtatacaagtagtcgttgttatccaggaatgaagtctgctagtctttttgcatgcctgtgagattaaaaggatcctttccctagcatagaattcaccctctctcaataaaaggctttaaaaagatatacaacctttacatatcttgcatgtgttagtctccattgtttatcttgcataaatgtttgatgtgacatttcattggtagtatgtgcaaatgttgcatgtaaattttcatgaagtcagttttttttttaaaagtccagtaccgagtctaggaatgaacataggaaagaggtcaacagttgtcttgatgcaaatctgactataggaagcaagttttaaaattgatagcatctgttttagttacaatgagatatctactcagattttacattagtaaatattttaaccgtgttgtggtaatagttaaggttggagcatggaagtacaggcttctgaatgtttcatctagatgatttcattattgggaattacttctgatgaccaaatttattgctgtgtagcacttgtgtattttatagttgagatgccttgaaccacatatctagaatctaacagagacttctctggcttgttgattttttgtgttcattattcacttttgaatgtgttcatattcaggctttgcaactgattttttggctagtgttcattgttcaatcttctgtctcatgattgattgtctttgaatgtatgcttctgatattgtatatcacgctactggttctgattttccaatctgaaaagtagtagtttatggtttctcctctttactaacaggttacactggataagcataagatgagagcagaaaattctgagtttgtttggtcttcgccaccggatgttcggaaactaagtggtcatcccaaatcagtagaatcaagctctcacagggaagaagaacattcaaatgtttcagacgacagccaagacagnnnnnnnnnnnnnnnnnnnnnnnnnnnnnnnngatctcatattattcagaggtttccgcaattgcgtcatctatcaggggttatctccggtgcactcgcagagagctgtcttggtgaagaaagatataaattcgtcttggacacagagccaaaaggtcaactctccttttctgatacctctgatatcattaagctaatggttttattctgggaaccaaaaagtttagatagcaagtttatctctcgggaaaaactg

SEQ ID NO: 1887 - DNA, 2488 bp, Arabidopsis thaliana landsberg
ggccttaacagtagttaaaggacttgcggaactcatttgcagaagcactgcaccatttgtgtttgagattgtcaatatgatcggaactggagaaaggtcaataggattctggacggagggaaatggtcttgtgaagaaacttgacaaagaacctcgaagcataggtactttatccacttggcaagatcatcttaaacatataatatggcctggagaggccagttctgttccaaaaggatgggagatcccgactaatggaaagaagttgcgcattggagttcccaagagaatcggtttcactgatctcgtgaaggtcacaagggatcctatcaccaattcaacggtagtcaaaggtttttgcatagatttttttgaggctgtgattcaagcaatgccttatgacgtctcttatgagttcattccttttgaaaaacccaacggtgaaccagccggtaatcacaacgacttggtctaccaagtgtacctcggggtgagtacgatcacacactaatcatccctcaaaaatagcattagcaaaaccattttagtgaattacttttgttttcttttccatctcagcaagttgatgctgtggtcggagatacaaccatactggcgaacagatcctcttctgttgactttacactcccattcatgaaatcaggtgtgggattgatcgtcccattgaaagatgaagtgaaaagagacaaattcagcttcttgaaacctttgtcaatcgaattatggttgacaaccttagtctttttcttcctagttggaattagtgtatggactcttgaacatagggtcaatccggacttccgtggaccggctaattatcaagctagtaccatcttctggtttgccttctctaccatggtttttgctccaagtacattctatctccaccttttacatgtcatcttatatatgtttctatttattactttgtttgattcttactcttgagttgctgccagcaggagaaagagtgcttagcttcggggcaagggcccttgttgtcacatggtacttcgtccttctcgtgttaactcagagttacacagccagtttggcatcgcttttgacatcacaacaactaaatccaaccataaccagcatgagtagcttgcttcatagaggagaaacagtgggttatcagagaacatctttcatccttggaaagcttaacgaaacaggtttcccacaatctagccttgtgccctttgacaccgcagaagaatgcgatgagcttctgaaaaaaggaccaaaaaatggtggtgtggctgcagctttcttgggaacaccttacgtgagactctttcttggacaatattgtaacacttataaaatggttgaagaacccttcaatgttgatggattcggctttgtttttccaattggatcacctctggtggctgatgtttcaagggccatcttaaaagtagcagagtctccaaaggcagtggagctcgagcacgcttggttcaagaagaaagaacaaagttgtcctgatccagttaccaatccagattcaaatccaactgttaccgctattcagctcggcgtaggcagtttctggtttctgtttcttgttgtgtttgttgtctgcgttctagcactcggaaaattcacattttgtttcctatggaagacaaaagggaaagatttgtggaaagagtttcaaaaacgagacaccaactcgtacatcaacgacatagagaaatgttagtgttctcaagatatgcgtgaagacagcaataaagcaacaaaccagacagactacggtattgagttaagagttaggaatattgcacaagtaaacatctagattcatgacagagactgtctttaatttaacaaaacatggcatatgtttttattaaacaaactattgtaattgtgtaaataactattttcagaaataggtgatccatatactgctgtataagagactatcaagttaccatagaggttgatttttgttacgtgttatgcaagacagtaaacctaaggctgtgggctcttacatgtggggaaaattgtacttttatacccgtaatatatgctgaatgtatttttcaacctgaacaaaaccgagggataaattctaacctgaactataaaaaaatttgaaattacatatctaaacttaatatttggtgctaatttcaaaatcgtaactaatggatcgttgagtcaactaaaacatgtttgatgagctcaaaaagacgtcgttttgtttttgtgtgaaaataattaaattatttgcaaaacgcaggactcatataagtgaacgtgaccattagaggcgtctttaaccatttgatcgaccaacattttttcaattattacgcaaacgttttttttttttctttgtcggcacacaaacgtttttattacatccccaaacccttttgtcggcaaaattttacaaacaattaaaacatagagttttcgtaaatctttttttttctcattcgtcctc

SEQ ID NO: 1888 - DNA, 4012 bp, Arabidopsis thaliana landsberg
  unsure (1)..(4012): unsure at all n locations
tggtgtcgaccggcaccttccagtgtcgatcgacactagatccggactgcaccttgtgaggtgcaaatcccaatgcagcccgagtctgtttatactcctcctatcccttatccgaggaagtgtcgttctaagcaggagattcatgctgctaagtgaacaaccataatggagaagatcctccattctcttcctaaggatacatctaagacatcttttgcctcacttaataggtatgtcaagcgacttgttgacaatggtattagctcagatgaagcctcactgctgccacgggacatcagtgaaatcatgctgcctaagttcaagaaagagaaggcacagagagtggacattgcggagtacatctgcaccatcactcatgattagaccactgagaatcttccagatccaggtagctttgttcttgattgctctatcttcacaagcaggttcagtcgctctttgtgtgacatgggatcaagtatcaacctcatgtctaagtctgttgctgagagactaggcatgactaactataggccgactcgcatcacccttctcttcgcggatcgttccaaacgaatccctgaaggaatccttgattttgtggtcctcgactatgagaaagaatccaaggatcctcttatcctttgaagaacgttcctagctacagctggtgctaggtttgatgtgaagagaggtagaatatctctaaaggtttgtgatttggagatggagtttggcatggatggttaagagcttactaagtctattagtagtattgcctctagcacaaccacacctcctccaactgctcagaatcccacaacagagccacacacaacactcccataagcttagctcgccaatgagagttgtagagcaacgatatcaattgacaccaccactcatgtcgatcgacaccctcgagattcatagacagagggttctgcacaatctcatcatcccacaccacttgaggacctatgtgataagttctcttctatctcttctcctgctttaccttcaattaattctttagattcttcgaagtctgcttcactagataacaatcctagagttcttcgaggatcaaaacaagcacttagtgggaggcaacccacttgtttgatttttctttcccttttcttttattttcgatttatttttcccgctttctctagatttgaatgccactgggacagtgtcgtttaagtctgggggaggtccttactaattatacattaatttttgattcttattattttcttcgtttttgagtttattgagtcatttttccttagtttagttaggaatcatgacctatacttctcttgattattgcctgattgatgagtgctacaggttcaagtcaatccgactattggaaaatctagatggcaaaacaacagacttgaggatatcatagtttccaactcaaccacaaaggctggagctaatctcactgctcttccttttacctcttcaaacggttagtgttaatgggacttgtctccttgttcatacctgataagtcgactactgtgataaaaagaaagtgttcctctcccaaataaaaacaaaaattatactcattagagaatacataatgagagattgagaagactttcagatagtggataggggtaagaatgttacctatgacctcaccattatacataatttgaaacgatcaattacaaaggttggcaaaatgccaagggtgtcgatccagtatgcgagttctcctttgtttactctctaaaaataaaaagtctggggagagaaagaaccccgaaaaaagaaaaaatatataaagaatggtcaatttatcatggtatagtacatgaatgagtctagaagaatcttgaatgttggcttgtttgatgagacccagcgatgaaagcgttgtggatatagttgtggaacttaggtatggaatctagaatattgtgtaagcttgcagagaagaacatgttggttaggatttgattagacttgttaaccatatggaattagtttgaatgatcatggcaataggctagagaatgttgggagttcctttgttttaaaaacctcttccacgggtccgccttttgtattttgcttgagggcaagcaaaagctaagtctaggggagttgatataacctgattttcactgattttagctatgttttaggtataggattttgagtctttatgttatttctcaagtccttttagtgtcttttcagatactctatgcagtgggacaacaatgaagataaggagacattttggagcaagagctaaggagaaggaagctaaggtcgattttggatccaggaatcagcgaggagtgtcgatcgacacactcttggtgtcaatcgacactagtttcagcccaacaaaagtcctagacgctttcaagtttacagaagaggaaatttgccccagaagacttccctatttgcattattagtccctggacgttttatagggtttatatacatttttttagaccctagtttcgattatcaatcttttttgcaaaaccctgttatagagagacataaactattcatccattgttttcagagattcattcagttttgaatacagtgaagagatcctttctttctctcatccttattgatgtgtttatgttttcatactcaattatgttgtttgcttcaatcaatatgtctgagtaatctgcttgtcaggaatagggtttctcattagggattcatatggtttagtagattgcctcctctgctaggttatctgtagagttcttcatatttaattatgcttaatgctagatctagagaaattaactagattttgaattcagataatagatatgcccaccataggtatctgtagttggatctattatttgatgagcctggtttataggtgtgtaataagaatcagcctatctactaaggtgaacaatcgaactcgttaagaatgcatatttaggttaataatctttcggcttctccgattattcttagctatagatatagggagtttcgcgaacgccaccggttattccaaaattagagtttgcttttttgaatggttcgataacaacctagctatcattagaactactaagctatagtttcctgagaataccctaagcctaactctttattttatcgtttcacaaccaatcattctactgtccttttactttgtttacttttttatttcattatttctcttctaacttaatcttgacattcaattcattgtgtgaacaaaagaactttcaggaaattcgcacaaaagaactttggggaaattcgacccttaaatactacaaccgatctcttatttgagagagtaggtttaaggcaatttgagccatatcaaatttggcgtcgttgccaaagttcttgggaatcaccattgagttttgtttagaaatttcgtctagttcttatttttcttttttagtcactcggttcttgttttcttcttttctgtgtttcaggtgtatgcctaggcaaacaaggagcacacaacaaaaggagttgatcaacttgtctattctagacttgggaaaactggaacgcaccaaccgaaaaactcatagattagcaatggctgacaaagtcatccgagctgatgcagaaagagttttgagagcttaggatgggcaagcctacaatgacgctggtcaaagattggatgatcatggactcatcctacccgaggatgccaatgaggatcaggcgcgcctcattgtgcaattagttgccagagacgcagcagggctcggtgtcgagcgacaccaactgggtgtcgatnnnnnnnnnnnnnnnnnnnnnnnnnnnnnnnnnnnnnnnnnnnnnnncaacagaggtgtcgatcgacaccaacccaagattcttgcagctattcctcaagctgcggaaccacgtcgtactcttggggatttcaacaggcctgacctgttatatgctaatcgatcagcgattgtaccctcacccttccagaggaacgattatgagctgaagcatg

SEQ ID NO: 1889 - DNA, 641 bp, Arabidopsis thaliana landsberg
cttcttttgacttttctgactttcttcttagtacttaactacgtatgagaatggttaattaaactcttaaatacattttttagtttaatactacatgtaataacattttcaatagtatcgaataacattatgacattctcaaaacagctttttcctttcgttttcttccttctcttcctcgtctctctccgacacgcctcaaaccctaataactgttcatcttcttcatcaagaccactcagatgtggacccttctgtaaccatgcgagattcaatctccactgcaccgatctcaataagactgtcctagaacttcctatgtccggaacatttcttgtccgagatatcgactacagaaggcaaaaaatctatatcaacgacccttaaaactgtttggctaaacggcttttaaccttcaacatttcaggatctcctttctctgctcacttcgatatcttatacacgttcttgtcttgtcctaatgaggtcgtgttgccgtcttggtatccgtcgattccttgcctaagcaattctacttcatccttcttcgccacgtctaattattctcttgcacagtctatgcttccttcttgtcaaatcgtgaagagattacatgttccggctacttcgccatttgggga

SEQ ID NO: 1890 - DNA, 1652 bp, Arabidopsis thaliana landsberg
tctggattaataagataaaaaacataattcagaaagcaataaattaaggttaatgtcttgtaaccttaattaattggatgaaaagcataattaaacaatactcaaaccataaaaagagtaggaaatttaacgagtagattacttaaaaggcagcagaacctgcttcatcctcaccatcaagatcctcatcagcatcctcattcaaagggttaaatggtttaatgtcatcatcttggtcccgatcagtatgttcattctcaatgttgttagcacggtctagactggtcactgaagtgtcggttccttctgtatgctgcgtcgagccaaagtttggtgcaccatttggcatgtattgtttcatgtactccacaacagatgccagctgctcttgcaaggttatgacttggcgttcaagagtgactctacccaaagcaacagctgttgagctttcacctcgctcgcgtgtactgatatctccaacaccaaaaatccttccattttgaggtgctataacctgtaaagaaatcaaagaccaaaaaaagaaaatttcggtttctaagttttctaataagtgtggaccaaacaacttcagtttctaaagtttcttaaagttctaaacaacttcagttgataaagtttctaataagtttggacaaaacaacttctgtttctatagtttcttaaagtgctaaacaacttcattttttaataattttggaccaaacaacttcagtttccaaaaatttcttaaagcgctaaacaactttagaccatattaacaacttcagtttctttagtgctagaaactcgttaccttgtagtatatattgtcttcgtcaagacgagtgaggcctgtggaattggtgctatcatcagcagaaggacctgatgagtttctagagatctcgatctcgtcaagctgtctctgaattccttcatcaaaggcctttgccttctcatccacatatgtgctatcaactttaggatgagtctccctaaggatgtggagcatcaaaaggctcaacaccttctttttgttgctgtagaaaacatgtacaacacattaaggacacgtttacttattaagaagataacaaaaatgtaataaatttgaattcacttacaattatatttcagagttgttcataagttctagcacctgttgtgtgtcgatgtggcccaaacccgtcacggtcagagagtcgattggcagaggctgtctttctcttcttcttagcttcatcagtgctccaatactccaacatagactgccatgtgtcctcacttatccaatcacgtttgttcctagaagatttagctttagagatcatgtctctaaggcgggcatcaactacatgataccagaggtgatacacatcattcaaatgaattggattttaatagaaagattgatgcgaaaggagaacaaacaatttaggttacaaattaaaacgataaagtaagttatatgaagtatttggtaaaagatatcaaacttacaatgaagtctccccgccattggagtatatcatgatggggaacaaatgatatgttgaaccatcgggtcacgaatcatgctcttccacaagatgtgcaacatcgcctcgcagatgggagccggactgttcggtaacacaaacctcgtacgaaag

SEQ ID NO: 1891 - DNA, 3717 bp, Arabidopsis thaliana landsberg
attgaaactttgattcctaacttcttggaatgattctttttgagctagatttagatctgtatgattgatatgatgggtttggttagcttatgagtaaacagcaaatgggtgatgaggcagagatcaaggaacatttaaagccacatgcttcatctgaatcactggacaagaaacatactgtgaaagggaagaggttatgacagaaagtcaagtttcaatcggtggagtttcattcattgactgcttatttaagagacaatgagtacatcattggtcattaccgatccgcatggccgatcaaacagattcttatcagcatctttaccattcataatgagactttgaatgtttggacgtaagtgttgaatcatgtttcttgatgtatccttgtttaaagttcaagagccttgagtgtgtttgtgtgtgtgtgttctttgggatttgcaggcacttgattgggtttttcctgtttttggcgctcactatatacactgcaacgaaagtaccgagtgtcgtggatcttcattcgcttcaacaccgtttacccgatttgttgaggaaaacagatctccacaaacttcattctgagctcatggctcgccttccttctagtccatctagttggcatgtgatggaccttctttataactgtttgcctgaaagattttctcatggcaactacactgacatgtgtgttctggtaagaaaagactcaatctttctctctattcctgcagattactgtttcaaaatgtggccaagttcatatctttgtaattgcattgcagcattctgtgagggaagatcttgcaaacttgatagctcctttgatcttcaggccaattactcgatggccgttttatgcatttctaggtggtgctatgttctgtctattagcaagcagcacgtgccacctcctctcatgtcactccgagcgagtctcctacataatgcttaggcttgattacgccggcatcgcagctctaatagcgacttccttctaccctccggtttattactccttcatgtgtgatcctttcttctgcaacctctacttaggattcataaccatcttaggaatcgccactgtgcttgtttctctcctcccggttttccaaagcccggagtttcgggtggtgagggcgtctctgttctttggaatgggattctctggcttagctccgattcttcacaagctgataatcttttgggaccaacctgaagcccttcacatgacaggttatgagattttgatgggtttgctttatgggttaggagctttgctttatgcaactaggatcccagagagatggatgccgggtaaattcgatatagcaggacatagccatcagttgtttcatgttctggttgttgctggtgcgttaacgcactatagagctgggctagtgtatcttaagtggagagatattgaaggatgttgaagatgaagattgaagattagatggaatctttgatgttttaaatcttgtttgtagtagcttcatataaaagttggattatgtaaagtcttatctgtaatcaaacgtttaattgtttcttttattcaacaaaggattcatattgttaatctacatattactggttaaagaagctgaaggattcatatttttagatgagagatacactgtttattattgttttcaatatatgagaggaggagctcccatactatttttatttttttagccaatgagagagctccacttcataccccacttttaccaatcgtgccatttcacagccactctcacccatgtcgcgttgagcgcgtgcctacgagttctaaaggggttaatccacaaaaatcattccttttaggatccacgcacctcattctcaaaaatccatcgcgtgtcttattttttgggttttcttctctaaaccaaagtaaaccgaaccgagatcaatttgaatttcaaaccaatgtaaacccataaaacccatctgtgaaaacaaaaagctcggccacaaaaatggagacgacacagaggtacaacttggaagagaaatcaattcgaaagagccaagagaatgtattttatcatcctaacagacataccgtatttcagccaaaatcaattcgaaaaaccgttaataaaccggctaaaaattgtaaccaaaaccagattcaaattgcaaactgaactaaaccggaacacagagacttgtgaacctgagagcggtggtcgaggctgctgctgatatcaatctcggtgagccagattgggagctggagcgtagcgagtttatcgaggatggctctcatcagcgctacgtttggcgtcgtgaagtgaccctcgagaccgattccgtccatccttatgccgtcgtaccgttggagttccctcaccctcgcgatgtattcgtcaaccgttgacttctcgtcgctgcaagtctccaccacgttgaaatcattgaagaacagagtcgccaatgagtcaatctcacgagccgcggcgaagaatccgtacgacgcgttcttccccagtcgagtctcgtagaagtcaaagtgaagcatctcgttgctcacgtcccaatgcacgaactctcctctgtaccgagtcatcagactcttgattcgccggttaaccgccgaccggagatcttcgccggttagattacgaacccagtcgggattgtatttgggatcctcccagaatatgttgtggccgcgagcgatgattctgttagctctgacgaaattcatcatcttatcagccaatgtgtagttgagtttgccttgatcgggctccgtcgcgtaccatttcagctcgttctcgaataccgtggcgtcgaatctcttgacgaaccattcctatcaaaacagaatccgtttaaagaagcaaagacattgttgttttagtgtagactttagcgagtgtgttttacttggtaaggaatgtttccaaggatagttttggagatggcagatccaatgtagaagtcttaagagatctgctctaatgtcacatatgctccttcaacgctctatcggttttcttttgacacgtgaattgtcactgctcgttttctcgcctgaaaataagtgttaaggaggaaccacataaagaatgtagtttgcgattttaacgttagaaattagtgtgtgtattacggtatttatgaagtaatcttggttgttcctccattgctcctgcgtgaatggctgaagagaggcactcgtcacttgtaattggatcttaccatcgtcctctgatgtctgcattatcagaaaatttacagtctttgggatcatctaagctaatgagatacttttgagcatatatagaatctacctcaaagaagaggatggattgtttacaaggagaatcaagaaggaatcctcctttgaggaaagaccagcaaccatgtttggcagttacagaaccgacgcagtttaatgtggcgttgtctgctctcagccttgctcttacatgagctgatgcagcaccagcctctatcttcacccatactgttgtccatcagtcagatcatcacattcatttcatctgttaacgaatatataacattctagagatgaaagcatgaaatgcttaactggagaagcaatagatggtgttctgtgtgagattgtgcaatatgtaagttggtgtgtaacgagcaccaatgcctgtgaaagagtctttgcctggggcggtaggcttaagaaccacaacattcctccattgtatagtg

SEQ ID NO: 1892 - DNA, 1618 bp, Arabidopsis thaliana landsberg
  unsure (1)..(1618): unsure at all n locations
tgaggcttgcatttctgtccgtcatgaagaccaattctgaaatatcgggtacaaccgtttttagtttctcaaaaatgatcatgaaggagagttgcgactaattgtgggttgcctttccttttcctgagcctacaactacatttacttagccgagtgcaactatgcatcttattgtaccttctaatcgagaatatatcagtattactgatattggacgctcgtaaacgccaagaacaactctctttggcacactttaggacatagcgctccttatccgacttcttaaccacataaccaaaactgttagcaaatgcagctctatccaccacctcgtgcaatgctgccttgtttggaaattcttgacgtaaggtcaacccaattccgtcttcccatttttttttaaacatacccggttctacagcaggtggcgactcaacatactgttcccccctatcagaattatccatagactcatcatagcgtgtttcatcttcttgagtctcgtgatcctcctccactattgcctcaagttgatgttgagttccttgttcctcttctaataagaagatgagtgcaccatcatccactctcatttcatcctcctctgaattcaactccgtatagttcttaccaacacaacttttaccaactctatacaattgctcgctcaattgctcctcctcgggcggtttagagatctcctccacaaccaaaacacttctccagttattttttgcggatgttacataaacaaagacatcctcatcatcacaaacgttcatttcttcctctactccgaacaaccgtggattgtacctcatatgcaattttaccttatttgcatctaatccaagcttcgtcattatcctatcttctaacactgannnnnnnnnnnnnnnnnnnnnnnnnnnnnnnntcacattatacatgcgaccttggaatttaaaatatatgatcacgttctctttcattgtaacctgccaaaacaatacacatactcagtcaatattactagtattaccgattctagtacattttcagtaatactagtactaattctgaaatattacatgtgtgagtaatactattacatatatgaaatactacgtgtttaagtaatattggtgttattaaaaaatactatctatataaattacggtactactatagctagttcgaccattattattttcgcgacaaaaacaaatattcgatttgagttcaatttagtatgaatcagcatgtgaaatcaattgcttacccattaacagaccaaatgaagcctaaatctatacttaaacttctaatgtaggtgctaaaacacaataacccaaatctaattggattgaatctcaaaatcctcaaaatatgtaattcaaagcttttgaagctctctccatacctggacttagtagattgatgcagcttgcaggaggagaaaaaggacaatgcggctcgccggagctcgccggaggaagaatcccgaagaagaagtcgagctcgctcgtgttcgagcttttttttatttcttttttcgtcccctgctctttttttgtttcaaaatgttttctaaaaatatataattattattcaaaataaattataaggataaatttgt

SEQ ID NO: 1893 - DNA, 1789 bp, Arabidopsis thaliana landsberg
cactcccttaacaaaagaaatgtctttggacctattgtcactgcatctaagaatgtaaagaatgttgggcacaagtgggccgggtattcgtgcgaaatttctttgagaaagatgagatcacacgatataaaacccgacttgttgcacaaagtttctctcaaagaccaggagttgattatgaagaaacttaatgagtctttcgacatccaataatttagatatgtaccttatggatgtagtgacaacttatttatatggatctcttgataatgatatttttttttttgaacaaaatattgcttgcattaattaaaagcttagccaaagcatcaacttctctgttttgttcacgggggataaatttaaagcaaataaactgaaaataagatgaaaggatcaggatatcgcggagaatcccgtggagcttaatcaatggagactccgaattgatggattcgatcaacagttttgaatcggaagcaacaaagagttttttgaagccccgatctgaggcatgtttgatagcgaggcgaatagcaagggcttcggccataatcggtgatcgggtgtgcgtcgcaattgaagagatctgtcgattaaagcccgtagatcggtttgagaagatacaacccatccttgcatatttggcatgtaatgaggtcgagatcaggtgctttgctcggtcccaaggaacgttttgtgactacttgtttggactgaagttgagcagattgccattcatgtgctaacatgatagcttgtgtaaggatttcgcgagggttgtcgtggggattttcaaagatttgctgattgcgagccatctataatttccagagaatccaaggatgaagagggcctgaaccaatttcggatggtggtaggtgataagtgtgcattttacatgttttgagcatccatttgttatcactattgcatcatatcaccactgttttataccatttctcatcatttgtcatcactttgcatgtttaggatagttttgcatgcatgttgtatatttgtgttgttttcaggtgatttggagctgttggcgagctaattgaaagaagcggatatgatcatatcaaaccacttgacgccctgttcgagtagatggcttcacgatttcaagacaacactcgaccccctggtcgagtagatggcctcatcacatcacaccaccactcgaccccatggtcgagtatcttcatctccaccacctgaccatcactcgatcacaccactcgaccccttggtcgagtacctccatcacacccactcgatcactcacttgattacatggccgagtcccaccatcatcacacactcaaccgatcactctaccaccaagccgagtaccaccatctccatcactcgacttcatactcgacttcatactcgactgccagcttcactgttttctccattccgcactcaaccagacactcgagcacaaggaagagaagaacactccagcttatcactcgactacctgggtcgagtaccgttcttaatccgtctcaatacttcgtcgttttgagtattagggtttcagaatattttgctataagtagcatgtattttacatttttgtgacctaagttttattccgcatacactgtgttcttgacattttgtaatccagatttctcttaatctattcagtattcagtatttgcttttcaatttcgtttactaagttgttcatcttgttatcatcttgctattactctgttgctatcatgttttcattctattcatcgtttaagttctttgcaatgatgtttag

SEQ ID NO: 1894 - DNA, 716 bp, Arabidopsis thaliana landsberg
ggaataagaccggcgcatagaacataatcgcattgattccggtaaattgttggaaaagctggagaagcattccgatgatgaacggtgggcgactcgcgggcttcaacagtttcctgtaagggtccttgacttgactcgcgatgtcacatgcatggacgatagactcatactcgtcattgatatcatcaactcctctgatcttccttagggcttcttttccttcttcgttcttgttgcgctcgatgagacttgtgggagtctcaatgataagtagtgaaccgaagaggaggataacagcgggaattccagctccaccgagagcaatcctccatccgtaaggatgaaccgtggcagtgaagtagttgacaatgttggcaattaggattccgattgtaaccatgagttggaatacaatgttgagacctcctcggagctgtgctggagcaatctcagacaggaaaagaggcactgcctgattgccaaatccgacaccaaagccaagaaagagtcttccaatgatcaacatgactaggttaacggctcctgcagtgagaccgacaccaatcaagaagaagatggaagcaaactgcattgtaggcctgcgtccaagtttagaacaggtggcggacgctacgaaactggccacgagtgcagcttggtaaagagacgaggtgaacagttgcaagaactggttatcgtacttgcagaagttgttc

SEQ ID NO: 1895 - DNA, 2817 bp, Arabidopsis thaliana landsberg
  unsure (1)..(2817): unsure at all n locations
ttgaaaaaataagaaagactgtaacaaatgcatttactttaatcttgaccaaagtttgttgttagagtttgcaaaataaaacaacactcaagtttaaagaactaacacaatattaattaaacatatttgaatatatattttaaactagcattatgctcgtgctaagcatggacgtggtactttgttttactaattgaaaattatattaactactaaatttttcgaagaacatttaaaatgaaaaagaaaaaaaacgacaactaattggtataagaataaatacaggtgtaaaacaatctcagtcttatctcttctcttcaattgttagtttatcatcgccgattgtgtctttgtgatcggaaacatggtggttggtctagagatttcacccttataaacggattaaatggcctgataaatatgtttgagaaacctcaacgatggagccaaagtgcatactcttttcacctataactttctcgaagagctttttatctaccttgttgctgcccaaaaaacaccaactcagaatattattgcatacaatcagaattacatcactttttactttataatcaaatataacaggtatctatgagaaatttcatctcaccacactaattctgatccagttcatgttgcattgcttttgtgacacatagtgaacccgttgccattttccataatgattctcaaacctaaatcatgcaaataatcttattccacctttagaaataaataaattttgtagatagtttaagtcattatcaagtcactggttaatatacataccacatgtataaggatacaaacaattacaaacgctgcaagtctccattaactcacccacttaacaacaattagagttggaacggaaggaagattctgcagaattagctactgtaacgtctgcaaattttgcaagaaaatagaaagaactggacatttcaaagtgaacaaaaaaaaactttacttgaaccaagaaaatgtcaggtactggtccttagctttaaggaaaagaaaccggagaagcattgtaaattgaataaatgccttgagcgagagagttacctgataaagtatctttagaaagtgctgaatcaattgaggctgggcctgttttaaaaaaccccaaaacaaaacagaaacagctgatcatgaatctacatacattctagtagtttaggagtaagatttgatcgtagcataccatagtatggatgtggattgatgggtgtattcatggcaaaagatgtggtgcttgtatggcttcttttctattgtgctgtcactaactcaaacgcgtaatcaaatatgtgatcaacgattagtgaaaaccaaacaaaataaatgacagttacctcacgatctaacaatttagcattcacgatttgctccgcagaattgttcgtttcccgttcttctttcccataaagccaggacattgaatcccatgtattcgatgtgcccaacttctacatgaaagtagtcagctttagagatagtatgtgaaggagactgaaatattttccatcttatttctctcttaatgttgtgattacattagactctcttatatagtctctagattaggttaagctaggtcctcactctctagacattcaaacctattagtcaagattaggtcttgacttggacagctggaattgctttcatcttttagcaatttccttgaagcttccttaattttgtcttcttgttttgcaggtgaccgttgctcttggatgggctgaatgggctgcttttctgctttgggcctccagaccatgttattgggcttggtcatctgatttggtagagcgactcaacgacaccgtattgagttgtgtctgaagctgaattaggtcttttgttttcttcacctttttcagtcttctcgatctctttcccaaacattcttgtttcttctagcttgtctccattgatagtccccctcaaacttggagtgggtggaacatctacgccaagtttgaatctgaagagatgagaatcggaccgtgaggcagagatttggtgaagatgtctacgatctgaaattgatttgagatgtgagtgacccgaagagttcccagagcaacctgttcccgaacatagtgatagtgattcgcaaagtgcttgctcttcttgtggaaagccggatttgcagtgagatacacagatgaaaggttatctccgtatagctctggtgttcgatgcagcggaatcccaagttctttcagaatcttacacagccaggtaatttccgaagctgcttcagacaaagctctatattctgcttctgtagaacttttagcaactgttggttgtttctgtgactgccaggagatgatattgtttccaaggaaggtatagaatccaccagtcgatctgcttgttgtttcacagcctccatagtcactgtcactataagctcgcaaggtacaatctgtgtccttgttaaaagaaatccccattgttacagttctttttatgtacctgattattcgtttcaggagattgaagtctgctacagtgggcatgtgcatcttttggcgcacataattcacagcaannnnnnnnnnnnnnnnnnnnnnnnnnnnnnnnnnnnnnnnnnnnnnnnnnnntctaaaatatgttggattctcaaatttttcttcttgatgggagaccttgtttaattgcaggggcaatggtgttggcatgggagcacaatcaagcataccagcaacaacaagaaggtcctctgcatatttctgttgagaaagaaacagtcccnctgaatggaattgcgcctgtataccaagatagtagtgtagc

SEQ ID NO: 1896 - DNA, 921 bp, Arabidopsis thaliana landsberg
ccccaacagtttttacgtgtgggagcttgatatccttaaatctttatgacgtatacttgcctaatcgcgagttggggtctttaccttccctcaaagttatcgttctagatgcagttgtgtttgacgaagatttcgctttcgaaatgctggtctcaggctgcccagttctcgaaagcttaagtgtaaacaagattaacttgaacgacatttcagaaagtgttcaagtgtcttcgcagtctctattgagcttcagttatgttgcagacgatgatgattatctagaagttgtaattgatgctcctaggcttcactatctaaagctcaatgataaacgaactgcaagttttataatgaaaaatcatggctcccttcttaaggcggatattgattttgtgtttaacttaggttccgaatatatgttcgatccaaattatctaccaacgagacatataattcgtgactttcttgtcggtttatctggtgttaaagatatgatcatctcttcgagtactcttcaggtaaccatcattgaatttactatttgaattcttcactttatcctataagtttcatactaatatcttttattttcttcgagaaggtcatatatgattactcaagatgtgaacaactacccttattccgtaatgtatctttcttgcgtgttgaattcgccgactacaggtgggaaatgttgccaatctttcttgagagatggccgaatctaaaatctcttgtcttgggtagtatttttacttaataataaactctctgccttactatgaacgcaaatggtaagagtaagacatattcaacttgttcgtctttccagggatttagtatacctccaggggaggagggagctaatattttacttggacccccgcggtttctaacatctctcgagtatgttaaagatgc

SEQ ID NO: 1897 - DNA, 3149 bp, Arabidopsis thaliana landsberg
  unsure (1)..(3149): unsure at all n locations
atgtcaatgaattataggatggattaaaagttcataaggttgagttagttattcaaataaaataaagattgcgagttctggtttgtcggacaacatacaaattaattttaaatcaacataagttcccaccaatgatctcaatgaagatgatatattttgtataatctcgtcattcatcatatctcgtagactctgtatcatcnnnnnnnnnnnnnnnnnnnnnnnnnnnnnnatgatggttattacaaaacttttttttttcttttttgtcatccgaaattaattaaaatcaaacgagccaatcccgagggatattgtttacatatgtgataagatgcggttcagtacggattttccgcgccaaattatccgcttttacattagcactacgagaaattaaagataaagaaaaatttgtgaattctttcgtgtcgctttgcaattcctccaaatacatagaaaatgtcggccattcaattggggaagacaccatcttccccaggtctgaacagtctgcaaaaagaattacttcttggttgtcggcattgatatgtcctggtttttactgatttctaacatagtttcagaatggttttagagtctttccagtcttttcgtatgttttgagtcatttcaggtacacttacacatttgggaactatggagcacaataaggaattttggaagcttttcagcaatgaagatcttaaaagacgtttttcagaagttgggtgtcgatcgacaccacacctgtgtcgatcgacactcttattgctgcctagggaattctcgttttctaccaagtctttgcgaagccctgaagtcttccttatttgcaaagtagtccctccacgtttttagtcacgaatatacctaattgtttggtcattgttagacctaagttttgttttagagattgttacacattttgagagaagaatccaatccttttagagaggcttctgaactcccttactttcattcttaaatcatcaatgcaaactattcagattatgatttgtgtttctattatcatgtctgagtaatcaccttgttgggtttagggagtctcaatagggatttagatggattagtagatcaaaaaccccttaggcttattcttagcgttcttcatcttgattattcttattgctagttttagattgatcacctagaacttgatattagataataggtatgtccgccataggtacttgtaattagaactataatagatgagcctaggcatttaagaaagaacaggtaggctcatagaagggctctggtttagatactaggtgaacttatcaagcttattaacaatgcatgctttagcataggatttatcggcttctctggttatcttagctttaagtatagagagtttcgcagaacgccaccggttactctagaatcatagtttgagnnnnnnnnnnnnnnnnnnncaatcttaatattagctagatctacaatttatctatctccctagacaattccttagacccgacgctttaatcaattgaatctacaactcatttacttgattatttgtctttaacattcaattacttcatttagcttattaaacaacatcataagtctattttgtgaacatcgagagctcagtggaattcgacccttaagtgctaacgacgatctcttatttgagggagtaagcttaaggcaatttgagctatatcgctattgttgattctttcttcatatgctttgatttgtccaacaatgtcttcgaaacctataacttttaagtcaagtacttgttccaaggcagccacaatttgtatgtatttgtctcttggcaagctattaagaaacttcttcaccagtcttgtttcctcaattgcttggccaagagtcgatgatttagatgacagctgcgatagcctacttgcaaaatcatcgactgtctccgtatccatcattgttatcttctcaaaataagacatcacaatactcaaacgtgcttccttgacacgttctgctcctacgtttcgactttgaatcaagttccaaatatcttttggagtcccttaattacctacttgaagtgtaagggcttcgggtattgattgaaagatcaaagctgttgcaacgtcgttcttgttatcgtcggttaatccgggttcaatcgtatcccacactttatgcactcgcagcataaccctcattcgcatggcccatactgtgtagttagattgagtaagcataggacattgtaaagacgaagaaggaacgttctccttgtgtgtggcgtcatattaagatgatgatatgtgatcctcatggaggatgtttacaaggaatcaaggtacataaaaatgatttgtaaaagcaacatcattatatcttctggtttttgttaaacaatctactgccttgttgcttgttcttggaatccattgaatcttcatacttgtgaacctctgttgccaaactcttatttcttgaatcaaattatgaagtgtgaagctccttgtttcaccagtgattagcttcagtattttgctgttgtcgccttcaaagaataaataccgatgacctcgaatccacatgtgttgcatcgccatgagtagcgattgtaattctgcttccaaaatcgtattgcagatctgagctttgctctgtgttgcttctatataataaccttccacatcacgtaaaatccaacctgcattgataaaatttcttaagaacactaggcaagcttttaaaagaataactctctttcaaaactaagcaccaaggtctctcaatattctcacacaactcttatggttacaactcaaacaaatagatccttatatacgggcacaactttgccttttcctaatacaattaggattagataactcctaatacctaatagaatatactaaacctatctaaatctttaacctcctcattaaagattactcgggccttaagtcaattgaagtttacccaaaattcacatctccaccattttgtttgtagcttgagtcataattacactttttatatcctttctctcgtttttgccatccgtctttgatcaatcccaagtgtgtggtgttcgacgtatcgctgaaactcctctgttttggtatctagtcaaaagcctttctaagaacactagatgatttccacgc

SEQ ID NO: 1898 - DNA, 2136 bp, Arabidopsis thaliana landsberg
cgattacttgaatttaaacaaataaacaacacatataacacctttttatttgtgagataaaacccatacttacctggcccaagacttgcatggtcataatgcttaaggtaatctattcctaaagtttatcttttcaatccgcctctacctaatgtcttgccagtttcctttttgaatgaaccaatggggaaagaaaactatttaaaaataaattcctcctcaaggttgtcatctccatcttctggtaaaaaacctgcttcgaacatccaagggtaaatcctatcccatctacctaaatgctaaggacataactggtttcctaattgtctttgtgactcctttgactcgataaaatattgaaaacaagtgtctcttacgagcatcaattaaccatgctctgataccatacttataacacccctgaaccgctctaggccaagaacaaatttggaagtatcacagttgactcccgcagccggctaacccagattcacggaacacgaccgctcgcccaaagtcgtccaactgcgagaaatcggtttaccttgctatcatggcctaaggctttgcaacccgtactgcgatacgcgagttatgatagtccggacatgactaattatatcatgggagacatgggtttactaaaatcatagctttattactatcaatgaaaatatcaagttatacatactatacgcaaaacctatatccttacaaagataatgcaaactacaccggttggcctaacatccttcgctcccaaaggttacctcttaaacaaatttagaatcttgagtaatctagcattagtcagtaaatccgggattctaatagtataacccaacccaacccccaatctcaaagaatcaataacacaagattcacaagcaataaattgaacaaccacgacagtctaaaagagattacatccctcaatactatatcgtcatgtatcgcttgcccgggcatgacctgctccaaaccttcgtaagctataacgttacggagtttcacgcaacgcaccaagacggatggactatcatggttcgcctaacaatagttaaccccctcgatcaaaactcttgaaagtatcctagaatacttcggctcatcgccaacaatcattctcttctatattggctgatggttcttcgatagccatccctcggtcaatttgtagtcttagtgaggggtattacacccgccataggtatctattatcaaaactattatttgatgagcctggtaataggtgtgtaataagaattggtctatctactaaggcgaactaatcaaactcgtttagcatgcatgtttaggataaggtttcatagaacgccactgggaatcttagctttaggcatagtgagtttcacggaacgctaccagttattatgatattagagtttgagttcgagaaccgttcaataacaatcctaataatagctagatctacaatttatctattttctgagaccattccctagacctgacgctttaatctcctgaatctacaactcaatttactgttttaatgtcttttacttttacctattttgtctagcttaatattaatcatcataagtctattgtgtgaacatcgagagctcagtggaattcgactcttaagtgctaatgacgatctcttatttgagggagtaagcttaaggcaatttgagatagatcaggaacctttaccgatggtacgtgaagtcatctaggaaagaatatagttaacgttttgactacgtatagaatcggctaagtcatagcgaattttgtgtccaaatatgctaaggcttagaaattgttgaatagtttatgtaagactaagtttaatatccaacacttatgacttgtataaacttttgaatgtgaaataagttaagtacttgcttgtttgtgtgtgaccgactattatacaagtgaaaaatcacttgtgtaagaaccggatgtttgtgtttaaatttgagaattcatcggaagcactccagcagtaaccaatcgaatgaagaatcagagaaagaaggaaataattgagttgggagcaagtcaagtctaaaacgggcgtacttcagggaaaccgacaaaagagaaggaacttgagtcatgagtacatgcatatataatcggaga

SEQ ID NO: 1899 - DNA, 2119 bp, Arabidopsis thaliana landsberg
aagaaccccacggcatacatctttcatggttgctctgttaagaaacagtttcagttctctgacatcattttttttttctttaacaaagtttgaattttttgtcacaccttatattcttctccccacgctttaccattttctaaattatactatttccttgtatatgtaaaaatgtaggtatataagaacaaaaatatgtatacctattattggatgaaatttcttatagaagatagatatatattcctatgtacaactaagttctatgtattatttaagaaagaaaaacacaagattaagacttaagtttcatagtggcataaccaacatattcaacatgaagaaagcataatgttgtttaaagttttttggcccagttgttttagataggcagggccggttgatggcacggtctggagccccaacccaataattaaagggccagattttaaaaaagtgattgcatatgaaaaaaaaccaaaattaatctagaggccaaaaatgaattctcaaacacaagaaagattaatttagacaaaaaaactagacataggcattcggttttggttcgtatccattcagttatcggtttttttgtttctaaattttagtatttattcggttattttaaaattttggttcggtttcggtttgggttccagttttttcagttttgtaatttagtatccattcggttattttgctttgaatattttcggatatttcggttattttggatattatcatatattttttggttattttcgagtattttactatttatatataattccaagtatttttagttatttagtttaacaataactaatattttttaaaaagataattatattttggatatttttggttacccaaaatattttggtttggtatcaagtcaattttggttctttcggttatagaatttggtattcattcggttattttcaaatttttggttcgattcggttaatgacctaaattgctactaatgagataactcccaattgttcttctttcatggagtatcatataaatctcaaatggtttatgcatgggttcacatgtaagaagcatagcgatcaaaaattaatcaaaaattacatatcttaattttagcgtgagttattggtcaattagatattgacatgtatgaaattatttcttttaaaaatttttttagcatggatattaaccaattacaattaatattgaaattcaaaatagcaatataaatgatttaacattgatttaattggataaaaatttgtatttatcgttataatataatatttctattcgtaaaatcaaatacaaaaatgtacctaataaatgtaaaattttaattatatttgaatcactaataacgctagtgaaagatatttttaattaatgtcattatccatctagttgtcatattattgctagacagaagtgtatggacttagttgacctgaaataagaatagtcaaagtcttttatgtggtggacctgaaattagactaatcaaagtctttgtgtttactttgtagtttgtacgtaagtttgtgttgctagagcctatatgaaaaaaaaaaaaaaacaaagcagcagaagtgtggatgcctagtgaagctatgtcgattgttgtggatgttagtagagtatcagattcggtagctcaagatgcaaatttgagtcggagttcgggtatgagcactcaagatgaaaacatctatgcaagattgaagacggtggctcaagttggagatatagaaagactctacgagttgatagcagaagatccaaacattttagaccactttgataaagtgtctttttgtgagacgccactacacattgcagctgaaaaagggcaaactcatttcgccatggaactaatgactcttaagccgtcacttgctttgaagctaaacgtgtcaggtttcagcccactgcatttagccttacaaaacaaccacattcgaacggtgagagggttagtggcaatcaacagcagcttagttagcatcaagggaagaggaaggattactcctttgcatcatgtggctcgaataggcgatgcggaattgttgagtgagttcttgtttgctagtccttcttctattaaacaatttga

SEQ ID NO: 1900 - DNA, 2063 bp, Arabidopsis thaliana landsberg
tgatctctaagttgagtttctgctcttagatctctcaagtcataaagttaatgttgttgcacaggagcattgaatccatgtgcagacacctctttcggtacaggaatatgaataatattgtatgtctaaggctcagtaacttaacactatctcggatagccgcggtcgagaagttgctatatttgtccaaatgttagatctcagtcacaatgagcttcattcaactgaaggtacgttatgtagtgttttctaacgctttttgagtcttgttcaatattagttgttgcatctttggtgcttagaggtttgatgaaactgaagcagttagatattagagtcaacgacctaatatttgcagacctaactaaataaattatggtgtttgatttggtttaacctgacaagcaagtttctatcacgtcaaattaaaaacataaaaaacacaaattcattactaaaaccaacaaaagaacactaaacgttcactggtttgtaagataaaagccagtaaagagaagaaaaaggaaataacaaaaggaagaaacagagtttagagtttttagcaaacttgtagcagcttgattgcctgaaacatgtccatggctgagaaaccagaaaagatcatctaacggaaagtaaatgacaagttgatgttatcagagattatttggacctcacacttggctgaagctactctaggaagcttcttaagtttcttgaacaccttcatcacatcttcatccgctggtgtattgtagtacaatatcactttttcaagatccggcattgtctctaggaattgcttgacctgctttatctgacccgctacatcttcttcaacatcacaaaactcacaaaacccacaaagttcaccaaagttcaatatctttatgaccttcaccggacttgacgatagacaagcatcaatatccttcttcaccctcatattatccagatttttgcacatgcacgtcccatcctcgtccacgtccccgcaagctcttcctttcctatatatatgatgcattccctgaaacataaaatgaatcaatatcaaagtctaattatatgtgtttcaaaagcatgtcatcggttgatttaaaggatgtatacagtacctcgaagacaagagtttgtagatttggacaattcttgagtagatgtggtaatgatttccatcctatatgtactccagtcctaatagttaagtgaattaagttctcgaataccggcattgtttcacggcagcaaccaagtacctgaaagagaaaccaaatcaactacatatatgattactcacttatcaatatctgagtagaaatttaatacattaggagaaagatgtgattaaccttaagagtatcttcagtcaagtagagaatcgtgacattgcatattcccatgaaaagctttgttacattattattgtcattttcaatctgtttagaggtcttacaaagaccaatactaactttaacaagcgagtcaaacctcacttgttcatacttgtccgcaattgtatccaagtactctaagtagactagatttggaatatcaaatgacaataacacgatcggtttaaaatttttagccttcataaaattttcaaaacgagaaaattttagtatcttgagggttcggacagaaacactcacaaagcaaggttcaggttctgaagattctttccatatcaaattcatcagcaataattcttcgagcgtgtgacagccagaaagaagcttctgtaacattctggtatccatcttaacataatcaagatggagagtcttaagcatcggaagagaaacatcaccttccacattaacgttggcaccatcttgaaactgtatctttagtctaaccaatgtcttgctcacaaagatctctgaaggtagaggataaaaagtcgagttggaaccaaaaccgcgagacgaagggatctgtacatcattatttatcacaccacgttataacacttttggtatctcatttatgctcctttcttttctcacctcctatcacactttatcttgacatttttttttctattcttctctttcttc

SEQ ID NO: 1901 - DNA, 1091 bp, Arabidopsis thaliana landsberg
  unsure (1)..(1091): unsure at all n locations
gtttcagcatgtcggcaggtgacttttccattgacgctttaaaccaatcaaacaagctttacggaacacatgtgcacaagaagtcaccttcaaagtaaaagaaccagagaagaatattaaagggaaaagtaagtccaacaatagtaatctgacgattcttaaacagtgtcaaatgaaagcagctcgtttcagaagatacagttactgagaaacaagagtcaagatattacgaaatagcaatagattgacttaaaatacttacaacgtagtcctcggccggatcgtggcagagaccacattcttgctcacttttgttctcatcaaccaagttagcattagcgccactagaattggaatacaccacaaggtatggatgatcaacggcctggaacaaattgcagagcaaataaatcacaaaccaatatatctatatcgtcaaaaaagtgcattggctggttagttgaaccaaaaaaactgtagatgccactcacctgtctcaggcgggtgagaagatcaaatatatgtgcatagttattcatcaatgtcccagcctcaatatacctgcacacaaaaatgtacatagcatagtcgacaataaaattctgttacgcaaaccagtggaaatccatctagtagaagtaacttacgtattaaattccgcctggctgtttttgtatagtgattcatagtaatcaaactcctttacatctagtgtatcccgcctcaaagtgatctacaagaagtcaaattaaaaagttgaggtaaagctttgtttagcgattcttattaatcagccccatttatatctagagtatcacgccttaaagaaatctgtaagaagctaaatttataggtagagatgaaactcagaagcaactataccaaacttcatttacatcaaacaaaggagagaaaggaacatacaattctaggaggaagagcaagatcagctgcccggcccaatttagtacgtcttaaaaggatgtccttcagaactttgtgtttaagcaatatcatggctctttntcccagnccaaagcttccatatactggtattggcttggccacattactacaagaataggaaaaca

SEQ ID NO: 1902 - DNA, 2443 bp, Arabidopsis thaliana landsberg
atggcaccaccaaagaagatagggggacttgggtttacagatcttcatgtttttaaccaggccttattggcgaatcaggtatggaaaatggttcaacgtcctactagcttaatttatcggttactcaaagctagatacttccgggatagctctctccttgacgcgacacgaggctcacaaccctcctatggttggaactctctccgtttcggacgcgatctgttacgaactaacatacaaataagcattggtgatggtaagaagaccatgttgggaaccgatccatggttaccatccgcaccacctcgagcgcccaaagtgttacctcacgttgatgtcgatactaaggttgaggccatcattgatcctatctctcgccaatgggatgagactaaaatcactcaactcattgaaccggacgatcatcatctcgtctacaaaaactatctaccttagtacccaacagaagacacatacttatggagccctgcaaaagagagaaattacatagtcaaatccggttactggactgcattaaatgaatcgttgaatgatgaaaccccacaaccaccattagcaaagcattccgggttctcatcatcaactatatggaagttagacgtcacaccaaagctaaaacatttcatctggcgttatgcttcatatgcgattggaatagtagagaatcttcgtaggcggaacataaatgttgatccttattgttcaaggtgctgtacagagctggaaacaaatgaccataccattttctcttgtccccaggtgacaatggtatggcgtgcggcaggcttcccgaccaatcatctgagtaacacaggcatctctgtccatgataagcttactcttctcttccagatgcacactgataaaaatataaaccgtttttctcgctatttacctttctggttaatgtggagaatctggaagagaaagaatgatctggtattcaaccgagtcaatagatccacaagtgaaattgtggaacaagctattaaagatacaaaagagtggctggataacaggtcgatcgacaaggagcagagggagacaaaccaacaaggagtttctcgtattacgaagtggtgcaaaccgaatagaggatggctcaaatgtaattatgacgccttacatcgggagggaaatcaagattcaggacttggctggataattagagactcacatggcacggtgctacactgtggtatgggaaaatatcaaggccgcctcaccgctgaagaagcagagtgctcagctttaatttgggctttacaagccacatcggctcttggttatgcgaggatggagtttgagggagataacttgaacattaaccgatacataaaggagaaaggttcaaacccacgactacgtcattaccttgcaactatccagagctgggcgcagagcttcacggcgatcaaattttctttcagacctcgggaacaaaataaatgtgcggatcttctagctaagaccgtattatcatatactgatcaatgggctatgtatcagacttgtccaccatttttatggtctcttgtaaaaaacgaacaaacgtaacgtacgtaataaagttttaagaaggaaaaagaaaaaaaaatagaattaattttaaatcagaatttaaattctcttataataatatagtgtttggtttctacaatattacttgtttcacggacgcggcttggaacgcgtcctctggctcttgtggtatgggatcgatttttaagactcaataccaaagagttatccatcagggctcgtcttctcgacttcatacaccttcggccttagctgtcaaagcccttgcgattaaatcggcgttgactgcagcgttgcgaatggaatttacctccattacagtttgctcaatacagagaccacaacgaatgagcttcaggggatacttcatggtattacctgtttgtgtctttcactcctatcttttaaagtctgctttatttcatgtttagctaatgtttcagctaatgcagtaggcaaagagactatattttctttggaattctctgttgtatgaaccttttaaaaatacttcaatgaaaattccagtttaaccaaaaataaaataaaatattatgtgtttttggtaattttttgttaaactgctattacaactcttgttagctagttataaattttacgcaaatgtatttttttctaactgctaaactagtcataaattgcttaacaacgcataactagtacatttgcaaccaaccgcttttgcaagttctgcatcctctgctaaactactcaagcgtttagcctgaattgttttttacaaaaacgtttaatacagtaaacttgatttttgacaaataggtgtaacaactcaaactacgatgaactaaaaaaatatagaataaattaatcgattatgaagtgaacaaatcgacataca

SEQ ID NO: 1903 - DNA, 560 bp, Arabidopsis thaliana landsberg
  unsure (1)..(560): unsure at all n locations
cagaaacaaaaatcattctactacctgacgagggtttcgatctatgactgactgctccttgaacttcaactggcaggaataattgctaccgcctttgatacgcatggttccataatggtcgcagtaaagtttaccaaggatgatgttgtatatagaagtggtaaccttgctccattgatatatctcaccatcatcaaattttaatgttaagacacccactgggtcaagctggattgaccgtccccaaaattttcctttgatatttgagtctccccagaaattccacccttgtccctcacaatggcaagcaacaatcataggatgatgactcacctgaacaagagaattatggtggcaaaaaaggtgaggggttgctattatatatgtctgatagatttaaaaagataatgaagtgttaaagtttttcacattcatgcatgatttttcaatacaacttctacattagaatgatgtgatggttgacttgccttctcagagaagaaacgnnnnnnnnnnnnnnnnnnnnnnnnnnnnnnnnnntcaccaagtagagggttgaa

SEQ ID NO: 1904 - DNA, 1050 bp, Arabidopsis thaliana landsberg
aatctttgtttttgtttgaaaatcatccaggtttatccgattaaaaatgctagaggctctaaatcctttaagctttttcttgcttgcctgatgttcactagaagtcaccttcaaagtgcgagaaccaaagacatattaaccggacaggacaagtccaccattagtcatccgatgtttcttataagaaagtgataaatggtggcagatagttacagaagatacagtaactgtgaaacaagagtcgagatagtatgaaatagcaacaatatatcgactggaacacttacaaagtagtccttggaagggtcatggccgaaaccacattctttctcatttttgttcgcatcaagcaagttagcgttagcgccactaggactagaataactcaccaggtatggatgatcaacagcctgaaaaaattgcaagaaaatgcatcagaaatctatatacctatatcatccaaaacatgcactggcttgtaaatagaacaacaaaactatcgataccactcacttgtctcagtcggataagaagaccaaatatatgtgcatagttattcatcaatgtcccagcctgaatatacctgcagaaacaaatgtacatgtcagatttaataataaaattcagtttacacaaagcatggagcagaaaccagtgaaaatccatagaacaaaagtaacttacccatcaaatgttgtcttgctaactttgtatagtgattcatagaaatcagcttctactacacttagtgcatctcgcctcagagagatctaaatttatatgtagagatcaagctcggaagcaactataccaagcttcatttatatcagacaagggagagaaaggaacatacgattctagaaggaagagcaaggtcagctgcccggcccaatttagtacgtcttagtagaatgtcctttaaaacattttgtttaaggaatatacaggctctgtttctccgtttgtccacattctaagcagattggaaaatataaaaacccaagaaccatatggtgatcctgcttttaaaatgtttttaataatggcacc

SEQ ID NO: 1905 - DNA, 2663 bp, Arabidopsis thaliana landsberg
  unsure (1)..(2663): unsure at all n locations
taaagcacacataaggatttctatgtctttaaacttctaagacatcacaatgctaagtacaaccaagctgttctatttgttgaaacttctaaggcactacaacctaattccattacgctctaaggcactacaaagttctaaggcactacaacctaagctgttctaggacaatgaatttaaccttaccagagagttcccggaggacgctttgggtctagccttgtcaagccagcacgaccaggactatcaagaagctcctccagtgtgagattgttgagacgctcagcttgagaatcaaaatgattgacagaaggctgagtggttggcgttagaggcgatggtggatggcgtgaaccttgaacccctgaaatattctcagcactgacaggagaattgacatgcaacgggtctcgctgctgtgacctatatcgtggataagtattctccgacgatggcatcttgcaaaaaaaacaaaacccagagtttagatccgtaaactagaacatattagatctggaaaacaatgtcagatcggagatgaagaagaagttagatcggagaagaaaacgttaccttggaggaaaaagagatcgagtcgcggctgctgctggagaagaagagtcgcgacggctgctggagaagaagagtcgcgacggctgatggagaagacgagacgcgacggagaagaagaagaagttacatcggacggtggaagttggaatggaaagaagaagttatatcggagaagaagacgttaccttggagaagaaacagatcgactcgcggctgaagctggagaagaagagttgcggcggctgctggagaataagagacgcggcagagaagaagaagagaggcggcgacgtaatcagatcgaagaagaagagaggcggcggcgaagaaattagatcggagaagaagagaagccggcgaggagacagatcggagaagaagataatcgaagaaaaaaaattaggtttagggtttgaggcggcaggtttgagctccgctcaaactatatttcctcgcaaatcagttgcaaaccttgctaggaaattgcaacgaaccgtcttttaaaccaatcaaaatgcagcttacattgcgagggaactgcgagagctcttagcaaatccctcgcaaagttttaaccaattaaatcatatctgattcaataattatatttgattcagtctctcctatttctagtaagaccctcagcaaaataagaacatgactaaaaattctaaatattttagggtttagtgtaaatattgcgagggaagtgcttcacgtacctagcaaacaccttcgcaatttcctcgcaaagtagaatcaatttcgaaaatacaacaatcattactcaaaatcattcggattcatttttttgaatcattagaacgttaattatctacatttgaacctattttatcatcatatacttcgaatgtgtattttccccaaatacatcaatgatgatcttatggttttttcttaagtatgaatcatgaatgtttaacattttcaaaatgaaatgttaatattgaaaccaatacaatatttttttgtgcaaaccatataatcaacttgtatgattatatggtcacttagattcacatttataaatgagaatcaaagatcgcaaaacacttttatgtattttagggtttagggtaaagatttgcgacgtatctgcttgggatttgtgacggataatatctttcttgcgaaaccatcgtacttccctcgcaaatgtgcgagacagccttccctcgcaagttttgcgacggaattgctacgcgcgtccgatgtgtagcacgttactcgcaataccctcgcaaaaactgcgaggaatgccttccctggcaacttcctcgcaaattgactgttttcttgtagggataggattaatctgtatttgttggaggtggaggacatagttgcaaatatggaagagttaaagttttttttgcacaaaatcctaattaaaacttaggtagctaagtaatttactatatctagtactaaattaggatcacaggccatttgtgaaggtatattacctctttctccaagatggatttcttcaaatgtgggattatatacntgttagagcctcgaattttcataatttcttgcatgcacgattgcacagtcaaaaaaatttggttcacatgtttgcgggatgttcgtcaaatgaattttctaccatagaaataagatcttttatcgtctttggacacacccttgtgttagagtgtttgaatggcactaaaaaatccaagatctagaatattcaagtcaggcgaattcggtggttgacacatcaaacgaatgtcaaagccatgatgagaaactactactcagaattcctcatctcttggatcaatgtgagttcttgcattatcttgttaaataaaaataggttttccaaaatcatcttgtggccatctttaatgaattcttggtacaaatttttcagttaaaaactcctttatattttctctcttgatggatgtcgtcggctttaactccaaagtaccctcctctcgatttctactttgtctttaagacttttgcattgtaacaaatgaaaacattcttatttttctcaaaacaatttcatttccttctctatcaaatcttggacgggacatgacggctaa

SEQ ID NO: 1906 - DNA, 1213 bp, Arabidopsis thaliana landsberg
  unsure (1)..(1213): unsure at all n locations
caagaataactaaaacatctatatatacattattgtcttctctgtaaatactaatactaacaaatattcaaacaaacattttgctctatatcacttaaaatcacaatgtctctcatgaatgcctctaatctaaatctagctacctatgttgcatttgatgatttgcaacttggaactcacgcccaacgttattggttgtattgttaggatgtagaaaatttatactgaaatacgtaccgccaacgatcgtcctgtattccttggaaactcactcctcctgcttgatgagaaagtatcaatgtccaatgcctagcatgtcaatttatttttctaacataaatctcacatccatactcataatatatcactattttccttaatttgttgcatcatacctgcatcactttctgaaaaatacaatggtattttccaagaaggaagcttacaaattcaagggtttgaagtaaggccatgtaccaaacacaccaaaatcacagaccatcctttcgtcatcaagttcaacattgatatcaaaatcattgtgaaatataaatcatggctaaagatagaaaatgagaaattcagagtttacaattacgctcacttggttggttttgccaacacaaatgttcactacttggtaaatatttactaaacatatgattttctatttaataatattaaaatactaacattagtctcagcttcaaattctaaatataatagtaacattatcgttttatatgaattttacatatttactattcttggttaataacaaattccaaactcaatacaaatgtagttgggaaaattctttcaattgaaggttcaaaccttagtgaccttacttcaataaaccaaatcattgtcaaattatggttccaaccttaagtttctattttgattgtctaagacttttttccctacatttcaattatctttactcataactaaacaaattactttaaacattctacaccaatatgttgtctcctcatctctttgggttcaaactgcttctcgccttcaagccatccatccagtgtctctgttaatccaacaattctagaatgtaagattattttataattataaacagaatgtcttagatttcctaattaagctttgcacgcatgcacatattttttgatggaaccatatacacgaggtttttttccaacccccatattggtcgnatctttcagtttat

SEQ ID NO: 1907 - DNA, 3031 bp, Arabidopsis thaliana landsberg
tctgtattaagttgggcatacaagatttgcacgctccaacttgcgggagggtattaacgactcaacagagtttgcggaccaagtcatgatcccgacgatcacgtaaccatataaggaagttgctctgtttttgatacaatctgtatacgattgatacgattgtgattatgcattgattgtaatttaggaatttctatgatctcttctgtcgcctataaaagacatataatatgcatcaaagtaaatacaagaaacagtttacagtttctaaaactttataatggatatagttgagtgctttggtatggaatctaggatgttgtgtgggctagcggagaattacatagtggtgaggatttggctagaactatttagtgcatagaattgatttgtatgatcaggataataagctagaagattgggagttcctgtgttttcaaacctcttccacgggtttggcttttgtgttttgcttgagggcaagcaaaaactaagtcttggggagttgatatacctcgattttcaatgcttttagctatgaattaggtatactttttagagtcttttgttatttgtagagacttttctagtctttttcaggtctttaaatgattggaatgcatttggagattatggagcattctggatcaaaacagacaacttaagctgcagaagcaatccagagacaaaaatctacgtatgtgtcgatcaacaccgcccctggtgtcgagcgacaccaatatctgacggcaattcgattgcgcaacttattcaatttttgaagattttcaaatttggcccagaacgtttctaggaacttaagtatcaatttttaaggtcaatgtttagacctaacacttattatctattctttactagggagcaaaaccctgttgagactccctttagagaagatctttctaactctattctcttcttaattttattactgctttcttattcaaacatgttttgttcttttataatcatgtgtgagtagttctcttgttaggttttcgatctactaattcatctaaatccctgttaggataatatatttagaattcttcatctttgtttgttcttaatgctagttctagagtaattaactagaacttgattttaatataacatgtatacccgccataggtatctattactagaactaccttatatgagcctagtatttagatgcggactagcgtcgatttagatacttaggtaaacttatcaaactggattagaatgtttgcttacttctagggattatatgttgaacgatgtatttaattttaacgtggggtttgatgataactatcataagaatggtagttatcagaaagtggaagaactggtccgtaaccattcaaataaattctacgacttgctagaaggtgcaaataatcaattgtacaatggttgtcgtgaacggcagttgcattcatccttagcggctggggtcatgcaaaacaaggcggattataatatgagtgaaaagttggtggattctgtttgtgaaatgtttacatattttttaccaaaaggaaaccaggctaccacttcacattaccagaccaaaaagttgatgcgtaatttaggacttccatatcatacgattaatgtttgtaagaacaattgtatgctattttggaaagaagacgaaaagaagatcaatgtcaattttgtggcgtacaaagatggaagcctaaggacgaccgtcgaagaaccaaagtaccatatagtcgtatgtggtatctacctattggggaccggttgaagagaatgtatcagagccacaagacatctgcgtcaatgtgatggcatgttgagcaccaatcaaaggagggagaaatgaatcatccttcagatgcggcagagtggagatatttccaagagttacatccccggtttgctgaagaaccccgtaacgtttatctcgggttgtgtactgatgggttcaatccatttggcatgtctcgtaatcattcgttgtggcctgtgatcctaactccatataatttaccccctcgtttgtgcatgaatatagagtacttatttcttaccattctgaattctggaccaaatcatcctcgagctagtcttgatgtcttcctccaacctcttattgaggagctaaaagagttgtggtgtactggagtcgatgcgtacgatgtttcattgagtcagaattttaatctaaaagaagtactactctggacgattagcgactttcccgcgtatagcatgttatcaggatggactactcatggtaaattgtcttgtctagtttgcatggaaagtacaaagtctttttatctacccaatggacggaagacatgttggtttgattgtcaccgtagatttcttcctcatggtcatccatctcgtaggaacaaaaaagactttctcaaaggaagagacgcttctagcgagtatccacccgaatctttgacaggggagcaagtttattacgagcggttggctagtgtaaatccacccaaaacgaaggatgttggtgggaacggtcatgaaaagaagatgcgaggctatgggaaggaacataattggcacaaagaaagcatcttgtgggagttgtcttactgaaggacctcaatcttcgacataatattgatgtgatgcatacaaagaagaattttcttgacaacatcatgaacactctcttgcgtgttaagggtaaatcaaaagacaatatcatgtcaagaatggatattgagaaattttgttcacggccaggcttacatattgatagtaatggtaaagctccatttccagcgtattcattaacagacgaagccaaacagagtttatttcaatgtgtgaaacatgatgttagatttccagatggttattctagcgatttggctagttgtgtagatctgaagaatggaaagttttcaggcatgaagagtcatgatagtcatgattgtcatgtttttatggaacgactacttctatttatctttgctgaactccttgaccggaatgtccgccttgccatatcaagtacaat

SEQ ID NO: 1908 - DNA, 2820 bp, Arabidopsis thaliana landsberg
gttatcctctcgtattgaattccctctaaatcatattgtatttattctcatcatattaactttgagaggggagaactataccgcatcgatgattttaattttgtatattcccatagaaaacaatgtatatgctcttctagagtcttttaataagattttatactacttaaaaaactttgaccatcaaaaatatgatatcttcttaagatacattaaactagtcattcatgaaaatttctataagtgattatacttttaaattaagttatttatcaatcaatttatttcataaaataatcaagtattatatactaatacaattttaatgcaatattgtgaaaaccaatcagaataaaactattttgtgcaaaatctggattttacatatatcttgacaaaacttttatttagggtaatatgaattcgtgcaaaatttgggtaaaatgatttcgtgcaaaattagggcaaaaccatgaacagttttttttctcttttaaaaaattaatacaaatcttttaaacaaatatttcgtgcaaatttagggtaaacaatattcataatcaactctattaacgtaaaactaatagtgcatcaactatgaaattttaattttcaaagaagcattagatctttatctttataaaagtatggaagagaacttatctttcgtgcgaaaatccagatgctgatcattcgtgcaaaaatagggtttctgcgatataatgcataaaacagttcagaatcaataacatataatccgtgcataaatcgtacaaaaatacaaataaaattgataatagataataagtgcataattcgtacagagattcaaacagatatgataatagataaataggcagatctgataatagataatcagttcataattagtgcagaaatacaaacagatctgatgatagataatctgtgcataattcgtgcataaacaaatatgaacagaaaacttatcttgttagcttaagattttgtttgtttaggaggctaggtttttttttttttttcttaggcggctagggtttactcagttaggtaggactcgtgctgataacgtgttataaacagagaaagagatagaggaaatgagtgtgttattccattgagataaagggttctttatataggagtacaaggaaagggtaaaaccctagaaacatctagaagatgggctaagatgatgggccttataatgggcatccatctttattcataacactccccctgatgaccattatagtatcataactcgtaaagtatttgaaatgctgcctcattaaaaaccttaccaggaaaacccaatgggaaaaaccatggttaagggaaaaagagtgcataagcaacacttaaccctttaccgagcctcttgagccgtgatcactatgaatgaggattgagccacgtcttcttgattcttctttacatccttgagtagtccattgatagcttggttgaacttcttggattttgatcttgttagaggacccaccagaacgatgaatgctttctccggaacaagctgctcctcggcttcaagctgctccttgtcttcttgtggttcaagtggcttggttgcattggtcatgttctcatcattctttgacctcaaatccaaattatctacaaaaaaggttgaagatcagaaacattgtaactatcatttacattatacttaccttggagatcgagtttgtaggcgttgttgttgatccgtttgtgcactttgaatggtccatcgattcttggcattagcttggatgatcgctcttccggaaaacgttccttcctaagatgaacccacacttgatggccttcgttgaagatgacttcttttcgacctttgttcgcatacttctcgtattgcttcgttcgagcctcaagattttccttagcctccttgtgaacctgttgtactaaatcggctttcttcttaccatcaagacttgatctttcactcaaaggtaaaggcattagatccaaaggagatgtgggtttgaacccataaacaatttcaaaaggagaaaacttagtcgcggaatgcattgaatgattataagcaaattcaacatgcggcaagcagtcttcccaagtcttaaggttctttttaatgagcacacgcaataaagtagacaaggttcgttttacaacttcagtttgaccatcggtttgcggatgacatgtagtagagaaaagcaacttagttcctaacttcgaccacaaagttttccaaaaataactaaggaacttagtatcacgatcagaaactatggtcttaggaatgccatgcaaacgaacaacttctctaaagaacaagctagcaacatgagatgcatcatcgattttatgacatggaataaaatgcgccattttagaaaagcgatcaacaaccacaaagatggaatccttaccattcctagtcctaggcaatcctaccacaaagtccatagaaatatcatttcaaggatgcaaaggaataggtagaggggtatacaaaccttggggttgaaccttagccttagcttgcttacaagtcgcacatcgttcacatagccgctcgacatctcttttcatgtgcggccaattgaagtgttcttgcattaccttgtacgtcttagcaattccaaagtgtctcattaagccacctccatgagcttcccttagaaacaattctcgcaaagaagagtgaggcacacaaagtctattttcaaagacaaatacccatcatatcgataatattttccaaaggcaaacttctcacaagactgaaatattttgtaaaatcagaatcattagcatacaagtctt

SEQ ID NO: 1909 - DNA, 1622 bp, Arabidopsis thaliana landsberg
  unsure (1)..(1622): unsure at all n locations
tacttgtcttctttttctttgaactattacctccatcaccttcatctcatgtttccttctcttaacgcttcctcttatttccagaagtaggagtatgttgaacaacatcatcatcgtcatttccacttaattcaacatcatcaaaatcatttggaggtagagtttcatttgacgccatctacataaacaacaatcagagctaggaactgagaaatcgagaattgaattgaaacaagcaaacaacaatccgaactaggaactgagaaatcgagaattgaaacttgaaacttgaaagtttgaaactaatcagagattgagatcaataatcgaaacctagaattgaaattgcatgaacgtacttacctcagaatgatttcgcgattgagctgtctgtggtgggtttaacgggaacgtcggtgacggtgaggtcgccgagagtgtttcgacaagggtttccagtttgatagaatatggttcaaagagaatttaagaagagaagccgatattcaagggattcgtgaaggaaactgaatcgacaaaaggtaattagtggtgtataggtgtataggttataagcacaagaatcgggtgtatgggtacccggaatgggtaatgggtaatagcctacccgaacccgaacccacagattaaccaaaaccaaacccaatgaggtaatatccccttaccctaacccgccccaacccagctttttcggttcgggtatcggtttgggtatcaggtccggttattatgcccaggcctagttgaagcaagatcattgtgatgtggatggatggttctattcaccaaggagaacaaacatgagtgtgagatctattaaggcctatagttggagagtattgctttgctcaatcagaggtatctttgttcttggagaccttagtcaatttctctcaaaagtatttctgaccactttacccaaaaatctgggcttctttatccacttaactcctctaatttgcctcatgacgacgaataattatcttcccacaataacttaaatcctatttgctatctacttcccatccaatagccaatgataatttgcaaataacctcaagcctttctatttggcatttcagcaaaattagaagtttgcagccataaacccattattatcaaacccgagacaatttgattgcaatctagcttcatatgttccacacctatagatctaaaccagcagctatccttctcaacctatgacaaatactccacgttctatcccaaatagaatagagagaaacggtaccttgaataccatggttaggttatgtctcgagctctttgaagattttctaagctgattccattgtctctgaaaatctgactccttagatgttaaacctcacgtttaccgccgctttagcagagaaggcacaaagctcatcgtttcaatattgtggtatgagagaaggctagaagctcgagagaagaaaaaaacctgatgaactgtttggctctgataccatgttgacatttcttaacttatgctttgataccatattaggaatgtggcatancttaaaacaaagcntagatcaagagttaaggattgccacatcctttatataatgcccaaagatcgtaattccnagcga

SEQ ID NO: 1910 - DNA, 1924 bp, Arabidopsis thaliana landsberg
ctgaaaagttcgatacaagcaccatcataagcgaacagtaacccaaagattcaatatgcataacaataatcgatcatcccaaacaaatatgtctttagaaagtagagatctcaacttctcaacttatcacataaaaaaagtctcctgaaaacatgcattcttaaacaaagtcttccactagtagcatgttgttctctagatagatagatatttcttgcttaatcgatggataggcgtggaacacaaaagtccacaagcagcacagatggccctacgcccgccaaataaaacatcctgctcaaagccactttgacaactacaaacttcttcttgtaccataccttcactattgccatggactttccttggatcttctctgttccaactactatcccatctctaagtccaacgtagcgcgcatactcacctgacgaggcaagtaaattgcctagcacgcaaaacaaatgaacatatattttagatcagatgtatatctctctggatcattttatattgaattttaactaacagctatagcacttacgtcttgttgaagttcaatgtgtggagtgaacacatgcagttttgctcccacggctgattgatgcaccaacaactcaggtacttcgtccatatccttaggctcaatcacttctcctttcatggaaacgagagcaggttcgtacgatgatggggtctttgactcagatcccaaaggtggccaatcttctgctctcggtatgccgcctttctttaacgcaaagttaaggcagtccttgacagtgagcttgcgcctgcgcctgaggttgcgtgagccagctttgtccaccaaatactgagctgagtactcagtgcggacactatccagcttaagtgcaagccgtgcagagcttatcagctcaaccgctacgatagcagcagaagcagattcatctgcatagacaaaacacaaaatggaacaataaatcaaatctgaatgtattcccatcttacaagatacgaataggatcagaatcaactgtgatatactaacataatccaggctataactaaagcaatgtgacaaaagcagtggattcaacacaacatcctaattctacagccacaaaatttggctgattgattggtcaaatgacttaaatctcactgttaacataaaagagaatctctgaaatcatgaaaaaacgtacaaagacaacacacatgctatcaatatctgagagaatctaaaacctatcttggcaaacaagttatcagagccaacaacaacaaaacttaagacattggtgtaattaagcacatgaccagaactgtgataactcaacataatgggtaaattttgtcctgcactaaatccaggctaaaactaaagcaatgaatcaacacaacatcctaattctacagccacaattcaccattcctagggattagatcaaaatctgttttaaaaccaagaagtgagatacttttatgagtaaattctatacagtaacaagttcttaccgtgctctgggtcattctcaaagacattatcgcgtctaccgtatgaaaaagccaatgtgaaattcggatcatagggagggagtgccatctgaaaatttgcaaagttttcaataaaactacattaatggatgtgaataataaatgcaaagaacattaacaagggaattaaagtgaagcgatttttcacgaaagaaaggaaaagcaagagggacctttgcttcctaataggatcgaagttatagcaaaaagaaacatttttatcaatgacaaaaaaacagatcgatgagtatgtggctaaatcgaagcaatgtgaccaaactaaatgaagtttaaacgctaacaacctaaccaaaagctcctcattgttcactaatcacactgaaatagtaaaaagatgacatttttatcaatgacaaaaaac

SEQ ID NO: 1911 - DNA, 5314 bp, Arabidopsis thaliana landsberg
agccaagatgacctaagaagaatccaatctaggatggtaggtttcgatgagagcatatggagacttggaacgggcattaatcaactagaagataatgatgcgaaagaagatgtggctttggaggacctgataagaagacaaggtgaagttgaggagaaccaagtcaagaacgttgatgatcaatcaaagatctgggcatcacttacaaaagtgacgatggaatcctcaaggaaaaacgtggaatcgcttgataggattcttgatttggacaagaaagctgataacctaacaacacgcatagaagggcatgaaccgatggagagcgaagaagaagactcaagccctcatgtgctttgcgatgtggttacaacttaccgagaacctcacgaccttgaagaaggagagatcgacgaaaggaatgaagatccttcgggaagaacaaggcgttacaaccggctcactctcctagaagaccagtggcatccacgcatgataagcttgagaagacttggagactttacccgagccgtttctaagctacctcgaggtatccctttctctaaagcttgttcggtttaccatattgaccatttctttcttgagagttgcgaaccaaggagagagatgaaggaattgtacgaggaagccttacaccacttgaaaccgttcaacactcttcgaaagatagagagcccgagaagattccttgtgacttgttctatacgatgtgttgaattcaaggatgccctatgtgattttggatcatgcatcaacattatgacaaaggagacatcgaaggatcttagaatcaaggagctacaacctttggatgtgcgaattggacttgcagactcgtctttcatggttcccgaagggatagtctgcaacgtctatgttcaggttggaaggtgcaatgtgccgaccaatttccatgtcataaaggtcgagaaaggaagaccctctcaactcatactaggaggcgggttcctagccacagcgggcactataatggattggcttaatcaaacagtattcttcgccaacatcgatgatgaagtgttccacaagatggtgccgtttaccccgggctcaaaaaggagaaggaggtcaaatggcgagagcacggaagaacctcccaaggagtttcaatcaaagaaaggtcgcctagggcgaaacaacccgtcttaccacgcctagtaagacccaaccgtcgagccaacgacgttaaacaagcgcgctaagtgggaggcaaccctttaggtagctacttttcccttgggatttttattttgcttttggttttaacctttctagtatttgtttcagattttataaaataaacaaaactagaaaaatagaaaacagaaaaacccaaaaagaagagaaggaagaagggtcacttggacccgtcactaggcaccgtgacaacaggcccatctactcgcccgagtaaccggtgccgccaggaaaagccggcccagccatgccaagtcttagccagagcacgccgatttgcgccatcacttggccagagtttgccaatgcgccccgaccacccgccggacctcgccggagtgtgccacgcctttgccagacttgccccacctggcagcccgggcaacaacttgcccacctgtccggccgaatgcaaactcatccgggcaagacttggccaactcgggcaaacacgtgaatggacaaggggagtttcaccaccacggccgatcggtccgccaatggatttgtttaacacatgaccattctgcccatcgcaacgcccggcgaccccatccaacacccggacgttacttgcccacccactccaccctttcggccaagcccgcaactgcccaccatccattcacaccatccgtcaccacgaatttgatcttatttgttgtcgtataaactacaacaatatcaatttatcttaggtatgtttttatttattttgttgcgttaaagctattagtggttttaggtttttgtttcaaggaagaagcgaatggagatcaatatcatggaattcgacctcactaagccgagtatggccgatgttaagcatggagaaagaccatccggttagtcaccacatacaaggtgacattgattataacttatctttctcacgtattcatcccaatgcttattctcacaccggggactgtaacgcccccgagatgctctatgaccggacaagtcacgggctccccgaaaatgccacattgagattgatcatcaacatccaaccgaggttcgggaaccaatcccaacccttggccggcgtattgacgacaactctcacacttaaaacatcgtttaggcttgccaaccctttcgatatttaagtgttgtgccgactcggactaagtcattatcagtcattactcgttaatttgtacaaaaaatccgatttatttcataagtataaatattacacaacatgttaccaaacatttataagttttatggccagcgcctagtgccaaaagcatggtacataatagaaacatacttgttttacaaaaggcacaaaactactccgagtttcctattgtccaccacgccctctattacccactacgggtttcctgcaagacaagtagaatcatgagtaatctaagattactcagtgagctcgggattccctgcaacagacattagtttaccccaacccaaatacccaacatgaaacacgcaacagataatggcaacaaaaggtagcttgtcgaagcaactacaaaaatatgccaatgcattaagaatccaatttttattaagttttaaagggcccgatatgctgccttcaatcccaacaccaaacacacacactcccgtgatctcccgtgttacaaccacaaaggtaaataaccagagcatcactaccaaacgctacaccgtcgtgtagacactcggccagggtagctaaccccgtctctctgagttcttcgcacttcatggcgatcaagtaacattgttacaagaccccacgatagcacggttcactacgaaggtcagacatatcgcgatcttggcacgattatggtctttgcctcctaccacaagcacctcataccaagaccccaaagtttaagatattatgaaacatatggtgaaataaaacacatagaatcatcaatatcccaacacaatctcccaaccataaacaatagcataagaatctaaagatcacatatgcaaatccaatataaccattcacacaattcatataactcacgagatcaatcaagaatgcatgagaatatgattatgaaacttaaacaattttctagaacttactcagtaaccaacaaaatgagtgcaacgattcggacagaattttcggctacaagaccttaacatgaatcggacggacgatcttcaactcggcagcctctcacttttgttcaatttctcttcacaaatcatttggggtcgagttgggcttgtataggcaaggcaagggcgagtcagcatgtccatatctcaaccgcatgggcgagtcagcaatccaagtgtcatccgcccgtgatgacacgctcgccactttagcggatgagcgacacgtggctacccaaacttcggctccacgcaactcaaattccccaagttagccgagccacgcgtccttggcgtggtcaaatggcggtcaacgcccggcggtgcaaacttcgcccacggctcacctgttcttgcccaaacttgctcattcatgctcattcttgcccaaacttgccctttgatagtctattatgttttgggtacctagggtcaattgaccatgcattcgggcaactttctaaaatttggattcatgctcgtgcctgatgtccttacgcgggtcactacataatccctaaaccctttttaagttttattcatttttttgttacggtttactcaacccaactattgattagctcctttgccatgatcgagtagatctctagttgggtttgagggggtttcaaaggggaattcatggggactaatagatcaaatgtctaggttggccgtttctatggtcttgtttgatcgtttacactattctttctagttgatttgaatcttaatgcttgtatgtctggaacgtcacctagtacctgaccttaggtatttcattctttggtaaaatctcgtttgaatgcttgagctagctcaactgaataaataaccataactgttgcacacccgccgagttatagggacttatggactagaatcaaatttgaacttaatgcgttgatcttgtattttcgaaccatgttagcacctactaaccgatagggcaactgagtacgcaagatatttgtgataatagccggctttcacctactaaccgttagggttggctggtcttgatagagtttcgtatgtccgagaatttggaagtaaacaaacctaactatttatcatctagattgagatctataccttatttattgaaccatgacatccggagaaacccccgaagacctaatgcttctctcttattgcttaccgtttagtttaattacttgtcttttattttggttacttattgcatacaacaactgtaacgcctctggatcgctgatatagctcaaattgccttaagcttactccctcaattaagagatcgtcgttagcacttaagggtcgaattccactgagctctcgatgtgcacacaatagacttatgatgttgtttgataagctaaatgaagtaattgaatattaaaggcaactaagcaagtaaatgagttgtagattcaagtgattaaggcgtcaggtctaaggaattgtctcgagagatagataaattgtagatctagctaatatcaggattgttattgcaccgttctcaaactcaaactataattctagagtaaccggtggcgttccgcgaaactctcgatacttacaactaagataaccggagaagccgagagatcttatactaaagcatgcattattaataagcttgattagttcacctagtatctaaacaagagcccttctatgagcctacctgttctttcttagatgcataggctcatctatgatagttcaataacaagtacctatggtgggtatacctattatctaatatcaagtgctgtttagctactctagaactagcattaagaacaatcaagaagaagaatcctacagataacctagcaagggggcaatctactaaatcatctaaatccctaatgagaaaccctaaacctaaccaaaaagctactcaaacatgatgaatgaagcaaacaatatgattgaataagaaatcaatgaataaaacaagaagagattaaggtatagaaggatc

SEQ ID NO: 1912 - DNA, 1878 bp, Arabidopsis thaliana landsberg
gtataaacacaataattatggtatttgtgaagtaagctatgaacatggaaccatccatgaaaaacttgaagtttggttggatatttacttttcatgtgttggattaatgctttgttttaaaaattgtttgtgtggtgaattttcactgaaattagaaattatagaaaagcaaagagtataatttgtgaagaaaagaatataaaatcataatccaataacatctaattatactaaatcagcagtcacttttctaataactgatgcatttagtgattaacacatcagcttagtactatttttttattctttcattttcacgcaggatttttatgtgtcgtttttatttaattttgtttctttcttaaacgattttctctttcatccccacgatttccacatctccactttctctcttccaaaaactccatgactactgtgtaaaatctcaaagatgggtttctcaacatcattaatcgattactcagaaatcaggtactttgttcatctcaatgaaccaatttaccattttctatttctgtttgtaattttgttttatatatatagaattctccatagatccaaaaatcatatatcctttttctagatttctatggcttttttttcttttttgtttgtttcagctttatttgactgaattcgatttctctttttcgataggattactctttaatacaatcaatgcctatgcttctcctgtctcacaaacactagaggttaagcaacaaattttggcttctcatcagaatagttgctttaaaatccgagtgagttttatagctttatcgaatcttaagttctttttttaaagataaattatatctcatatttttttaaatttcttcttttatctcttattttacttctttatatatgcaatttcgtttttgtattagcccattctacaaaacaaaacaatgtcttctgtaggaaaatctcattctcttgctttttctttgtttcacttttggtcttcttttgaatcttctgtcggagaacataacaaccaagcatgggatggccattagttgagaagttctttgtaagtttttttcagcatcctctttctccaggtgtatttattgtcaagtaagtatattacatttatgtttgatgcataagtcatcataattatagagaaaacgtaatgtctttaatttacagattggattacaatttgggcaattcacttacttcaaaagctaaatgcaattcacaactaaattattattttgtatgttgagcaaacttagaaacttgcattacactacaaaaaagtctttattaatagcataacgttatagcacggtttactcaattgctattgaagatgtcatgtaattttggttatcatattacagcgtttgagaaacgctaatatagaattttaatgagggagaacccaaaacacttagtccgccaaacacttagtcaattttttattcaatcgacaataacccaaactccaaacacttattccccctttattaaaaaccctatcatatcaaagaactctctcagtccgacgaactaattaaattctccgtcgcctctttgtcgccgtcgtataaactctccgtgctactggaacctcccgctggcacttaatccgctccagatctgtccactttgagatcgaatcgaaggcaagttcttatctccgttgatttttttctcctttgacactcaatttgttactctagatctgcttctatcaatctttgagactcaataatcgatgtttatgtgattgtagtttggttttcttctcgattcttaaaatttagtcgaatttgcatgcatttgttatttggttcagtaatggttttgtgggttgcttttggtgcatgtgacaatttt

SEQ ID NO: 1913 - DNA, 590 bp, Arabidopsis thaliana landsberg
acccaattattagtttgagtgtgatgattgttatatctacctacgtgtatcaagcatttctcaataatgccactttttcacagcttatcatgtctcgccggaggattccatgcctggattcatatctggacaaggttagtaactccttgtctctcttttagtctgtgtgatatactcttaatgtatattacttgcagttgtgccaacttatgttttctacctggtataactttgaatgtcttgcatagattttagatatgagctcatagatgccgcttggttgatttccttaatgaatcttttgcaaattgagcaggttaatatttctttgtggcctcgttttaagacggtgtttgacttgcacatcggcagtctgcgaaatgcaaacataaatacaatatgggaagatgatgtgcatcctcactatatcatgagacgttatgctgaattcacggcttcgtttattcacctgaatgttgaatatggagatgggcaggttcgttataagtattctctctgtccctaacgatatgtgttatttggagcttctcacccaaagctcttgacatttgtctatgaaaccttgcagc

SEQ ID NO: 1914 - DNA, 860 bp, Arabidopsis thaliana landsberg
  unsure (1)..(860): unsure at all n locations
acttatgcatttcgcgtggcaatgtatctctggttgtttagccacttgtcaaagattttcatatcgtcacaagggtacagataaaggttgcccccgatgcagattaaacagaagagactatcaaccatctccagtttcattgtccaccctcgagacagatttgagcattatcgcatattcctacctcacagaatatttttcctagaaagtcccttttctataatttcgatttcttttttggcgtggccgggaatttggaatcggagaagaagtgttggaactctttccatggatacttnnnnnnnnnnnnnnnnnnnnnnnnnnnnnnnnnnnntttagaaaacctctcgttgaaactttaactttggctcttcaagaggcagatgtttggaaacaagcaactctagcagaagatgcacccatacgctcaattcctcccctaagttcttctcaaatcccgctaacccagctccctgaatgtcaacttgatgctacttggcatgttggatgagtctttgttcgacaagacttactcctccatcttggcatcaagagtactcatcgaagcttattaccgtttcatgcagaatttgactttttgctatgggcaatagatgcatgatctctattagcaatacttctggtacttttgcttcagattgttcagacctaatttctatcattgacaaccaagacgattagccgacattcgcagcggaattggcttcctatcgatctttagtttgtttttttcttcttttcatattagatttcttcttcgtagttttactgttcgagattattgtttagctaaaaaagctcggaatcgaaaaagtcttttctcccatgaaagcacatcg

SEQ ID NO: 1915 - DNA, 5927 bp, Arabidopsis thaliana landsberg
atcttgatgtggctgcttgggtatcgaagtgtcagacttgtcagtaagtaaaaatagagaataaggttctgagtggtttactctagaatttacctctacaagagtggaaatgggatatgataacaatgaattttattacagggcttccaacgactactggcggcaagaatgctatttgggtgatcgtggaccgactcaccaacacagctcagttcttggccattaagaaaacagacagtgcaaatatcttagcccagttgtacctagacaagattgtttaaaagcatcaggtgccagtaagcattgtgtcattgagatctaaaatttacatctatattctggcaggctttcctaaaggctttgggaagaaaggtacgtctcagtactgcataccatcctcagacaaacagacatgttgagggcttgtgtactatactgtgaagaaaattggctaaggtacctaccattggtggaatttgcgtacaacaacagttatccctccggtatatgaatgccaccatatgaggctctatatggtaggccatgtcgtaccccactctattggactgaagttagggagcgtaaaaagctagagccagaaatggtcaaagagactataaagcatgtggatttgtttcgagataggctaaaggaagcccatgacagacagaagagttatgccgacaagcgtaggaaggatttggaagttgtactttacttgaaaatgaggatatttagtggagcatataaaacaagaaagttgagaaagcttaagccaatatatatggggtcctatgtcattacatagcggattggggctgtagcttatcatttggcattacccctagagctatcaagcttccatgatgttacatagcggattgccaaacccacatgctgatttaaattggaacttgactactttaagtagacccgtggaaattttggaccgtcaagaaacagaagatcaagggaagatcataaagtaaatgaaagtatgttgggaaagagacgggattcgagatgagacttgggaatcaaaaaaacagatgaaggtggactacccagatcttttgaaggacaaaagtgaagaacaaggtgacaaatcaaatttggagacgaattccattgtagttaggaagaattgtaacgatccaaatttttggattaaacctgaaccaaaccctacgattcccacgagtgtataaaagaaagacacaagcctcaaaacaagcctcaaaaatggttggccgtcaagttacaccgtaagcctcgcatcctggttttgagtctcaatttctcataggtttgatcgagtcctaactcgaacctcgtttgtggcctgttataacaccacccaagtcaccgaagactttcgtcgtggtgagtttgtgcggccttatgattgtcactggaacgataaaaccatcacttaatcttgattccaatctctgtttttgttatggattgttgtatcaatctaattagtgaaagctggaatcatcacagatattggtatagaaatgtggttagtgtaatccgggaaatcaagtgtgataaccggaacactccactataaatagaatctttgattgtgatcaatactcaagagaaataacagaaagtttgttagattctatgcttgttattcgatcttctcttcatctaacatggtatcagagcgttgacctccaaagctcgactgattctctgatcatcgagtttttctttcatagagctcttagattcttccgtttcatcatcaaaaatccgattgaatcatctcaaaaccagctgtgaaaactttagatcttgcgatggtttccgttaaacgattacgacgtcgtccaagaagatcgagcaaagaatcagattagaagattcaaaatagaacttcatcttcaccgattgcaccaatttcttccccgattccaccaattccaccaatttattttccatttcaatagaatttcacaaacaagaccgacgattcttgaattcaatttcaacgattctcattagactccatatgcgttatcgaatggcgataatccaggaaaaacaattgtttccgaggtacttaatggctcaaacttctcttcttggaaaattgcgatgtttgttgccttagatgctaagaacaagtttgattttgttgacggaaccttaagaagaccttctaaatctgatcctagctttagagtttggtcacgatgcaatagtatggtcaagttttggttattgaattctgttactaaggagatttacaagagtattctgcgttttaatgatggtgctgaaacttggaaagatttgacctcaagatttcatatcacctatcttccaagttcttaccaatggacacaacaaatttggaacttacaacaaggagtattatattgccttgaagactttatgggatgatttggatgaagctatgatgcttgttttatttcgcctcaggcttttacctaaaagaccacacgactactgcaagtgcacagtatatcggagtagtatttgaggatcgaatccacagggagtgtagctacaaagaagaattcaagttagtttacttggatcaagacaaacaaaagagtgggagttgttttatgcggtagaaataagtaaagaatgcaataaaagtaaaaagcaataaaaggaaactaatgaaaaggcaataaaagtagaaagcaataaagagagcggtgtaaaataagtaaaacaaaacgctaggtcatcaggggttttctccgggcgtcaaggtttaatcaataaggtatagattccaatctagatgatataacatggctaggtttgtttacttccaaattctcggacatacgaaactctatcaagaccagctaacccaaacggttagtaggtgaaagtcagctattatcactaatatcttgcggactcagttgccttatcggttagtaggtgctaacatggtttcaaaatacaagatcaaagcattaagttcaaattcgattctagtccataagttcctatcactcggcgagtgtgcaatagttatagttatttattcagttgagctagctcaagcattcaaacgagattttaccaaagaatgaaatacctaaggtcaggtactaggtgacgttccagacatacaagcattaagattaaactcaactagaaagaatagtgtaaaccatcaaacaagaccatagaaacggccaacctagacatttgatctattagtccccatgaattcccctttgaaaccccctcaaacccaactagagatctactcgctcatggcaaaggatctaatcaaaagttgggttgagtaaaccataacaaaaagatgaataaaacatagaaagggtttaaagattacttctttgaatgtagaatacaagaggcaaagctccaccttaaagagtcttacacaaaacgagaaagagaaagagagagatggtgatcttcaagcttcaagaggtgcggtggcgagttggcagcgatgaaggcacacctagggttagggcttagaacaagtatttatacttgagggccaagaattaggtttaggggtaagaacgtcattctgccaggtaagtaagtgatcgggccgagtagtgggctttagggaaggagcctaatgatggtggcgcaaagagagaaggacttgggcgtgccctagtggttggtggtgagcttcgcggagctgccctagttcaagtctctttggccggatactttttggatttattatttctaaacggctggttcttgacatgtctttactcttcgggtcatatcttccaaacggcttcatggattgcttcgattcgacttcgacgttaatcttgactcttctagctttcgatacataccaaaatatctggttgccgtgatgggaaagacttcggccggatgctaaacttctcaagtactagaatgatcgccttttgatgcttttagcttcaaaacttttaaaaccttcttggcacctagaatacgtgtttctcctcttattggctctagaatggtgttggggtcggattccacccaggatagcgagccaaccacacctcaacgcctcgagagacatcgatgagttatcccgaaccgggccacaaaacgcctcggagatctcgtcaagaatcaacaccgaggggatgtcgacaacgcttcggagcaggctcatgaaatggtcccctgacccgacctctaaacgcctcgggcataaaacccggcaaatcgtcccgaggcgggctccaagacacctcgggaatctgtcctcaaataccgtggaccgagcatcccaagcacgacccgaggccagcttaatcacggctcggaagagtctcgggttagacgaggaaaacttcaaaagacttagccggtataagttcaaaacacatcatctctgaaaaccccggaagagattatcttcaaagatatcaccggatacagaaagtcccagaatcttcggaagataagggcaatctccttcaacaagataaagataaagagaaatcttccgagaatatcgcgagaggtgatattctcgaactctataaaaagcacctcagaggacaaataaagaggacatacactaaaacgctctcaacttcaggctatcaaaaacgctctgactttgaaggaagaaacacttattttcatattctagcacacttgtacgatcaaatcattactttctcattaatataatcaagaacaccgtcctcggtaattgagtttttttttgttctttgagaatctcacaaagatccgttctttgaagaaacccttaaaataaattttattgtgcgagttttgactctcacaatttggcgctagaaggaggggagagatttctcttactcccggaacacagaaccaaccacccaattcacaatggtcagcaataaaatccccggtaacacagttgatgcagaggggaacccaatcctccgatccagacagacgctcctgaagccgctgctcccgcgaccctagcggaactaagaagtatgatggctcaacttcaacagaaggtgaacaatcaagaacaggcaaatcgatccttggtgcagcaactcgaagcagctacctcccaaggacagatcaggactactcgtttcagcgcgaggcatcttcaggatcgacgggcagcagcagatctcaatcccacacggctcgtattccacacacctggcaatacgacaaggcccgtccgcagaaccgcaccggaaatcggaagagaccgaaccgagccggcaattttgggaaatcgggaaacaaatcgaaacgaaccgcaactccctcctccccgagcagaggttaccgaggccgatcatatcgacgcctcggacaatgaagactccgaggagaatattaggtgggctgaagagtacgccagagaacaggaaataagcgccatcaagctatccctagccaaggcagagaacgagatgaagctcgtgagatcccaaatgcataacgcagtctcctctgcaccaaacatcgaccgcattctggaagagtcccacaacacaccgttcacacatatgatttccaacgcgataatctcggatccaggaaaactaagaatcgagtacttcaacggatcttccgacccgaaaggacacttgaagttattcatcatctccgtggcccgagccaaattgagaccagaagaaagagacgccggtctctgtcacctgttcgtcgagcacttgaaagggccagctctggattggttcacaagactaaaaggaaattctgtggacagttttcaggagttatcgacactcttcctgaagcaatattcggtgctaatcgatcccggcacatcagacgccgacctatggtcactatctcagtagcctaatgagccacttcgagacttcctcgcaaaattccgatctaccctagccaaagtcgaaggaatc

SEQ ID NO: 1916 - DNA, 6304 bp, Arabidopsis thaliana landsberg
atagatctttacctttatcactgataccgaaaatctatattaaagttaattttacatcttcggtaactcttcaaattttaactatatatatagagaaagacgttcgcttatttctcatatttttttaaaagaagatcatccttggcatctctcatgcgatggcttatctactttaccatgctcttaaaaagaaaattggtccagtccgggtgttgctcccacagcgtgtccagtccgggtgtcgcccatcgagcgtggcttggtggcgacgaccatgacaagtgtccccaagcacctcagctaaccaactcgcccgaaaacctataaatagccctcattctcgacccttagaacttacatctcgaatagaaaaccactataattaccttcagccactagtaaacccaaggagaacccgcggaaagacccgattcggaagtcggtaagttttcccgaccttagctgcttttagtaaccgccgattagtccttaatagagttagattgtggatttctagataaccgagtaagagaaggaaccaatggattcgaggggtaggtacgacagttttccgaggatgtgtggatcaccagtaagtctcagacatgtgaagtagcacgtgtttaggtgtttaatttgatttacttataaattgcctaggaggttagtaaatcgtacttagtgataattattgtgagctgcattgtcttttgatgtgattgcatgatgttaaagtacagtataaacgttgtgctgcccaagttctgacaacattaccgttatgctgtccgcgttgcggtaacatagccgttgtgctgtttgtttggaattggttgttgctagttagaagtggttagctaactagcatagtcgaatgaagtctttccatccgtctgctgtgtattgcgctacatgacgaagtagtagtgaggaatgcgatctcttgtagactgtatatgtctaggagtgtgtggggcattgccttgggggggggggaaggatctgaattcgtagaagcctaaagtaggaagagtgtagaagtgtagattaagtcttataggaggtgcattgtcgattgagtcttgcttgttgattgtagattgcttggtatagttgggtgttccgatagcggtataggtgaaaccctagagaccgcggtctaactgagtaattctagattattcatggtactacctttttgtttacaggaaaccttagcggggaatctgtaaaacggcgcgatgatcattaggccaaccagcttagcccttacacctcttgcaaatatctataaagtttattatatatgatttcctcggaaaataaataaggatccgccctatatacaagttttggtaatgttttattcgtatatatataatgtaaagactcaaagctttaatgaaatagatgttgaaccaatgaaattatttgtctagtccaagacttacacaactcgtgttctcggaatgggttgaaaagccttaggccacgaacacaaggaaaagattctcatggttggtcgactatgtgaacggtcgtgttccgggcacctggtggactagctacgggggtctaacgtgacgcttccggatttgtccttagttttaggacggttcaggggtgttataggaggcctttgacattactccatgttctttctccttaacccatggacgtcgtgtttacaccaattcaatcggaggaccctaggtaagacagatacaacagattaccaaccgatatttgacacacaccgtaaagatccacttgacaatgggccatagaatgagttaaatatcaaggtacttttatacagaccaacgcatcaactttatggcctttaattatgtttatggcttctctatactagacctaatgatttatgaaatgtctttgcaatgtttttccaaaattacttattatgccacttttcattttgactttgaattgtagaatacattggagaagattgctgaatctcagtccttgttacatcacaccaccgaacaaacctttatacaaaaagtgctacatagtttaataagctctaaaaagaaggtcaaccttagaactaaaattgataatggtcacatgtgcctagttatattggacatgattttgtagatactttatatttgtaggcaatttttcttaacttttttctcaccatcttcgtgtgtaattcatcattcagggtaccttggagacgactgcgacatctcattcagtgtttgagcctcaacccaaagtcaacattgatgatgatcatatgaaggtatacatttttaactagtttcaatttatggtttgcggtccttgctttattggacactggagaggggttttgcatctctcagtccttgttagatcacaccacccaataaaccttcatagaaaaagtgctccataatgtaatattttctaataagaaggtcaaccttagaactaaactaaattatgcttgcatgtttcctttatattggacaggagtttgtggatacattacaatttgcaagtaatagtttcttatgtttttctcaccacctttgtgtgtacttcattattaaggacaccttggagacagctgctgtaacaccccgtatgtggaagtaggagtctagagaagtgagccggactttgaacctttcgcgtgagttaagtaccatggaagggtaagggaaaggagaagtccatggaagaaaaaaaaacttaactggaggacaaagacgagaaggaaggtaattattttaccctcgcttcaaacccgtcaatgaagccctccaagttaaaagagaaagtggaactcacgaacagagtttccaaggaaccaacgagatcctttcgatccacgactgtatcttgagaaaggtaatcagatatccaagtccgtatgtgaaccaaggatgctcaactcagatcgaatcaaaatgacttgatccgcgagagtggttttcaaagcattgagaagtaagaagaaatccgattagaaagaaaataatcagatggagatgggagattcaatgatcgaaagattgagttgaattacccgattaagtttctaaggtcaagagcttaagaatcggaagaagtttctaaggaaagggaacttgagaatttttgagaggaaagatgaataaaatttgtctaagtgtttgggagttgagaagtgaaggagttagagttacgattaatatagaagtgaagaaaggcgagccatgcaagccaaatgaagagaacttggtgaccaagtcggctcgcgtagagctgaagggaaaaagcttggcgcccaagttctttggtcggaagccatgcaagggaaacaccacttgtcgatgccacgcggccgatcccttttgcatgtgcgagaggtggacacgcgctcatgccaagtgtcgttaagtttaagccatgtgtcttaggactctagctcaaaaccaacaatcgatcactctttttaaggctactctcctcacttccgaacattcctttagagaaaataaaaagaacttagaatttcaagagttttagagagagtttaagagaggtttaaaggagaaggcggaggagattcttgaggagaaagtcgaagacaccaaaatcgccggtgaaacccttccaaagccttaacctctcgatccgttccttgtttgtgagttcgcgtgactacttttcttgctgcattttcattctagggttcatcattctcgaatttggttgcatgcatgataagctacgatcatttagaaatcgtcacttgttatatttctttggatgattaaaattcggctaggttaataatgaacctcatatagatatcatcacctatcatgcttaattttttttttaaaaaccggctaggttgtttgctgcatgtagatgatccctaaggctttgtttgttgattgcttgttcgtttgtgtgcattcatacttgtttgtttgtgttgcatgtttattttctttgcatgtgagtcttgtaagtcctgcttaagtgtcgtcatcttcaaatccatgtcggatgagaggtgtgcattgtttgtataagtgatcttggatgcggaatccatggatcgtagagaatctagtttagggtgatgtcatctcctgcctgtgtgttgagccttcgagtctcggtcccaaggaaacatttgttggttagtcttggaacctaggccgagattgcatgacgatgcatttgggcttattggtatcctgggtgggttcaataagtcatgatgttgttggtttcctgtgtggattcaacgagtggttggtcgggttgacggatccatataggaaaactcaacttccgaagttttgtaaggaggaatggagcacatggcccataggtcgagtctaggttatatcgagtcttttgtcttgcttgtattgcttgtgtgtttatgtgcttttaacgtgttactctgattgtttgttgcattcttgctttgcttccgttcgttaacccctctaggttgttagatttgcataagaatggcttacagttgccgtaggttccatgttgcattggcccgactcactgagtaatactagtttactcatgattctacttgtctttcaggttacccgtagctcaatcgttagagggaagacgaacgttaaggccgccagactagggtatttttatgttgcttttgtaaaacccgttttggaactcgcgtttttcctttaaagaaatggatccagtttgcaaaatgaattttggtgattttagttcgattaacgtttgtttcaaattgttttgcaaaggcggatgtttcgtaatgatacaaggctttgtccaagtcgcacaatacctcgccgcaagggttggcaagcctacgcagtgaatccagtggggagatgactagatgcgagttggccgaggacttggaaccccgggtattttgccgagttgcgagtggttctctccatttgtgacgccctcccgggtcggccgtggttagtccggtcatggccaggctagggggcgttacagctgcaaaatcacattcagtgttaaagacgcaaccggaaatcaacattgacgttgatcatataaagttatacatttttaacaaatttcattttatggtttgcggtccttgtattattggacatgattttgtggttactttataatttgcagacaatatttcttagattttttagaccactttcgtgtatacttcaaaatccaggacactttggatatgtctatagcatctctttcagtgttagtgcagcaagcggaaataaaaatatactatggtcatacaaaggtacacatgtttaactagtttaagttttggtatgcggtgcttgttttattggacaatactatttggatagtttttaccactttcttgttattccaggcactcgttttggctggggatcgtgtatttgataccagttccaaacctgacaaagacacccaatcatctcatctcccacacataactccaacaatgggggtacaagaaaggagctattgcttaccatatcatatatgtccatagatggactctatatataatgaattaattactcagataacatagaattgtatgtttattcctagaatatcatacatcttttttttattactcatatgtttttggtacttgtgtaattacagttaacaccctgattagttttaattaaatattatttttaattcgtttttagctaaaaattaaataaaaaaaactgattatacatgtcattaacataatccacgtcattactcatctcaaacagcaaaaacgtttcggtttcttttttttaagcattactgttcatcagcggaaaaaaaaactgtcgctttctttctcgacgggaaaacaattcctgagacctaattccgtcgccgttttctctttctctcttctgttccggacgaaattcttacgacggaattgcatttcttatccagtaaagtcacatccctatcaagtcgcatttgaagtgaacttctcaaaggtccagtaagtctatatcctaactgtatttcgaattttcgacaagattccgacatctaagttcaatagcaagtgattcacgcgacctttaaccgttttccaaaaaccatcgtgatgttattgatggtttttaacgatgcttattccggcttcttttcgtcgtcgttgattgacatatggtggctgatttgttagatctgtttgattcgatggctgagttattgtttgtttgccgactgatttatgatttatcaatgcatatgtgtctgagtttcccatatcctgtggttgagtttgttttatgttttgtataagtta

SEQ ID NO: 1917 - DNA, 575 bp, Arabidopsis thaliana landsberg
  unsure (1)..(575): unsure at all n locations
gatacaattcaactagatatttttaagacttatctgacaatatngtactttaccctaatatctaaatatttcacatgcgcgtgtcttatattagacgagtctgacaatattgaatgcctattgtcaacttgggacgtacacgcttaacgagttttttttttcacgttctttcaaagcgacaacgtatcatttttgctaataaaacagagcatgataacacatgcattcttgatcaaagattactctgtttcatttgtctctgcactttgagcaacaatggcagtattgatcatcttcatcctcttatgtctcttgtcattcctgtgttactctctcttcttcataaaacctaaagattcacgagatggccgtgaccttcctccgagccctccttcgcttccaatcatcggtcatcttcacctaattcttctgtctactttaacccacaagtcttttcagagactctcatcaaagtatggacctcttctccatctccgcatcttccacgtacctatagtcctcgcctcctcggnctcagtggcctacgatatcttcagggaccaagacgtgaatgt

SEQ ID NO: 1918 - DNA, 1560 bp, Arabidopsis thaliana landsberg
gcaattttgatatgaagaaagtcagagaacaagtataaacttttttggttgcttttgttccttgtaacatacactcttctcacctctctgtggcctcaccatctcagccgttatacatttaatatgaaataaatccatcaacaagtatggaaataaagatctcatgcttagtggaacaagatgtaacaactcttcaatttatgaactaacattgactcatctttaacactcactactcaggtcacgaagcaaagatacaacaacctctgtgtaaccagttgcatgaaaaaactctagcccatttcaaaataataaatgctgtattgatcatcacttggttggtggtgctggttaataaagtgaggcattttaagtagcaagagacatcatttttaatatctaaaccgtaaattcgtatgaagtaggttttataggctaaagaaagatgatatacatgaatctacatctttttacttgcgaaaaatccgttaacacacatcgtgatcggactgaactttgtttctcgggggcttcccaatcttcaaacaatcaatgggaggaagagtaggagtgttgagctcaccaaatgtctgccagcaataagcatcatacattcgatacttttcttgaaccggtttaagctctatcgacgataactgcacatctacacacgggaagttatcgctacaagcgaaatgcaccggtttcacggtataagttccttttatcctctcgtaagtcactccttccactgctactgctgatgtttggttcttgcatttgctatggtcacagtagaattggtttatcgttattggaatttgtacttggttgagctgaatgtttgagaagattatccctttcactgatcctactcctccttgccatgtcttgattcggacacctgtcattgtgttgtgcatagctacgtctcgtactgttatgttcgagacgcaggcttttgtaccctctttgccgagactaccaatgctgatcccgtgacccggtccacagttcacattgtgcacaaacacgttcgagcaacccgtttggatcgagatacagtcatctcctgcataattcaaggtttctagatttaagaattgagattttttaaagattcaggatttaagattggagatcatattaccgcaagcgagagtagtgctgtgaatgaggacatctttggtgttctggaggtgaattccatcagtgtttggactgtcaccaggtgaagaaacggctatgtcatgcaccacaacccctacgcagtcgtcgaatttgaggtgacactgaggactgttttgtatcgttatacccgtcacttccacaccaaaactcccagagaatctcaatgcctaacagaaacaaaaatcagtaaacaaactaatgcttacaatctcacagtgccaatatctatttctcaccgttggtttaatgcttggcattctctcatcaagctcacttctgatctgtcatatgtaaaaacaaaacagagttttggtcttagatgaatattgtgtttgggaatgagacagtgaagaagaagacgatgaactt

SEQ ID NO: 1919 - DNA, 583 bp, Arabidopsis thaliana landsberg
  unsure (1)..(583): unsure at all n locations
tgctacgccaagttcatggccgtccccaactatacctacctcaagctcaagatgtcgggccccaacgggtcatcaccgtcggctccacgtaccgacacgcgtacgaaggcgacgtggagttcgtggagtacgccgaggcccttgccgaatccgaggccctcatcgccgacctggagagcctctccaaggaggcgccagatgcgaacggccatgccggcaacttcgagccagccgagacggtcaaatccgtccctctcgaccccagcaacgacgcctccaagcagatacggatcggctccgagctcaaccccaaataggaagcagtgctcatcgactttctcctcgtgaacgccgagcactcgctggatatccgagctagagcccgacccatgaagcagcctctgcgccgattcgacgaagaaaagcgcagagccataagcgaggagatccacaagatgatggccgcacggttcatcaaagaggtattccatccgaatggctttccaacctgtgcttgtgagaaagaaaggagggagatggcggatgtgtgtagctacactggtctnacaaagcatgtctgaag

SEQ ID NO: 1920 - DNA, 572 bp, Arabidopsis thaliana landsberg
ctgcttctctgtctctgcttggctctctcaactcggagatcacttcccgaggctcaaatgatgaagctcggggtcgatcgatcctgtcagccctcctcgtagctgagctcgttgaaccacttcttattactttgggggtgggagacgggggccttggcttgctctggaagtcttttatttgagcatcaatactcttcagcgacttcttcatggttctcatcttcttcttgaaacctttcatcgttttgctgtgaaggttcccaaactcttcaagcacaccgagcttctctagctcctccgatgtcgattttcatggcagagggagatggcatgaagttgatgttatgccttgtcttcactgaagtttggttctcgcaaggtaggggtaacaaagaaggtccaagcttaggatggttgaacttgacgatgtagtaatccgccggagttgtcttgtcaagataatactttcccctgaggtaatcgaggtcgaggaacttagggaacacatcagggggttcccaggtgtatccctgcagctcctaggattggctgtaagagccacaacacaaagg

SEQ ID NO: 1921 - DNA, 419 bp, Arabidopsis thaliana landsberg
  unsure (1)..(419): unsure at all n locations
cagtgcagaaattctggcggcgtanatagataatatgccgccgactgtaccgggaatngagaagcttgaaaatgaagatcttgaacttacgcttgagaaagtagttttctacttccttcatatatactgctaataatgccctacaaatatgtcactttgatgctgacttttttaattgtatttattacaggtggttaagctgcttgtttatataagtgacaaggatcttttcgccgtgtttttcaggaagaaacaagcccgtcggctcttatttgatcgcaacggtaatgactaccacgaatgaagtttacttacatagtttaaagaactacttggtgcgcagtttactactaagatggagggcatggttagtcacatgagttttatttcctttgaaaacgggttgcttatttagtagt

SEQ ID NO: 1922 - DNA, 3064 bp, Arabidopsis thaliana landsberg
caataataaagtatagtgtcccgatgcgggccactagagtaaaaacttcatcgaagtctacaccatgcctttgcacataccacttagccacaagtctcgctttatacttgttgatgcttccatacgagtttccttttattttaaacatccattttagtccaattagcttagctcctgcgagaagatcaactatattctatgtattgttctttgttatggaagagatttcttgatttcttctttacaccaagaaccatgtaacaaatgcacagaacaccaaagcatatccagaatgtgcacacatcgactacttttccagcattttgctcatttgtatttactacgtgagtacccacgctacgcgtgggttgttgtttgaaatttgtttaaaaataattatgtttaagtatttttattactaatttatgttattttcgtgtatgttattatgtagttaataaagttatattcattttatgtaattatatttgtatagttagattcacttttgatttaaatatcaattatatttttttcatgtataaatcttcttatctatatatccaagattctaatcttttttaactatcatgaaatacttacatcaacaatataggatacaatagtattcaattatgttacttctttggtttgaaagttgcgtaacttgattctaagcaaacaagttattgtttcatgtattttctcctaatctagtattccaatcacatcatgatagactcatcgctaaatattggattgacataatttaaataacaaatgtataactaactatttatttgctttagttaagagtgagattgacggatgattcaatgcaatgtgaaacttttaatttttttatcactaagttttgttaatttttaatgatattaatttagaatgacatgtgccactcgttggtgtgatgatgtgtcactcatatggagagagttgaccaactttcatatatatgattttatcttcaactagaattaatactccaagtacttatatatatatatcatatttaaattcatattaatttaaaagtgataaaaatgcccttaaagatgacaaacaactgaaacaagacatttgagcaaacaacttgagatgctaacaaatggttttagtagacatctaaacaaatccaaattctaataagatttattttggtagtcatgtacatataccctataaccctaatatggaaaccaaataaataggtcactatggataatgtattttgaccaaaaaaagaaaagaagaagatgaataatgtatttttctgtctctacatacaaccaaacatagttaaatgtttaaagttcaaaatctactagaatttggctactcagaattataaaagagattcaagacatttatgtagtacctctgttgaaacaattttttgagaaattatagtgaaaaggggagccatttaatgaatctttacagctttctatatttcatgcgttttagctatatactattaaatagttaaggttagaaacttagaattaagagatttataattataaccggtgccgtggtcatgaactcatgcgtatatatcggtattttaaagacaaaaacaacgaaaacggcacgcagtttatccctcaacatccgagacaacacttctcgtagtccgtgcttaaattcgccacgtagttcactttattcaacttaaaaaagcatgacgttttggtgcatctatcttcttcccccttcctctctcagcttctctcacaccactaaggaggaacgttccaaagatccctctctcagaaaaatctccaagaaaacaaaattccagtggagaatcattcggatccctgaaacttttggcttgcggctgaatcgatttcaagattgcaggcaatgcctagtgtgaatatattgttgatgtgtgatgctttggttaaggaagttactgaattaaccggttatgataaggtgatgatgtagaagttccatgaagacgggaatggggaagtgactgctgaatgctgcagggacgacttggaaccttatttcaagttgcattactcggcaaacttcaagaactgtgctaatctttgcccaagatttacatgtaaatggtactgattgagtgttaaaaggaagaagcttcatacatgcaatatacattgatcgtagagtaggttccgagttccaaaacaaagtgaactatactgagtatttcaacatagaaaaattataaaattgacatcctttgcaaagtaaaagccatatcataacaaaaaaatcggaacatttaaccggaaacagagacaacccacaaaagaagaagaagaatgctaaaattgagaagcactggagttggtcgaaggggaccaaatggaatgggaatacgtcttggagaaattgcacacaatagtcattgacccacttttaatttcagattttgacactgtgggatgggcctttcagttattagccactaaaccaaaaactgaccaaaatgcccctgacgaaactgaccccggtttgtacgtacggaccgcgtcgttggaatccaaaagaaccgggttcgtacgtacactgttcatcgacgagaaatgcattaaatgatttctgggtttcggcgaaattgacacttgagattggaattaaaaaaaattaaaattcgttggactcacacgtttttaatgctaaaaagttttgacaagactaaaactcatgattacctattataatagagattatattgtaagatgttcagataatttagattagaattctggagaaaaaacgtaaatcgaaatggtgttaacgtgaagaaacgaaaatcgaaattgtgttaccgtgaagaatctgaagttttcagttgctgttttacaaagtttgaaggattgaaggggagacaatctgtgttctgggtaagaaattcgtgttaatcctaattacacttgagaacgtgattcgaatgatacgtttttaaaaatttatgggttcatacattgttttgttggagattctatttgtatttgtagatataaatgaaagctctatgttttgtttaattaagtttata

SEQ ID NO: 1923 - DNA, 683 bp, Arabidopsis thaliana landsberg
tttggtttatagactcaaacaccaaagatagttgcagataccaaatttacagtgctaatatgcattgttaaaaaggcgtaatgaatgataaggttttctgtagataggaattttatgttttttgttgtataataaaatgtatgtttcatacaaaagtatagcgagagagtgtataggtttcttgttgtatgttttgcttccttaaagcgcaaggcatatgaggagatcctcttaaatcatgtttgttttcttcagctatatattttcaaatccaacggttaactaaataacttcgttttgctaatctctaaaccaaaaccaattccacactttcatattgtagttacccataaaacgatcggttaactaaataactctgttttgcttcataattaaaccaaaattttatattgctcatagattagaagcagattaggtttcattagtgtaaactgatctgcttaattacacaaaattcatatgtatctaaaagcaaacaggaagaatttgggacccaaaagactaaagatgcatttcaacaagtctcataagaatttttgtataaaaggctaaaagagtggccaactctacacaaggctaagttcctgaaaccctaactaagacttgaggcttaagaaactaatctgaacaccagatttatcatcaatagtccaaagtcaaac

SEQ ID NO: 1924 - DNA, 645 bp, Arabidopsis thaliana landsberg
ggataaacaaaaacttgaaagaagaatatgccgagacctaaaaaagaagtgttaacagtctcgaattcataggtaagaattcggcttactcatgattacttaactctcaaacagattcaaatcaaagcagagtctagtcatcattttcaaaagttcttattactaaaacataagacatcaagagcgaggatgttctgcatacctgagatagtaagaactgtagccacatcattggtctagtagctcagacctccatatcttcttggactgttggcccatagtgcaaatatctgcatagccagattccaagtgatgaagatttatttgttcgggcaagacaaagcagttgcaaagactttaacaggtacaattttctgtgcaaagactaggttacctcggagtatgctgtctcatgtagacacagaatacaatacacaatgatagatgacatgagaggccaattcccaaggagaaacctcatgctaattttcatccaaaagttaacgctcaagccaaaaagagcgttaaaaatggcacgccaataaccacctaatcagtcatattacagattaacatggatacaataaccaaattatgtttaatgatactaacatggagattattcccacgagtatgatcggtttt

SEQ ID NO: 1925 - DNA, 557 bp, Arabidopsis thaliana landsberg
  unsure (1)..(557): unsure at all n locations
aggtacagcgtttaacatcataaaggaatgtgactaacatattcacgaatttttactaacttttaaaattagaggctctccagagccggaggactgtagtgattgactcgtagttctacaaccaaccaaaatacaaatttaccatactacaaatatatgtacgttcttaacgaatttcaatataaatatacatattacttgttaacttacaaattatctctgatggtaaatgtcatatatctggcctcatagtctgtttccccttcacgacagacatatggaaacctcgccacagttgagacacttgatatgactctaatagcatctaacaataacaaaagagcaaacaaatacttataaatcttagtactaaggaaatacaattgcaagaaagcataaactatataaataaatcttagattaccagttacataatccttagattcagattcgacttcatcagcatggatgaattggagagaacttttagtagatatatcacttacatgccacaantttgtgtaccacataaagatttcaaagtagatgatgagtac

SEQ ID NO: 1926 - DNA, 532 bp, Arabidopsis thaliana landsberg
aaaaataaattatagttatatttgtttcgtttattgtttcagattgtataactatatctatggctagttttttgtaatctagtgttgacccttaaagaaaaatccataagaatacgcataaattgatagtaaaattagaaaataaacatcattagaacatgaagtaatttacttatgaatctctatctagtttttttaaagaatcaatattctagatagattgtacacaaaattagattttaatttggattcaattttagattttctgtaaaaaactaatctgaattacatattttaaatttaggatgacgaaaatattttttttttaaagctaaaatttactatgatctcaacaattttggtatttttaaaattaaacttatcctcttgcattatcgcaaatatgatagtcattattgttcgaatacaattaatgttctgtcaaaaaaatcatattactgtttgttccagagaaaagtcattcaaatttcaaagaaaaaaaaaagaatattgttgggaatcaatattttct

SEQ ID NO: 1927 - DNA, 888 bp, Arabidopsis thaliana landsberg
cctgtctatcgttcctaatagaaagaggattagattgtttggttttagacccgggactaacttgagggagcggaaagaattggttgaactatctatttgaaaatcctctacaagaatatcaaccaacgcgtgataggtaatgtgctcatcaatgagcactaaagaagctcccaattcaatgtctaattcaattcccaagtcatattgtttgtcaacttccacaagccacaaacagaatacaattctagcattataacctgataagataaataacaacaaaatcaacacccacaaaaacactgtcactacagagagaaacaaggtttacaaatcgttttaaagcgtaagtaagtagaatagaataatttacaagggattttaaaagctttgaaaagtggttaacatggtttacaaatcgttttaaagcgtaagtggctaagatctatcacgaaagcatatgtaaaagaggtaaacactaaatcagaaccaaaatctattacgaaatagtataacgaattcacataagcaaatctatcacgaaacagtataacgaattcaaaaggattttagaacaatataacgaatttacaaggattttagaaacaaattcaatcatcaaatctcaaacaaaattcaaattcgaagctgaagcaaatgtcaaactgtcgattgaatcaggattcaaataacgaattcacataatcaacaacaaaaatcgaataaaccaattcgaaaacgaagatttaagctaacattataaaattaaacctgggaaacgcaagagattcgtcggcaacacacagctcactatttctgacggcatgggattcaacggcattcacaatttccgatggaggaagaagagagagagtgaagaaatgaattaag

SEQ ID NO: 1928 - DNA, 798 bp, Arabidopsis thaliana landsberg
aaacgtcctaatcatatcaactatgttttatttttcttcattaagataaggttattccatttgttctttcttcatctctggtttctcgggttggatctttaaagatttatgaaaacgatggcagcgatttacagtctttacataaataaaaaatctggcagctgcatagaaacttgcgactttccatgtctcgacaatgacgacctctttgacaaaacaaaaaagacaatgacgacctagtttaatgttaattctgcctgatttatcgattttgttcaagggaaaaaccgaaaattaaatttttggagttaactgcaaaagcttatttttcacctaaatatgtacaagcttctttatttgaatgcaaaacaactttggggtgtaattcttttccaaagtcaagaccaacgaattagtcaataataagaccaatggaataagaatgtcgtcaaagtcaagctatcaaaatcaaaatatcaaacgcaagcatataaaccacaacacctaggaaaacctagatcccagtgcccaagaactctcaagtcatcaaggaactttatcaatttatcaactttatctagctgctaacaaatcttccctctttcttgtttatttgatcttcaaggtctaagcacttcttcttaaatggctgaagctgttcatgctcgtagctgggctaaacaaccctcttctttcttcttcttttcctttatttatacaatccatccaacttatacactgcttactatatatgttaggatctgtcctagggttcattgtgtctcccttgcaatttct

SEQ ID NO: 1929 - DNA, 423 bp, Arabidopsis thaliana landsberg
ttaccatgccgttcagcttgaggaatgcgggtgcaacgtaccagcgatgcatgaaccatgtgttcggcgaacacatcggccgaacggtcaaggcctacgtcgatgacatcgtagtcaagacgaggaaagcctccgacctcctttccgaccttgaagtgacattccgatgtctcaaggcgaaaggcgtgaagctcaatcccggaggcatgctcttagggttcatcgtctccgagcggggcatcgaggccaacccggagaagatcgcggccatcaccagcatggggcccatcaaggacttgaaaggcgtatatagggtcatgggatgcctcgcggctctgagccgtttcatctcgcgcctcggcgaaagaggcctgcctctgtaccgcctcttaagggagggcgagtgcttcgcttggacccctg

SEQ ID NO: 1930 - DNA, 3793 bp, Arabidopsis thaliana landsberg
  unsure (1)..(3793): unsure at all n locations
ctggtaatttactttgcgaacctttaatgactattgtgtatcgatgagaatcgatgtagagcatccaatctctcatgttcatnnnnnnnnnnnnnnnnnnnnnnnattaattaaaaggttgcaactcattgcaagaccaataatattgacaacaaaactcccaatttatatacgggatcatgctatattgcatgctgcaactttggttcagattagaccaagcgcatataatgtatattcccctttacaaatgacttatggtcaaataccaaatttatcccatctccgccttttttgatgtgcggtatatgtgcctatagcaccgccacaaagaacaaaaatggggccctaaaggagattgagaatatacgtcggttatgtatcaccgagtataataaggtatcttgaaccacaaactggtgatttgtttacgggacgttttgccgattgctattataatgaagatgaattcccagctttagggggaggaattcataaaatgcatgtgcataaagatatagaatggtgcgcaccatctttaaaatattttgatctccccacaaagcaacgtgagttggaagtagaaaagattgtgcatttacaaaatatggcaaatcaattaccagattcgttcaccgatacaagaaaggtgacaaagtcatatatccccgctgcaaatgccccatcaagaattgaaattcctagtgagctggaattagatgggagcaaaattaatgaacctaaggttcaattaaagcgtgggacgcctattggctcaaaagataaaaattcctaaaagaaaaagtaatggggagaagaaaatgaaaaagttcttcaagaagaaccaagtcctcgggacgatacaaaaaaatatgagatttcaattaattatgtccataatggtatcatatgggatagaaatgatattgatgatgaaaatagaaatgtgtttggacatattgtcactgcatctgataatgtaaaacatgagtacaagtgggtatttatgcgaaaaaaatgagaaagatgagatcaaacgatataaagtgcgacttgttgcacaaggtttctctcaaagacccaagagttgattatgaagaaacatattctgaggtcataaatgcaattacattcaagtatataatgagcctttcggcatccaataatttatatatgtaccttattgatgtagtgataacttattaatatggatctcttgataatgatatatgaaaatccttgaaagattaaaagttcctgaggcattagactcatcaaagtctaaagatatatatttgtcaaattacagcgatcactttacagattgaaacaatccaaatgcatgtggtataattgtttaatagattatctacttaagaaagggtatgtgaataatgaaatctgcccttgcgtcttcattaagaaatcccctttgagatttgtgatcattgctgtttatgttgatgacctaaatataattggaactccataggagattgatggtgcacgaactcatatgaaagaaaagttcgaaacaaaagatcttggaaagataaaattttgtcttgggctccaaattgagtgataagtgtgtattttgcatgttttgagcatccatttgtcatcactttagcatcatatcatcactgttttataccatttcacatcatttgtcatcactttgcatgtttagcacagtctcgcatgcatgttgcatatttgtgttgaaatcaaatgatttggagttgtcgacgagctaactggaagaagcggacctgatcatgtcaaaccactcgaccccgaggtcgggtagaagcttcaaggcctcaacagaccactcgaccctctggtcgagtaggggacttctcgatttcatctcatcactcgacccctgaccgagtaccaccacgagagatactcgatcacttcactcgaccccaaagtcgagtgtcttcacctccaccaccttaccaccactcgatcacaccactctacctggaagtcgagtattaccatcaccaccactcgactacctactcgatggcgagcttcagagtcttcttcattccgcactcaaccagacactcgagcacaaggaagaaaagaagaccccagttattcactcaacctctcactcgaccacctgggtcgagtacagttcttaattcgtcccaatactgcgtcgttttgagtattagggtttcggaatattttgctataagtaacatgtactttacattttcgaaaacaagtttttagcttggttttatttcgcagacactgtgttctagacctttttgtaatctggatttctctttatctattcagtattcagtattcagtatttgttcttgatttcgtttactgttgttcatcctgttatcattctgctattacattgttgttatcatgttttcatcctgttcaacatttatgttctctacaatgatgtctgagtagtgaataggtttctaaggatgggttagagtagtgtagaattctcagtatgctaggtggttgagtttgattgatagatcccttctgaattagttgttcttaatgcctattgctttcttatcaactggaatttgagcccagacatttccgcgcccaaaaggtgttcgatgaaatgtctgaaccactaattccagagattcgtgaccctgtaccaaggtattggttgtagggagcgttttggctttaacttgttgatttgtaatgcctgttatgttagctctcgtcaatggtgattgagtctgggactaggttagcttgagagtctctgttgcggtggcacttagatttggttgatgaacttgttgtctagggttaatttattgagcatgtcaatcacctgtaaactgaggaaacgaaattactcaattatcccatccttaggaattctttgtctgattgattttattgtttactctactgctgtttactgcatcctgtcatatgttgcttagtttctgcaattctttactgttactcgacctgatactcgaccacccagttgtctggcaacagactgtgcagtcgagtatccctgtttcattttctgtctgttactcgacctgtcactcgacctcacccagtgctctgcaaagagctgtgttggtcgagtgttttactgtttctgtttgattttctgttttctgcatgttcacttaggactgctagaacacaccaaaacctgttatgcttggcttgacttagtgacttctgatcacatcttgattgttagcatcacacccatttggattgacaacctaaaatactacaacgatatgattggtgttttaggataattgacttaaaaacctattatcaatttggcgccgttgccaattgggtgtttgtttgttacctttaagatttcagacttgcttagatcaagttctttttcaattttcttttcagttactaactgtgtgtttttcttgttgtcttcttgatccaggtacagctctgttgtatgcgaactcgatcaacaggcaactagaacctccttttcaacgacaacatcaaccgcacagcccgcgaaatcagaaaaaaaagaaccacagtcaaccctgtacctcagcaaccactcgctatggctgaagaacagaatcaacaaaatggccatgccaacatcggtgctggagatgcaccacgtgatcaccgtcagaggaagggaatcgcacctcctgctatccagaataacaacttcgagattaagagtggtctcatctcgatgattcaagggaacaaattccatggtttgccaatggaggatccactcggccac

SEQ ID NO: 1931 - DNA, 644 bp, Arabidopsis thaliana landsberg
cagcataaagaagagaagaagactccagctaatcactcgaccaatcactcaaccacctgggtcgagtaccgttcttaatccatccctatactatgtcgttttgagtattagggcttcagaatattttgctataagtagcatgtacttgattccgcaaacagtttgtgagttcttcacttttgtaatcttgatttctcttaatctattcagtattcgcttttcgtttattttacaaagttgttcatcatgttatcatctagttatttctctattgctatcatttcttcattcttcatatatgttttctgcaatgatgtctgagagtgactaggtttctgagaatgggttaaagtagtttagaatcctcggtctgttaggtggttgagtttgatttatagatctcttctggattagttgttcttaatgcctattgctttctgatcaactggaatttgagcctagaaatttccgcacccaggaattcgagtatgagccagagtcacggcgcagggagacaaagctgtggaacagacccgactgggacctcgttagggaagagctgaaggatttgtgggctactatcgggaatgatataccgttgaactcactgcggtccaagagcaaccaaatccgaagtcatttga

SEQ ID NO: 1932 - DNA, 388 bp, Arabidopsis thaliana landsberg
atccattgcttcatttcaagatcgagttccataagtactcgctccaaacattaactataaaccatccttcacctggttccaagtattaaatggaatccacgattgttccttgtggaaccaagattttgcttggccaacgaaaaaaccggaaacacacgccaacttgtctttctcactatactcaccaccaagaaattgagcttcagtcatcgcaatccactcctcggattacctttagtgaagatcgggaggtccagctgtctaccgtcatctgaaattgatcgagattcaatcctctccaatgcgcaaaccactcgcttcaaggtttcctccattgaagtcaacatctccaaaaaattgcacctccgattggcatagtagcttgaat

SEQ ID NO: 1933 - DNA, 978 bp, Arabidopsis thaliana landsberg
  unsure (1)..(978): unsure at all n locations
ttagttatttttattcgggattgatcatttgggtagaataagtcaagtaagatccgatataatacttgtaaatgaatttattatcaataagaataaagtttaagtattacttattgtttggaagtaaattctatctgttgtgttggtctataccttttagtattgactttaaaattcacaaaagaaaattaaaactctcttatatatggtccaaacataataattttacagtaatgatccataagagttttcacatatgtttcttgacgtacatcatcaaatatatataaatgaaaaatacttatagaagattcaaattccacatagtgcactaatgttatgtcatttaattagtaggcttagcggtcaaaagttaaaacgaatttcctacctttctatcagcctcagctgcacgtttgaactgtctagttggtatttaaaaaaaagaaaaatgtttttcttaattaagacagttttcttttattttgtaacaatgtcattatcttgtttaatctacgatgattgtaatttgattcccaagtaattatttgagtcgcctttgttgtttagtcatagataatcggaacgtgatccccaagtgtattatcatgtatttcaaaatgctgatattggacgactgttgagtattgacgacgacgtccactatttgtatttcaaattgacggaattgtctcttatttttcctgttgttaggttattggcgggtgagttcggcatatctgacttttatagaattctattgtcaataataagttgaaaattgttaatacaaccattatttccccattgtgcactaataggatgtattaacaattttacgacgttaaacttttccaacaatattcagatttctaagtgaaaattcttttttttggngcacaaaaatgaaantatatattatatatctatgtgaaaattatctctactcatgatgcaacactcgatttgcttgtacat

SEQ ID NO: 1934 - DNA, 4288 bp, Arabidopsis thaliana landsberg
tgcaagctcatgcagagagttttggaaataacaaaagcaataaatgcaaagtttgaatagaaaagagagaatgggccaaggcattgtgactgggccttggaccacaaattgggctaataaagggaggcttgaaagtgttacttaggcctcattaaaaaccttgttaagaaaactcactgggacaaaacttgacaagggaaaaagagtgcataagcaacacttaaccctttaccgagcctcttgagccgtgatcactatgaaggaggattgagccacgtctttttgattcttctttagctccttgagtagtccattgatagcttggttgaacttcttggattttgatcttgttagaggacccgccggaacgatgaatgcttcctccggtacaagctgctcctcggcttcaagctgctcctcgtcttcttgtggttcaagtggtttggttgcattggtcatgttctcatcacaacccaacacaggagaaaccatcccacccacaaccaccacaccaccaggaaccgtcgcagccacagaacctacttcactttctccatctttttaaaaactttaaaccttctcttatgaacatgtaaggcattgtggttagcaacattagagctttgggtagcaacattttggctaatcaaatttatatgagtttggttttttgttattaggttttcaacaaaaaaaggtaatttgaaatagattagcaaattaatttacctaatttactgattaggtaacgaattagcataataaaaaacaacttaagcgtcacaatttggtctctgttcaaagcaagcaaaactggtaacaaattggtcgcaaattaatctgtgtccctaagtcgtcgtaaatatacgacaattaaccactgtcgcaaaactgtcgcttatatacgaccgaatatatatgtctcaaaggcgtcacaaattgacgacgcaatagcgaccgttttaattagcgaccgttttatagcgactaacatgtatcgttccacattagtcgcaaagtaacgatttgcgacggtttaaggattcttttgggggttgcaaaagacatgttttcttgtagcgagccgcctgtggggaccgaggattattgagttgtcagatctcttctcaccacatttttgaggcaagcatcaatggccgaagaaagttccatgaatgcatcatttgccgaaacgctcaaaaatattcaggaaaggatttcgaacatgacgcaaaagttctcggatgtggagaaagttgctaacacactgcaaacaagccagatatctcttagcccaaaacgttagtactatacaatctcgtgttcggtctttgagtacaagaaaccctctaggagtccgaaggagcatgttcagtttgccggggtctcataccaagaatggaaccagtggccagactactcctgatgctacaaatatagtaactcaatcggaggactcggaaacacaattcggagatgatgtcgactagcagatcaactcgagcaagagaaccctgagcagttcgaagctatgaaaaaggttagccgcaaatacaaagaaatgagatcgaagttccactaggccaccagtatggagccaaacatcgatcgagttattgaagaaactaggcgaacccctttcacccctcaaattgcaagcttgaaaatcagagattctcggaagctcaatcttgaaccatacaatggactggaagatcctaagagttatctcgcagctttccttattgctgccaaacgggttgatcttgatgaagacgaggaggatgcgggattttgcaaactcttctctcgaaaatctgtgtggacaagcattgatatggttcatccagttgaagcaagggtcgatcagtaattttaacgagctgtcagctgtgttcctaaagcagtactccatacttatggataaaagcacctcagacaccgacctatggaatctattgcaaggaccaaacgagtcacttcgtgctttcattacaaagttcaagggcatgctttccaagctcccaagggtatcataacagtcagctttatccgctcttcggaaaggtttgtggcacgactcaaggttcaaggaagatctaatacttcacaaaccggatatgatccaagatgccttgttccgcgccaacaactggatggaagtagaagataaaaaagaaagctttgcaaaaaggaatcgacaagcaaaacctgcgatcacattccctacaaagaagttcgagcctagagaataccacggacccaaaaatttcggagtgcacacctccaacaacaacgtcgggaagcaattccaaaggaaagggaagtctaacacgtgggtccaagatgaaagtttgtattgtgacatactttgagtgaccaggcacgtgggtccttgaaaggcatctcgcagaattatgggcaagcgaagattctaagttcaacatagaagatttcgttaaaaagtatcatgaggcaagagaaaatcccggagctcaaaatcctatcgtaaaaaggccaaggtcatccaacgaagaagaaccaaagagctcaaaagggaagatcaatgtgatccttggaggttccaaactctgccgagattcaatcagtgttatcaaaaagcataggagaaatgttttgcttaaagcgagcttaagtatacatagatgatatgttggtcaaatcattgaagaaagaagaccacattcagcgtttagaagaatgttttgaaattctcaatcaataccagatgaagctgaatccggcgaagtgtactttcggagttccttctggggaattccttggttacatcgtgactaagaggggaattgaagtcaatccaaaccaaaccaatgcttatatatccttatatttacatgttttaactatgttttaggtataggttttggagtctatttgttatttctagagtcttttgaaaagactcttttctagttctttttcaggtctttacatgcttggattcatttggagataatgaagaattctaaagaaaaaccgagaactaatgctgcaaaagaaattcgaagactaaaaatcatgtaggtgtcggtcgacaccacccctggtgtcgagcgacaccaatacctgacggcaatttgaagaagcaacttaatgaagttttgaagatttccaaattcggttcagaactttcccttatttctaaagaaggcccatcacgttttaggtcacatatatatagattttaaggtcattgtttatacctaagttttgttttaattgagagagactctttttgagaaaagaatccaatccctgcagagaggattctgaactccttttactctccttcttattattcaatgcaatctatttagactttgatttgtgtttctttattcatgtctaagtaatcaccttgttgggtttagggagtctcaatagggatttagatggattagtagatcgaaaaccccttaggattattcttagagttcttcatcttgattgttcttactgctagttttaaattgatcacgtagaaccttgatattagacaataggtattgccgccatatgtatttgttatttgaaccatcatagatgagcctaagcatttaagaaagaacaggtagggttaatcatgctcatagaagggctctggtttagatactaggtgagctaatcaagcttattaacaatgcatgttttagcataggatttctcggcttctccggttatcttagttgtaagtatagagagtttcgcggaacgccaccggttactctagaattatagtttgagtttgagaacggtgcgataacaatcctaatattagctagatctacaatatatctatttcccgagactatttcttagacccgtttacttgcttatttttcttttacattcatttactttgtctagtttatttaaaaacatcataagtctatcgtgtgaacatagagagctcagtgaaatttgacccttaagtgctaacgacgatttcttatttgagagagtaagcttaaggcaatttgagctatacaactacgtagtaaaattggcggatgtgggtaatactggtagaataggagaatacatttgagaaatatagagtaatactatggcagtactattaacaattgagtgatatatgaatgaatatttgtttgtttcatgatatggaggaagcgatggcaatgcaaccactcggtatgtacttcccggcttcagggtataccaagaagataaagttatcgacgaggtggtatatcttccgagtgttgaagacctttcatgactt

SEQ ID NO: 1935 - DNA, 7115 bp, Arabidopsis thaliana landsberg
  unsure (1)..(7115): unsure at all n locations
ggggcaggccaaatatttttatgtaagtagttcagataacgaacctgagaaattatgccaaggtgttcaccagccttttcaggcatagatttaattgcacaattgcaaatcaaagtactgtcaatgtatggctgtgtaagaggtacaaaaacaaagcctgcgaagatgtaataacttggaagcttatcatactgatgccctggaacaaggggtggcacctggatccaatagttcaccacaaaacgagttttgaagtcgttcagaaaaaatgtgaaccaaaaattaaaccgatatatataaaattattatactaaataataagaaatgacttacgggttttaccataatgtggaactcatgctctttcccatctctcaaaactttaagtaaaactgtttcatctaatttcttcatcgaaacaaaatgattgaaattgattcgttccttattccgaaaagcaactgcatgcaacaaatacaatctcaattatccatcacacatggagaaactttaacaatggttttacaatatatataaacgtaggattacctttagcatcatttcctataggaacatcatcaattgcgagaatgatgtcatcttttcttaatcttttgtaagcatccgacagagggtttatttcgtttataagaatccctgtcatttcaggacccatcttaaagtgattacggagttgagaattctccataagttgataggaaatgtctaacgtgcagaaaccaccatattgtccattttcttcaaaaccagttaaaaaatgttttattactggagtcgggattatgtatctgcaagtgaagttaaaccacaaaaatatattatttcgaagccaaaacccttttccacgttttcttcctacttcctagaccattatgcttttaatattgcaaatttaagcagatgaattatccaagatttgtggtttaaacgtaacttaccctatattatctgcagatggatctttttgaaaagctacacctgccattttatttcctatgattgctggaccaccactatttccagggtttatagccgcatctgtttgtatagcgagtagtgtagtgcctccgtgagcatatcttgtatattcgactctcgaaacataacctttagtaatagaaacgctatcaccacctgcataacataagtcattattagtccatgcaagttttaacctatttattcgacccgtttattttttgtaagcattttaccagtaggatagccaaatacggccacagattcatccagagatggtatctctccgagttccaaaggtatcatatcctcccaaaactcttcattatcgatctccaaaatggccaaatcacattcatgtccaatcgctcgaacttgtgctttgtattttgtgggtgagccatgttttctaacttgcaaaaatatgtgatcagcaactacatgagcgttcgtaagaatcttttttcccgagattacaaatcctacatcagttccaaggatcagttaggaaaatacttatgcgcgcgactcttaaaagagttgataagaattatggataaacatcaaataccagagccgccggattcttgctgcggccaattccgccaaggttgcaaaacgctaggcatgctatagacggtgaagaccttcaccactgaatttaccgcaaaatcaatggaagaagatgtcacgttttctgccgcttctggttgttatgcgtcagtccctgatgcaagtgctgactccctgttgtgcttattttcgtcttgcagttttacgtaaccaagaagaagcaaaggaganaacgggaacccaagaaccgaaatgagcaagaagcggcagaaccgagccagtgtttgaagaaatcggaacaacatgttagcgactacgaataggtttgagatttaaaacatacatgattaggagttatttatattgatattaactttcttattatcaattgtttgtggatacactcataatgtaaatatctcacatcattttcttgatttgtaatgagaaatacatgctaacatattatattgcacttaaggaaaatattaactaaagttaatattaaatctttaaacatcagtatatagttaatgaatcttatataatacaatatattaaagtttcttataaacaaaaagttttgagaagcttacacgtaatttctctcctttagatatgtatcattttttagatgggtccaatcttataatcataaaacaattttattttaagaatatctacaaaaaaaaatttctttctaattctataaaaattgatctaacaaattagaaaatttgttataagaatatataaatatataatgtgttataataatttgatcattgcatacacatagtattaatagacaaggaagaaatagacacgtggatttcactaaaccatattgtatcttagagtgtttcaatctcaaacaatggatatgtggtgccacaatctgctttagtcccggattatctatatcaaatctctttaaccgtagcgatagggtcagatcaatagacttaagtttatgacagtgtgcaatgtcaagctctcgagcagtggagaacaagaaagaatctgagcaaatgatttatcagtgagtttgcaagaactcaaggacaagtttcttaaggaggaaatcgaccatgagttccctgatgtgcaagtaataaaaaaaatcataatcaagaaactcaagagatagcttctccatgttgcgagacctggcgaaatcgatcaagatatcaatcttgtgttccctggtgcggatacagagatggaaactcatgattttgggagctgagtatctagctagggttttgtttatcgagttagtgtctgcactacggcaatcaatgtagagagaaggtgtatcagaccatacatgcctccatcgcctggataaaacggaagttttgatcgccaatctggttggaagataggagagaattagttggagaatatcatcaggcaacctactgatcaagtctccagcttctttgagatagctagggcttgcgcatgtactctgcaatttgtataaatatcgcatcacccacataagagaaaaaggattggatatttggattatagagagatattaccttagaggaagagaaaacagtagacgaagcatcgggtctggtcgagttttcctgactttccttctccatcttttcggtttccgagttcaccttttcttcttgtataaacttttagatctattgacatctataataaattttcgaagatcacaatctaaaaatgatatttaccaatttgtatataatgatgataaaaggaaggaaatataggggaaatgagtaaaggagaagaaggagaaagcagttaccaaaaattaaattactgccggcacatatctgcagagaaggaaagaatgaacagtgatcagccttgtgacagctttggcaggagtgttgtctgtgagtttctggcagcaagtgaatccccaaaagcttttcattagtcttcaatatacgcatcacataactttcttttcggtttttcttttctaggaactcaagtccactgggctcaaaagcctgttggattactatatacagtagtccgatttatctcgtagctgcatctgaaaacctcttgagcgcaaagaaactaaatagcaaaagccaagggaaggcatgtactgcactagatacatcacaagcagtactggctgataaatagcaaaaagaagatcgtatatcagcatctaaactgagtgaaacatatgcgattttgacaaacaagtacctgatatgaaatccaagcttccttcaagctatgagacgcggcgattatagtcagttctgcatatcattcagatgacacacgcttctgtgtagcaaaagaaaagatctttgagtggaaataaaaagagaaagaagccggagatagaagatcctaatgttgaaaaggaagaggattctatgtgtctacaagactgattagttgcttaaaggaaaggtacaagtacaaaaaactgacaacttaaacaacaaaatcacaatcagttaaccaacctcatgagacttcttgtcttccgaagttgatgttcctgtaccattcaacgtttctattggaccaggaataacgacggtcactttgattccctcctgacagaactgaaaccataggcagattgtgaaccaactgtgaattgttactttatggtgctattctcagcaattagtgaaaaggaatgtaaaagaaaaaatcaaatcagaaaactctgaggtagctgtgagttttctattgtgactttcaataagtcattagctgccaaataattagcaagcaccacagtttctttaacttttaacatacctcagaacgcaagctgtggaagtagccgtgcagagcatgttttgaagcagaatatatagcctgtccaggtgatggtacctttcctgcagcactgcttatctatagactgacgtgaattattaatcatgacatttaacccaaggaaatggaaaattaacacatacaagaatagctaaccgtagtttgacttctcaagatgtgtatacggtaacatgatttggaatttagcaagcagaagacaaaaatacaaaagaaaccttaaactatctatacatagcttaaaagccttagatttaacatataaaaaacgcaatgtatatccatatccataaactatgatatgaagctcaatccttcaacaaatccacaaaattagggcacttaacaaaaactatccctcgttagtctccacgtaccacaacaaaatgaccgcctccttgttttagcatatgaggagtgaccaactttgtaagagttatcgtcccaaagacattgatatcgaatgtagtctgcacacaaagtcattgaataatcatatgtcaccaagcaaaccattgtatggcctacggattttatgcaattaatttagtacattgatagtttcctcacttgcatccgatgccttggatttctgcaagaaaaaaaatatgatgatgaaacgacataaaactaaggtacagagcatttaaggcaaaaccaacacaaatctcaaccgttcaaggctaagacaaacctaatgaagaaacctgacaaaagcgtagccagctaatagatttgtatgaggatgttttgatggagaaggaacttataaggatgcagagctaatgcaataaactatttcaagatcaatgacgattctgatcacaatgctgagaaaaaactagagagtcagttttaacaagcattttgcagaagaagggaacttacaagaatgttgagcttgccactgaatcaacttatccctctgatctctaaccgaaccagacaccactaaaccactggatttgcaatcatttaagcatgcttttagctcttcctgtcttgtagtgtaggaggctgcaggaaggcaaagaaaagcaaccagtgacgcgatttcctccggtgctggtaatcttaactatgttaacatataacagatcttgcctaatagatggaaaacttacatgagatcaacaagcatcactatatggttcaacaaaaaaccgtaagccttcacattacatgtatggaatagacagatagctgatcattcgaggcaaaaccaccaaaagtctaaaccattcaatcctaagaccaaacatatatagaaacctgataaaagtgtggcagaatggttcgaagattgttctatcggataagaaacttgcaaggatacgagctaatgtgatatgtagaatttcaagattggtgaagattccaatgtgtagaaaattcaataaaaaaaagcatagtcaatctacgaatgtctttagcaggagaagggaacttacaaggatgttgagcttgcccggtgaaagcagaagaaacttcctgagtcggcttattcctctgatcccctaaccatttatgtgcaactccatagtcaaacacagacaaaatcttccaagtgatcctcatcaaccatttgctttcagattttgattttggtgacaggaatcgatttgagaaataaccccaaaacctgaaatagaatcaattgtatctaaaatgggattgagagacgtcaaaattgttttgtatagaatgaattgtacctaaaaacaacaactttcatcagattgagagaagaagacgaaaaactaatatggaactagcaacatgtatactatttcactttttttagagtttttcaaccaatcagaaggctgtatttcacccccactctcacaaagtgagcgttgagcgcgtgagagcacttctgtgggtgtaccccccttggaaatcatgccttttttaatctacgcactcctctctgaaatccccatcgcgtgcaattgtttttgatttcttctcttaaccagtgtaaaccgaaaccaaaatcaattctaatttaaacctaaccgaaaaatcaatttcaatttcatataagaactccactatcaaattaacaaatcatataaacgtaagtctttaagtataatatttttattaaatcgcggtacaagcctagtcagaatatactgttttattttttccaaaacataaattatactataatttcattttgtcttaacagatatttaatttcattctatgtgctatactctaatacttaacaactaatcggagcactaagaatatactaataaaaatcgcttagaaaggcaaaacaaattactatcatcagatttcttccccaatcttcttcttcatatccttgaaggagagagtatagagaatccgatccaaaaaccctaaaccccatttcccgcggattttctcccaagctgatacggagatcaaatgggagatccgttggagaggttgggttctcaggcatcaatggctactgagtctgtcatgaaggaggacttgtgtttagagatcgatcctcccttaactgaatccgttgccaccgctgaagattggcgacgagctcacagataggttgatgccgccgtcgttgtactccgcaccacggcctgtagcgccctatagtacgcgtccgccggagctaaatatgttaccagtatatgctattcaattaaataatgtgtcattcattaatcatgtgtgtagtttccaataca

SEQ ID NO: 1936 - DNA, 303 bp, Arabidopsis thaliana landsberg
aagcataaataaaaatcctaatcagtcctaatattccaagcatgcacaagatatctatttttgctagatgttttcactatgttatatcttaagtttagtaagtgacaaatattttaaaacaaatcaagaatattggttgacattgataacatccaaataaaatgaaaactgtaaagagagaactgatttacctagttaggaaatcaaatcctaaaaaacttaattggacaataagattgaaatcttgtttacaaaagtatatccaactaacattgaaatcttgtttacaaaagatttatgtaa

SEQ ID NO: 1937 - DNA, 1022 bp, Arabidopsis thaliana landsberg
  unsure (1)..(1022): unsure at all n locations
ttcttagaaaatacttcaggtgcaatgtatcctgctgtccctctcgcatctagcattgaaggtatgctttcttccttattcttgcatagtttagcaagaccaaaatctgaaattttagggcaaagacgatcgtccatcaatatgttctgtggctttatgtcgaaatgcacaatcctcgtgacacaacggttgtgcaaatactctaggccgcgggagatgcctagcgcaagatcatataatctttcccaatccatcttggttgacatattctcagatatatatttgtcgagcgatccattcggcatgaactcgtagattatagctctcttgttcttttcataacagaatccaagcagagaaacaatattgacatgagatgttctactcatgctagctacttcattgatgaactcttctccattcccctctgacttcttcaagatcttcaccgcaacatcccgaccactatcgggtaactttcctttgtagacagttccaaatcctcctttcccgagaacatgctcaaatgagtttgtcatcttcttgactcttttataactatatcttttcaacattgcaactgcttcaacgttctggtcattccaaccactctttgttttcactattatcacgaccacaataatgatcatcaaagttaaggcagcagagactcctgtaaataaacagaattaaaatctaggtgttttttttttatataaagagtagtatccgatggcttgaccgatatatatagagtaccaagtgtgagttttaatttccatgatgatttttctgcaaaaaaaaaaatcaaacaggaattattgttaaggtaaaaaagcataagatatagtggtatgaaaatgtaaataaaaaacttacgttttggtcctccattaatttccttggaaggtttagactccgagggaggttcaagagttccatttttcgtttgcgctggaaatggagattcagcagctgagcttctgttggtgctatccaacagaaaagcaatgntttaaaaa

SEQ ID NO: 1938 - DNA, 1669 bp, Arabidopsis thaliana landsberg
aaatcaacccaaccgcagttaaaacacatgaccataacacaatgcttaaagcatagaacacactttaaagcttagaacacaactgaaccacataaattatatacaggactttaaccaagaacatatactcaaaagcatatactaaggacaacatgtcagtaatgaacttgtgcttaagagccaactcgtagaaagactcattttttgttaggacactctctagtaatctgtccttacttagcttcttttttttgaaacagaagcttctctttaccattaagtagcttatccttaatcccccaaatatattgcatctccgtcatagtgttgtttgcatcaccttccatagtaggctacgctttggctttacctttggctttggctttggctgccttacaccaatgggactagtttgatccccttcaaggtcaattgtcacatgatctcctgcagattcattttgttttcctcgcttggtaggtacatttaaatcattgcaagaacacaacttttgatcaaacctaacctccctccaagcatgctcaagactgaacttagtcttgtaatcagtgtagaaaatttggtgagccaagttcaccacataattatcattctgcccactagttttctctttggttgaagccacatagcttcctacgaacttgcaacaaccctcatttatcttagaccatctctgtatacaacattttggtgatctcttttccatcccttgtagctagggacttgtagcaaagtaggcagcgatgcggtgctagaatgatgttactttttgctcattggatacaacaaaatctatggaggtgttgagccacgcactgatgaggaccacatcttcagttggtccccatttgcatcttgatttcttgtttgcaattggctgttccactttgcttggatcatcagtccattgaacttctgatgatccatcatctatgcttggtgaaaaacaagcatattgatttggtggaagcacttggttctctttttgagaggttaaaaagtttaaaaaacttcgttgatgggaatatgagtttgaggaatccataacaatattttggctaaaggttaaaaggacttgaaacgcttcaagtaattttgatgtgttttaaaaagcttcaagtaattttaaaggaatgggttgcggtttttaaatgcttcaagttgtggttatatgttaagtcaaagcattgatcacatagagcaatgaatgactagcattagactttaacctattgataaaccaataaaacatctactactaataaaagaaacttcttgaagacctctcaaggtgtccacaacagctatttttccaacactctcttcatacgccatgtcagcatcggcaaaaaaataatttcttaaataaaaacttttacccataatagtaagaagaccaactatatgaagcccacatactcaatacgtaacataaaagcgtaataattttgtagtcccctaatatcaatgggtcaatctataacctaaaatcagttcacaaaaaaaaaaaactagaggcatccttcctcctcaccgtctctatcctctcatgctaaatcgattcagttttctccaaaaaataaaaactccacctttatcaaatcgcaacttcgccatctcactcatggatctattaatctatttatat

SEQ ID NO: 1939 - DNA, 1877 bp, Arabidopsis thaliana landsberg
gtaaccgaaacataagaagccgtgcatagcacgggccaaaatactagtgtagaccaataattgactgacataaaagaatttaaaggaacaaatgagaagtaataaaattatgttagtaagtaaaatgacatgatttaacatctatttggaaggatcagtggataagttcgttggatacaagctcactcatgagaaacaccaaagccgaaacccatggccaaaaactagccgaacaacagaactgaactttgggacgagcaaattttcaccatttctcaggtcgattttaccacctgaaatgctactgttaagttttttacttttctatatttttctcttggctcgaattagaaactgaaactggaaacatctctatttcaatttttttttttaaaaagggacaagtgaggattctttttcatttgctttaactctaccaaaagggagatagaaaaaaaaaagactaatcaatggtgaaaaactgattcgagttctaacatctgacggtggaaaattggctctttgaacataatcgtcaaagactgctcaaatgatacttaagacaaatagagtgaatctatgaactctgccttgtaatgcacatccaacttcttaaagattcctccttgtcttgactcgtgattggaacgtgccatgatcctttctccgattcctgagtaataccggaaacaaaaataagatacagactcgggcaacaaaacaaaaaaacagaagcacagatttgatataagatttgtgaaaaacctggatcacaactgaaaaaggaggtggcatttcaagcttgagacagcctttcacaaaggtaaaccgaacttgatgtctttctttccatttttggaagaaactgttacttaatagttcaaaaatgtgatctctcatctcatcattagtcacaagtaaacacttgagtttagcagcagcgtagagccaatacctgaaaccaaaaatttaaaaaaaccaagatttgagtataaccaaaccaaaccatgtttgtgggagtataaaataagcttaagtcagagtcagtccataccaatcatcattggaacctggtggagtcgcatacaggacattgttattaatccattcttccacaagattccggtgattcgggttttctaaaagcgcattgacccgtttcttgtgcaagagaattagcggctgttttttgctaccacttttattgtaaagttccttcactacagcttcaagctgctctttttcacaatgtttcactgtgtcagtatttgcaggaatatgtattcagaaatgcaaaggaagaaaaatctatgagaacctgtggtagactgaaaccaccatctgcaaaattttgttggtagagcccaatatttgctccatctagtatagcttcgtaatctccatgcttttcaagccactcctgtcaaatagttaagaaaaccgtttttcaagcatcaaacttaatagaactccaccatgaacaataaaaaatacctacattgcatccaagacaatcttaaaaacagaaactacattatagcattttcttttctttcttgatagtgtctgttatatagctaatgatttcacattcagaactatacagaacgcagagaatggttaccgattgatggtcacatttgctaaaaccgattaataatctatgcagagtttaaacgaccaatgcaaaacaaatacagctattgaagtctcctttgcccaaagaactaagcataacaatattagacgcaaaatataaaaaaggcattattctttctaacctgaaactcactgaaatccgccataggctcgcatgaattcatctttgccttcctctccatagccaaagtcaccaaagaattcacaaaatcttcagc

SEQ ID NO: 1940 - DNA, 2081 bp, Arabidopsis thaliana landsberg
catctgtcaagacagctgaacttgatgcagctcttggaggccgagctgtccaatatcgtgaaattcaaggtcatgaatctgacaaattcttgtcttacttcaagccttgcattataccactagagggtggtgttgcgtctggatttaaaaaaccggaggaggaggagtttgaaacccggctgtatacctgcaaaggaaaacgtgctgtccacttgaagcaggttttctttgctgcagatttttagaagtgttacactctcttcgcatgagtgtttaatatgtatatacttatctcttttcttttgtaggttccttttgcacgctcatctctgaatcatgatgatgtgtttatcttggacaccaaggaaaagatttatcagtttaatggtgcaaattcaaatatccaagagagagctaaagcgttggtagtcattcaatatttgaaagacaagtttcatgaaggaacttctgacgttgctattgttggtaagttgtattagacgcattacaactaatatttgaatatcttctttttcacgttttgatcagtcaatcaagcagcagttggatgctcaatcaatttattgcggtactcatgcatgtataataatttccttgcataacagatgacggaaaattagatacagaatcagattctggtgcattttgggtcctctttggtggtttttctccaatcggaaggaaagttgccaatgatgatgacattgtcccgaagttaactccacgtaagctttattggtactcttcttcctaggaaggctaattttgatgctcgtgatggttgggaagcacggtaatgtgattcttttggtttcatgactcaatggttgtttcttttggttagatttgtgcttttggttttgaaatttggttgtgttgtgtggataggcatatgctgatgctaagtgttatggtaacatggatgttttcaacattttgatttaagctctgttgttttcatatctcaatgtttttatagttacattttcttcttggttttagaaaaccaaaaggacaccgatggttgtggcgaatcctcgtgaagttcctgaatacgagttaaatccacaagaacttcaagttcggaaagctgatggtatctcaaaggcatgatctctttgctttaccttcccgtaatagtgtcttagttttccatttggcacttctttaacaaattactacatcacttgccagggaatatatcaagtggctaaatggaatgggactaaggcatctgtaaagatacttgataaggatctctacaaggatcctgacactatgtaagatgactcttctcttcaatgagtatctgtctatgttagctaacaagtcaagaaggagtttgaatttcttcttgagtgaagctatagatcgttgaaatcatctttgttatggtcatagtgatgatgatatgagatgtaacattattaatcatagttcttatataatcttctatgttggaactgtgcttttttggtaatatcttctggaattctcatttcatctgtgttaatccatgtttagttttcatagattatcttagttctgcaatcttagcatctgaattttattatttacccacagaaatgccttcaaacacgaacttacactattcgagaaggtgcgtcatcctaatgctgtacaattttttggagctgttactcaaaatgtccccatgatgaatgtgtctgagtatcatcctaaagtaaccttctccctctttaacacattaatttttttccctcattaagcaatttttggatgctaggaactaattttgtctactcgatggtaacttgcatgaaagacctaaggatttaggatttgtgaagcattgaagtgtggcttgcttcaacagttgctttgtagtggcattgtatgaataagtatttatgttttgcaggctttattcaaagcaagattcgaacaagcgcttgaatcccagaagctgaacataaagaaaacagaacagcagctacggagaatgggtgttaaccctgaagatccggttgcaatggctagcatccacagagtggcctcaacatttttcaatgcaatcg

SEQ ID NO: 1941 - DNA, 562 bp, Arabidopsis thaliana landsberg
actcttcctactctactgcaggaagtagacatatgttcaatatttcctggcttgctggcggtcaccccattctgaaggcagcggggctcatgtctgaagcaaataggacatttggcatcttagtagatttcatacagtcagctaatcgtttaccgggtgcattgacgatatctgttattagttggtatgtttctgaatccatcccactatgcttgtgtaggtacttttctttatattcatcatgatattaattgtgcttttgcctgttacagtttttgctattctacttttttagttgaaactatgttagttcttttggtcctcagtatgctgatttattcttgcaagttagttgatatgggtgctttggcgctcataaattttagtctcttatcgttaccttcataacgtgaaaaactcattctcacatgtatgttggtgagaaatgagccatacataatgtgtctgtgtcctgaatgatagggtgatattaaaagtcttcttttgcataagttttatgtgtgcctcacttttgtgagatacaacaataagcagttgatct

SEQ ID NO: 1942 - DNA, 571 bp, Arabidopsis thaliana landsberg
cacccgtgctgcgcggtgcactgtactcatcccttatgcgagaacttccccctgcacgccgagactatgcagatctcgggtgtcagggcgcaagaagattgccccagcggaagatattagtagttacatccgttatgttcctgtgcccgcatgtcggggctcagtactcttgtacatgtccccctttagctataaaaggggaggcatgcaacattacaaggcagacccaactcaagctcaagcttgatcgagaggcttagactctcaggtttccacagcaatccaacacacagtggagtagggtgttacgctccggtggcccgaaccactctaaaccctcgcgtgtccacaacaatcctcatcttaggatttagggcgggtgcactccgccacccggccgaagaattccctctccgacatttggcatgccaggtaggggactaggcattaggtttttgctggatttctcgctcagcatgatggtgcaaatcgttgagcaccggccgagacttcacggattcctagtggaggagaagttgtttctccagcacaggttccaatcgccagtccg

SEQ ID NO: 1943 - DNA, 559 bp, Arabidopsis thaliana landsberg
  unsure (1)..(559): unsure at all n locations
agctattaactggataaatctcctttctccagctgatttaatgtccaaattcatcatcttaactgcccaaactactttatgctctaattccactgggagatgacaagctttaccatagagaagaaaaggtgtggttccaagtggagttttgaaagttgttttgtaagcccataatgcatcatctaactggaaagaccaatcctttttcgactttcccactgtcttctcaagaatctctttgatctgcctattagagggtgatagggcgtagccacacgatacttaactccatactgataaagcaattttgcaaggattttattgacaaaatgcttacctccatcactaatgactatatgtggtactacaaaacgagggaagatgatagtcattaataatctcatgacaactacagaatcatttttcggactagttagtctctacccatttggagatataatcaacagttaaagtaaaacctctataaactaataatgttgggactaagaaattnttttaatttagagaggtattaattattgataaatttataattatt

SEQ ID NO: 1944 - DNA, 515 bp, Arabidopsis thaliana landsberg
agagttcattggttcagcactttgttgttacaggtcttgcaagcacggtaccacatcgatcttttctgtcttgatgaagcttatgtaagctctagtgctgaagaatacaggctgcaatatatatacgagactcataaatcaacttttcttttttccgcatcttaatatgttaaaagtgttttgaagtaccttctcctctcctaaagagggattgcttgtgatgtgagaaagaaaaactctgtcagaatacatggatcttgatccgttgttggcagaagaactcattccataaccaatagcagacatagatgtctttttcccttcagcatcataccaagatttcaactttgtagcttctggagaattaggggttatcaccacattgcttttgctgatagtagacaatgaaacacctaaaaatccaggttcgcatcagcgccccgtttaacataatgcttatatggcattaacactaaaatgaaaagtgttgatttaccttgaaaagctccaacttt

SEQ ID NO: 1945 - DNA, 635 bp, Arabidopsis thaliana landsberg
  unsure (1)..(635): unsure at all n locations
tcgggcgaggggctccaatccttcccactgttgtagtgtcccccgcgcctggggtggtagcctcggtgcaccttttcgtcgtggcggtggtgctcgttgccgaggcggcctggggccgnnacgtcacgtcccgcgtgcgcccggtgtggatcgaggcttcccgcatgaatcgggaagtcacgacgcgatgctttggggggtaccttgccttcgggaggcagagctctcggcccgttgcaccgtggcattctccaggagattcttgagttctccctggatacgctgccccttagtggtggatggctccggcatctctcggagtagtattgccgctgcagccaggttctggccgaccccactggaagccggggcagccttgcctagcatcgtcagtgatacggcgctggtgcttggcctgcccactcctgctcgatgttttgccggagcnnnnnnnnnnnnnnnnnnnnnnnnnnnagcttggcctgcatctcacggatttgctcgagctgtgtgtcctgacccccgcaagacntgggaccatagctagctcccacaggatgtcaacgcgaggcgcaggccaagggggatcatcgtcctccggcataccaaggtggttgcttcgttgtgacccctag

SEQ ID NO: 1946 - DNA, 558 bp, Arabidopsis thaliana landsberg
  unsure (1)..(558): unsure at all n locations
tgatttcttggtccaactcctcctcctggagtgttggactaatggccttcctttttctggcttcgggcctctcggagagagagggtctcctaatttgggtccagtggttgtagtgcggcacccctggcgttgaagctttctttggcggcatgacgaaggtcagtgcttgccgaacgtggtnnnnnnnnnnnnnnnnnnnnnnnnnnnnnnnnnnnnnnnacttgttctcaaatactatgaattaagaacaaggcaacacgagatgttaaatgttaatgcccttcgtcctttaaaacattatttcccttaggatataatgattttcagaagaagaaacatatgacatataggaaacaacatatacaatcatatgacattattaattcattctaattatataatcatagaaagacaggaacaatattgaattacaaaagtaccttcggcttgatagaaggcaaaaaagtacaagcatgacgcaaaaacaagtaccagtcagcgtgaacagtacgagggtacctgtcatctatttataggcgcaggactcagtctgtgaga

SEQ ID NO: 1947 - DNA, 663 bp, Arabidopsis thaliana landsberg
  unsure (1)..(663): unsure at all n locations
agttcagattgagtgactgcccacacagtctcgagtggttgtacttatcatgagtacatgtagtgaaatatgacaaaccggtccttatacgaggggacaatccttctgctcacgcctaaaccagctgagccatcaccttaggccctcccctaaaccagggagtccctgatcatccctactcaaaggtgataagggtgaaaacccttcatcatacacattttgaaaagcattttattttgaaaactcacaccttttctcaaatcatttgtaacaaatatatcaagaattgattgcggcaagcggctgggtggccataataacttgtctcaaaatcatatcatgcataaaataacaggctgagggttgtggttgtaaaacataggtaatttatgcatcaaagggatccagtgagcttgccgtgcttatccggcgaagggggaaggagagctcgcggaactggcttctggctccaccgcctggcgtaggcttgcagatctggcctccacaagacgacacgaacgctccgataacaggagggtggactggaggcgacagacactatgtgtgtagctggcagacggagtaactgagtgggtggggtgttttcttggctgagggtngtgagtgtgtgtggagagggagagggtagctgggtgtatttat

SEQ ID NO: 1948 - DNA, 911 bp, Arabidopsis thaliana landsberg
cagaattattatcattaaacatcagtaatggtacagagaacttatccgaaatccatatctaaatcaaagagaagaagagaccaaaccctaaaacaaactgtaatctaacccatgacaccctaaatcccaacacaatcaatcaaaaactatggatcaaacagataaaatcttacatagagatgacatataagatttcttaccggcggtttctcggtttcaaagtggatttctcatattcacggtagatatctcggattcacagagtatctagagaaacaagtgaaaagggaagaagaagaagaagaagatgaaagggtatcgactgaaatgagatagagaagaagaagaggatccaaagaaaaaacgaaacaaaattgagatttttcaagtcggattctccaatcgccgaaagagagaaaaagagtaagacgaaggcatgaaatcgatggaagcataaagtttaaagttaaaagattaatccttttaaacccaaatcgaccaacacagaagatacaagaaatagttcattagaagtgaatttgaattccttaaatagggacaaagaagaagatgataaagcaaaaataaaagtgaacaaagaataatttggagattagcgcaaaaaaatttaaagtcaacgatgagtttcattaagatccaagtaatacaatcatcctgtcttgccttctcgttcttcccctctccttcgctccaatcccattgtcgccgagttctgtctctgttcgtattccttatctccaatattggaaactcgaatgtcgacaaaattttcaacgaccaagctcatctttgttcttcgtctattattcaaagtgagaattaccattctcttcttatattcttcacatcttaattcatccagtcttgtgttgttgtgtttgaactttgga

SEQ ID NO: 1949 - DNA, 469 bp, Arabidopsis thaliana landsberg
  unsure (1)..(469): unsure at all n locations
gtcgactctctgaacagtcatttcgattgttattnnnnnnnnnnnnnnnnnnnnnnnnnnnnnnnnnnnnnnnnnnnnnnnnnnnnnnnnnnnnnnnnnnnngggccgatgaagtggtcgcctactatgattcccaactggtggttaacctgttcaatggtgattatgaagcaaaagactcacgaatggaggcatatcttgaggtggtcaaagacttgcagccctggcatcaatatacgatcccgaagtcaaaagaatcattccagtagtgtgtatttcggaaaggagcattaaggacgaaaaggagacatacgtcgtcacaagatcccgagctgcagcccgagatcgcaactgtacctaaccctactgtgtaggaagatattgggctcgaaccagtagaagaaatacccccgacaccatagtcgaagctgaaaccgaaccgtgggttgaagaagatatactagcgcca

SEQ ID NO: 1950 - DNA, 3379 bp, Arabidopsis thaliana landsberg
aattactctcatgacagcaacatcgatgccatacacatcaaaattttcaaaactacaaaaaaaaagctagtgctcaatatttacctgagtggatgactttctgccaaattcatgtattccattaactgtgctggttgtgttacttgcactctagcaccagacaacaacacaaatattaatatatgcatcatagtgacatagatattatctaaaggggacttaccatagtaggatgatcttctgcctactccctgtacaggttcatcaacaaagtctatgtctcttctatggcaaggccatgctatctttgttttaaatgcatcagacatcacaaacttttcggtacttggtctccacaaacaagcattcacacccaaaggtatgttatcgatcaactcatctttgttggttgaacagataacaccctcggctataacttcatccaatgtccaatctaaaactctgcaactaccaagttgatcatcatctacaccagtatcctatagtagagtagtatttattagtaatcgtctgatggaacaagtgaacatattgatatatccctatttttactgtttttaactacgttttaggtatagattttagagtctaattgttttttctagagtcttttctagtccttttcaagtttttacatgtttgggattcatttggatataatagagcattctggagcaaaacagacaacttaagctgcaaaagcaatccggagacgaaaaagcacgtaggtgtcgaacgacaccacccctggtgttgagcgacaccaatacctgacggtaattttgagacgcaacttattgatgttttgaagatttccaaatatggcccagaaatttctcctatgtttaatgaaggcccaacacgtttttaagacatatatatagtttttaggtcattgttaagaccctaagctttgggaggctattccctttatctattctgttcttgggagcaaaaccctgtggagactccctttagagaatatttttcttaactctactctcctcttgttttatgcattgatttcttattcaatcatgttttgttcttctatgatcatgtttgagtaatcttcttgttaggtttacggtttctcattagggttatagatgatttagtagattgcccccttgcttggttatctgtaggattcttcatcttgattattcttaatgctagttctagagtagctaattagaacttgatattagataataggtctatgcctaccataggtacttgttatttgaactatcatagatgagcctaggcatttaagaaagaacatgtaggctcatagaagggctctagtttagatactaggtgaactaatcaaacttgataataatgcatgctttagtctaggatttctcggcttctccggttatcttagctctaagtatagagagtttcgcggaatgccaccgcttactctaaaatcatagtttgagtttgagaacggttcgataacaattcagttatttctagatctactatcatctatttcctgaaaattccctaaggctgacgcttttattatcttgatgtacaaccatccaatcgaatgctattgcttacttttgtttcccttcatttcatttagtgatttacttagcataattcgatttgccattagtctattgcgtgatccgagaactttgtgaattcaacccctaagtgctgcaaccgacctctttatttgagagagtagtcttaggattaattttacctatatcattcatcgttatttggttgtaactagatgctactgtcttccaaattgttcgttcatgatctttctcatcgatggtcactttgattatgacgtcatccactacttgcccgcttgatattcctagaatcacttctttcttcacgagatttgttaattggataaccatccgatgagtcgttaaataacaagattttgaagattcttgatctcctcgtaaaattttcacaccattcgggattaaatatttaacgtattgacgatagattgatgggataaccttgatccgataaattcatggggctccaactatgtcagcctggctactttccattctctctaagcgtactcaagaatagtagatctatcaaacttccaacatcaatcacaatccttgaaaccccgacgtcagccacgtctaaggtgaggacaaaatcaacgtcatcaggttctgcaaggtgacgaatttcttcttccttgaacattgtgattgctctagcgagttcgagtttgtcgcttgtgctcgcctttaatagaacattcccttaaactttttgattgtagtggtcgaatctctacaaaacttagacccattcatgattacttcaatcttcttcttagaaccaaaagcaactccgggatttgatgttttaggtattttcttagctagtgatgaattttcgacttccgcctttttttcgtggtaagttttcacgaactctccgatgtcgaggttttgcgaggtcaccaattgtccgtagctcagcaagatgcctcttgaaatcggtacagtcttttgtagtataattatttactctatggatgttgttgtatgccttttcatcgcaaccatgttgttagagatggttgtctcgatcttctctttcccaagagatggtgtaatgcccctgaccttgactatatggccggacgtacagtctgtcgagtagaatgcgagatcaagccaaaaaaaggcaagatcagttcggccttttagtgtggcaagtcatgggtaaggagcattgaattggatcaagtccatgggtaaaggaatgacacaccatgagacggaccaagtttagctacgatgcgactatcggtaaaccccaaaaccattaggctagccctaagaactaggatagcttcaggaaaccttactttcggtctaggaaaccttagaaggtcgagtggaatccatttggacagtgagatatgtgtatgggtcgtgaatggtcacgggattgatcggagaatgcggataagtgacgatagccggcttactcggttaattctggcatggaacgtgttatagtcctaaggaagccttgatttgcgtcatggaccctcaggagacattggaacggagtgtgccgtattaatgttcttgcggtctggtgacagatcgtaggtttcgccggaatgaggaaatggacgaccaagattgaatcgtgcctcatgtttatcctttaaggctcaagcttatccatattctggtcatccttatccttttagggtcgtgcttatccatttttggatgatgtttatccgaaaaaatggaaggaaccaatcggaggccgattagtgtcttggagcggccgttggtctacatttttcacattttgattg

SEQ ID NO: 1951 - DNA, 803 bp, Arabidopsis thaliana landsberg
  unsure (1)..(803): unsure at all n locations
ataacaaagaagctacttattaatcaaaaagctgcatatgttagttccacaaaatatcaattttactaagagaagaatgagaaacattggaggttgaaaaagttattatggtatctagaggaaatttgagttgagcatagcacattccctccaaaagtgaaaggaaaaggcgtaaaatttttgggattgaggttattgtttgatggctaagaaaaatcgaagctttaaaattgggttaagtgaaagtgttttcattacttagagctatagcttcttttggttgatgatgacaatggagcagcttgtttactacttttataaaacataagacatacatttgttcattcttattttttggttttttccccagattatttgcttatttaagaaaatgttttaggagagtctcagaccaaggtgacgtttaaatttggcggattattcaaccactatacagactagacatctagtaagcggaatgttattcaagtaccgtgaacacacnaaaaaatttaaaaactcactatatattttgttaataaaattttacattgcattgaatagagacttttgacaccaatatcaccacttactaattactatactatgcttgaggccgagaaaggttcaacacgggggcgtgtctctttgcggcgtccaatcaagaggataaaaaaatgggggcaaacacagccttgaaaattataatgtgagggtcagatttgggaaccttggttttgtagtatcgttggacattttgaaggtttgagtggttttttagacacatccacttatgtattaaa

SEQ ID NO: 1952 - DNA, 3148 bp, Arabidopsis thaliana landsberg
  unsure (1)..(3148): unsure at all n locations
gaacgtagctacctggatcagaagcttctaatggttgatccggagtgatggtgcggatgtactcattaatgtccactctctacgccttctctttcctgaccttaggcagcatgattgcactgatgtcccttttcagcagtttagcttcatctaagctaataccattgtcaacaagtcgcttgacatacctgttgagtggaacaaaagatgtctcagaagcatccttagggagagaagggaggatcttttccatgataactgtgcacttagcagcatgaatctcttgcctagagcgacgcttcctcggataagggacatgagngagtgtaggcagactctggcttcatagggattctcacctcatatggtgcagtccgaacccagtgtcgatcgacaccctcctaaggaaccgtttaagaaaacagtgttccatacggttctagctcttgttcagtatcaacttcttcccacacctcatctccgtctctgatcatgatggcattacagctcttcctcaagttagcattagggtttccaggaagaaagccctcttgtctcttaatggattgtgtagtttgagctacatgtacatctagcttcttcatgtgagagctcagattgtcaatcttcctattaagatctgtgtagacagcatcgaacttgccattaaactcaacaacgagctttgtttggctctaaaaaatctgctcgagcatggatttcattatgctctctaatgaggggcggagggagcttggtaagctgaattaccataagtcctctagaagttgctctaaggaaatgtcttctggaaggctagctttggagtgtagtttgaggaactctggttccctgtaaaccttttgacactgaagttgtcgtgtggctgtccaaacttcatgtagccccgaccatctatgtagaagacgccctcctctgactcagtcttaggctaaatggtttcatcctcagttgcaaagtggacatgcttcttccctgtaagcaatatattaactgaatctaacttggcatgaacctctgccatttgattgcctgaaacagctccagcaatcttcttcctctgaaagtcaacattcttggtgttactgcaagctaggttctctattagggcggttgcatcagccggatattgtgtgatgaagttaccattgcttgctgcatctagagccatagcatcatcatagaaattgttcaacaatgctatcttgatgtttctccaagtcttgagggaacctgcttttacttgtttcagccaagaagtagcttcctgataagtgtgcattttacatgttttaagcatccatttgtcatcactttagcatcatatcaccactgttttataccatttctcatcatttgtcatcactttgcatgtttaggatagttttgcatgcatattgcatatttgtgttgttttcaggtgatttggagatgttggtgagataattggaagaagtggacatgatcaaaccaatatactcaacctgatcaaaccaatatacttgaccttgaggtcgagcaccgacatcctggacttcctgaagtactcggccacaaccaggcgtttcaccaacatccgtcactcgaccccctggtcgagtagctgccttcaccatatctcaataccactcaaccccctggtcgagtaggtgccctcaccatctcgatccaccactcgacatcatactcgactgccagcttaagagtcttctatattccgcactcaaccagacactcgagcataaggaagagaagaagactctagctaatcactcaaccaatcactcgaccgcctaggtcgagtactgttcttaatttgtcccaatactttgttattttcagtattagggtttcagaacatttcactataagtagcttgtactttatattttcgagactaagtttttttccgcagacacttttagttcttgacattttgtaatccgaatttctcttaatctatgtagtaattgcttttcatttggttaacgaagttgttcatcctgctatcatgttgttattactctattgctatgatgttttcattcatgtcttcgtttatgtttctgcaataaagtctaagtagtgaataggttgctaaggatgggttagagtagttaggaatccttggtttgctaggtggttgactttgatttatagatctgttatggattagttgttcttaatgcctattgctttctgatcaactagaatttgaacccagacttttccacgcccaaaaggtgtttgatgaaatgtctgaaccactaattccagagattcgtggccctgtacaaaggtattggttgcagggagcgttttggctttaacttgttgattcgtaatgcctgttaggttagctctcgtcaatggtgattgagtctgggactaggttaacttgagggtctctgttgcggtggcacttagatttggttaatgaacttgttgtcgagggttaatttattgaacatgtagttcacctgtaaactgaggaaacgaaactactcaattaccccatcctcgggaattctttatctgattgaattctttgtttactatactggtgtttactgcatcttgtcatctactgcttagtttctgcaattcttttttttgttactcgaccacccagttgtctggcaacagactatgcagacgggtatccctgttacattttttgtttgttactcgacctgtcactcgaccacacccagtgctctgcaacgagctgtgttggtcgagtgttttattgtttctgcttgattttctgttttctgcatgttcacttaggattgctagaacacaccaaaacctgttattgcttggcttgagttagtgacttctgatcacatcttgattgttagcatcacacccatttggattgacaacctttagtactacaacgacatgataatggtttaggattaattgatcttaaaaacctattatcaatttggcgccgttgccaattgggtgtttgtttgttacatttgagattttagacttgcttagataaagttctttttcaattttcaattcggttgctaactgtgagtttttctttttgtcttcctgatccaggtacacctctgctgtatgcaaactgctttccttcgacaaatcggcc

SEQ ID NO: 1953 - DNA, 9432 bp, Arabidopsis thaliana landsberg
  unsure (1)..(9432): unsure at all n locations
gaaatgaaatgcaatctacatgacactctgtctttgtgaaataattttctgaaacttttcaaattttttatggttttttctatgccttagatgatgcaaaatttgaaataagaaaagagaacacaatgttaaacatgtcttgaaccctcccccaaacttaaattacacagtcccttgtgtaataaaaatctgagaaagaattcaagaccaaaacacaaaacatacaaagaaaaataaaaagatgatgttatatacaatggtcaaggtggtgttacctcagttgtcaggtgaagtaggcggagaaaaagtcatccatgctctcctttgtatagctccagggagtgggttgtgctggacttgaattaggtggatgctctatcctttgctcgggttgttgatcgagtggctcttcaagtggtgcggtagagtggcttgccccagcatccgatttccttgtccttctagcttctttaacttactcctcttctccttctccctaagttcaaaagatgattgcctcagtggtgaaggtgcaacatggtgttctcttggctcatatgaagactgtcttggtggcaaaggcggatcatattgcataggttcatgtcgagtggatccacttctcctaaaaggcatgtccagtggcatcaccgtactagaagaagaacagcggaacttgagttggagagcgttaaacttcatgttgagtgctgctagagccttatcttgaagtttacaccagctttggagaaaaccaagacgcttgcgaatttccttcgagtctttactttgccttggcgcggagtactcttcaaagtaaaactgttgtgttgcgtacgactcgcccatgggttctgcctcatcatctgaatgatggattggagcctcatcatcgttcactccttccatcggcatagcttcatcactctgcagtatagaggttctccactggcgcgcaaaactcaatgttgccaccatctctgatcaaagtggaagcgggatttggaaggagaaaaatagattgtcttgctgcggggtgatcgaacctatatttaaagaggccattcttctgttgcgaccaaaaacaattggaattgataaggtgttgcatatcaatccagctcggaggaatcgttcgaatgcagaggtacaatgcatgctctcaaaattggggtcacaactcctgccacaaccattcttcatggtttcttaagtcccttagcccatcctctataacacagcagatgttcgattatgtataatgagactgaagcgtctgcctgatctccagctagaactgtaccatctgatgctaaatcatatagctcctacaatgctgtctccattaattctagctctccattgtcaaaggtcccattcctctctcttgcaaatagtgcactagctaaagacctatgaaagtacctaaccaccggactccttattcgttgctcttggtcctagaggatgaaaacccatgtttagacccaagcatggccaagaatgactgaagctctctcttgtcaaaacgatgactcgtgtctttttcgcttgggaacccatacataagctctaaatgatcgattggaagccgatactctacgtcatagacacagaactccaagtatcccaaacttccgtctggcctgattccatcgtcctctgactctccatatatgaacaattctacagatgaaagaaaattgaccgtctcttcctcatacccctccattggccgaaacatatgaatattcaggctgcactgcttaaacatgtactctacatcatcatagatgcggagtctctccatggtctcgggatgagggtatcaagttcctaaaaactcattgcacttcagcagcttgtagtacttgtttcgagttgcacacttttctgattccaaatcatcatcgcctcctttctctgtttggtcatcttcctctggtgaagccatttcttcctcgaagtcttcatctaccagctccaacctcctccccacgggcttctttcctcgagtgatatctgccttgttcctcgagaattcccttgtagaggacttactcgaccttcgggatcgagtatttccagatggagagctgaaggtctcttcttcttgcatcacttcctcctcttggctcgattcactatgatcgatcttgaaacttgcttgctctctcctgctcaaccccaagggtgtcaatccagtccactgtattgctagcactcaagatgtgaacaaaaacaactaagtcaagccagattataatgatggtgggtttctagtaacaatcctaggtcaggattcaaacaagtaaagatgagaacttaacagccctactcgatcattgggtcgagtagaaccaacaggtgacaaaattaagaactaaaatgcaatcaaaaggggatgcaaatagaggatacaaataacaggtaaataaaagtgcaatccaaaaggggatacaaataaatctaatagaagttttaatgatggattcattgataagggcaactctagggttcatctgatggctaataggctaaaggtagatacccatgacgatagattcaaaaacctggtcaatccactctcgtgacagagacccccataactccaccacttcctaatctcaactctcgttgatgaaacatagcagagcagggtttaagaaccctaatcactactcatgtaacattctcaagaacacaaacccaaaaattactaaaattataccaaaatgtagatctaaacaggctaaacaacattacttaaacaatctgatatgtctataatttgcatgttttacacatccttttatcaccattttgagtctagtttcatccgtctttcatagcattcaccataatttttgtacattttgcatctttagtcgagtctaggactagtcttgcatacattctgcatttaggaattgttttggagctattggtgctcacaaagagggaaaacataacagaaagtcacacttccaccaaacatactcgatcactagtagcagagagggaagctgttagctcagcagtccatccagacccttctactcgaccgcagaggagaggaggcagtccattctcaattctactctatcgtagaggcgaccaggcagtccactttgccagtccaccagttatactcgatcgcagaggagaagaaccagtccatcctgacagctgacacacttactcgatcacagaggccaagaagcagcccaaaccattctgtcaaccaacctactcgaccaccacctcgaccctctgatcaatccgcactcaaccagacaacctgagcatcgaaaagagaagagaagagaaagcccattcgaagcccatcaggaaacccactttgagccgacactcttgatcacgccgtccatgggccattaagtgggctcgaagcccgctttcttatcttagtataaataagtctctaagggtttcgccctgagacatgcacttttagagacacgaatttcgcactattattcagcaaccgcttttcattcctgcaacttcgtatttcgatttttcttctaagttattcagattttgctttcatttgcttgttcatctttgtttcataccctttaatcttttaagtatgcaatcttcaatcatttctatgttattgtctttaagcatgttgtctgagtagtaattaggatttctgaggatgggatagagtagttgtggaacccctggtcgaatctgttggttaagtgtagatttattgaatcccttctggattagttgtgtttattgcttattcctttctgatcaactggaatccgatcccagacgttccagcgctcaaaaggcgtttaatggaacgttggatctactaattccattgataatcgtctttatcccaagggattggccgtttagaacggttattggttttaacagtcggttcttattgcctgcttagttagagatcgctaatgggaattaggtcagtgtctagctatgcttgaggatttctatcacgcgaatggattaatctgttgttgaacctgttattgaacctgttgtctagggatagcttaattgagatttgttaatctactgaattgattagggagaccacactattcgattaccccatccttaggagtttctcatctaattgatttctctgtttacttaccttcttcattcagttgctattgaattttagtattttcctgttttcaaccattctactcgatcacaccctgctattaacaatgagactgtgtgatagagtaaactggtccatttatgcactttcactcgaataggtgtgaggaaaccaatctgatactgaactgggagaaatgccacttcatggtcagagaaggaattgtcttggggcacagaatctcaaagaagggggtacaagttaataaggctaaggtcgatgttatgatgcaattacagccaccaaagactgggaaggacattaggagttttcttgggcatgcaggcttttacagaagattcatcaaagacttctccaagctcgctagaccactcactagactgttgtgcaaagaagcagaattcatatttgaagaagaatgtctaacagcttttaagtcaaccaaggatgctttggtatctgctcctgttgttcgagcgcctaattgggactatccatttgagatcatgtgtgatgcatcagattacgcagtatgagctgttttaggccagaaaatagacaagaagcttcatgtcatatattacgtcagccgaacgttggatgaagctcagggaagatatgcaacaactaagaaggagcttctagctgttgtattcgcatttgagaagttcataagctatttggttggatcaaaggtcactgtctatacagaccatgcagctttgaggcatctgtatgccaagaaggatactaaaccaagactgttgagatggatacttttattgcaagagtttgacatggagatagtagataagaaaggcattgaaaatggtgcagctgaccatctatcaaggatgagaattgaagaaccccttccgatagatgattcaatgccagaagagcagctcatgattgtagagttcttcggaaggagctacagtgggaaagagttccattaactgaatgctgttgaaggagaatctccatggtatgctgatcacgtctattacttggcatgcggagtagagcctcccaacctgaccagttatgaaaggaagaagtttttcagagacatacaccattactactgggatgagcattatctttacactctctgtaaagataagatctataggagatgtgtctcagaagatgaagtagaaggtatcctgctgcattgccatggctcagcatatgctggtcacttcgcgacgttcaagacagtgtcaaagattcttcaagcaggcttttggtggccaacaatatttaaggacgctcaggagtttgttccaaagtgtgattcatgccagagaaaaggcaacatcagaagaagaaatgagatgcctcagaatccaatcttggaagttgagatctttgatgtatgggggattgatttcatgggtccattcccatcttcatacggtaacaagtatatactggttgccgtagactacatatcaaagtgggtcgaagctattgctagtcctaccaacgatgcaaaagttgtgctgaagctgttcaagaccataatcttccagagatttggagtacccaaggtagtaatcagtgatggtgggaagcatttcatcaacaaggtttttgagaacctcctgaagaagcatggagtaaaacacaaggtcgccactccttatcatccacatacaagtgggcaggttaagatttccaacaggtagataaaagcaactatggaaaagactgttgggattacaaggaaagactggtctacaaagctcgatgacgcattgtgggcttacaggacaactttcaagacccccattggtacaactcctttcaatcttctctatggaaaatcatgtcacctaccttttgagcgcgagtacaaagctatgtgggcggtaaaactcctgacatttgacataaaaaccactgagcagaagcggttgatccaactcggtgaccttgatgagatcagtttagaagcttatgagagctctgaaatctacaaggagagaactaagcttttccatgacaagaagatcatcactaaggatttctaggttggtgatcaggtgctgctattcaactcttgcttgaaactctttctaggaaagcttaagtctagatggtcctgtcccttctgtgtcactgaagtccgtccttatggaacagtcactctagctggtaagagtggagatttcacagtaaatggtcaaaggcttaagaaatacttataagatcaaatccttccagaggtgacgtcggttcatctcgaggaacttcatgataattaaaggagtaaaggagtcaagctaatgactttaaaaaagctcacttgggaggaagtcccatgactatctctgtaaataaatatttattttcttgttatttttgatttatcttggttgtgtttgtggttttcaggaacaaagggacaacgtggagatagagtaaaaattcaaaacttttactctacagaagacttggagatcgagtgtacagcctgttggagtacaaaattttgaaaatcttctgttgcacctggagaccttgcactcgagtacattggtcgagtatgtgtgatgttttaaaacccaaaaacttttaaatcatcattttacacgaccaaccgaagctacagagacttgcagaaatttcctacagtttaaagtaggttttctgcaaaaatttctcagtcaacagagtgtggaccacgcgctgaggataagctggagagagaatctataactcaacctagaccactcattttgaagcgtcactcgacttctccaaatacactcgacctacctcttttcatctcaccaccgacactccattctctctacaccacgaatcgccgtccaaagagccactctatccagatcactccactcgacctccgtgagtcactcgacctctacaccgccatcacaagaccatatcttccgtcactcgacctccgcgccgccgtaatcgagcactcctgaaacaccagctactagaccactcgacctctgcgccgccgtcgaagtctccaggaccactcggttacgacgaagctactcgaccgcatactatcactcgacctcgactattcactcgacctctgcagcagcaactcgacccttgttcttgaaagcaatagagccctgaagaactgtcagagtgtttactcgacctctaggcttcactggctgaactcaacctccacaactnnnnnnnnnnnnnnnnncatacccactcgaatccagagacgatactcgatccaaatcgtctaaagggaactcaagaacagctctgtctactcgagtacagaattgtactcgaccaatagggtttatttcattgcctattgataacaattttggtttcattgctatctttgagactaacctattgactttgagctttgagttttaaatttctacaggagaatcatgagcaattacagtggcagttcttctgttgatcctgactacaacatggatgagatagagtcgtcatcttcaggtcagagagagaacagagagaatatgatagcttcaaaagaaaagctgagatagcccgagggaagagagcgatgacagagaggtatgagcttatagatgaggatctggaagacgagtacatgcctgagcatactcgcagagccaccaaacttctgaacaaacccgatgtattgcctactgaggaatatattaggctcttcaagctgaatgagttctgtagcacgaggtatccttactcgaccacacttgcacaactcggattgttggaagatgttcagcacctgtaccagagttgtcatctgcacactctgatggcttatccgtatgtatcatatgaagatgagacaattcaattcctctccacgctgcaagtggagctctaccaaggtatgacctctgatgagttggattgtgaaggattgggattcttgcgattctctgtgtatggtcatgagtataggttatcaatcaagcgcttggaaggattgtttggcttccccagtggaacgggaactaagcccaagtatgatagagaagagttgaaagacttgtacatcaccattggcagctctgtaccgctgaattcttccaggtcaaagagcaatcagatacgcagccctatcatcaggtactttcagcgtgctatagccaatgtactctactcccgagagatcacagagactgttactaattctgatatggagatgatcgcaatggctctcaagggaactcttcgccaaactaagaatggcatgtctctccaaggtgaaatcaatgacacacctctctttgtacttcttctgatccatctgtgtggatacaagagctgggctgtcagcaataaccacaagagagcgctaggcgctttgtgcataggtggtgttatgacaccgattttgatagcttgtggagtcccaatcatttctgatggactcgagccgcgagcaatggatatcgagcacctacgtcactgagaattcctggagtttgcaatggttgacgacttgcacaggttcaggtttgagcactctacagacaagagagctaacatccttctccccagccctgaggttacacggattatagagggagataacattgatttttggcctgaggttggacgcctttactatgagaacgcttcgccattggatgatgatcttctagaagaagctgcttcggatgggatggatgaagacagagcagtggagttcgacactagcatgtatcactttggtgaacatgtacctccagcgagggagagcaagagcttgactgaagctcataagaacaacagtaaactgcagaagtaatgcaagaagcaggacaagctactcgccaagtgtgttaagactatcaagcttctgacagataagctgagttgttgctcctccaccactgctattccacaggaacagcctcctctggagatgtcatcgaggagatttgatgagcctgcgcacaggccttagcttagcgagtagagagtctcacatgtcctggctaggcattcatcatttgagtcccgggagcacaagagaagaaggaaggctacactcactcgatctagcagcagatcacgcctcattcactcgaggagatcactcgaccgcggtgctagccgcagcagaaggagagaggtcgagtatcctcagagcggtgctggccgccacattgctgatgaggtcgagtacccacctactggagctgatatagaacaaggtggttcatctatggcctgggagcaatcacatgcagccattgacgagcaactacgttcattct

SEQ ID NO: 1954 - DNA, 1182 bp, Arabidopsis thaliana landsberg
tgggctggctctggcatcgccgactagcacatgttggaatgaagaatcttcataagcttctaaagagagaacacattttaggactaacaaatgttcattttgagaaagacaggatttgtagcgtatgccaagcagggaagcaagttggcactcatcatccacacaagaacatcatgacgaccgacagaccgcttgagctcctacacatggatctattcggcccgatagcttagataagcatcggcgggagtaaatactgtttagttattgtggatgattattctcgcttcacttgggtgttctttttgcaggaaaaatctcaaacccaagaaaccttaaagggattcttgagacgggctcaaaatgagttcggcttaaggatcaagaaaattagaagcgacaatgggacggagttcaagaactctcaaatcgaaggcttccttgaggaagagggcatcaagcatgagttctcttctccctacacgccacaacaaaatggtgtagtggagaggaagaatagaactctattggacatggcaagaaccatgcttgatgagtacaagacttcggatcggttttgggccgaggcgattaacaccgcctgctactccatcaactggttatatctacaccgaatcctcaataagacatcttatgaactcctaaccggtaaaaagcccaatgtttcatattttagagtctttggtagcaaatgtgaaagggaaatgtgcccttgggcatttctaagtattttggtgattaagtgtccaacacaaaatggttatgtgttaaactatgccaaatggtggacaaagtgcaaatcaatacaaaggtatgattctagacttagtacattggtttttgtgtactaacatatttgtctaagtgctagaatcagagaaaagacaaatggaaaaaacttggctcgagcagccaagactctgttcagtccgggtgcaccggacaatgtccgtcggccaggttggctctggtgaaaaggctgctctcgggatttcgtcggtggcgtacgactaaaaatcaccggactgtccggtggtgcaccggactgtccgttgagccaacggtcggccgagccaatggtcggcgcgcaatccgccgtgaccgtggccgagcaacggtctgatgggacacggactgtcggtgtcacagcagtgtcggtgg

SEQ ID NO: 1955 - DNA, 1664 bp, Arabidopsis thaliana landsberg
ccgccatagcacctaggttatccccaaaaattcaatttttagccctaaaatacaattctcgagaaaaaagttccaaactttttttgaagctggaaacttttcattcacatacaatgttatttgagtatttcgatctcaagctatgttgtcactacgcatggattcattactttttgcatggatttgattcttgtacttgaaaataagaaatgagtaaaattttcaaaactctgcaaaatggatttacaattacacgaagagaatgatttataagaatggaaacagttacataacaaagaagaaaaagaaagttcttctttttatttggcatcaaagattacaaattgtttagctttttccattgttctggagaagactgatcagtttcatcatcgattcatggcgaaaccaaagtcatcgtcgtctatcaaccgagaagcaaagacattatgtgtcgtcgatgcgaaatcattgtcaaactctccttcttttaacctctctatcttctccacagcatctctcatctccatcctcctttcttcatcttcttcgcaacaactcaacccgattttcaaaaggtttagcatctctgctttgcagtttttcttcccagtcatttccttgtcaaacacgtcacctgttttcttctccttaaccatgttgctcacccaagttacgaggctcatgttagcatcgtacccttggcttagataattctccggaaacctacctgttaaaagctccaagatcaatacccccaggcaccaaacatctgtctttttagttagatgtccctttaagctatactctggtgatttataagagatcattagattgtgagactgctctgagttcatcactggtcttagtgcataatcggttaggagtggctcaaatgattcgtccaatacaacgttcgatgacttgagatgaccgtgagggattgttagggttgttagctcgttgaacaagtaacctaaacccttagccactccttgtataatctttagccttgttggccaatccaatcccggttgatccacagaatgattcgctgaaacagagcatttttttagtcaaaactgataaagttacaattttaatcgaccaaaaaagttgaatgttacataccgtgaagatggcttgccaagctacgatttggcatgaactcagcgatcaagagcttctcctctctacggtaatagtaagcaacgagaggcaatatatttgtttgttttaatctccctaaccgtctcatatgctcatgaaactcatctcttccgacattgttcatatgtttatacctcttcacaaccaatgtttgtccactagatatcgctgctttgtatgaagcaccaaatgttccgctaccaagaacttcagctgaagctctcaaaagatcttgaagatcgaatctttgaatatcgtccctcacgaatagaagccttcctcctggatcaggcatcgatcctctccttgtgtgatttacggattctgcgggtttattgttcttgtttgtggattgatgataattatagctctctatcctttcttttcccgcagaagaaggataagctgacaagaaattacgtcttcttgattgaacgaaacagaacacaagcgcgatgatcactagtattatgccaataacaatcaaaatgatt

SEQ ID NO: 1956 - DNA, 430 bp, Arabidopsis thaliana landsberg
taaagctaaaacttaatttatttttggcatttcactatttgtttttttttttggggtccaaacctcattatatgggacgcggatgagaatattacaatcatgatacaagccacttttaagctcatattaaatgaacccaataacattaatgacacataactataaaacgtgtatgacttcattccagcgattagtagatagagacttggaatcatgcttcaaggaccttctttctacaattatagctgcaacaaatgttgaattaactgtagaaggctttgaactcaatcccaccttcaagaagaagctccgactcaaatctaacgaagagttctttaatctttcactttgatgatatattgcatcatatagcatttcgtcctcgggtaattctaacagaggcaaacatgattttgagagaaagttaatt

SEQ ID NO: 1957 - DNA, 583 bp, Arabidopsis thaliana landsberg
  unsure (1)..(583): unsure at all n locations
gctcagtttaatgcaatatgggtaagcgtggatttaccaacttttgttcgaagaatcaagtacacaactaacaagacacgcgtcaaacccccatgattaaatagcttcaacaacatctaagtgttgatttgaagataaaccgacaagaagtcggagatagatccgaacgaagtcggaaagctaaaacatagaacaaaatctaaaaaatcctattagcaaaggataagaacaagatttagagttttctctctctaaaagatttgagaaagtgaagagagagaaaactctttgtattttattttaataaattctagaaagttaacaaatggatgttattaaaatggaacaaatatcaaaaaaattgcaaacttttaaatacacagaaaagcatgaacttttgaaatgtcattaaaatcctaaagtttggtttgattttataaaaaaataggtaagtttcgctaactgggtcattgtaagcatatcaataaatttccgctagcacaaatatgatggagttaactttccataacggttaggagataaataaattntatacatacatataaagtatcactaaagataa

SEQ ID NO: 1958 - DNA, 1257 bp, Arabidopsis thaliana landsberg
ggttcgagaattgcaatagaaatttgtgttaacgatggtgaaacacaagttaattttgttaattttgaattttcaaaattttaatggtatgtgtgaactaagaatttgtgttaccatgttaaactatttaaatattgatgcattttttgtatatgtgttttgggctatattcaattggctgcttgtaaatccatattttgccaaagtaatttaaacaaaataatggcaaagagaaaactctaatatcactaaacatattatctatagttggccaatgtagaacttgtaaattgttttgtaagtatgactcgattgcaaagatgaggtaagtcctgttttctatcattgtatgttgaacttttttactgttaatttgttattaaattatattgttgtttcggaaaatatctaataaattagtaccaaaataaataagtttacatataaacgatttcgaattaaatagcatgatttgttatggaaactttattaaacaatttataaaaatattgggtagattgtttgttttttaattgtagtatttgttaatttactaaattacccatgcaaaaattcatttagttagttttaaactacccttacaatgttgtagttcacacaatgcttctcaattaatagtatagatagttataaagttttttctcatcatcttatttgagagaaatataaatacttgcgtgtaagaaaatttaaatgtattgatctgattctacctctattgtttttaatatactaatgtcaagaagatttttttttatttcgtcctcacatggcataacatgattagggaatttattatatgatgactttcaaactctatgcagatctgaatttgttatttcttaatatatattctgcgatcgacctttatatagtatttggctttgagtagtaacatcgcactgcttataatgactatcatctcttgtataactattcacatttttcgtaatattttattcgcaattttaatcttctatggctcttgttattgcgacaaaggtacaatactaatttcttataaatacaatttaattctagtatacatttcaattttttttttttttttggtgaagctggagactacatttatgaaagatgcaacattggcaccaaagaatgctagtttcgactacataatcatcggaggaggaaccgcaggttgtgcattagccgcaacgctctctcaaaacgccagcgttttggttcttgaacgcggcggatcgccatatggaa

SEQ ID NO: 1959 - DNA, 601 bp, Arabidopsis thaliana landsberg
ggtcttataagaaaacaagaatagtgtgaaatacctacatcaagggagggcaagattggaaaagaaaaagaaagacgaagaagtaatttgagttagggtttcgtgtagcttataacatgtcggtttcagaaatatggcagtatatgctcagagatttaaaataattgatttggccacctattttcgaaagaactctacagttaagcgtgcttgaactggagcaatttcaagaaatgtgaccttcatgtaagtgattgtcggaaccatgtgagtgaggataaaacatgaggaaaaatgatctcatgatttgaaggattggtaaaaaaatctttaaagcatctcagacgtagatgacatgctgtcgaacaggagtggggcccaccacaggctggaaaaagatgtggatgctcactggtaaggtcgaaacgttacaagttgtatcagaactgaaccgaggttagtgtggagccatgagactcacaccgtcgagaggacagtcttggtgcgcacgaagatgttatgataagttagtagggatgaattgtacacttcagatcatgaatatggtgttgcatgtatagagggttaagaagattgatgt

SEQ ID NO: 1960 - DNA, 608 bp, Arabidopsis thaliana landsberg
tggaaaaagaacctatcttcctccagctctttggtctttgtccaaaacagagaagaaaatattttatattcacttattttgttctaatattttcacatgtgtgaagatagaagattctacggttaagttgatgcaaaaacttcttccgattgcaatcagaggtataagatgaattattttagcttaactcttgcataatttgctgttatgtttgttacctaagtgttaggatagcgattggacgcttatgtgctttctttaacaaactgtgtcagcgagttattgacacagagaccgtttctacaatggacaatgaaattgtggaaactatttgcatgtttgagaggttctttcctccaagtttcttcgatataatggtgcatttgacagtccacttaggcagggaagctcggttatgtggaccagttcatttctgttggatgtacccatttgagaggtacaatccaatagcttataactttgtatcctttacaatacacttttatgctttaaagttacatgtgtttttatcttcaggtactagaaagttcttaaggactttgttagaaacactgcaagaccaagggttgtttgcaaagcattcggtc

SEQ ID NO: 1961 - DNA, 999 bp, Arabidopsis thaliana landsberg
aatgattactctaacaaaattacttaaaaaatgtcacctatctatttatccatattcctttttttttcttttttttttcaacaatagtttgagtgatatttatgtgatggggattcactcaaactggaagataactgtagtgaagtgcccaaagcaaaagatcttcatgggactctctatgtcttaaaaactttttttttctctctctctctctctctcttaatccaccgagtaaatccagcaaacttccactttcagagatcaaacttgagttatcttaagtgatgaagaaagactaattccatggcggcgtttgcagtttcttaagcttcctcatcatctaccgtcaatctttatagcaaagaaaaggaaatcaaatcaagatttacccttttctttgatttctctttgtggtgtgttgggtgtgtgatgttgattaccactggggaaagaaatggcagggttcttctatctaggagggagagacaacaacagcaacaacaacaagcaagatcatcatcaagtagacaaggatcatcatcatcaagacaagagcaattatctttatctttacaaagacgagatctataataacaacaagggtttcgagatttggcctccgcaatacttccaacaacaagaacatcaacaacaacaacaacagcaacaacatgcctcagctcctgcaaacttctactcatttggaatggttcctagcggaagcagcagcaacaacaacaataaccgtagccggagtttatacttcaacgtagtctccgatcatgagccgggagggttcacggtgacgagacaaggaggtatgaattgtcaagattgtggaaatcaagctaagaaagattgtcctcatatgagatgtagaacttgttgtaaaagccgaggctttcattgtcaaactcacgttaagagcaaatgggttcctgctgctaaacgtcgtgagcgtttagcccaactcgcttccttgcagcaccactgagcctc

SEQ ID NO: 1962 - DNA, 590 bp, Arabidopsis thaliana landsberg
  unsure (1)..(590): unsure at all n locations
tagaagtagtaaacaactttgttagtatttttatggtcaaaatgtttcacaatccaatgcatttttataatcataagagttagagatgaattatgtgtgtttaggtgtatgtttatcatcatttagctttgcatttggtcattgtatcatatcattttgcaccattttagcttattttgcatacttaggcatctaggatcatcttgcatatgcattgcatattttggtgtgttttcaggtgcagaaggagctaaaaaggactctactcgatccattcactcgacccaggtagctacagaagaggatgcagtttactcgacctctttactcaatccaggatgtcacagaggaggctgcagtttactcgaccctcctactcgatcaaggcaacctctgatgaagcaacagattgatctactcgcctctcctacttgatccatttactcgnnnnnnnnnnnnnnnnnnnnnnngacttattgagctatcaaagcgtcttcggatcctcctcattccccactcaaccagacatctgagcatacagataggagaggattgaacatctactcgaccaaattgtcactatgagcata

SEQ ID NO: 1963 - DNA, 673 bp, Arabidopsis thaliana landsberg
tctttgtatgtgtgtatatatactcctcaagatcgatcaataacatcaagcactttttcattcattcttagtctttacaattaatgtacgaagaggattattatttattaaattacgaaaaagaagtgaaaatcgatctaaatgattgactttttacgtagaatcgtcgaattgcatgcacatttccaccgaaattccaaaaatctgaattacaaataagttggaaccgatcgatcttgttttgtatatttacgtacaaggcagacgtacatacatgtagtttggattatcatatgtatgatcaacgcaattttcgtgaatagaaacgtgaatactaacaatttcggtgaatacctaccgtaaatactaacattaaaatctatgactttttaaaataataatcaatcaaacttttacatttgattttatattttcctcagtttttaggcctatgatacacctgcctcctcaaaatattagttccgtgatgtttgctttgctttgcttgctccatctaaggtggatatcgatcttcggagcatccagctctggcttccaatgatggatcaacgctttcaactatgttctgattagtcttatcctcatcagatctaatacagattattgtttagtattcatttcaaacatcttgccacgagttaacgttcattaa

SEQ ID NO: 1964 - DNA, 701 bp, Arabidopsis thaliana landsberg
ggttttctaaccgtttatctctccggtctatggtggtcggtttaggtttcggcttatcaatccatcgcttacgggccgaacgatatcattatcaaacccaagggtccatggattcatccaccggatcatcgtaggctagcccgtgaaatccttcttctgtcggctttaggttcgctcacgggtccaacatccattttggccatgggttcccaccgtggactttcccgttggttatccatcgagtcagcctttggttttaccgatctttgatcggttgcaccatggctgaggagatagatacatgaaggcggccgcattatttatcctatatggtgaatcatgttccttacccattcttggtgctttctccctttatcggtaagattgcatccatgggcgacccttgggtgtgttcggatgcacttatccttgtgcttcctcgaacacttttctcgatccatcccatccgacgatcggccgaacctcttaatttttcgcgattcaacatagaattgcctttacgaggctaaattctataatcgctctcttattacacagcggaagtctttctaaccttggtttaattctaaccaactcttgtaccggtttcatcgtctttgttccttagacttagatcgatcctttactcggtcaagacatgcatatgttcgctaaccattctaagccaaacaatcgcatat

SEQ ID NO: 1965 - DNA, 1159 bp, Arabidopsis thaliana landsberg
aaaaccatcgctgagtagaggagcaggaaacctaataagagatcaaaatcaaaatcggatttcacatacataggccagttcggaatttctcttaaaccaagcccttaactttttcactcttttccttgccgttgttactcttggaatttcaagcctcccgaattcacttgccgctagcacctcaacctcctccatagccaagccctaaatttctcacaactctcgatctctcatctctctcgcattactttgtttactataaaaaaaaaaaaaaaaaaaaaaaaaaagcccacaaagcgtaacaaatatcagcggtcggcggcccatattaggtttgagattaccggaggagatgattgagaagataatgaacggagatcaagttcggatgaaatcttgtcgatgatgtgatttgtctgctttctcttggctctggagctatggtatgtctgctctgtgatcgccaaaggttgattcttggtgcaataaaggaagtaaaatcatcatctgaagaagaaccttaagcttgcggagaggaaagtgtcatttaaccatgcctttccacatactgatcatatcagtaacctccatggtttggtactcttgtgttattggttatcatacaaagtaactattatgcattgcaaactgatagccagcacttagcgaaggttaaaatgtacatatagattccaactcgttatagtgcctgaagttgtagacataaagacaagccaaacacacatcgtgcatagtcatataacatgattaaagttgaatagtgattaataattgattgcaacagaccagatgcatacaagaggtgtctgtctattatttttattcttcttcttcttgttctcgacttactttaccaaagcaatttcaagactcatgtgttctggtaccccatccatggttttccttatgatagctttgtgatcacttgaagaaacacctgtatacttgtaacttatgtagaagattgcattctctgcgtggagcttctcacgcgcctcagttatgtaatcttctttagtttctaaaactaccttgctgatctccaagggtgggaaagccaccaattcctgggcaagcgtacgaggaaagagacaacaagtaaaaaagaagaagcagaaaaagctttatgttgtttaga

SEQ ID NO: 1966 - DNA, 808 bp, Arabidopsis thaliana landsberg
agaagagctacgttgtgcgtatccttgtagtacttttcatgttatgaatcaagagccattagatcgggtacagggggagaatcatgacttgctttccttgccactaaagcaatgttctctactgtcaagtttcagacgagcaacccaaacacaaaagtccacttgagagtttttcttatccgaaactggttcccagacaagttctttgagttcagaatcaatagtaacagtagatgagctaactccactgacggcttggtcaaagtaaacttagtagaagaggcattgaaacagccaggtccagatagaatgataataactcaatttattaacaccaaatacacgttaatataatactacagatttcaaaatcaattacaaatcaacaattctcgtacaagaatgcattgtgtatgacagattaatattcaaacaaataatatataattgtgtattcaaaaccatattatataagcggggagaataatatcatcaaagacttgtgttgagcaactctctgtaatctttacgaattccccacaaaatctcactgcattttttcatgcttggtctcgaacgtctatgaggagctagacattgaaacgccatctccaataccttctctaatgctaagttggtcgctgaattttgttctagcttcgggtccaataccgatatcgtatctccactcgtgaacttcttgatcgcctgatcaaatcacaaccattacacatgaatcaaaaacttgttgaacttactttatagtagctaagagaatgtttagtgttacccatctaatggcgaagcg

SEQ ID NO: 1967 - DNA, 2117 bp, Arabidopsis thaliana landsberg
aaagtcgcccgcgtttttaagtccgaatggcatcactcggtaacaaaagatgccttgttctgtgtaaaatgcggctttttcttgatcctcgggattcatcatgatctggttgtaaccagcgaaagcgtccatgaatgacagcaacttgtttccagaagttgattctacgaggcgatcgatgtgcggtaatgggaaactgtcttttgggtaggctttgttaaggtcggtgaaatctacgtagactctccatttgccgtttttcttttttactactaccgggttcgcgagccaatcgggatattttgcctcggtgatgaacccgatcctcagtaatttctctacttcggctttcatggcttctgctcgctcccgacccaattttctcctcttctgcttaacaggtttgaacgtcgggtcgatgttgagctcgtgtgatacgatatcaacacttactccgggcagatcttccggggaccaggcgaatgtattgactttttctctgaggaaagcgatgagttcagctgttaattcttctcctaggtctccaccgatttccacgcaccgctcgggtttttcgtcatcaaggcagatagagattaccagattggggattggtcttgtggattcccgagcctcctcgatctttagctgctataactgctcggaaattactttctcttcagctaagccaagcttagctttcttatgatttgcgtcggccgttgactcagtgacgggttcctgagcttgtgtgctgccatgaagcagattcgagcatttttctaatttccccagatggttttcacgccgttactcgtgggaaatttcaggcagagatgatatgtcgaagcgacagctcggaaatgatttaaccatggtgtgccaataatcgcgttgtacacggtcggctggtcggtaacagagaaatcgacgatttttgttacccctttggctcggactggtaatttgatggtcccgagagtcatagtgatttccccagagaatccgagcacaggtcgtggagttggtacgatttgcgtcatgtcgatcttcatttctcgcagagttgtaagaaaaatgatatctagtgtgcttcccgtgtcgactaggactcgttcgacgttgaaatcaccgatggtcagtgtaatgactaaaggatcgttgtgcggacggtctaaaccgttggtatcgctttcgtgaaaagttacttcgtcatttggctcgttaaatggccgcgcccagttatgattcgcgtcagccttcctttgataagcctttattgatgccgccgtgtcttgacagaaagccgaatcccctaaaattgtgaagatccttccccgagcagcttctggctcatcgtcgtctgcttcgcgattacctctgcctcttttgggtccttcgaggttcgtcgcgggggctgcctgctcgggattggccacagggttgacctgctcggttttacccttttccgcttctatgtcttcgatggtcaaacctccaccgatttctccggctatgaattttgctgccaactttgctctggaagtatgatggccgtaactcttatgcaactcgcaatattcgtgctcgtttcctgcaggttgatcctttgtccaagtgtaggattctcgaccgcggcctcgtcctcggcctcgggcggcttcgcctcggggtgtatcagcttggtaattatgggctccggaggaagtctcgaagtggctcattaggctgctgagatagtgatcataggtcggcgtctgatgtgcccggatcgattagcaccgaatattgcttcaggaagagtgtcgatagctcctgaaaactgtccacagaatttccttcgagtctcgagaaccaatgcagagctggccctttcaagtgctcgacgaacaggtgacagataccggcatctctttcttctggtctgaatttggctcgggccacagagaggatgaatgacttcaagtgtcctttcgggtcggaagatccgttgaagtactcgattcttagttttcctggatctgagattatcgcgttggagatcatgtgtgtgaacggtgtgttgtgggactcttccagaatgcggtcgatgttcggggccgaggagactgcgttat

SEQ ID NO: 1968 - DNA, 507 bp, Arabidopsis thaliana landsberg
  unsure (1)..(507): unsure at all n locations
tatatagtctactcttaaactaagttaaactagctaacttggaccaaagtttcttcattccctgctattatcaacaatgtctcatttcagggtcaaatataaaacgaaagaaaagggatcacaatagtcacaaaacttaccccattttttttcttaaactcaatagatgacaacaatgtctcctgatgaagtctgaagaggagatctctgacatcttgcatctgtagtgctttcagagacaactttgttgacatgacatgctacaaaagaaagtaaacagtcctcaaggtatgtcacatctatcattggccttcatataannnnnnnnnnnnnnnnnnnnnnnnnnnnnnnnttcacttctgctagtcctagaggaagttgatgcggacatccaaattaaacaaaactgggagcataccaaaccagccggtacatttatcaaaccgattgatgaggagcattttggaggactcttgcccaattggagtctcaatcaagcacaaggcc

SEQ ID NO: 1969 - DNA, 722 bp, Arabidopsis thaliana landsberg
gctttctcaaatgcctaggctcatctatgatagttcaaataacaagtacctatggcaagcatacctattatctaatatcaagttctaggtaatcaatctaaaactagcaaaaagaataatcaagatgaagaactctaagaataatcctaaggggttttcgatctactaatccatctaaatccctaatgagactccctaaacccaacaaggtgattactcagacatgataacagaaacacaaatcataatctgaatagttttcagtgaatgaattaagaatagaagtaaaggagttcagaatcctctctaaagggattagattcttctctcaaatgtgtaacaaactctgaaaaacaaaaactaggtctaacaatgaccgtgcagggactactttgtcgatcgacaccagcttctgaaaaacgtccttcaagatcttcattgctgaaaagcttccaaaattccttattgtgctctatagttcccatatgtgtaagtgtacctgaaatgactcaaaacgtacgaaaaagtctagaaagactctaaaaactattttgaaactatgttagaaatcaataaaaaccaggacatatcacaaatgaagcagcggtggccactttcaagaagggattgttgcaaggatccaaactaagaaaacatttggcgattagggagcagctagacctcgatgacactctacatagagcatcacggtatacggtcct

SEQ ID NO: 1970 - DNA, 535 bp, Arabidopsis thaliana landsberg
tccgtaacggaaaaatcgataatttttgttattcctctggcccggactggtaactcgatggtgtcgagagtcatagtagtctcaccaaaaaacctaagcacaggtctaggagtcggtacgacttgcgccatatcgaccttcatttcttgcaaggttgtaagacagataatgtccaccgtactccctgtatcgactaaaacttgctcgacgctaaaatccccaatagtcagtgtaatgaccaagggatcatagtacgactgatccaaactgttagtatccctctcacaaaaagtgaatttatcatctggtccgttgaactgtcgtgccgagttacgatttgaaacgggcttgattgaggctgttgtgtcttgacaaaaggccgagcctcccaagattgtaaagattttgccccgagcagcttctggttcgtcgtcatctgcctcgcggttaccccaacctctcttgagccgttcggggttttccgtaggggctgccagcttggagttagccactgcgttacttgttcggctttggc

SEQ ID NO: 1971 - DNA, 663 bp, Arabidopsis thaliana landsberg
ccagacagtgtccggtgcgccaggctggtcaccggcgaactggccactctcgggaaaactttggcggcgtatggctataattcagcagccaacggtcaccaaagcaacggtcggccgcgcaatccatgggcgacgcgtggcccacgccaacggtcggctagggacactggactgttcggtgtgcaccggacagtgtccgtcggccaaccagcccgaagctgcaacggtcggctgcccaggaatggaaggaaatcgcgcaccggacatgaacagtggctgtccggtggcacaccgaactgtccggtgcgccacccgacagaaggcaagattagccttccaggaatgtcctcaacggctcctagctaccttggggctataaaagggaccctaggcgcatggaggaggcacttaagcattctttgatcattcctaagcatctagactccactcccacgcatttgattctctgtgctagcaatttgagctcctcttgagttgagactccgtgtgttacttagagctaagttgtacttgtgtgcgtattgcctctcgtgttgagcttgtgtcgttgtcttcctccttacttcgtgctctttggatcacaattgtaggcgagagctcaagttgggagatcttcaaacggagaagttagaagagacctgt

SEQ ID NO: 1972 - DNA, 2045 bp, Arabidopsis thaliana landsberg
attaaggtttgagcctcgattgaaagaattttctcaactacatctgtattgagtttgaaatttattattaaccacgaaaagtaaatatgtaagattcatataatacgatactattactattatatttataatttcaagctgagactaatgttagtatttcgatattattaaatagaaaatcatctgtttagtaaatatttaccaggtaatgcaagatttgtgttggcaaaaccaactaggtgagcgtaattgtaaactctaaatttatcattttctatttttagccatgattcatatacccctagattttagtatcaatgttgaatttgatgacaaaaggatggtccgtgattttggtgtgtttggtgcatagcctaacttcgaacccttgaatttgtaagatcattcatttttggaaaatactattgtttttttcagcaagagatgcatgtatgaatatgagatttatgttaggaaaatatattgatatgttatcattagacaatgataccttctcatcaagcaagaggagtaagtttccaaagaatacaatcgttggcggtacgtatttcatgagcttctcacatgctaacaatatggccaataacatgttgggcgtgcgttccaagttgcaaatcgttaaatgcaacataggtagctagatttacattagagggattcatgagagacattgtgattttacgtgatagagagagaaaaagtgatatagaggaaaatgctcgtttgagtatttgttactaaaagtatttatacaaaatagaaaatagtatatttatagatgttttgttttttcttgggagatttaaagacccactttattgtagcattaacggtttcggtatattaaaatgtggaaggatttgagaatcatattaatcgtggagcattaaagatatgggctggaatgaacaagtctacgtttaagttcaggttgaggaagtgtatacaaattctctacaaatcaacaacttacacttgtatccaagaacttctacgactcttttatttaaactatgtgtagcatgcagggccggccctgggctaaagttggtgaagcccatgttttaggcgcccaaaatatatcaagaattttagggcatcattttcatgagaaatgcatttagtgtagcggtagtgtcttgcttttctaggcagcaggtctcaagttcgagactatatgagtattatttgtgattcttttacatttttgaattagttgggtgaaaaacaaaatttggtgctttaggcagaaaaatacattgggccagccctgaaaacatgtttggattttatgatcactttagccatttacgtggatctcaaaattaaagaggatatattgaattaaaaaaatatagaaagagtgattgttcttgttcgcattaattatattctcctattttagttgttatgttgaattaattactaattatgtattacttattttatgaagtgtaggtggcaagctctcatgtgctgatgtgtcaagttgtggaagagagttagtcttctttcatatatatgattaggttaattagataagacctaaagcggggacgtttgctgctctctgattctgattagggaaggacttcaaaacggtacgtagtcggtttagttagggagcggtaaattggtcagaccggaccaatggttttattacattgatttggttaaatgtaaatttaattcctaggttctttcaaaacgctgcgtattgatgtcacccttctctcttgaagcctctccatctcctctctatccgtcggtctgcagaagaaaaaaagctcggcaatttcacattatcaatatgttattagataaatgttacaatcattttacagtattcaaattgtaagatttattgtaagattttcatttctatattttaagttattgtaagattatattatatatatttatagcgtattatacatatttattatttctcattcacaattgtaaagtaaattattagtgtaaaatctaaattagagtgttaagactttagactgttgcattgt

SEQ ID NO: 1973 - DNA, 603 bp, Arabidopsis thaliana landsberg
tgcaggggtttgttttttctactggtacgccagggagattgctatattctactagaagcaaagctgctaaagtctaagctactctactcggctctactctcaagtattttgttatgacggatgcacacatattttgcaacacatgtgtgtgcttcgttcaacaatttaagttttatgaatcgttccaactttgttccatgttcaagtttatttatcctctgaatttcggtttatataaactgtttgtcctttttatgtttctggcttttgaatgaatgaagtttaagttttatgatatgtcttcgtttatgtacactatatagtacactaaacttggtttatcgtacattggcaaatagcttacacaacataagtaaaaatctaatatttttgatgtcgaaggcaacataaatgttatacgtacacgatagcgtacaccagaaagtatacgtacattgcgagacgatttgaacaatataacaaggcacgtacataaatgaagacaatagattaacattaaaatgaaaacaggaaacaacaacaacaacaactggtaaagaaacttaattgaaatgtagtcttaaattatattacacggagaat

SEQ ID NO: 1974 - DNA, 509 bp, Arabidopsis thaliana landsberg
  unsure (1)..(509): unsure at all n locations
gctatcgagtagatagtgtgataaacatagcacacgatagattctacactatagccgttggttgcggaatctggcttttcatgagccttcttgtttttcctatttgggctggtgaagatctacacaaaaccaccgttggtgaactccaaggtctctctcgctctatagaaggtatgtaattctcgaaaatatcatttttgttttgttaaaccttaacaccaaacttataattccaaaaatattacttaatttatcttgttttaatattctgtaattgtgtttgtgtttatacgtctagcatgtgtgaatgagtactttgaggagaaagagaaagaaaaaacagattcaaaagacagaatctacgaagnnnnnnnnnnnnnnnnnnnnnntaaatctactgacgaaacactcgtaagtctttgttatatgattctctaatatttgaagatttgtttgtgtgtaagttataaatatcngaaattaaaatggaattattcagggctttatat

SEQ ID NO: 1975 - DNA, 3432 bp, Arabidopsis thaliana landsberg
agggcgagcatgagcttgagtgaagctcataggaacaacaataaactgtagaagtgatgcaacaagcaggacatgctactcgccaaatgcttcaaaactatcaagtttttgacaaataagctgagatgttcctcctctactacagctattccacagtgacaacctcctctagagatgccatcaaggagatttgatgagcttgagcacaggccagagcttagtgagcagagagtctcacacgtccctgctaagcattcgtcattcgagtctcgggagcacaagagaagaaggaaggctacactcgttcgctctagcagcagatcatgcctaattcactcgaggagatcactcgaccgcggtgctggccgcagcagaagaagagaggagctgatgaggtcgatgaaattcaccggataaactcagtgccctagttgctagttatctgttgcgtagtcaatgaaattgaagtaaaactgaaccatgcctagattgctctactcgaccacactatcatgatatgataccattccctatcaatttgaacctgaatttgacctttaattatcatgtctgcatcaaatttgaactcatggataccttaaaatgcttggattttcttattcattttgatcactcttgttaatccaagtagctgactctccttattagagcagttaacccaaacccaaacctagacattctttcaagccctatatcactcgtgcgtgtttgtgaggtcttataccaattaagcttggtagaaagtgttaggttcgtaacgacagagatagtgtctcatgtagttctagttcgcattttttcggactagataggactagatgggcgcttatactttgggttgggatgtgtttaaaaaaaaaaaaagggggtgattcattgattggaaaaagtaaaagactctaggtgaagtaagctaaagaagcagaaaaattctagtaaaggttttgggatttgtaaagaaaagaaagagttattgttagctattggagacgggcaaaagccctcggttttaaaatgttaaaaacaggaaccttagttgttaaagaaatccaaatccgctagatgtatcagagtattgagaaagcttctcctagagttaatagaaaagaaaagaatgatataaaaaagagtttgaaagattcatgagtgcaaagggtagagttaagttgggactggagttgagattaccattagagcttcattgttatactctggatgggatcttatctctgtatgcataacttgggacttaactttagcattctattaaagctcaatcattcttgagagatcccctgttacttaagcctattctgttagggaccatctttgtttcttaaccttcaccttagccaaatgagttcattgatgatgcattgcttgattcacgttccagaactaatgaatgttaaagggattggtagatttgaaagcatgtgtaggtcgagtataagagacagattgattgataacaaggcatggctaacgtttttgagtaaaattcaatcatatcgcatcttagaactaccaactgggacattgattttatactttgcatgattaggatagctttgcatacatattgcatttttgagttgttttcaggtgatttggagctgtttgcgagcaaattggaagaaacgagctagaaccagaaaacatactcgaccaccaggtcgtgtgcatccagcaccatactcgaccaccaagtcgagtgactttggagccattcttcccatctactcgaccccctggtcgagtaacctcagctcaggctactcgatgacgccactcgacccctggtcgagtatcacttcgccacaccacctgaccacactcggccattcactctaccaagttactcgccccctggtcgagtatcatcactcaccaccatcaccatcactcgaccggacactcgatcatgtcttcacagtctactcaaatccgcactcaaccagacaagctgggcacaaggaagagaagaggagaagacaaagtgtttggaagcggcctggacctccatcggatcacgaagcccatctcggcccattatcactctatgggccgggcgattaggttattggcccgtctactatcattttatttcgttttgtataaatagatgtcttagggttctgtcttgagacatctagtcgacattgagtttttgcttcagttttattttccgttttactctggctgcgccgcttttgcttctgcaacctgtaattcgagatttttccaagttattcagatcccgcatttgatttcatctgtcatcttgtttctctactctttatctctttacttatgcaatattatcatttacctgcgtttatgtctttgagcaagttgtctgagtagtgacttagaattcttaaggatgggatagagtaattgtggaatccgtagtctgtagaatggttaagttttagaattaattgaatcccttcaggactagatgtgtttacttcttatttctttctgatcaactggaattcgatcccaagaaatcccgcacccagaaggtgttcgatggaatgcttgatccactagttcctaagatatgcgtctcaatcccaagtggattggccgtttagagcatttattgactctatcagtctgttcttattgcctgcatagttagattatgttaatgggaattagtctgggctagctttgcttgaggatttctatcacgggagtgaattgatctgttgttgaacctgttgtctagggatagcttgattgcgcttgttaaccattcgaataggctaggataccactctattcgattaccccatccttaggaatttctcgtctatctgatttctctgctttatcgctatcgcttaatcattctcattgcctgtttcttagttttttgcaattactcgaccaacttactcgaccacatccagtgtctggcaatagactgagcagtcgagtatagttgtcttgtttcctgtcggttactcgaccagtatactcgaccacacccagtgtctggcaacagactgtgcagtcgagtatatctgtttcatatcctttctgttactcggcttgttactcgaccacatcctacttctggcatcagcctgttgtggtcgagtgattttaataattctgttattatttctgttttctgcatgttcacttaggactgttagaaacccctatactgttattgtttggcttgacttagtgacttctgatcacatctcatttgtttgcatcacacccatttacaacgacatgattggtgttttaggataattgactaaaaacatattatcaactcatacgtacttcatctacaccatcaaagctttgagatgcaagaagaggcttggttagtgttgtggagtcacttatgactacactggacgggtctgagtgagagtgaca

SEQ ID NO: 1976 - DNA, 529 bp, Arabidopsis thaliana landsberg
agaacatcaagctcacgataacatagagatcaacattgatctctcattcacattttttggccaaagtctcacaaagaagtctcaggacatcaaaagcataatccccctaataagaacagagtcagtatttatagaagaagagtttcaaggcaaagcttctgacagagaaagagtctgttgacttcctgttctcttctcaacttcacttagcccaatctctcagcttctttctccagttgtagaccttataaacgtatcagcaatgcctctgttataagtacccgagcgcctacacttttgtggtgggtatgccagagtttgaaggagaagatgtcagagtagagattgagaatgagaaggtgcttatggtgagcggagagaagcaaagggaggctaagaagagaatgtgtggactgagacgatgtggaagatagtgaggaagttacatttaccgaagcatagaacacggacatggacaatatgttgaggggtgactgttgagaagcttccttttccgagcctaagaacc

SEQ ID NO: 1977 - DNA, 559 bp, Arabidopsis thaliana landsberg
gcaacacatttgaagaacggatatggaggtgttctagttttctttatcgccatcattatatcatagcggttggcgtacgggacggtgaaaatgatgctagttggggatggttctttgagaagctgctaagtgttcgaccccatactccaaaattggtgtttatgagtgactgaacttcaagcctcatcaagggcatacgtcatgcgtatactgccgctcatcactggaattgtgtttggcatttatcccaaaatgtcaaagctcattccactaacctcaacagagacgtgctcgcttggagattcatggagttcagtcggatttataccttgccagaattagagatggagtatacagccttcaaggtgagatatcttaccgtggagaattatttggaggattcaaccgtgaaagaaagatgggctaggtgtcgttttccgggggaacgatacaatctggacaccatcactgtgtggaatcagcgaattgtattttctcagtgcaggagtattctttaatcccatctaatgcgatcatgccaaattttgtttgttaatga

SEQ ID NO: 1978 - DNA, 1804 bp, Arabidopsis thaliana landsberg
ctgaatagaggaggattcttactgatctaacggtgtggatgtaagcgttagaggcagttaccggcgaccagacgagcctcatgatcgtattcttgtgttgatatcttgataaaaatgtttggctttcgagagaagaaagggtttctatataaagagaagttgagggaaggaaggtgatgacaagacggttaggcagttaggttaataaatgggtgtggtttggctttaaggaatggacttagcgttgacatttgtttaacccaatcatttacgtgtgcctcattcccttctatcttcccatatatttactcacttcgattcttagattttgttttgaataacatttaatgtcgatagcgaatctatttctttaggtctagggtttaaattctacactctgtgcaacatattaaatgacttttgattatgatcatgtgtaatgtgttaagtattcgtttgggactgtgatatatatgtagtgtaacgtgcttgttaggttaatgtgtatacaatgacgtttatccctattttgtgtcgaactagatcataacctgtgctatacaacacgggcattaatattttgtataaattaaattgtatattttgtttgaattacataagaaatagtataatataaaagtgatgtcataatatttttcaatgtttttactatttgcatataatgctgcattggattgactttgtttaaaaatattatttttataataaatacaacatatgtagttttaagtaaatgtgtaaaaattttatacaagttgttttggtaagaaacatgtttcctttgtattagaagatctaatttttggtctaacttagaattagtctttgtatagtattttggttatatttgtggacctaatttgggcctatatagagctgacgaaaaaacggacccgataaccaacccaatacccaaaccaaaaaaccgggttttggcgggttaaaattttaggaaattccttattgggtagagttttagtaaacccgtggatatccgattggtccagaaattacctgttacccaaaaagagtattcaaaaacccaaacattaatttaatatccaaaatattaattatatttaatcgtaatattatctaattatctaggattataattataaatctaaatatatcaattaattttggacctaaatatccaaaacaactaaactattcaaaaattatatgttatgtttgtcaaaatttagtaaaatatattcaaatataattaaatttattaaaacttaacaaatttaaaagttttttttgtttggagacccgctatctacatacaaatttcccgtttctatttttttgggtatttttagggtctgaaactttttatccaaactgacgcaaacccaaatggacccgacccgaaccagaaccaaatatttagaattattctattgggtagtaaatcatatacccattaatcccaaacccgaacgggttctacccgaacgggttctacccgaacgggttctacccgaacgggttctacccgaacggttctacccgaacttgaatgggttactcatatgcccagccctattctctgatttaattatctaaaaactcccaaaataacatatgttttgctgtctacgttttattcgaaaagttttacatcctcttctgccaaaatcatttcatgagacatcttaaaacccttggaagaatgattccatgaatgaagaaatcctaatttgaatataccaagaggttttgaaaggttttaagtttttgataggtgtgtatgtgagaaggtacaaacatcgtg

SEQ ID NO: 1979 - DNA, 1081 bp, Arabidopsis thaliana landsberg
tttttttttcaattatcacgtttattttagaagataattatggttagctctccagtgtttaagttctttccatctctccaatcacagataaataactggactataaaccactgcagacgaattatatatctaatattacaaccaccaccaaatcaatacgtaatattctcaaataaatatgtcatagagcataacgacacgggatcgttcaagtaagcaccccttggatgttaaaagttacatcttttcctcgcagacgaacttacaccgttttggcttcaatcagaggaacactttcacttgctataaatacctctcctattcttgactctaccaagacaacccaatcgcaaaagaaaaacaatatcctctgttttctgttgatgcacgaatcacacaagtacgaaaatgggatctctagggaaggaagaagaatctttctattaatgacgagcccgcgacttaggcgaattggacggattacaaaggatgatttcatcaacaagcataaatggagtaagaacgagccgattgtagatgaaagacgagcttgaggccggaaaacgatcttgatatccgacgaagaatagagtttattcgttttatagctgaaccttgtaaaaggctgcctacgtacccttaggaagggatcaagccacacgtagttcatatcgcgataaacgagctaggccattactggaggaaggtcgtatgtcgagttaggcagttttagggatgattcggcggataagtgacgagttgaatggcttctcgagacgtgcgagtaggttagttactttgggcggtcaagtcggcgagacacttcggacggacgagtaaacgagctactcaagatggatgggcaaacgaggtacttcggacgggtgagctgacgagctgcttgagacgggcgagctgataagctacttgagacgggccggctggcgagatacttcggacgggtgagctgacgagctgcttgagacgggcgagctgataagctacttgagacgggccggctggcgagatacttcggacgggtgagctgacgagctgcttgagactggcgagctgatgagct

SEQ ID NO: 1980 - DNA, 1163 bp, Arabidopsis thaliana landsberg
tagtgatgtggaatcaatggatccactacatgaggatgcctgttactaaccagtttccttcttatatgtccatgtcctcatatcacaaacgacaagctttcggtgagatttgtttcgcccttttttacttgtacctttacagctaaactcagatatgatgatagctaattagatgatatgttgcagtgttgtatttgcagatgaatccaggcgggataacgatattcgggtggacagtagacaggcatttgataaacacaatattcttcattgagctctctctagttacttttgtactcggcaagactgtagttttcggtactgaatgaccaaaaaaaaaaagggttggtgtatcatgcattattgcatagcttttttaccttctgccatatagtgagattcttcaattgataggagaagatatacttacatgagcgtctcttaactttttttttttttttttcccgcgagcctctcttaacttggttacgtgaagagtgtacaaagctatattgtactagatggaggaggagtttcttgatcttgatcctgttgttggactcgtcgtttttgtaaaatccatacttgttcactctcaaaatatgtccgaacatttggattttttataaataatatcatattttatggcaatttgcaaatttataacatatggagtcaaattgtaaattatataattaaaaggtattagtatataaatagaaatagaatatttctaaaaatattcttttttagactagaaaatagaaatatacattggagagaaagcaactctattttagagtaagatatagagctatacattggagattgtcttacaaaacaagcactgtcagaaagccatagcactaactggccagcctagcttgtgaacacattaaacctgcaaggattctcagtggcgaaaggaggaaaatcatcttcacaaatcaccacggaccctcaaagtgaataaagaaagcatgaatgatattctgagatacaaatattccaacctccgcttaagcagcagccctcgcctaaaatgtggtaattccaaggtatttgagaatatcaaggttgtattccaactgctatcttcgaccggtgtgctgtacttcagccaaacagaccgccagacccaagttcggtttgcgttaattccc

SEQ ID NO: 1981 - DNA, 532 bp, Arabidopsis thaliana landsberg
tatctaaatcacataaatctaataatatttacgtacataaaattatttattggaacatacatggtacaatattaaaatgagtttaaaaattctctaaccactatctacgtattaagttattatgtaagttatatgtatacctatatattttaatataaattatgcatataaaatatttcaacgaattgtattctgattcaggtaaaactgatcttccaatacttgcacaccattaccattcatttcacatctaccatgcctatatgtattcgtgtatgtaaaacattcacctttacataattcaccaggtacatagttagtagtgtacgtacatattctttgataaatgtacgtactagtgtacgttaacttcgattttataattgcaatttgggtaattgaatataaaagtctaaatataatttatgttacgtatataactatattttggatatccattcgattctctgtttgctttggataaattttggtttttcaactatggttcacgttattcacgtatagaaattta

SEQ ID NO: 1982 - DNA, 1816 bp, Arabidopsis thaliana landsberg
cttttggtgatgtttatacttttacctccagattagcagcaaggagccagcttttcctacaagtctatgagatattgtctccctttattcaggtcagtgaaaaggttccatcgacattataaatcactacgaaagaaaaaaaaagtcagaatttaaaccatggatacaagctacatcctgaactgaatcatttgggaaaattcgaaattggcaaagtaatgagacttccttctttgcataggcctcgatcagtgaacactatggaggaagcttgagtataccatgaaaggtcttcactgaggttggactgaagtctggctggatgctataaaagaatgtatacttgcaggtacatttaccttcgtcccttctgatcggttaagattcattgtaagtgttatagggtgaaacattgttgtggtccttaccaacaagatctgtgaatagaactaaacttgggatttaactttaataggacaatgtggatcctgaagggcatcatggtgaacgcacacggacaatacacgaagcagcttaagcaaaccaaactcgggaagatttttgggcaatagaaggctagctgctgcaaatccgcgtgtgaaatggagtctcgaaagcacttattgtggcatttgcacaatgagatatggaagtgattcaaatctcaaagtgcagagccattaggagccactgcttttctctgttcatagaaatgtaactgaacttgataatcatttcttcccatgacacgagctaatatatcacctagttccttgttcatgaattgtctttatttttaaaaacgataatttattctctggatgaatgaacaattgtagaaggataattccccaagtaaatttttttgtttgttaaaaaaaaatatttacgacaaaaacaaaggatacatattctctaatctctaatattttgtaccctatatgaaatcagtggttggtaacgtcttctctcttcaaagcaaaataaaatccaacatttgagattctaactcacaattattaacgtcatttatgtttactaaggaaatgaatttttcgaacttccaaattatcatcgaaaaacggtaaatatgtttttgccttttgatatatctcacaagaaaatctcaacttttactgtaaatctttatcttaaaccccaccattttctcttaagaaaagatttcaaaactacaaacaaatcttcataacattttctactatgtaaacacaaacgcttcaattggcaactttgaatcacaataacaacaataacaacaacaacaaaaagatggcagagcacgacttctctcttaaggaaacatgtcccaaaatcggcggccgaagatcaattcccggcggtgacatgctaacgtcatcatttgacctcgtcgaacgcatgaccttcctctacatccgaatcgttaaggctcgagctttaccttccaacgacttattcgttgaagtaacaatcggtagatacaaaggaagaacgaaacgtagcacaaacccttaccctaatctggagttcgacgaagttttcgcctttaatagtgatcgtcttcaaggaaatatgttggaagtgaccatgaagatgaacgaagaagagattattggacagtgtagattcgaggtggctgagattcctacacgtatcccaccggatagtccattggctccacaatgggataggttagaagatagaaatgcgaacagatttggagaagaggttatggtatctgtatggatggggacacaagccgatgaagtttgcctgaggcttggcattcggattcggctacagtgactggagaaaa

SEQ ID NO: 1983 - DNA, 549 bp, Arabidopsis thaliana landsberg
  unsure (1)..(549): unsure at all n locations
acatgatgtaactcaaccgtaacatataatttacacaacctttcgtcttccctgaatgataattcagtcgtgacatgtaatttaacgaacctttcgtcttccttgaatcatataactcaaccgtaacatataatttacacccatctttcgtcttcctttgagcatatcacgcagctgtgacattttaattgaccgaacctttcgccatcccttaagcatataactcagccataatgtaattttaccgagccttacgtcttctttggaacatataactcannnnnnnnnnnnnnnnnnnnnaaacctttcttcttctcttaagcatataagccagctgtgacatgtaaatattctctgaaacaataagagacgcaacatttcgtctaactttatcattgagcaccaacttcacaagtttgtcctgcgttggttccgcatcaatctgcacaactctacaccctatttcatcggtgttaaatacgtaacttgatcaaccatatcgggagaaggatgatagaaatagaagaagatgagggagacgatgaggaa

SEQ ID NO: 1984 - DNA, 625 bp, Arabidopsis thaliana landsberg
aggtatcaatccactgatacaaatcaggcccaaattcatagtttgatcaattaaaatatgatttctgggctagtgatacccaaaataaatcacccatgtacatgatctaatgctcaaatcgaatcaatttacaaatccaaattttataaagacaacaattctaccccagttccccaacgtccgttcttccctttaggtctcccaaactaaggttacttgtaagacaaagtagaatccttagattactcagtgagcccgggtttctaacaaataacaaaaatctcaatcccaatccccaatcaaacaatcaatacgagtaacctcgattgagtatattcgacaagaaatcatgcaatacaaacaactaagcaatgaatactctttacagagtatatgcatcggacctatactatacgatgcttattttccacaaggcaatgtctctgaccgctatacacaaagtctaaaacgatcacatcacttccccaatccaaaccgtctacaagggaccaactcccttacggtaaaacttttactaccccgtcggacagtctggggtggtagtgaaccattccgagctattgggacaatcacgatatcgtcacaccttagtcatattaatgac

SEQ ID NO: 1985 - DNA, 1491 bp, Arabidopsis thaliana landsberg
  unsure (1)..(1491): unsure at all n locations
accatattcatcatcctcacacaaatctgatctctttcttttgccgtttctttccaagggtctcccaaaatcatttttgaaatcctttaatgattcaaatatttcttctccagtttgaattctactagttgtcccttcttctacagtgttgtcaaaccagcctcttctacgcctgtaaggatgccctggtctgagtcgttttctattgcttaagtacacatgttttctactgaacttcaaccacctaaaaggtgtatctttcccacagacattacaagcttgctttcctttcaccttacaaccagccaatgtccctaaggctggatagtcactgatactccacaacaacatagctctaagagtgaaactttcctttaagaatgagtcataaacttgaataccatcactccacaaatcctttaagtcatctatcaatggggctagatagacatctatgttattgttgagtagggatgttaatgatgggttaaaacccactgggtacccgaaacccatctaaaatttcaaacccattgatctactttttgtataaaataaaacgtgggttttaaatgggcaggtcccatttcgttaaagtcttacacgggttttaccctactgggttattggtacccgtgggttttaacttattattttagtatgttaaaggcccaatagcccaattgccaattctattgagaaaccctaaattcctttttttccccaaaattcagccaccaccacaaccgtctctctctcttctctcctcttctctccggcggagtcaccgtgagagtcaccgccgtctacaccgccggagtcaccgccgtcttcaccggcggagtcaccaccgtaagtctctcgtcatctccttgaaaaatcaaactctagtttcacttgatattagatgtcctttctctcctttgattttgcgtttttctcctagcttcagaatatgacgaatctcatgaataatctaatttttagacttggtgataagtattcaaatgcgtgacttgctcttaatcagaatttgttacttatatgatttaattattgttcattgatggtcaagtttattctctaattaaagttcatgagtttttttttgtagaatggattcacaaactagagaaacattggcacatttggaggctgagaatgagtatttggcaatgaatgaggaggctgaaactcaaggagaagcaactcaaagtgcaacacaatctactcaagcggctacaacggtatataactctaacaaacgcttaaagtctgatgtttagaaagagtttagacccatcttagaattagaagaagatgggaaacagagaggtcgttgcattcattgtgataagaagttaatcattgaaattagtcagggaacatccgctttgaaacgtcatttacagatttggcaaaagagacctcaagtgcttagtgaanaaattgtgtatcgatcacaaagtagatcgtgagatgggtagtgag

SEQ ID NO: 1986 - DNA, 807 bp, Arabidopsis thaliana landsberg
  unsure (1)..(807): unsure at all n locations
atgtttttttttgctttcatgtttgtcatctcttgctgttgcaagaaatttttatttaaaataaaattcaacttttatattacctatcattgcatatagtagtttcaatatatttttaaaactactaaccatccataaaaaaaaaaaatatatatggggcaaaaaataaaaatatgaaaaaattaagtagcaaacatttgaaaacaatagttatttttaaatacaattatacaaaataacaaaagatgagaacaaaacgaatgttagaaacaaatcaaatttataaaaatatgcatgagtaagctaaaatggtgctcttctataatcctttacaacttaccaatacgcaagcaaaaagtatatataatacacctataaattaggctcagaataaagagaactgaactatgcggtttcatcaacacactcaaatcttctacctacgaataaaaattaacaaacactatgaaatatatagttttcatccttcataatacaatctctcttataaaataacaattctaaaaaagtgttataaactaaatatattagaaattttttttttaaaaaaaaataacaaaatcccgcgcgtagcgcggacactcacctagtatatataaaatctcaattcgtgatcctacttttgttgataaacttgcaccttgttgaaatcctccttttaaaccgacttgctntatcacatagtttacgactgttgatatctacgatatacagttatcaacacggttatcatatcggatagtgatgactaccacctttgataactccggaaaatagcattctggg

SEQ ID NO: 1987 - DNA, 575 bp, Arabidopsis thaliana landsberg
  unsure (1)..(575): unsure at all n locations
aatgcagaaaatgacataatcaaacaaagcataatttttattttttcatgaaccttggatagcattcggtccaagatgtgtttccaacgtgttatttaccagcgaccaaatgtttcttcccattgagcagtggttccagagaaaccagtatcaagcttcttacctttgctacggtcagagtctgtatcatcatgctccaagatcttaccaatcatcttagtcaaatcattgcaataagagatagcatgaagctgatgtgtgtgacagataagatcaatatcgtaagtcggaacacagaaaagtttaatcgacctttctcggtttatcttgatcaagtagagaaatgctttgtatctagccacagcttcttgcaaaaagacatcattatcaacatgagctcttgaaacctgcaacaaaacacaaacaaacaaaatcaattacaaaaccttgcaacaaagcggtttgggacaagaagctgactatgattttacctggtagtgaaatgggctntgtcttggcaaaatcaaagtcataaggctccgtatgatacaatcttttccataaagtttcagttt

SEQ ID NO: 1988 - DNA, 459 bp, Arabidopsis thaliana landsberg
  unsure (1)..(459): unsure at all n locations
aaatgcaatgnngataaggaaagggaaagaatnctatttgaagnattctaaagaagnnagaaaaaaagggtctagtggaggtttttggaatgttaaacacataatgaccttcttgttagctaaagaacaaggattaaaagcctttgttttaaagattaaaaacaggaaccttagttgttaaagatatgaaaaagagtttaaaagattcacgagtgtaaagggtagagttaagttcttgtattgggactagagttgggattaccattagagcttcactgttatactctgggtagatgtaatcttatctctgtatgcatagcttgggacttacctttagctatctactaaagctcaatcatttttttagagatcccctcttactgaagccctattctgtaagggaccatctttgtctcctgacccttacctttaccaaatgagttcattgatgatgcattg

SEQ ID NO: 1989 - DNA, 519 bp, Arabidopsis thaliana landsberg
gggcaaaagcccttggttttagaatgttataaacaagaatcttagttgttaaagaaaaccaaattcgctttatgtatcaaagtgttgaggaagcttctcctagagttaagaaaaaagaaaagaatgattagaaaaagggcttaaaagattcataaatgcaaaaggtagagttaagttcttgtattgggattggagatgggattaccattagagcttcatttgatatactctgggtagatgggatcttatctctgtatgcatagcttgggacttacctttagcattctactaaagcttaatcattttttgagagatcccctgttactgaagcctattctgtaatgcaccatctttgtctcttgacctttgaaaacatgtgtaggtcgagcatatgagtcggattgattgataatgaggcatggctaacgtttttaagtagaatttgatcatattgcagcttagaactttcaacttgggcattgatttcatctggtttatctggtgctttggctctgagtc

SEQ ID NO: 1990 - DNA, 421 bp, Arabidopsis thaliana landsberg
gatttttctcacacaggtgagataaaggtgagctcaagattggagtacccaatattctatagcaactttatgaggcatcaaaattcacactagaaccgtatcgtggttgatggtaacatttattacaaagggtccaggatcaggtcgctatcttggaattcgttcatgaatatcgctaccatgctctgaaatcatcataacactgcatttattcgtcaaattcttagtgaccattgtcttgacataccttcttattgtgggagagagataaatagcttcaactagaggcatctcaacaatcagcttatcaaccatagtcttgcatctgtaaatcatctaaggcttgtcttaacgttttaggactcttggggaaaggaattcaccgatttgctgacttggtttcagttataagttgcacatt

SEQ ID NO: 1991 - DNA, 551 bp, Arabidopsis thaliana landsberg
tatctatgctttaggtataggattttgagtctttatattatttctttacaccagtttcggcccagcaaaagtcctaggggctttcgagtttacagaagaggaaatttgccccagaagacttccctatttgcattattagtcccttgacatttttagggtctatttatattgtttctagacctagttttcattatcaagtctttcatccagttttcattatcaagttttctacaaaaccctgttactgagagacataagctaatcatcgattgttttcagagtttcattcagatcattaatacagtgaagagatcccttctttctccttctctatttactgcgtttatgctttcacactcaaatatgttgtttgcttcatccaatatgtttgagtaatctgcttgttaggaatagggtttctcattagggattcatatggtttagtagattgttcactttgctaggttatctatagaattcttcatctttaattatgtttaatgctagatttagaataattaactagatcttgaatccagacaatagatatg

SEQ ID NO: 1992 - DNA, 1433 bp, Arabidopsis thaliana landsberg
caatctgtacaaaagagattacaaatatgcttcatacacatggtgtgatcaaagctcacaatgccaacaatcatcaacatatacttaccgttccagggccttccgtacatggacctccgatcaaagctacaattctagccccagttccaggcaagcaagctccaagcaatcctgcagctacactcaatgccacgcctgtacatcgttgggaccgatgacctggcttaacaggccactgatcactttgtagctcatccaaaagctacataccaaacatcattcacacaaagatagaagaatcagatgaaaattttccaacttgacaatcaaaagcaaagtcactcaccgagttgagtgtgaattcgcactcggaagcaggcaacaagaatctattcaaaccagaactcgggaagccattttgaggtcctttagaacctcctctcctagaagaaccaccaagccccaactgatccaaaatctgatctttcgaaatctctttatctcctttaaaaacaaaaactttagacatctcagagaatcccaattcatgtacatgagcctgagtaccaaacgacacaaatccaaccaaagcattctccggaagcaacccaatcgcttgtttaagcgccgatttagcaaaatccaattcttcttcaatcatacaagtatcaagaacaaacacaaacaccggcggatccaccagaccttccccgttggctacaggcggaggaagagtgtattcaacagtagtgtactgaggataaagctcaccaggaagattagtctcagagatcacatgataatgaggcgggaaatgattacgctgataacaaaacggacagatccaaagctttgcggtgaaatcgacttgtgcgtaagcgtttaacgcagcggaacaagtccggcatcggagcggtgcgtaaggaagagtagggatatcggcatgtcgccggatcggagaaatgcaagcggcgagtgggatcacgcatttgctagcttcagctttggaatgaggccagacgttccatgtcatacgaactccatcgattccttctagatctgtattcgcagtctccgccatttgttggaagcttttagatcagatcagagaatttgagtttttttttttttttttccttaatgaagaaattgaaaaatctcaaaattctttggcgttattttttaggaactctaacgttgactgagtatcaaatatttctatttttgtgtgtctatactcatttcattttagttaggatcgaacggagatcgtagaaatagaaatggtaagtctaattactgatttgtattcctaagctcaaacttgagttttttttttctaaaataatttttcaaaactttgctcccatgatcatctttagccagtttcaccaacttatcttcatcacacttcacaatctccttcgagaaga

SEQ ID NO: 1993 - DNA, 734 bp, Arabidopsis thaliana landsberg
ctatttacttacgtatggcacttcagtactaagaatttcttcattgttttcccgagggcggaatggatctttatccacatcaagtgatcgtacaaccattgggctactcatggggtgtgctccatccatatagaatcttttgagaacattttctgtatatgtctcttgatgcaccagaattccattctttaggtgtttgatttgtagttccaaacaaaaattttccaagatctttcatctcgaattctttctttaaatattctactgtgaaggaaatctttgcaggagttcccataatatttaaatcatcaacataaactgcaattataacaaaggctttctgaaatctttttataaagatgcatggactaacagggtcatttttatagacttcttttatcaagtactcactaaggcgatatactacaagaaaacctgcaatttgcaactccaatattagtcccaaaatggttgcaaacaaggtagttacgactacttagtgacgcttattagcgacgaattgtggacgcattctggtagtcgtaaatatgcgactgcagatatgcgactaaactgcaacgagatacaccaaggttcggttcatacactttgttacaattgagtcggaaaatagtcttacctttttgcgacgaagttaaggcgttctataattcatcgcaaaatcgtaatgcttttgcgacattggtcatatttgtataatttgatttagtcac

SEQ ID NO: 1994 - DNA, 732 bp, Arabidopsis thaliana landsberg
aaaagaaagagactaattccctcctccaaagcttgttgaaaaagcagagtagctttctcaaagtgatctctagcctcagtttgatcaggagtcaaaaccccatatgaagtatgagcatccccaatgcaccaaagagcatcgtgcttctttggatagattaacaaggcctctcccagagggagtatatataagaacaagaaaactgaaatctttttttgtttcgcacatacaaacacaacaagatctgtctgtgatgcagctcattgcatctgaagaaagaagcaagaaaaaagcaacaagaaaaaaacagaaagaaaaaaacagaccacaagggaaccaacgaaagatctgtgattctttcatctttagtgagctcaacagcttcaggctcctgataccttataaagattccccgagtaagatcactaaatcctgagactggtctcgaactaagctctgtcttattattcttcatcttcttcttccccagacgaagcttcctaagccaactccagtggcctgtatgtttactgttttcaacttgagttaccttaaacgcttctgcttctccatctatgtggtggtttctgttgcctccagtttcacagtagcccacttcaatgccactacttaaaaagatctttacaccacattccacaatctcgacatcactggagctgaaatcaaacagaatctcgttcggagtcacgtccataaggcttctgttttctt

SEQ ID NO: 1995 - DNA, 1108 bp, Arabidopsis thaliana landsberg
tctttcattgcttccactcattcatcaatgatgcggggtccggttctgtctccgtctcgacgacctcccacataaaagataagttcaattactttcttacatattagttaagcttgattgacattttcgcttatatcactagctttcatcattgcttctctctttctacgcaaagatgagatcttctctaacgaacaacatctcaaatgtagattttcatccatcgacgtttacaatttcggatattcagatcgtccatgtcgttgatgtcatcatctccatctccaaaccgttgagataagtgttatcgattataatctaacaaacatcactcaatcatatacatgcattatctgttatacctttttgcatagattttcgaaacactcgtctatgaaaaaaaaacaaacaaaaataaaaacaccacgagctcggtaatccgacctctccattagaacttgaactacgaatggcttgatcccttcacagggtacgtaggcaatccatcacggatgcaactataccttctaataccctaattctttctctgttcttgagcaaaaccctaatgtatttcataagagattagaacctcttttgtaatagagtcttggatggaatatctaatgaagagaaattactagatttgttttcctccttaaacaaatatattgtgtgaatccttgattcaacaattggcgccgtatgtggggacgaaaaagaactctcttcgcatatcattcatccaagtattcgatgtacgctcatcaagccaagacaatcagatccgtctacttgtggggaggccacctgtcaaggttcaatgaaccatgtgacgtaacctgtccacggattgccccggagatcagagttccagggaatctaactgtagctcgatcggatatctctgctcagagttatcgccgtttttctgaagtcgatgctgtctgtttcttcacagatttctgaagtttttctgaagtcgatgctgtcgatgctgtctgtttcttcacagatctgtatgaatagaccaatcgcccacagagtcatatttttggaaaagtcgaccttgccttaatctaagatatatgctgagagatataaacgt

SEQ ID NO: 1996 - DNA, 339 bp, Arabidopsis thaliana landsberg
  unsure (1)..(339): unsure at all n locations
gattcatcttctgagttgtctacccctcaagtgaaagaaagagatgaaagtagtgactttgatcaacgtatgctgtctgcttctcagcctctggtggcatccagctcgcctcagcagagttcctcttctggtatgatgtcnnnnnnnnnnnnnnnnnnnnnnnnnnnnnaacatcagttttggaaccagccatctaagcctcagccagttattttacgcccgcatccattgcccagcaacaacatggcagctagcttctcaaggcaggagaagacaaaccaattgtcctcccaaaatggtgacatgtcattaagtgggagggacatggtgaatatgcat

SEQ ID NO: 1997 - DNA, 1229 bp, Arabidopsis thaliana landsberg
gtgacattaaacatcattttaacctcgtccggtgaaattaaatcttaataaaattttaaaatcattaatatttaaatatttgttatagagtttcacttttaaaagtttaaatatataaaatatttttgaaaacttttaaacttttagttatttaaaataaaggactgaagtaaaattaaagttcttgctcattcgtatgactcttaacgatttcctcttttttttgagcaatgtgggacctttaaaactttttttttcatcgatggagtattatatgtttgttttaaaaaatttgaatttcatcagatgcgaaaaaatctaatattttattaactatatgtgttttatatataaactaaaagcaaaattagatatataaacaaatatagtgacagaaaaattagatatttatatttaatgtcgatatatagattttaggaaattagcctcaatcgaatatagttcaataaaaaatgatttcattgagaataaaaatttagaaaagagttaattcaactaatcaatgcaattcaacaaattgtaagtttttagttctaaattatttgtatgaaattaaatttgtaaggaataatattgaaattagtaaataggtgagggatttttggccaaaaaccctaccaaaaatgtatatgtagataaacagtgggttaaaattagatgtgatgatttaaataaggattgcaacctaaatatttgaaattttgattttgtaagtaattttttcattagaattctaaaatgaaaaatatggtttctatgtacgggctgaattttgtaatgttatttaccaaatatatgtttataatatattcgattatgctaaattctgtaattagctcaaacaaattcctatttcaacaactaaaaaattgaaaattcaaaaatgacttcctaaattaactcaaagtaatagctaagttccttaattaatatattctagatatggttcatttataatatgttgacttttgatctaacataattatatgcaatcttattttgtggttgtggatgtcggatctcgtttttggtctggcccgcaatttgatatccaggaaaaggctcagtctggcaagagggcccgttaaaagcccagcagttcaaaagccgatccgacttcaattcggtaacggaaggatctcggagtgaatgacaaggcattaatgacccgagctggaggagtcgtacgtacgaagaaatggagtgag

SEQ ID NO: 1998 - DNA, 1055 bp, Arabidopsis thaliana landsberg
caaatgtaggattccatacaacaacgtttacaatctcagagattcagatcgtccatgtcgtagatgtcatcatctctatctccaaaccactaagataaatgttattgattataatctaacaagcacagctcaatcatatatatgcattctctgttcaaattttttcataaacttgcaaaaacacttgtctatcgagcaaaaagactcgtctaccgagcaaaaagtctcctctaccgaggaaaaaaaaactcttctatcgagtaaaaaaagaacttcagcctcttcatcataacttgaactacgagttggcttgatccctaaaaagggtacgtcggcagcttgtctccggacgagttcagctagcccccacaaaaatttgaccttcatttttctacttcaaattttcttgaaattcaatttctaaatctttttactttgaaatattttaacgggcgacggcctattattttcaaagtttcatttacaccacttcggttacagggcgctatataaatattcaagataagaatctgctcggatgtttttctgagcaggctatgaattctatcttctgaaccctggtaaaagactgaatcagatcgggtcgcaaccgtgggtattcaagtctacaaaagtccagtaactctaaacacactggtaccaagctaaccacctcgggcatgaaagacaaagcttcgcccgaaaatgctccaatacattctctcctacaaaacccagtccttactggtatcgagccgattacctcggaagccaaaacctagttctaactttacactggtaccgagtcaaccacctcggaaactaaaactcagttatcataaacattggtgctaagcgtttgtctcggctgtataagtccttccgacttaatctactaacacctagttgtcataaacactggtgtcgagcgtttgctttggctaaatacagtttcttatctgctttgggctcagtgtttagaaatccagttatcccgaataacttggtactcagtcgttcagctcgaaacaaaatatactaaacccaactttgac

SEQ ID NO: 1999 - DNA, 596 bp, Arabidopsis thaliana landsberg
tctggaacgcgaatcaagcaatgcatcatcaatgaactcatttggttaaggtaaaaggtcaagagacaaagatgggcccttactgaataggcttcagtaacaggggatctctcaaaaaaaaaatgattaagctttagtagaatgctaaaggtaagtcccaagctatgcatacagagataagatcccatctacccatagtatatcaaatgaagctctaatggtaatctcatccccaatcccaatataagaacctaactctaccctttacattcataaatcttttaagccctttttctaatcattcttttttttttctcttaactctaggagaagctttctcaacactttgatacatctacaacaaaggttcctgtttttaatattttaaaaccgaggacttttgcccttcttcattagtgataatattgtattttactcattttaggtatgtgtttatcatcatttagctttgcatttgctcattgtatcatgtcattttgcccattttaccttattgtgcatacttaggcaactaggatcgtcttgcattcacattgcatgttttggtgtgtatcaggtgtagaaggagctaaaaa

SEQ ID NO: 2000 - DNA, 555 bp, Arabidopsis thaliana landsberg
  unsure (1)..(555): unsure at all n locations
gagaggaaccccgtaatcatccatactctcttgagtataagcaggggctgaagttgaggcgggaagattttactggttctgtccggtcgagtagttggtctagcgtgttgaagctcgtctatgcctacttcttggctctctcaacttggagatcacttcccgaggattaaaagatgaagttcggggttggtcgattctattagctctccttgcacctggatagttgcaacaaactctttgtagctcaataagtgatccaaaagaacaacactcagcgaagtgtctgcactatcacccgccatcttcctcccatcttttgtatcactcagaatgaagaccaaagattggtctatcatgcatagctcctcttcaccaacaaatccggtgaccttctttnggaagagggtgttggcgatgaattgtggagtattgtaaccaaggcctcctctctcttctttctctgaatcatcaaccccgaagtagaacttgagggttgccaggagttggcaactctcctctttatatccccacattggcagctcatgaatgttcaag

SEQ ID NO: 2001 - DNA, 594 bp, Arabidopsis thaliana landsberg
  unsure (1)..(594): unsure at all n locations
tccggtgcgccaggcgactgaaggcaagaattgccttcctaggaatgctctcaacggctcctagctgccttggggctataaaagggacccctaggcgcatggaggagataaccaacatcctttgagcattgttgatcactcacacttcattcttgtgcacttgttcgacattcttagtgatttgagctccgttctagtgagaacctcgtgatactctcttgagctcaagtctgggtcttgtgtgtgtgtatttgctgtgattttgtgtctcgtgtgcgttgctcatccctcccttactctgtgcttctttgtgaacatctttgtaagggcgagagactccaagttgtggagattcctcgcaagcgggatatagaaaagcaaagcaaaacaccgtggtattcaagtgggtctttggaccgcttgagatgggttgattgcaacccacgtccgttgggacgccacaacgtggagtaggcaataaaccactgtgccatctctgtgttgatttctttgtggttactgtgttttgctaagactcctctctagccacttggcattattgtgctactcctaatcaagttntgtggcattaag

SEQ ID NO: 2002 - DNA, 1183 bp, Arabidopsis thaliana landsberg
  unsure (1)..(1183): unsure at all n locations
gtctgactctcctacaaagaagcagaaagtctctcacggtgagggtgctcaatatggtgtaggagatgcacgaaagaagaagatgaagaagaagaagaagcaaattgctggtgaatatgacgaggacaaggatgaggaggatgtttgggaagatgtgtcggtcgtggatgcggtgtctaaattaatctctcccttaaactcaaggtttaacaccgttgatacaagcatcaaagaaatgtcctcccgtatggaggtgattggagatcaagtggaagcgaggattgatgcaaagtttgaaagtaggtttgaatctattgagaatgagttcaaacagatgaaagagcatctgaagaccattggagtaggccttactgactaaaatgcccaagcttactcaaaattattctctaaagtgaaaattagagatatgtttttaacagttgatcaacaagaaatgccgaaacccaaaaatcaactaacaccaaaaggtccaaagaaacctccaaataactactatgttactagtcctcctcaagtaagctaaccgttgagttatcaatacgctatttacttacgattgagttataattatgttatggctgagttatcgttatgttattaagttacgaccgagttataattatgttatacggctgggttgtctttaccttgtttacttttggctgagttagaactttttatttacttatggttgagttatcgttatgttatacggctgagttgtctttatcttacttactttcggctgagttattattatcttatttagttacaactgagttatcattatacatatgacttagttatcgttattttatgcttgagttatctttacgtttatgcagtcaaaggaagttgtagatttggtggtagagaaggatgtggggtcagtaggaatcttgatggcgaatttgttaagaccactgatgtaaaccaagctgatattgatttcannnnnnnnnnnnnnnnnnnnnnnnnnnnnnnnnnnnnnnnnntggcgaggagaaattctaaagcgaaggcagattcaaagaaagaaagctgtcgttaaagagaaaaccgtaaatgagccaaccgtcaaagagccagccgccaaaaagaaaagaggaagaaaggcagcggcgcttcctcctgctccactcacaaaggtgagactaagaat

SEQ ID NO: 2003 - DNA, 878 bp, Arabidopsis thaliana landsberg
aaatacaagaaagggattgagaatggtgttgcagatcatctctctcggttgaggattgataatgatatactattcgatgactctcttcccgaggagcaactattagcaattaggcttttggatgcaagtcatgagacctataaaaaacttgaggaggtgaagacattgaatgaaaatggcccatggtatgcggattatgttaactatttggcatgtggaaaagaacctccaaatttgagtagctatgaaaagaagaagttcttgaaagatataaaccacttctattgggatgaaccatttctttatagtctatgtaaagataagatctatagaagatgtgtctcgaaagaagaagtagaaggaactttgcgactttcaagacggttaccaaggttctacaagcgggtttatggtggccaacgatgtttaaagacgcacaagagttcatttcgaaatgcgattcatgtcaaagaaaaggaaacattagtagacgaaatgagatgccccaaaatccaattttagaggttgagatctttgatgtatggggaatagattttatgggaccatttccttcttcatatggaaatagctacatacttgtggcggttgattatgtgtcaaaatgggttgaggcgattgctagtccaactaacgatgcaaaagttgtgttgaagctattcaagactataatatttccaaaatttggtgttcttagagtggtcataagtgatggagggaagcatttcatcaacaaggtctttgagagtctactcaagaagcacggagtgaagcacatggtcgccacgccttatcatccgcaaacaagtggtcaagttgagatttctaaccgggaaatcaaagctattctagagaagacg

SEQ ID NO: 2004 - DNA, 761 bp, Arabidopsis thaliana landsberg
  unsure (1)..(761): unsure at all n locations
agtaagttcatatatcctcatcattacggctttccactttattttgatttatatattattgttttatttttgcaggagtaaattataatacactaaacacaaaaggaaatatacaataactccaatagctcaaaagtttattgtccaacccatccaagagctgccgcaaaaaataggaaatcaggttactaagttatatacgcaaaaaatatgtgttgatattgatattgtctttgcaggaaatttatccaatactaaaagaatatcatcattacttcgagagaagaccaatgatgaagcaaccaacaattatgatattgttaacaaaacacatgttcgaaggttgtctgctgttaaaagaatggccagaaaagatcaatctcatcaggttataaagttatatgaattagatacaatacattttagttaatatttttatttatcttcatttggttgttgtttttctcagtaagatcaccagacttcttaactcctaatcaaactaccccaaacttaaatatattgattggggtagatgactctggaaatgtcttataggatataacaaatatatcgggacgttctaggagaggatccaacgtctataccattagattaatgtcgaataagaagaaaagtatcaaatgggcaacgttcgattcatatttgaaaattagctatttatattatgttntactatggttggctaaatttcataagttaacagaattatattatacttcataaaaaattaatatttt

SEQ ID NO: 2005 - DNA, 715 bp, Arabidopsis thaliana landsberg
gacaacaatggagataagaagatattttagagcaaaagctaaagaacaagaagctaaggacaattttggactgaggtatcaagaggagtgtcgatccacacattcttggtgtcgatcgaccccagtttcggcccaacagagtccaagacgctttcaagtttacagaagaggaaatttctcccagaaaactttcctatttgcattattagtccctggacgttttatgaggtttatatacattgttttagaccctagtttcgattatcaagttcttattatcaagctttttgcaaaacccatttactgagagacataagctattcatcgattgttttcagagattcatccagttcttaatacagtgaagagataccttctttcacttatcttatttcctgtgtttatgctttcttattcaatcatgttgtttgttacaatcaatatgtctaagtaatctgcttgttaggaatagggtttctcattagggattcatatggattcatatgcttaatgctaaggtgaacaatcgaagtcgttaagaatgcatatttaggttaataattgatatgtcccggtttttactgatttctaacacagtttcagaatggtttttagagtctttctagtcttttcgtacgttttgagtcattccaggtacactcacacatttgggaactatggagcacaataagggaattttggaagcttttcagca

SEQ ID NO: 2006 - DNA, 1634 bp, Arabidopsis thaliana landsberg
gtgtgtattggcttgcaggtgaacctgttcagaggctcaaaactttccaggtatttggataatttgtacaaatttcagtggtacgtacagtcacatttttgttaagtatgtaatgtatatgttatagggaatggagcttggtatcccccccccctgatcttcagactgtgagacttgctggtaactattgttagctaaatatatgactacattaattattcattgagatacaatttttgatatctctttgtatatttttgtaggacttctccatgacattggccatgggcctttcagtcatatgtttgagcgtgagttcctcccaaaggtcataagtggctgtcagtggtatgttcaatgccatggtgttacttgataatttgatatgatacaagaaatattactacattgctgatgtacaaacgctttttcgaataaattttacattttcttcaaaaataaaataaaaatatttactactttggctctatggatttattcttctttctagctcttctttatatgccagttcttgtatgcaggtctcatgagttaatgtctataaacatgattgactatatagtcgatacacatcacatagatgttgatgcaaaaatgctaaaaagagtcaaagtaattttctttctcaagactgtttaacttctctcaaatgacctttagtattaaatattttccactttggtgatgattttctcaaatgtttacttaacactacaggacatgatactagctagtactgaagtttcagagctgaaagtaaattttataacaggcatgttctctattctaatcaaacatgaacaactaattaagctttgtatatattttctttttttcataatttgtagggcaatgcagagaagcgtttcttgtatgacattgttgctaatggtcgaaatgggattgatgtggataagtaattctatctttcccttagtttctttctttcttttttcactcatcatgatgcttacgaaatcaactgaaaattttgtaggtttgactacattgtccgagactctcgagcttgtggactagggtgcaactttcagtttcaaaggtcttcatactactttatagtcatttcagtttttgttttgatattcactgattcttagtagtttatagactaacagaaccaatgagagtcatagacaatgaaatctgctaccccgccaaggaatgtgagttttgtccacctgatacatatttattctgcatttgcatttgcctcttatgtaaaatcgggtgacttttttttgcagatcgtactgtccacaagttgtttgcaactcgagctgatctttgtggaaccgtctacatgcatcccaaaaaaatggtattgtaccattatcattctctctgtaccttgtctattctttctctctttcccatttgtttctttgcaggccatagagcttatgatagtagatgcaatggtcaaagccaacaatgtcttggagatttcttctatgattaatgatccttctcaatactggaaggtacacaaatctttccctctctgcatcaaaactcttttgcttgtagtttacatcatttttttctccacacaaatgcagttagacgacacaatcctcaaaacgattgaaaga

SEQ ID NO: 2007 - DNA, 1693 bp, Arabidopsis thaliana landsberg
gacgatacaatcaatgacctttaaagattaacaatctgatctgattatcacaactaaagagaagagcaattgttacataaaatcgtatatctaggacaactcacctgagttgtacccaattctgcattaatagtatcaagaggaaagcctttcaaatggtttttcttaaacttcaccttgcacatcttaggagatccctgatctgctcctgcaatgtcgacaataaattttttcctcaactatgggattgcctcgaatacaagaagctacagaataagaaaacaatttttaataacaaatagtattccacaatattaccagtattgctaacattcacctattaatataagttgtaagtaacctccatcaaaagacagaaacccgggaacgggcatatggacttctcgctgctggagactgaaccattaaaatgattcactgtgtgagcgttgggggaaaattcaaccacttgaggtgccttttccccggttttgataggcgttatgataatgctccttaagaaatacaagatcatcatcttcaacctttctttttatctttcacgtgacggtaccatttctaagagcttcataacagtactcttgaaatgcttcgacttgaaatccaaatttccagtatttttatacccaagtgtatagtttttgcaattgaagcccgatatcaatgcgtgttccgatataccatatcggattggaacgccattgacgatgaaccacgcttctttcttcctttcaatgcgcgtcgtgcgaagatgtattggaaacttggatgattctcaaaccatgccctctcggacttgctcatcgccggctgcaacttatcgaatgtattcaacacttcgtgaatatagcaccgagttgaaagcttgattttcttcacatattccgagggcgggaaatacatactcagcggtggtattgcttctgttttctcgttgatctcctgcaacagacattcattcatattactaccaatgttacatagaatcatacacatagttttatcctagtaatgacagtattatccagaaatcatacacgtagttgtttcctagtattggcagtatgacccaaaaatgcatagttatatcctagtaataacagtattatccataaatcatacacgtagttgtttcctagtattgacagtatgacccaaaaattgatagttatatcctagtaatgacagtattatccagaaatcatacatgtagttgtttcctagtattgacagtatgacccaaaaacgcatagttatatcctagtaataacagtattatccagaaatcatacacgtagttgtttcctagtattgatagtattctccacaaatcatagtattaccctgttctaccagttttacaccattcaaatacttgagaaatccttaccatagccgctggaatttccactacagtctcatcgtccatattctcatcggaggaggtctcttcccccaagcttctactactatcatctgaggactcttctccggcaacattctcctcttcttctttctcctcttcctctttctcttcttcttctttctcttcttcttctttctcttcttcttcactctcttctttttcactctcttcttcctcatcattggtgtcagacttctctccttcttccactacggtcaggaccagattttgctctgtcgtgatggc

SEQ ID NO: 2008 - DNA, 938 bp, Arabidopsis thaliana landsberg
  unsure (1)..(938): unsure at all n locations
attcatttaattttgatggtaacatttttattagataagatataactttttttatatacaatagttgttagagcatctccaacaacgaccctcattttaagaggtggcaaactttcaaaataagggtttgagggtcacttagagcatctataagagatacttcatatatagaatatgcaaacttcaaatataaagtaggggaaattaaatttaaaggatatctaaaaaaaatttgtccatctattcttttttcttgtagattagtcaaataggtttttcaaaaacaattaagtcttttttaccctcattttattttataattaaaaccctatcttttgtctcttttcctcctttattagattaaaaaaaaaaacattcagctttattattttatttccagcgaacattcaactgaatgcaccggatttggttgaggcaaatatcgctgaagttacatctataaccattgagaagtttcttggatcgttcacttcagtcacacgtctgttattgaatttatcacccttgaaggtaatctttcggggttctttgtcatcacattgtttctatatatatacactaataatttgtctcgtggatagattacatatcctactggaagtatgttctatcagctggaagagaagaagagaaagaaatagcttcatatattctcaagaacggaagacggttgaagaaggcaactttctcgacaaatcccattgaatcgaaatagctcaataagttgaaagagagacgtaaggtgctcaacggattggatggtgtgggcagggcttcaaattcatgccagcttgtgttgaaaattgatccatcttatcttggatcagactctccttagctcttagagcctcttatatttaccggtatgaaagatttggatcgtttagggtttngacttttgattttatctatcgtat

SEQ ID NO: 2009 - DNA, 1077 bp, Arabidopsis thaliana landsberg
tttcttcattttcttgtctaccttacgcattgaacacttctcctcctctatcttcttcgctgccattctcactctatctcttgctgcttccatttttctcagcttcacttcttcatcctcctttagtgtaatcgggaaatgaaattccggtatgctgatccaaaaaccataaatcatatcatcagcagtaaatacagatgcaaggaatattacagtttaaattcaagaactaaaacggatacaaggatcaagaaaaggtcaagtacctgcacccggaatatatgaatccgttatcttttgcgataaaaccatctaaagacacagcgtctccaccattgatgtgaggaagagctgctttaacttgctctgcggtctcatatacctgcaactctgtgaagactccatagaatagtgtctctctaagcccgtaacccgagcttgattgtatatccagctcctctgaagctaaatctatcatgttcacagcgtagcctttgaaaccgggtataggatctccattcggcaggtaagggttatccatggctaatctcttctgaggatcattcctcacaagtccgttcctccaaggtctgcatgttttgaaccagaacatatctggttaagcaaaagattaacacgaaatccaaatatcaaaggaagagtaccaaaatacctagttgcatcaagacaaataacaagaaaccgattggtgatagatcgtccgaggctagctgcttcagattgaagcttgcgatactcatcgcttttgggtccaaactgtgatgatttgcacaccaaagaaagcattgtgtctttccccaaatattcagacaaaaccctgtcataccaaataacttaggaaattgaagatttgccccaagtgtagacactatgaatttgatcagaaagactctggctataaaatcaatgtcacctgcttagcgacgtggaggcaactgaacctagaagcgctacaacgccaaacatttctttctgtgacagaaacagaagaccgggaggtggagcctttttgtacagacaacagaacaactgagctgcagtgtcatgatgcttctc

SEQ ID NO: 2010 - DNA, 748 bp, Arabidopsis thaliana landsberg
  unsure (1)..(748): unsure at all n locations
cactatccttgtgccacgaatgtgcctttatctgcgcatacgtgagatgtgtgtaatgcgtgtattcagacaacggatttcttctcgaattggtgtttcaagaacctatgtacaacaacttcatacaatcagggtttggtagccaaagaatgttattagcaaggttccattgtgcagcattttctccgggaaataatggctgcataagaacgtgatatagccacaatgagtcctaatgcaaatatacacatggagattgaataagctggttactgaaagaattgtttacctgaccaagaagaagctcagcaagaacacaaccagcagaccagatatcaatagaagttgtgtactcagtggcaccaaatatgagctcgggtgcacggtataatcgtgagcagatgtaagaaatgttggcttcacctttaacctgaagcaaaagtagatttcaacagtaaatgacaagatcacagaaaacaacgaccgctacaagtcgaatgagtttatatgtcacaaagtcttacgagctgtttcgcactgtcaaagtcacagattttgacttgatgagtaagaggatcaacctattgaaagagaccagaagagatacatttagaacgaatgaaacaaaggcangaaaaaaaacaaagaattcaatcttaaaatgttacacataccaaaagattttgaggctttagatctctgtgacaaactccagcaacattgtgattgtaagcaagtccccgggaga

SEQ ID NO: 2011 - DNA, 1249 bp, Arabidopsis thaliana landsberg
gagacccaaggaatatactattgatatagttgattgattaagaaattttaaagatataacggaagaataaaaaaattgatttcgcaaaggcaaagacttgttccgtgtacgagggttcatcgtcactttcactatcactctctcaacccactaagagaccttgatttttgcagtgtttgaatgatttaacccacaccacacggctgggataattggtgtttgtggaaaaatcttatcttttaaagtcaagatctaatttactccacagatgtgagacaatacgttgatcaattcgtttcacagaaagaaaaaaaaaatcatagaaaaaaatatgatgtattcttgtagtgtgaggaggatgataacagtaaaatggagcttgtgtttaatcttctgcctttcaaactcaatacttgtttttgctaaacacttgtgtcttccagaccagagggattctctttgggggttcaagaacgagttccatgtcccaagcgagaagtggaggaacaacactgattgctgttcttgggatggtgtttcttgtgatcctaagacggacaatgtcgttgggttagatctagcgggcagtgatctcaatggccctttgagatctaatagcagcctgtttagactacaacatcttcagaagctgtatcttggctaccggaatcgtattgttttaacgattacttcattcggaagtctttcttataatgatggtttgaagggtgagctaccggattccatcggcaacctcaaatatttgaaggttttgagtcttcgtggttgccatctctttggaaagattccttcttcactcggaaatctttcttatctcactcatcttgatctttcctataatgatttcaccagaggaccagattcaatggggaaccttaaccgactaaccgatatgcttctcaggttgagctcgctcatctggatcaaccttggtaataaccagttcagaggtatgctcccatctaacatgagtagcctctccaaactgaagtattttgatattagtggaaattcattttctggaaccattccctcttccctcttcatgctcccttcgttggttgaacttggcctgcgaagaaaccacttcagcggccctcttgagattgggaatatctcttcacaatctaaacttcaactattacaccttggaagaaataatttcaatgggccaatcccttcttcacttcgaagtcttctatctcactcatctgatctttcgatatga

SEQ ID NO: 2012 - DNA, 1684 bp, Arabidopsis thaliana landsberg
agttttggaaaaatcatgaactacaaatatgtattggtttgaaatattgtttagttcgataataaaattatgttaaaaacgaaacaaaatggtttttagtgttcagttgcgtttatatatgtgttaatttaaatttaaaataaattatttttctttaaaattacaaattatagaaacaaaaacatatatctaatatcttattatgtatgtaactatgtatttttaaaaattattaaacaaacactcaaatgaagcagtcaagctttacacgttaataaatagaaagtaaaagcaggaaagtcccacaatttaaaacttcttgtattaatgggctttgattttccgtgaaattaaaatatagcgctatatgtaaactaaaatcaaatgtttttggacgagttcttggactatatatcgagcatgcatgcatgtttctcatgcaacatcgctcaatccacaacataaaagggaaacaagaccacacatacgattttatttgaaaaaggaaacaaatgggccgaataaatattaatgggcctgattaaatgggtactatatccaattaaactatgctaaacagaaacgttatcttttcgaataacacacaaactcaacgttgccagtgaagttcgccgtcgccggagctcatggatcgaccaccgtcgtttacaccctatcaaaattctaatccgaaattcttcaaccacgcttctccttttcaaaatcctaacaattttactccatcgctccggcgccgattcacgagctctccggtatactctcttcttctgttgtcagaattttcttagattccctatcgaaaaatctagcttttagatcactcttctattctcaggacaagcggttagtcattggttttgaaattaaaattgatttttaggttcggtatacattggtattgaaattagaattgatttgcggtttggtttacactggtttagagaagaaaacaaacaaattttcacgcgatgggaatttttgagactagtgcgtcgattgaaaaaggcatgatttcgaaaggggtatacccacagaattgctctcacgcgctcaacgctcactttgtgcgagtgggtgtgaaatagagccttctgattggcttagaaactctaaaaaaagtgaaatagtatacatgttgctagctcatgttgttattatttagtttttcgtttcttctatcaatctgatcaaagttcagttttttttttacatacaattgattctagatacttgagatctgatggtaatgataattttagatttttatgagactaggccactcagtacagagaagaaatgaatgcacttgggcatagaaatgttacatttgaaccacctagtgcttctgctgcaatgtcatcttcaaaagctattagtaagccaaaactgtcccaaggttcaaatatgcagtggattaaaaaagtcatccaaagtcgtcaaaaatgtctcaaccttccacttatattgatgaggtcattacaatatatatgatttaagtttaaaaacattgattatatccactggcattattcaattcatgtttttgttatcttgtgcagatgagcttctcttatgagttgcttgtgaaactctattgtgattgagtagaagtacagccatttggccttgtgaacttatgagacaggtacatgattgacgagga

SEQ ID NO: 2013 - DNA, 579 bp, Arabidopsis thaliana landsberg
  unsure (1)..(579): unsure at all n locations
gctgcgttagagaggatggccttgtttgtcttgaagttgttgtaccctttgtagccaccttgattgtggatgtagctaacttcctcgtcatgaacagggaagtgcacatgcttctgctggctaaaaagaatcttgtcctgcttgtcattcagcgctttgatctctttcttgtgtttgtcatccgagtcagttgttcctctgatggtcctgttgtagtcctcgttgtaatttccatctgactgagctaggttctcaaccaattcccagccttcttcaacatctttgttctggaaatttccattgctggcggtatccagaagcattcttatgcgtggtagaacacctctgtataaagtgctgagcatagaggctttcttgaagccatgatgagggcattggttggtgtaacccttgaaacgctctcatgcttcatagaagctttcaccagtcttctgtgaaaaacaagagatctcanttctgagtcttgcagttctggcgttggagaagaactctgccagaaaggcctcttgcatcatccagatgtgtgctttgtcgcccaggagaaatgaaacaccgagc

SEQ ID NO: 2014 - DNA, 2028 bp, Arabidopsis thaliana landsberg
  unsure (1)..(2028): unsure at all n locations
tcagagacgactcgatacgacgatgtcgatcgatacccctctagtgtcgatcgacactggatccggacagtaccctgtgaggtgcaaatacctatgcagcccgagtctgtctacactcctcctgtcctttatccgaggaggcgtcgttctaagcaagagaatcatgctgccaagtgcacaaccataatggagaagatcctccatactcttcctaaggatgcttcaaagacatcttctacctcactcaacaagtatgtcaagcgagttgttgacaatggaattagctcagatgaagctaagctgcttaccagagacatcagtgcaatcatactgccaaaggccaagaaggagaaggcactgagagtagacatagctgagtacatccgcaccattactcctggtcagaccattgagaannnnnnnnnnnnnnnnnnnnnnnttcttgattgctctatctccacaagcagattcagccgctctttgtgtgatctggaatcaagcatcaacctcatgcctaagtctgttgttgagagactaggcatgactcactacagacctactcgcatcactctccttttcgcggatcgctccaagcgaatccctgaaggtatccttgaagatgtttttgttaaggttggtaacaggaacatgttggttaggatttgatcagacttgttaggcatatggacttagtttgaatgatcatggcaataggctacagaatgtttggagttcttttgttttcaaaacctcttccacgggttcggcttttgtgttttgctagagggcaagcaaaacctatgtctggggagttgatataacccgattttcactgattttatctatgttttaggtataggattttgagtctttatgttacttcttgagtctttttagtgttgtttcaggtatactatgcaatgggacaacaatggagataaggagacattttggaggaaaagctaacggaaaggaagctaaggacgattttggattcaggaatcagcgaggagtgtcgaccgacacactcttggtgtcgatcgacacaagtttcggcccaacaaaaaccctagacgctttcaagttttcagaagctcaagtttgccccataagacttccctatttgcattattagtccctggacgtttttagggtctatatatattgtttttagacctaagttttgtttatcaagtcttttatcaaattctttgcaaaccctattataagagacataaagctattcattcattattattcagagtttcattcagatctatatacagtgaaaagatcccttctttccccttctctatttactgtgtttatgctttttatttcaatcatgttggttggctcatccgatatgtcttgagtagtctgcttgttaggaatagggtttttcattaaggattcatatgatttagtagattgcccccttgctaggttatctataggattcttcatctttaattatacctaatgctacatctagagtaattaactagatcttgaatccagacaatagatatgcccgccataggtatctccagctgggaaaccacgtcgtaatcttggggatttcaacaggctagacctgttctatgctaatcgatcagcgattgtacccccaccattctagaagaacgactatgagctgaagcctgcgtactttgctttagttggcaacatcctttccatggcttatctcatgaacagccaatggatcatatcgagcgctttgaggaccttgttctaagcatcaagactaatggagtctcagaggactacctactgtgcaagctcttcccttattcacttgctggggaagcagcttcttgactgaaacaacttaaagcaggttccctcaagacttggagaagcatcaagatagccttcttgaacaatttctacgatgatcctaagtttgatgagttgagaaacaagctgtctaccttcacacagggtccagctaaagcctaaaaggctgtgtggttcatttcaatgagtaccaacgggactgcccac

SEQ ID NO: 2015 - DNA, 407 bp, Arabidopsis thaliana landsberg
aaaaaaatcggttatcggtagacgtcattttagttattaatttttttacaacaaatctattacaatgtgacagattttgttaacataattataaatctgccatatcttcaaattatatgagtccgtggttgaataaattgaaaatctgtcaatcaaattaaatatgctataatttataaatttgttataaatatcttctaaaaagtctcaaccaaaaaagtctgccataaaaaatatgtcgcagttaaaaaagtctgcggaataagaataaatatgtcataactaaacgatagacttttgtaaaatcgctgaaattttttaaagggtattttgcatttattttatttttaacacatgagaaaatggaattttagacaagaaaagattcattttacccccaatatttt

SEQ ID NO: 2016 - DNA, 377 bp, Arabidopsis thaliana landsberg
tgagcaataagatggagagagatcacgtggaagattctccagatctaagaatgattatctcaggaaagaagaaggaaattcaatgctctgagtgtggtggttttggtcacattaaaccggaatgtgcagtcaccaagagagaagaaatgaaatgtcttgaatacaaaggtgtgggtcacactaagtttgagtgttctcacacgagcaaacttaaagagaaatctctaatgagcggcagtgcatcatagtctaatgatgaaggtgaagagctgttaaacttcgaggcgtaaggacaagctgaagttggtaaaggaaaagctaaccctaaaagcgaaacttgctaatgcgagcacagcggataagcaaaaactgagtgg

SEQ ID NO: 2017 - DNA, 583 bp, Arabidopsis thaliana landsberg
  unsure (1)..(583): unsure at all n locations
ggccattgtctgttcaagatcttctgtgctaaaatcatctttttttcctttttcattgaacccaacctatcaacaacagcaacattgtatcatccatataaatcatattctaagagattagattaagcattattattatataccacataatcatcgactttagtgttcttaatgagggcaagagtgggaagaacaacaatcttaagcctctcagccaagaatggacttttctcagcttggatcttcacgaaacgtgtctcaatgtgttgctttgccaatatgctcatgtgtttatccatcacctgcacaaagatttttccatttataaacatcaatcattccaaagaaacatgacagcgatcacaggaaagatcaggcaatgtaaacaaatccacaaggtatgtagagagaatttcgttaaccttatgctaaaataggtctagtggctatagacaagaagcaccatgtctgtcctaacatctcttatcaagaccaaaacaataaaactaacacgtaataactttttgaagaaaggctaaacccagcagcanaaaatcccgcacacttcgatgaaacacgacag

SEQ ID NO: 2018 - DNA, 586 bp, Arabidopsis thaliana landsberg
gggtttgttatggaaatgtttcttcttacgtactggtgattggaggaggagatggatgagtcctgagggaagtggcacgtcatagttgttgtgggcggatcgacatctgtgcaatctataacatggtggtagatgtgagtacttgtcacatttctttcatttattattatgcatcttgcaagtgcattgagatgaacctttacttaagtttaatatgttttcttccaccttatgggatctttcttcaggtggctaagcagtatttccctaatgtagcagttggatacgaggatcctcgtgtcaacctcatcattggcgatggtacacaatgctctctgctttcatctctctcttttgagatcagtttttataaacaatgttgtggccatttttttgtaggtgttgctttcttgaagaacgctgctgaaggaacctatgatgcagttattgttgattcatctgatccaatcggtccagcaaaagagctatttgagaaacctttctttgagtcagtgaatagagctctttcgtcctggtggaggtgtgtgcacaccaagctgaaaagctttggggcttcacaatggga

SEQ ID NO: 2019 - DNA, 650 bp, Arabidopsis thaliana landsberg
actctcccagactaagcttttgcttcccctcaagcaaaacaaaaaagccgaacccgtggaagaggttttgaaaacaaaggaactcccaacattctctagcctattgccatgattattcaaactaagtccatatgcctaacaagtgtaatcaaatcctaaccaacatgtacttctctgcaagcttacacaacattctagattccatacctaagttccacaactatatccaccaggctttcatcgctgggtctcatcaaacaagccaacattcaagatccttgtagactcattcctgtacaataccatgataaattgaccattctttatatattttttttctttttcggtgttctttctctcccccagacttattacttttagagaataaacaaatgggaactcgcatactggatcgacaccctcggcatttttccaacctttgtaattgatcattccaaataatgtataataatgaggtcataggaaacattcatacccctatacactatccgaaagtcgtctcaatctctcgtgatttaccgtttgaagaggtaaaaggaagagcagtgagattagctccagccttagtggttgagttggaaactaggatatcctccagtctgttggtttgccatctagattttccaata

SEQ ID NO: 2020 - DNA, 1122 bp, Arabidopsis thaliana landsberg
agagctccatgagttaaagttaaaaaaattaaaaggtgaattgcctggagaggggcctcgcttctttagaagggggtggagttgtgaaatcctcacatggggtacattgatgaataacctgttcgatcaccaaagaattaccagcgcacccactacgaattacctcatctgaatcctgcgcaaaccaaccgcggcgcatgggcgacgtattacaaattgaaatttcgcgtgagagaaatttagctcagtagcaatatgattagcaggcaaggaaaattaaataaattaatgaccctggcggggagatgaaacagcagaagggggcacccctgcaaaaagcctattacaacctaaacaaaagcaaaagttatcgattgacaacgaatgatgaattagttatatctgatactaataatgttatcaaactaaccgggacagtggttactggtagatcggccgacacatcagggatagggacctaattagagttttgtataaaacaagatgaacacatccgagataaaagatggtccgcttgaaaactattatggacattcttaataaccactaactaaacttcactccaaaaagataacgacaaagattgtattggagacaaagggtagtcatataaaaacaatgtaataatggattgactttaatagtatagttagtgcgataaactttttttttttaggccaattagttagtacgataaacttattacttaatttaggtcggttagtgtaaagagatcaataatcaatattttattttagtcttcaaaagatattaggattaatattttaaagaacaaaaaaaaaggttgaaaacaaactaaaaaaccgatggtaatttaggacctaataagttatcacaccaaacatttatccttacagaaagagaagaagttgatttggaaacaagttctaaagacaatatatcaaatattgatggtaatttagctgctaaccactatatctggcaactccgcagacgtctcgttgctaaccgaatcgacgctaaccacggggacccctacagaacgaaaattcaatagaatgaggtcaaatatacaaaaaaatttgaaaactagtcaacccgactaggataatataaaag

SEQ ID NO: 2021 - DNA, 619 bp, Arabidopsis thaliana landsberg
  unsure (1)..(619): unsure at all n locations
cagcaggttctgaataattttttgggtatgagccgtatgatttatttttttaaccgaattagaggaatatgtacttggacagttataactagattttaatccggggctatatctttttcaaaaaataaaaaattaatttatttagtagattaaatatatataatttatttttatttagtagattataactaaataattcaaattttaattatatttgttttattaatataatgatattttgatttataaatatatatatatatatatatatatatataatttcacccgtggtatactatctcgtattattattgattcaaaatcgtcatatcatctaatctcgttcagtgaaattaaacatatctaatagatttcacccgtactatactgtctcgtattacctatcgaccaaaacttgtcataccatctcgtatttttgttntaataatactttactttaaaagatatataattcaaatcaatttaaaagttttatttctaatggttattaatagttttaagttcatatattataaatattctaaactcgtctatcatctatcttaacagtgaataaacatatttttttattttgttgatatattttataaagattata

SEQ ID NO: 2022 - DNA, 1308 bp, Arabidopsis thaliana landsberg
cacgtgataagtctaatgataagatgcttacatgtgtcattaaacatttaacctttttattctctaaaagaaatagaaaacctaaaaaggtaaacaaatttacatatactaatttttatgtctacaaatatatacaattatttttattaataaaaaaaaaaattaacaaatttgattacatgtgttattggtcaattaaataaatctagcatgtattaatttaaagccaaatcattagtatggataataactaattaaaaagaccgctcaagtttaaaataactaaataatttatttacattaatttagttggataaaattgtatttttcaatgtaatattagtgaaaacaacaaaaattaggaaaatagggcttagagggattgattttttattatttgatgaaaatgttaatataaattttttgtgttttatttataaattctaagtcatttcatatgagtttgacattaggtaaaactaatttatgagattatagaatatagcaaaactatatgttgaacaatgtttcttttccaaaacattttgtggttttctttttttggttcattatgttttattttaatatgaagtaattatattgatttgatatgttatacatattattttgatataagcatttaacatttattcatataaatcacatgtttatgataataatcgggatttattcttattgactctggagtgataatcaatcttactctgtgtaaacttcaatccatgagctgtactcaccaccacagtccgatcattcgctccaataactcctgactttctcagcttcatcaacgccgtcaatgcaacaccagtatgtggacatataaacataccagtagaatcagcaagagctgttgcatccatcaactcttcctctgtagcttcctcaacaatcccattagatttcttcaacgcatacacagctctatcaatcgaaacagggtcaccaatctgaatagcagaagcaaatgtagtgtttgctttcaatggattgaaatcttctttaaacccagatttgtaatgcaagtaaagtggatttgcattagcagcttgagcacaaacaagcctagggatacgatcaacaagacctaactctttacacatatgaaaccctttgtaaaacgcatagatgttaccaagattgcctccaggaacaatgacccaatcaggaacttgccaattaaactgctgcagaatctcaatcgccgccgtcttttgaccttcgagacggagactgttgagagagttcgccaagtaaataggaagctccgccgtaacttctctgatc

SEQ ID NO: 2023 - DNA, 562 bp, Arabidopsis thaliana landsberg
  unsure (1)..(562): unsure at all n locations
tccaaggatttttcgaagcatctatgagtgcnnnnnnnnnnnnnnnnnnnnnnnnnnnnnnnnnnnnnnnnncactaacatagttgtcggcgttccgaacccgggagtccctggaccgacgagtaaattgtcgccgcgtgccctagcccagatgggtcggcgcgagacggagcacgaaggggggaagaagccggagggagacatgcgtaaaaggggaaacccgcggccttcgtgtttgtcccgtgcccaggtagggtgcgcttgcagtagggggttacaagcgtccacgtcgggagggagcgagcggcttacgcgagcgatcgtcccgtccttccccgcgcaagagctagtgccctaagtacacgccatcgtggcagccggagaggttttggcacccggttcgtgtggtgtcgtggccgtcggaggagcgctggagcctggcggaaggacagctgtcggggctgtcgagtccttgctgacgtctccttgctatccgtaaggggctgggagcaccgtcgtcatggagcatgtggggcgccacattacttgttttaccggggcg

SEQ ID NO: 2024 - DNA, 1230 bp, Arabidopsis thaliana landsberg
attgctcaagtttagtggagctcccctcctctattgaaaaactcaccagtctccagagattatatctccaaaggtgctcaagtcttgtggagcttccctcttttgggaatgcaactaaacttgaggaactatatcttgaaaattgttcgagtcttgagaagctcccaccatctatcaatgccaataatcttcagcaattgtctctaataaattgttcacgtgttgtggagctccccgctattgagaatgcgactaatctccaggtattggatctccataattgctcaagtctactagagctccctccttctattgcatctgctacaaatctgaagaaattagatattagcggatgctcaagtctcgtgaaactcccatcctctattggagatatgactaatctcgatgtgttagatctatctaactgctcaagtttagtggagcttccaatcaacatcaacttgaaaagttttctcgcagttaatctcgcaggttgctcgcagttgaaaagttttcctgagatctccacaaagatcttcacagattgctatcagagaatgtctcgtttacgtgttcttagactcaacaactgcaataatctggtatcactcccccaactttcagattcccttgattacatatatgcagataattgtaagtccctcgagagactggattgttgctttaacaatccagagatccgtctctatttccccaaatgcttcaaactgaatcaagaagccagagatctcatcatgcacacatcaactgtgcgatgtgcgatgttacctggtacacaagtgcctgcctgcttcaatcaccgagctacttctggggattccttgaaaatcaagttgaaggagtcgtctcttcctacaaccttgagatttaaggcttgtatcatgcttgttatggttaatgaagaaatgagttatgataggagatggatgagcgttgacattgacatcagggatgaacagaatgatctcaaagttcagtgtacaccaaacgattatattatatatccacttttagtagagcatatatacacatttgaatttgaagtagaggaggtgacttccacggagcttgtctttgagttcacaccacactacgaaagaaattggaagataagagaatgcgggattctccaaattgtggaggtcccttcctctgataagagaattgcgggattctacggcggtaaaccggggcatgattacgaggagg

SEQ ID NO: 2025 - DNA, 1103 bp, Arabidopsis thaliana landsberg
actacaaatacaaaacatagaaacagaagacaaatattatcattaaaccaaactgatgaagcagagaaccagtttgagttcgatcaatttccctcatacatatatgtatggaaaactgatcgaggtcaaaccagaccctttcattcattacattgctaaaacatatctgtaaccaaaattagcagaatcaatacatacatataataaagaagtaactagaagttagtttgaaaactgcagagaaattatcttcaaagtgctgaaatagtgtttgcaaagtctttgaaacaatcagagaatcgtagattatctccatccaaacatctctgaaaataagaaaacggagttagatccaccgagacttgatcatcaacaacagcgttcaaaatacttgcactaatctcctgatgagtagtgttgtccgaaaaccaatcatttagcgcgctctcaaaaggcgtgtcgaagccaatgtcttgatcgtaatccaggttcatttcaggtaaagcagcgttgttatccgtaacacaaaaagtttcacaaatcgagcgaatctgatcttgttcttcagtgatctcattgaaattttcaggtgaattatcagggacgcaacaaattgcagaagtactggactgaatatttagggtttgatttggctcttgagtaatctcgttgagattttctgggatgcaacaaattggagaagcggactgaagaattagggtttgatcatgagtttcgtggtctgaaacaaaatcgcacttgtcgttgttcttcaggtcctcgcgatcattaacgaaagcttgattacaggctaaagcttcatccgcacgcaattccttgagattcctcaacagcgtccgcatagaatcgatcgcttcactaatctcttgaggattctccgatctggcaaggctctcgtcgttccaccaaaaacctaaccctagattattgcgagtcaaacagataccaacgtcctccctcgtctctttgttatccttcggaacaggacgttgtccggagagaaaagcagagacaacggcatcaacagaggagtgaccgaaagagtagaaggagacgttggatcagaagaaggaggagtcgct

SEQ ID NO: 2026 - DNA, 1614 bp, Arabidopsis thaliana landsberg
  unsure (1)..(1614): unsure at all n locations
acccagtactatcagagaagggtagatgacaccagcatcaagaagtttcaaaatttcttttttcactacttctttcaaattgggatttaacctcctctgtggttcaatgctagaataggattcgttttcaaggtggatcctatcgttgcataaactaggtgaaattcccttaatgtcggataatgaataaccaattgctctcctatactttctaaactcaaataatagcaggttcacttcatcatcatttaactcaggattaatgatcacatggtaagtagagtttggaccaaggaatgcgtaccttagacctttaggaagtggttttagatcaacctttggcgccttcagttcagaccagtcatctgaagttgggatgatcggctccccaaattcgttggcagacaagatcgagtatttgctcgagtgtgcaggttgaactcgtgttgacccttcttcgctcattaccattacctccgttgctggtccattcaaatcctcaaagggttctgattcttccattgctttatgggagtctaacagcttctggtatcccaatgtttccaaatgcagaaacccatcttcactacttttggttaaagcactgttcagatgatcttcttctgccagctcttccagtaattcatcggctaaatgatccatttcttcgatccaaaagagttgcccttctatggtaggcttcttcatcgcgtctttgacatcaaaggccatcctaaagtctttgccaatgtttagatcaatcttccctttcttgacatcaatcatagctcctacagtggctaagaaaggtctccctagaatcaaaaggtccataagactcctcatccatctccaggactacaaagtcagttggtatctctacaactccaatcctgattggtaggttttcaagaaaaccgtgagggatcctttctgatctgtcagctaggataggggatatgttgcaagatttgtattgattgaaccccaatctttttgcaacggagagtggcatgagactgactgatgctcctaaatcacataggcatctcttgaatgcaatggacctaaagagcatggtagagtgaatgaaccaggatcactaagcttctttggaatgatcttcttctctctcatagcactgcattcatgactcaatactaccatcccttgcacttcttgaattctctctacgatcaagtctttcaataacttgtggaaatccgggataagtgccagagcgtcgacaagaggtatacttaacccaacttgtccactactcggcccgatcacttaattatctcgcggaatgacgttcttacccctaaacctaattcttgcccctcaagtataaatacttgttctaagccctaaccctaggtatgccttcatcaccagcaaaccctagtcgtcgccaagtctgcccactcgtcgccgcacctcttgaagctagaagaacaccanctctctctctctctctctctctttctcggtttcatgtaagactctttaaggtggagctttgcctctagtattttacattcaaagaagtaatctcttaaccctttttaagttntcttcatctttttttatggttactcaacccactttgat

SEQ ID NO: 2027 - DNA, 4561 bp, Arabidopsis thaliana landsberg
  unsure (1)..(4561): unsure at all n locations
tcatgggagagcttgatgagtttgagatagtcgctcgtggagatctataagatcttctgagataggcgctagcaagagtgtctgacgatcttggagataggcgctcgtggaagagctttaagatctttggatgtatgtgctcgcaggagacggaagagctcgacgattttggagataggcgctcgtgggagagcttgacgattttggagataggcgctagtgtgagagcttgatgattttggagataggcgctcgtgtgagagcttgacaatttcggagataggcgctcgtgtgggaggttgatgatttcggatataggcgctcgtggaagagctttaagatctttggatgtatgtgctcgcaagagacggaagagctcaacgattttggagataggcgctcgtgggagagcttgacgattttggagatgtgcgctcgtgggagagtaagtgattttgaagagttaggcgtttgtgcaagagcaaagttgttttaactaggaaagtctcggtgaagatactaaaatcgatgcaaggcgtgctggtcttgtataaaagagctcgatgaggtcaaatttttaggtgtacttggtgagattagtgtgaggagcatgagagataaaggaggtcggtcgtagagatgtgttaggcgagatcgatgtgaagtgcgtaaatgtgagcacgaggtatttgagctcgaccacaattgttcgttgaggtcggtacaagttgcgttgaggttgcacgatatgcgttaaggtcaatgcatgttggatcgtgcactaggtgagtcgaggtcgacacaaagcgtgtaagctcggcaagaatctttcgtcgacgtaggaaggtgaactcgttcttgcttgagctatgagttcgaataggtgagtgagttcggcgggactgagttagcgaatgaggtcggtaatgagttcagggagaatcgttgtgagatttgctggcgatttaggtaactgctttagagctaggcgaactaggattttcgcaatgtcttatgatatattgcgaaattgcatggcttcctagctctaatctgctgcgaatttgcaaagctgcctacctccgatatgttgcaagtttgcgagacagcctaggtttgttcttctacaggtttgcgggaatccttaactctaatctggtgggagtttgccgagctgtcaacctttgttcttctaggagtttgactagctatgtagctctgatattctacaaatttgttgagatgcctagctccatgcttctaggagtttgtcgagctgtgtagctctgattcactacgagtttgctaagatgcctagcaccgaaatgctgtgagtttgccgagctgtgtagctctgatccactgcgagtctgcaaagatgcatagcaacgatatgctggaagtttgccgagctgtgtatctctgatccactacgagtttgctaagatgcctagcaacgatatgctgggagtttgcgaagttccctagttagatcttttgcacgtttatgggaatgcctagcgttgggtggagaacgatcggggataagttttgtttggtgcgatggatctggtcaacaagatggttttgttccatgtgatggcttcgtctagtgagaaggttcgatggaagcagaacgttttgtaagtgatagatgtagtgtggcatcgccaaaggtgtagctcgatgtgattattgatgcttagcaagattggagattagttcggcgatttgatgaggattactttgtagcttagtgaagaacgctcaatcgtttccttcggggatgggaatgctttgtagttcgctgaggactgaacgctccgtattttagagctagaaacacttgttggttctgcgatgaacgcttggtaagtaacgctcgcctgttaggcaaggattgaacgttggaggtttttgagctaggaacgtttgacagttttgttaagaacgcctggtgagtaatgctctgcaaggaacgcttggctgggaacgcttgcttagtggatatagatttacggagattgacattaggtttttgtggatccgtgtcgagtagcgaggaagtaagtccgcttagcacaatcgtcgaaatcgatcagtgtgaatgttggttgattttgcgtggtaccaaacttggttggcattacgatggattgttatggccgtgagtgcggcaaacttgttttggcgagcgaggagatgacgtaagactgagtgatgatgttgattttgcggatcttcttctaggcatggggagatcggcacgactttaagttatgtcgtggatcgtgtctttgtcaagcgttttaggaaatgatctttgtatgtgcgagatcgagctcggcttaaccgtaactggtagtttgattcagcttgatattgtttgttatttgggagcgagactaagtttgacttcagattatgaatgcaaggctgggcttggcttatgctgtgaaatttagattcggtgcgatctgcagctcggcttatcctatctaaatacgcaattaggagtttgtcttagagacgaagtgacaatgatgagacagacggagaatttagtgatgacttgaagcttgttcttgagttttttgtgcaaggttatcctcggcttatattttgcgaggttttccttggcgtttaagcttgatttcgaaacgtattatggggcaaggcgtcccttgacttatcctgtatacgttgaactcgaatcacaaggcttacgtatgaagtatgcgagactgactcgtcgtactttgtaggtgcggcgctggtgtccggcttaccctgcggatgcctctaggtcagcgagaacgtgcgagcggactcggcttatattgttctgccttactatcagcttatttggtgcgaatctgggtcggctttaaatctttaagtgtaagttttagcttacttaagtaaagatgtgaattatttcttcggaaataggtttttagacctgtccgacgagcaccactgcatccatgtgggaacgcgttttagaatcgaactcctggccagggagacgatgtggggatgacaagtgttactcgtaaaagttagacttggaatagtaacttgtgtgcgcgttaaaaaaaataacgtttagaagaagttgcatatgtatcacgtagaagggattaaaccaattgttgtctatatagaaaatgagctcggtaggcgagcgttcttttttttttttttttttttgattttgatgtgcgcgcttagagctgagcgtatctgtcgtcgcggaaattcgggttcaggaaaccaacacaaggcttgtcacgcttagccatgttgatctgccaaagaggattaatgacgttggtaagttggggttagggactgggtgggtcgtcttcatgctaggcgatgagctcggctttagatctcaatgagttgagcagatcgaggcttgtggagagatcgacatagggagaagcgagctcgtcatagaagaagtttggtttgcggattactttgatcatcgtgagctatcctttgcgacaattccattaagtgtggagctcggcttagagtatgctcgacgagacgagttggcgagattcgtttgggaggcgagcttgaggagtcggaagcggagctcggcgaagatgatgtgcggtctagcgaggttgagagattcgttccaccttcagttatcgcggatttaatgcgaatctcaatggattggatcttagcgaccgtgagggagagtttagcgagtatggcggactgggtcgtctcatggtggggaacgggtttgacaatttggttgcgaataatctttccctctttcttttgagaggtttggccatgtgatattgccgattgtcgttgctccaatgagtttgtacttcaaagatttttgtgtttggcgccttgtcgacaagacttcttctctggtcggtgagaccttttgactggttttacactattacttcccaaggttggagcaacttcaagtcgtcgggtcgactagttggtcgagtcggcaaggcctcttgcacctgattggtgtggtctttaagttactcgatcgcaagttctccgagtaaaaggtcgatgaggttacttgacttggtcggtaagacttcttctaaggttggcattgcttcttaactgggtcggcgagctagacgagctggacgagctttgcaattaagtaacgaaccgatatgtatacgaggagatagttgctgaggagatgtgaaaagcttgaagacgagcccgatgtggtagttggacgagctggcatttgacgagcaagaactggtagattgactagctgactgttgacgagaagaaacttttggattgacgagctgatagtcgatgagctggaactatcggattaacgagctgacagttgatgagcacgaactgtcggngttgacgatttaacattcgacgagcaggaactttcggatagacgagctgacagttgacgaataggaattctcgggttgacgacctgatagttggtgagcacgaactgtcaaattgacgagatcagcgttgacgggcatgtatatcggattgacgagctaat

SEQ ID NO: 2028 - DNA, 569 bp, Arabidopsis thaliana landsberg
ggtacttacaagaggtagtgaaggtgccacgagtagaatcaaagctgagagtattttccttcaagattcaatttggcactaaggtctggtggtattattacctatattgttattttctgtctatctggttctttggagaaaatatttttggtttcatcagtaactgtagattcttgatccctttttttttttttttttttaaatgatgattactttgcagataacaaaactcactaaaggtttaaatgcggtaaattcagcatgtgaggaggtaagatttttgtgcagtccattttcgtttctctttcttggaccattaatcgatctcctcatttcttgttcatcagatacgtacttcacaaaagctaaaagatattatggaaaatattctgtgcctggggaacatattgaaccaaggaactgggaggggtgagtgagtatttctattatttttacccaaatatcttttggctttaagatatttcctaacgcaacataataaaatctgtgtgttgttcaatgtgagctaagaaaagaatggcgcctttgtttcattgcatcatatatac

SEQ ID NO: 2029 - DNA, 463 bp, Arabidopsis thaliana landsberg
ttttggcagtttaagctatatcaaatttggcgccgttgccgaagttctattttagttcaccattagactaggtgtcattttaagtgtagatactacttttctaccacctattaacgtgtttctttgtcttttggtctcttgtgtttcaggtaccttcagattgacaatcacgttcccatggcagactttcacggttgtgtcgaccgacactatcagggtgtcgatcgacaccctctgtagaaatagacggctacaataggcgatttagcagaactgacctcttctacacaaaccgatcagcattcaagctacctccgatgaatcaccattagatcatttggaagtcttcaaagacattgtttcctctattaaagcagaaggtgtaccagctgattaccttctttgcaaactcttgcccccattaaccaattggactgatacaaagaatgcattcatgaatcac

SEQ ID NO: 2030 - DNA, 638 bp, Arabidopsis thaliana landsberg
ctgatgcttacttgagaagtactccacaaactttggatgagatttttttcaacaaaattaagttcctttgccaataaagagaaacgaaaagtaagtagaatctaaaggcaaactctaagaacaaaaaaaaaagatgtactattcaaaaagtcacaatctctggtctgatcaagtcatgccttatgaattccaataaacttaaacgcgaaatggtaaatgcaactgtcgcatagaacaaaccagtccctgatcaaattttttctccgactattcaaagtccttaaaccctaaaatttctctttgaacattccatcattatccaataatgtgagacgtacataccttccaggataagatgatacatttaattacacttaaaaccacgatttctaaaccgaattcttttggcaacaacagtaataattattaacccgatcacttaagaaacagtgaaatacaacaaaggaagctgaaacattcagaacaatcatggtttattctggcccatgtaatggatactcaaaaaacttcattacctgccactgtttagcctagagagacgagattcgatgtcttctgattccgcaactacgtttaatgagctctttgattccaatgcttgtccatgatcctttgag

SEQ ID NO: 2031 - DNA, 4711 bp, Arabidopsis thaliana landsberg
  unsure (1)..(4711): unsure at all n locations
caaattttaagatattggggctttttaagacgtgaaaaaagcattaaatgagctggttattcttcccatgagaaggccagagctttttgcccgtggaaatctcttgcgggtattgctttctgtttgggacatatcgttgttttcttggtcaggtatttccgttcaacttggctgatattcctgatgacatgacctttttcagccctgtaaaggaatattgctttttggtcctcctggaacgggtaagacgctcctagctaaggcgcttgcaacagaagctggggcaaacttcattagcataactggctcaacacttacatcaaaggtaactggattatgttgtatgacagtgttttgtgtctccttgttgtatgtgtctatttgtatgcatgttttaatcaatcaagaagaatagttaaccttaataaatatgcttcagtcttcactggcctgtattgatacacttgtcttagcgaatatgtaatttcttagcttacacttctataaatgatttatgatactccccattattattctgatctgactctgtcttgtctttattccttgtttggcatagtggttcggagatgcagagaagctcactaaggctctcttttcctttgccaccaagctagcacctgtaattatttttgttgatgaggtgagaattttgtacctaaaactaaaattcatttctttattatgtccatagttctatcttagttattgatgctcttaggaaatatttgatgatgggtaaatgtgactgaacgggatttttgtttgtttggtagatcgacagtctgctaggtgctcgtggtggctcttccgagcacgaagctaccagaagaatgagaaatgagttcatggcagcttgggacgggctcaggtcaaaagacagccaaaggatcctcattcttggtgccaccaaccgtccctttgatcttgatgatgctgtcattcgtcgtctaccaaggcggtaacacctgatttgacttttatttacctttttgaaaattgctagtttgtatttctagtattggtaaactgtgtacctttgaattctaggatatatgtcgacttaccagatgccgaaaaccggttaaagatactgaaaatatttctaactcctgaaaatctggaatctgatttccagttcgagaaacttgcaaaggaaactgaaggttattccggtagcgatctgaaggttggtatttgttttctcatccctagctcatgacggcacttgtaagttctttatttaatcttttttgtttcttttgtgggcttacatttgcagaatctatgcattgctgctgcgtacaggcctgttcaagaactgttacaagaagaacaaaaggtacagaatccagattttgcagtgaaacatagactgctcacttacatagctttttttgcttgatgattttgcgttgtttgaatctttagggtgcaagagcagaagcatctcctggtctacggtcgctaagtttggatgacttcattcagtctaaagctaaggtaatttagttgcatcaatgccaggaaacaagatgtatcttgattttgttgcgttttgcattgtcgatgattgatataaaccacaaagatgtgattattgttatcatatgtatgggtgatgtgattctgcaggtgagcccatctgtggcgtacgatgcgactacgatgaatgagctgagaaaatggaacgagcaatatggtgaaggaggtagcaggacaaagtctccttttggcttctgatgaatttttttttgttttggtagatcaaagtgttttcatctgtcttttactttgtgatcatagtgtaactctcagtaaactatatataatggaacacgaaacactgtacgaccacatacaaaattcttcactataacataatgatttcttgtattcatataaattctcagagagtgagtgttgaatttgtttcaatgtggcacaaaattgcaacattagtcacgtgaaaacaaaaacaagcatctgtttaaaagatttcaaacgtacaatgtcaacactctttaagcaagtgtttcgccattatcatatataactttcatgaagatatgcagagagatgattcggtgtgggcacagaactattagatcggagggggcacacttgtgctggagcagtagagagttcaaattagttgacaataaacaaaaaaaagtatccatgctgcttctattaggaagcaattgtaatgaaataactagcttttacctggtcacaaagatggcggttggattgcccggagatggaggattcttcttcagtagtgaagcatgtggaccagcttttgaaacatcatcagggtcacttgcagaatatacttcaacctcttcaagaccaagttgccgcttgatcaagtccatgttactcttaaggacttcaatctctccaaaaggcagcctcaaatttagagcctgaatgccaatagatattgcctccttcttcttgaatttaacgaaaggcatgtaaatgttttctgcttgtccatccttctgtaatatctcctttagttctgcaattatctctgcatcaggggcaaaacgataggtttgctggtcaaatttgctttgcaggaacttgaggcagtgagctctccatcaatcaaattgctcattcacatatactaggcctattaactttcccgctggcgctgctgttacttgagcacctttcttagcagccttcttggaacctaagagctttctcagtaagacaatagaatcttgcaaatatttgttagcactcttgagaaccaaatctggctcatttgatgtaggccagcctgctgttaccacagaaccttccttcttcaaaagtttcctccatacatattctgcaaactggggacagattggttcaatgaggcgtgtttgcacatccatgaagttaagtatcaagtcatggttcatattttcgtcactgccacaagagtttctatactcatctcgagcagcttgtaagtcgtaaaccccattcttaagtgcctccctaaacaaacattctttgtacgctttttcagtcaatctgatagcaatgttaatgtcattctcaaacactttatcagcatatgtagatggaggccccgttctcaaagaggattcagcagccaagtttttcttccatccattcgagctgtttcaccagccgcaaaattgcagcatttgcagtttcaaatacaaaatttgcatcgtcaacgccatcaccagcatcagccaaagaaaaccttgtagcagtggcagagaattcttcgatagcctggcgcagggttctgaaatttccagttgactttgacattttctcagaattgagcataatgtgccattacatctgataccccgtggccagttacgcttctccattagtgcagtgtggttatagatgaaaaatgtcaaatgattctgaataagatcctttccggaaactcgaagatctagcgggtaccagtagtcaaattcctgcttcatcttacttaaaacagctgatggaatatcagttgattttggatacggaccatcacagaagagatactcccaaacttcatcattcatctgctgaggacggatcaaagacttgcttcctttatacatgtctccgtcgtgaaagatatgggcaactgtataataggccatataaagagatgaatcagataaggattccacaaggaaccgttcattatcccaaggaatacgagttcctagaccaaaagaccgtgagcaagcccactgaatgagccagctcaaagtgtgctcaaagccatgccttgtttcctcagagtagagattcatttttgataagcattcttcagccattttccgccattctgattcgccgtacgttggtgacgataccagtacctttgttggttagaatcgttgacatgggcagagcatagatgatctcgttcactgacagaggagacttcagagggagtccaatcagatcataaccggtcaactcgaccaagcaagatggtttcttagggttctttgagaagttctggtaggcacggttgagtgcagatctctcagtaaggatgaagacatcagtttcactgatttcataagctccatatttcccatcaggtagtacccaagcgtttgtttgtccatacatggtctcaggcctcaaagtagctgcagccaaaaacactctttttccttccaaaggactcagtttcagaggaaatggcttcactacttccatctttatgagagtatactcctgaggctgaacaccttcaccagtagcacggtcgtgatcagcacaaggctggcgatctagaggtgagaatattgtgtacctacagtctttgacaatctttcccagagctttcaacttcctcatctgccacctcacaaaggcatcgaaaaaaggattaacatcagtagtcacaaatgaccgtctccagtcacagcccaatccatatgccttgagatcttcaacagccaaagggggaaagtaatacaaccattcatctggatcccgaaatcttgcaatctcactgtcagtaagaccaaaactgcgcataatctgccactgataaacctnnnnnnnnnnnnnnnnnnnnaccttagacttctttcccttgaactgacccgttaaagccggtgtatcactgccctcctcgtgaacttgaggagctaggttatcttagcagggaagacaggagggtctc

SEQ ID NO: 2032 - DNA, 1558 bp, Arabidopsis thaliana landsberg
aattaaaagtaaaatcattagttttttaatactctcgaaacccagtctcaaccgttcaatctggaatatactaggattgatgagatggcatcacatctaatggttcatattaatatacatgaaaaaggtattaattcacggaataagatttgggccttaaacttagttgtctaggctactagtgaggcctaatgtcttatttcatagtatttatttgtaaaaacaagatataaattaagtccattaacttggagaaaacaaatacaatgctagaatcatcaattataaatttatattacttttgacaacaacatttgaaaccacatggaatacaaagagaaccacaacttgtccacctgacacttgtgaatattgtttgttaaagttttttcatttttgggcaaaaaatcatttacattatgaatatgtagatatttacaggtaatgatcgcggagaagagctctacataactgtgcttgggaaagaaagaaaaaaagctcttctattctagtatatctttttcctaataaaatgttggaggtatcctgatttagaccaccgaattcttatcgtggtttctataaatcaagactttgaaagatcaaaaacagaaactaaatatcaaacaaaatcttattccttttctaaaaatatcttattcatttctcgttgaacattgatttttttttaattagttgacatttcacaacgttttgatgatgtcagcagtcatatcggcgatatcatggacggctttgttacgtgccgtcaccggagattccccggcgaactggtcctcacaataacctggcttcgccacaacgtctttcatttcagacatagcctcaggatatttcttcgcctttagatcagccttcaccgccggtaaaaacctatcaaccgccgcaccatactcctcgatgcaagttccgtatctctcagagtctacgcggcctctgacattctttaggacagagatataatatgttaacgtcacgttgaatttctttgtcgtagcatcgagagagatcgacgcaagccctttcatggattacaaaatgaataaacaaatatgaattagctatataacttggaattctaattataaaataggtaatgacaaaacttacgttaatagcaaaatcatttcaacattgttttaatcaagtttttcttttagattgttagctagtggacagtttttagaagaaacgaaagaggcaaagaatgatgtatttataagttgtcaccttgtagatttgaggttttgcttctaggatcaacattgagagtagagatgcatagggcttggtaacggtttcttttgcagagtcgttgtacaaggctagatcccggaggagactgaattgtttgtgacaaggctatttggatttggctaagcacgacaaaaatagcgaatatgtatatgaaaatattcattttgatagtcggagaatcttgagagctacttactgttagtgaattgttctagttttaaggttatatagcgtttacagaatcattataaggcaagataacgtttttgttatcagaatg

SEQ ID NO: 2033 - DNA, 767 bp, Arabidopsis thaliana landsberg
tccccctcatagtctaggaggcggtgacctagcccttctctggaaacaggaagtggaagtgaagattctatctacctacaataaccttattgacacacatataaaggatgccggaaaatttttctatgttactttcatatatggtgaaccagataaagcaaagcggaaagccatttgggaactgctcaccaatttaggcaaatatagaagtgatccctgataccgcactggcgatttcaatggcatcattgattcctctgaaaagcaaggaggccttgtcaaatatgaatgaacttttgtggatattagatcattcatggcggaatgcgacttatatgacttaagacactcaggaaatttcctatcttggcgtggaaagagacatgactatgtagtacactacagactagaccgtgcaatgtcccatggagcatgggttgaagggtctgatcatagaccacttcttactcattttgatctatcaaagaaaaagaaaaaaggagtgttcatgtatgataggcgcctaaagaataatgatgaagtcacagctcttatacaagaggccagaaaacttaatgattctgaaaatgtggaggaaaaaaatcaacagatgtcgtctggaaatcgttaactggtccaggactaaacagcaaaatagtcaaaaacttattgaggaaaatcgacaaaagcttgaagaggcaatgtctagccaagagcacaatcaagagctgatatctaccatcaatactaatctacttttggcttac

SEQ ID NO: 2034 - DNA, 509 bp, Arabidopsis thaliana landsberg
cttactaatccttaatcaaaaggtctacaatcttgatgtacagagcactagtcctttcttgtaagaattcgggttccttgtacgcaattctctttcttcttctctttctttttctctttctctttcaggtttactgagctcatcagcagtaaaacttgcagcctcggtatttccaaactcaatcaatcttttagttagagttgcttcgcatatatacacaatgttggggagatctgtcttagagcacttgataccatgagaaagtgcagctgtatagagtgctgctccacatattccacttggtttccgtccgatctgcatccagttactcttcatactagctataatgtgtgtagccgtttccacgacttgcttattgtgtgcacctttcaataacttgtttgagaatcgaggaatgaaagttgaaggatcaacaaggttctcatacttgcggttttttgtaagggagagcatgtcacaaagttgcaaattcacagaacctaactcgg

SEQ ID NO: 2035 - DNA, 537 bp, Arabidopsis thaliana landsberg
taccgctgtaggtttttcctattcgacttcttcagcaaaaaaaaaaaaaacttggaattggtctttttctaagctttgctctgtttcttctctgttctgtttcttttttttttctttcaaattcagtttaggttaactcaggttttatagatagaattaagtttttacatcccccgaggcatgtgttttctactttgtgtacgattttattatcagtatattctcaaaatgttacctttcattgctagttttcaaacaaaatcagattatagcacaacatcatctcttcaaagccacattaagcttttagtgatttccatgtcgttgtattccttcaccttttaccaaaaaaaaaaataaaaaaaaatttgtatttttggttactttttttcaagattgttgattttttttatctttcacgttggttgacaaagaacaatagataaaatctctttcaaaaatagcaaaattgagagaaagaaaagccaaataataggtcattagttaacacattatgagggaactttcgttacaaaa

SEQ ID NO: 2036 - DNA, 571 bp, Arabidopsis thaliana landsberg
acttgaaaacgtggaacgctttatcaaaaaatcagatctttggtaaaaaatcagtagcaaggtttcagtttctagagttaatgattctagattctagggtttgttccttgagattcgatctccaaaaaatccgtatcgaagacgaagaagacttggttgatccatctatgaaacaaataagcatacctaatattgatgatcaagtcgagatatctcgagtctatcactgcgatggcttattgttatgcatccccaaagacaactcgggtcttatgttatggaatccgtatttggggcaaaccaaatggattcgacccaaaaacacattccacagagatgacagctttgctctcggatacgacaacaaccgtaaccacaaaatcttgaggttgaacgaggaaaacgaaagtcatattgatgtctacgattttagctctgattcatggaggacggttcttgatgataatccctatagggatgaactcatttatcaaagtggagtgtctttgaggggaatgcttactttttcgatcgagaggtaacgatagaagcagaagtggggacagaacac

SEQ ID NO: 2037 - DNA, 714 bp, Arabidopsis thaliana landsberg
ttttggttatatgtttagattgtgagacggtgaaattttagaaaatatatttcttaaactaaaaatataacatgactttattgaccatgtctctgcatattcaatctaatcatattcaacttgatgttcttggaaagtttaattaagttcctgttataatcttatatcttacgtattaattataaggataactcctcaaacatctttcaaattacttgttttcttagaataaatctcgaaaagcttagatatatttaatctgcatattcatttagtttctttcataataatcgtctaatttttaggcaatgaatatgtgtagcatgtttggattttatgatcactttagctacttaatggatcttaaaattaaagaggatatattgaattgaaaaaatgtagaaagagtgatgtattacttattttatgaagtttaggtggcaacctctcgtgtgctgatgtgtcaacaacaatataacacatgtgcatagtgaaagaataaacccagactgcaaacttggctttgatcgcacccacaaaaaaagaaaagcccgttacagcatccatcaacagaactcccaccaaatcagttaattactggctgaccgatgatcgtcgactgtacgcattcaatagcagagaagagctatatgaatcgagaccactaagacacacaaccactgaaattacatgtaggcgaaataagatgatgga

SEQ ID NO: 2038 - DNA, 641 bp, Arabidopsis thaliana landsberg
aagcatttcatgtacaaatatgcagagaaagtaaccattatgtttcgacaaatcccatccttatctcaattggctagaaatggcaatacaatacttgctattggttataatacatgtatcactttttttaaaggaaaatcatacatattaagaaaacatattaaaagttgattagaaatgtattattttttgtgatttataattttctatatttctaaatctctatatatacattgttgcagccattttgtgaaataaatcctgtagttgagacttatttacaatgacagaatatttgacaatcttcccaaaatctctccacattaaccacacgattggttactacagtaaaacctctataaattaataatgttgggaccataaatttctattaatttatagaggtattaatttatcaataaattaataattattaatttatagagagtttagactaattttgtaatttttaaaaaatattatgtttaaaataatttgtttttatttataatcattatttttctagaagtaattgcaaataagactaaattatcgtgtctataaaataacaaaaaagtgttttcgatgtagtaaaattattaaaattgaacattactaagaattagtataataaaaataaa

SEQ ID NO: 2039 - DNA, 6376 bp, Arabidopsis thaliana landsberg
cactcctgtaccgggttcatcggctttgttccttagacttagatcaatcctttactcagtcaagacatgcatatgttcgctattcattctaagccaaacaatcgcatattcctttatcctactttcacggtcaatttccaaacgtctatcttaactaataagctagatcgttacataccttggtcaatatgcggatatgattccttagcccgtttgtcgccttactccattcgttcaacgactcgtcatcggtcgtgaattgatgaaccaatccctatcgttacttagccatacaaccaaccaaccccactggtctaagtacaacgatagagattggggatcgtacgattcccttggttcacgatggccgaatcaagctcttggcttattggtccattcgttctccaaacgtacgcccctccagctacatggtggacgattgagccctcggcttatcgaaccatccatgtttccattccggtcgtttaacactacgaccgcccacggtttactaaccgtttacccgtccggtccatggtggtcgataaagctttcggcttaatgatccatccatgcggtccgaacgatatccttatcacacccaagggtccgtggattcatccactggatcatcgtaggctagcccatgaaatctttcttccatcggccttaggtttgctcgcgggtccaacttccgttttgtccatcggttcccaccgtggactttcccgttggttatccgtcgagtcaccctttggtcttaccgatctctgatcggtttcaccatggctgaggagatagatacatgaaggcggccgcgatgttgatcctatatggtgaatcacgttccttacccattcttggtactttctccctttatcggtaagattgcatccatgggcgacccttgggtgtgttcggatgcacttatccttgtgcttcctagaacacttttctcgatccatcccatccgacgatcggtctgtccgacccgttccgtcagacgatcggcccgtcccatccgacccgtccgacgatcggtctgtctgatccgtctggccgatccgatccgtctgacgatcggtctggccgatctaatccaacgatcggtctaccagatccgattcgtctctaagatgaaccgtctaccctctccatcctctacactccatcgaaccgttggatcgggaggtagcatgcgcatcagttcggtcgagttatactcgccgagccgcaccccctttccgaccaacaactctaggatgtgttggaactcctttaagaatgttttatggtgttttgaatgttgtgagatgatttgagatgccttgggcgtcctcccttatataggaggcgaatggatgcttcccgaagcatcacatccggtccttgcacccttctgaaaggtcacatccgttctttgcatcctttcgaaaggtcacatctgttccttgcatcctttgggcgatgcaaccgttcgttggtacccgctcgaccttacaccttttggccgagacacctcttcacccgtgagctaccacagtccaccagctcgagtgtcagctgaccggaccacccagctgggtcagtacttgattagctcaccgagctcaatcgagctgtcggtcagctcacctagctgagctagctagtcttacagctggtttagctcacctagcttagctagctagttcatccagcttgtccagctcacctagctggttcaacttgaactttctcgttcttcctactaagtattttggtctgttcctcgaccatgatctagttttctcctaaaacaaaccggcctcttttatgaacgcgggacgcggtcgttacaaacttgtaacgcccgcgatcctcaataggatcgttggctaggacttggtgagaaggagctcgccataagctcggacaaaggggaaatcatgctggctaagctaggatcgtaaagaaatcacttgggtcagctcgcccaaagctcaagctcagctggaaggagtgacggtactcaggtcgagtgacagtccagctcgggcagctggatgagtgacggttgagctcgaggtagctggacgagtgacggacgagctcgaggtagctggacgagtgacagacgagctcgaggtaactggacgagtgacggactagctgggcggttatgggcgaagagatacaactcttcggaaatgtgcaactcttcggaagggcgcaactcttcggaaaggtgcaactcttcagaaaggtgcaaggaacggatgtgttgattcgggaagcatccattcgccccctatataagggagggcgcccaggaccattccactcaccacaacacaccgaaaacaaagaaactcaccattaaaactctctcccttttgggagaataaatagtcttaggattcggtagccgggctgtggccggcaataaagaaggagggtcggatcgacctaacctcgagaaggaaggtaagggatcctagactttgagtctaagggttctaggatgtgagttagtagtcggatccttgaaaggatcgactagagggctgggtagtatccgggtcatgtgcatcctacacaagactcggtccaggtagggatcggctgaggcggggacgcggctcggcggaggaccgacgggtcttaactgacctgccaagaatcggccggactgatgcgcgatcttcccctctctgaattctctccacgtatccgagtagtgtatggcatatagagcattgcatggacttgcatatgattaagtaaatgagattacttatggctctatgactttcaggaacaaatggtgatcgtgggaaggacttggcttaagcgcgagagactcaaggccgggctgatgggtggtgatagttcggatagtctagggatcgattatatgacttgtaatagcttatatgcaaactcataggttgtatcgaatcctttgcttaatcaataaagtatccgattgtttgtttactctattcgtctcatatattgaatcacggaatcatatggaacggattagactaggaaagaacctcataaacggttaaggccgagtcacttagtggcttgggtcgagagaactcgttcggactttaggcagtccggatcggagcctttcaagttggtatcagagcatgcttggttctaggactaggtgttgggttaaggggtatcaccactcgtcggcttgagaatctcgtagtagttgctctttactcttttgcgattttactaggagttatgtggaataactttggaggtttcgcagatgggtaagagcagcaaaacgggaaagaataaaaaggacaagggcattgtcgaggagactttggttgaggaggaaacgatgatcaacgagaaaaccagagtcgggacgatgctcgatgggacagactcggccggacctgaggccgggaagaagtccataaatgaggaagcaccggagagtagcggtgcaagggacagcacggataaccggaacaatactccaacggcccaagaacagtgggatttgatgaaaggaatgatgacgtaactagccacattaaccaaggccgttgtagcagatccggtggtccaaagagtgtataaccaaaaggacgatgactcggaagttgtggaagtgaatccgcaaccgaatcatgggcggaaaaggggagactatctgagtcttctagaacatgtctcaaggctggacacgagacacttcatgggcagtacggaccctattgtggtcgatgagtggaggagtagactcaagaggaacttcatgtctacccgctgccctgaggattaccaaagggacattgcggtccacttacttgaaggagacgcccatatctggtggttaaccgtcgagaaacgcagaggggacgaggtccggtcctttgcggatttcgaagacaagtttaacaagaagtactttccaccggaggcttgggataggcttgaatgtgcgtacctcgacctagttcaagggaaccgcacggtgcgtgaatatgatgaggaatttaaccgcctaaggcgttatgtgggacgtgaacttgaggaggaacaagctcaagtgcgccgatttatccgtggactaaggatagagatccgcaaccattgtttggtccggacattcaactcggtttccgaattggttgaaagggcagcaatgattgaggaagggatcgaggaggagaggtacttgaaccgggagaaagcaccgatccggaacaatcaatccaccaaacccgcggataagaaaaggaaatttgacaaggtggataacactaagtccgatgctaagaccggggaatgcgtgacctgtggtaagagccacagcggaacttgctggaaggccataggtgcatgtggccggtgtggaagcaaggaccatgcgatccaaagttgcccgagaatggaaccagggcagtccaaggttctcggtgaagagacaaggacttgtttctattgcggaaagactggacatctaaagcgagagtgccctaagttgactgcggagaagcaggccggacaaagggacaatcgcgggggaaatggactgccgcctcccccaaagcggcaagccgtggcaccgcgagtttatgagttgtcggaggaagctaacgatgccggaaacttcagggcgatcactggtacgttcttacaactccctattcattatttcaataactgcatttgcattgcatcatgcatacgggaaaggggaggtactcagcattctaagggaatgtgtagggaccttgagagtaggtgacgtagtaacgcacactctatttgattctggggctacacattgttttgttagtccggaattggttgaaacaggtgggttcaggaaagaaccaaacaccgattatggaatggtacgagcggccggcggacaggcaatgtatccgaccggacttgttcggggcatctcggttgtagtgaacggtgtcaatatgcccgcggacctaatcattgttccactaaagaaacatgatgttatcttagggatggactggttggggaagtacaaggctcacatagattgtcaccgaggacggatacaattcgagagggacgagggtatgttaaaattccaaggaataagaacaacctcgggaagcttggtaatctcggcaatccaggctgaaaggatgctcgggaaaggatgtgaggcatatttagccacgatcacaaccaaggaagtgggggcgagtgcggagttgaaagacattccgatcgtcaacgagttctcggacgtgtttgcggccgttagtggtgtaccaccggaccggtcagacccgttcacgatagaactcgagcccgggacaacccccatatctaaagctccgtaccggatggcaccggcggaaatggcggagctaaagaaacagttggaggagttgttggataaaggattcatcaggccgagtagctcaccatggggtgcgccggttctgtttgtgaaaaagaaagatggtagctttaggctatgcatcgattatcggggattgaataaagttacggtgaaaaacaaatatcctttaccccggatagatgagttgatggatcaacttggaggtgcacagtggttttcaaaaatcgacttggcctcaggatatcaccaaattcccatagagccaacggacgtgaggaaaacggctttccggacaaggtacggccactttgagtttgtggtcatgccattcggattgaccaatgcaccagcagccttcatgaaaatgatgaatggggtgttccgggatttcttagacgagtttgttatcatcttcattgacgatatccttgtttactcgaaatcttgggaagctcaccaagaacatctaagggcggtgctggaacggctaagggaacatgagctatttgcgaagctaagtaaatgctcattttgacaaagaagcgttggttttcttggtcatgttatctcggaccaaggagtatcggttgatccggagaaaatacggtcgataaaggagtggccacgaccaaggaatgccaccgagattaggagttttctcggactagcggggtattaccgaaggttcgtaaggagttttgcgagcatggcccaacccttgtctcgactgaccggaaaagacaccgcattcaactggtcggatgaatgcgagaaaagcttcctggagttaaaggccatgttgactaatgcaccagtattggtcttaccggaggaaggtgagccatatacggtttatacggacgcatcaatagtgggactaggatgcgtactgatgcaaaaggggagtgttatcgcatacgcatcaaggcaattgcggaaacatgagaagaactaccctacgcatgatttggaaatggccgcggtagtatttgc

SEQ ID NO: 2040 - DNA, 644 bp, Arabidopsis thaliana landsberg
ctccttcttgtgtttgtcatcagagtcagctgttcttctgatggtcctatcgcagtcctcgttgtaattaccatctgattgagcaaagttctcaaccaattcccagccttcttcaacatctttgttctggaaattcccattgctggcggtatccagaagcattctgatgcgtggtaaaacgcctctataaagagtgtcgagcagagagggtttaatgaagccatgataggggcattggttggtataaacccatgaaacgctcccatgcttcacaaaagctttcaccagccttctgtaaaaagccggagatctcatttctgagtcttgcagttctagcgttggagaagaactttgatagaaaagcattcttgcaatcatcccaggtggtgattgagtcatggggcagattcttctcccagatgtgtgctttatcgactacatagtctgttgccagacaactgggtggtcgagtatcaggtcgagtaacagaagagaaatgcaaaaactaaggaacagataacaatatgcagagtaaacaaagaaatcagttggatgagaaattccccaggattgggtaattgagtagttttgtttcctcagtttacaggtgattgacatgctcaataaattatccctagacaaca

SEQ ID NO: 2041 - DNA, 610 bp, Arabidopsis thaliana landsberg
tgggggaaggctgtgcccccggctggtacgggcccggaattccggggtcgacccacgcgtccgcccacgcgtccgcaacaatggcaacggcttctcctccatttatctcaactctcagcttcactcactcttctttcaaaacttcttcttcttcttcattttctccgaagcttcttcgacccctcttaagcttttccgtcaaagcttccagaaagcaagtagagatagtgtttgatcctgatgagaggcttaataagataggtgatgatgttgacaaagaagctcctttgtccaggcttaagctcttctcaccttgcaagatcaatgttttcttgaggatcaccggaaagcgagaagatgggtttcatgatttagcctctttgtttcatgtgattagcttaggagacactattaaattctcattgtcaccatcaaagtctaaagatcgtttgtctactaacgttcaaggagtccctgttgatgggagaaatctgattataaaagcacttaacctttacaggaagaaaactggtagtaacagattcttctggattcatttagataagaaggtgcctaccggggctggactcggtgggggaagtagtaatgc

SEQ ID NO: 2042 - DNA, 636 bp, Arabidopsis thaliana landsberg
cactattgggaaagctggtacgcctgcaggtaccggtccggaattcccgggtcgacccacgcgtccgggagaatagtagaagaagaagaaagggagagtcttgtgatatctacgtagaaggaagatggccttatctcaagtgtctgcgtctctcgccttttctcttcccaattctggtgccctaaagctagccacaatcacaaacccaacttctacatgtcgggttcatgttccgcaacttgctggaatccgatccaccttcgcttctggttctcctctcttgccattgaagttgagtatgacccgtagaggaggaaacagagcagcatcagtttccataagaagtgagcaaagtacagaaggaagcagtggtttggatatatggcttggtcgtggcgccatggttggttttgcagttgccattactggtgagatttccactggaaaaggacttcttgagaattttggagtagcaagtccattgcctacggttgctttagctgttacagcattggttggtgttctagctgcggttttcatcttccaatcttcttctaaaaactgatcgacaagaatcttgtttgtgatgctgccaggatcattttcttgattaagaatcttgattatatatcactg

SEQ ID NO: 2043 - DNA, 780 bp, Arabidopsis thaliana landsberg
agttacttacatcttcattggaaagggctaggaggaacagtggtggtggaatgaatcagaagttttcagctgcacactacgagtttaagtcttgtcaagtgtatcctggaagtccaggtggtaatctaatctctcgtggttaaggtacatcttctctttacccagggaaatgctccatcatcgagtttcgtatcggttaacctccaaagtttcttggttttgagcacttcacagcgcgtaaatggggatcaagattcggttttggatccatcacacctgctggacaaggttcaaggttgggttcaggtgctttgactcctgatggctcaaagctaacttctggtgtagtgacaccaaatggtgcagagactgttataagaatgagttatgggaatctcacaccacttgaaggcagtcttttggatagtcagatctctgaggttgcgtctttagccaattcggaccacgggtcgtcaaggcataatgatgaagctctcgtggttcctcacagagtttctttctagttgactggtgaagacgttgcacggtgtcttgcaagcaagctaaaccgttccggttcacatgaaaaagcaagcggcgaacatttaagaccaaactattgtaaaacgtcgggagaaacagagagcgaccagagtcagaagctaagatcgttttctacaggctctaacaaagaattcaagtttgatagcaccaatgaagagataatagagaaagttcgatcggagtggggggcgaatgagaatgtctccggaaaaggtg

SEQ ID NO: 2044 - DNA, 672 bp, Arabidopsis thaliana landsberg
actttctgctcctgaaatttccaccataaaaaatgataattcttaaaattgcatcatgtactttcagatccgcgtttactgtaccgctaacatgatttacccaactaatcacccacaccgttaagaaaacaacgttgttttgtaagcctacaatggagcttcaagaaacactaagggagccgatacagtcacactcacatagagaagcagtctatgtgatcaatgagagtagttctagttctttattgatttagattgtcattggaacaatcttcaaccacttttgtctagtttggatgatgtatttttggaagttgattctctttaggatgttattgtttaggttgactgattgatttgaagtcttagctatccttatgattaggagttttatctatttcgatttgtcaaattccttaccaattaacacaacacataacatatatagatagattcacattacaaaacaaagacaaaacgacgtcgttttcttaacgggtgtgggattagtcgggagcaaaaagtacagggggaaagctgagaatgcaattagtttatgggtataaaatcagccaacccttaattctattaagtgtatctttttcattatatgtattacctaagtttccgtttttggttcaaacatcatgatcctattgtaaccatataaat

SEQ ID NO: 2045 - DNA, 551 bp, Arabidopsis thaliana landsberg
  unsure (1)..(551): unsure at all n locations
cgttcacccttgatttgttgtacaccgactgtggcttatggttcgtgaaaaacccggtngnnnaagtaactcaatctcagaataaacacgggctcagaataaacacgggctcacttaatacgaattggagttaacgggcctaaaatgagttttaaaacccaatccaatttgtttcgtcgaacccagcctgaatgtgtgtttttaaaacacaaggctactattgtatttgacacctcttttggatttttgctacctttttctatctcacatgaatcctattagacaagcccaataaaaagtaccctctcagcatatttccaaaaaaactgtctagttctcaaataattatctaaaaactgcctacttttacaataaaccctgtttgtattgtactgtctcttttaaagtatatatatttccattcttgttttaacttgtctcgcaatcttttgcaggtccaaggtactttagctctatgagggttgtggtggactgatgttctatttcggtgattccctgggaaactctccatgaaagcttcaaaaatctgc

SEQ ID NO: 2046 - DNA, 552 bp, Arabidopsis thaliana landsberg
ttgctaagttgtgtatatagatgcgaagttgattatgtgtgtatatggtaagctgagtagattatgttttagggttaatattgagtaatgtgtgtatatagatgctaagttgattaggtgtgtatatggtaagctgtgtagattacgtttagggttaatattgagtaatatgtgtgtgtatatagatgctaagttgattaggtcttctaattggtttatgtaattgtaggtttggtcatgacaatggtaagctgacctggaagattgcaaaggtattcacaaacaagtttgatgggccatttttacagttggagatgtgtacttactgaaaaagacagaaatacttcctcgaattcacgtaaacttctatctccagttaatcttttactattgtctatatccatttggtttggtttggttgtttgatcactaacatcaaactctcctcttgtttggcatccatcactaaccggtataattgaagagaaattctacaatatatgtatcctgcgtatgacggacatggtttttaaggcttgctcaaaacgagcc

SEQ ID NO: 2047 - DNA, 682 bp, Arabidopsis thaliana landsberg
gatcaatgcgctgaaagtaacaatatcagggtcgatattcctttcgatcatgtcacgcagcaattgctccgcatcactccatttaccatagctacaataaccgtctatcatacaattgtaagtgagaacattgggaaaaatacctttctcatgcatttcagtgaaaatattttgagccttgctgtggttcccgtccttgcaaagacgataaatgatggcattaatttacagaaatcaatttctgagtacaagggacgagatctaaccatatcatcgaacaaatcgatcgcaacatcaaagcttctgacataatgagatccacttctcaatttcaaactctctccttcaaaagctcctccgctcagagaaggcatactcttttcaaccttactagttttcttggcgacgcggcgatgaactaatctcgtagtgaacaatctcgcagaaacagcagcatcattaccagaagatgattcagatctgcaaaccctagccaacatttcgactcgcctgattttcgttgtctctaaactctaacaacaacaaatggagctaacaagtctgtgttaagtgtaaacccttaaagagtaaacgacgaccggttcaaattgtttggcacagtgaccggttcaattgattggcacagtggccggttcaacttcaaatttcgttagaacctttt

SEQ ID NO: 2048 - DNA, 555 bp, Arabidopsis thaliana landsberg
gtcttgtctggaccattaactcgtcccagtaactcttcataccatcaacaaagaccgaatcatcatctggatcgtaatcctcagaaaactcagcacagggcaatccagtcacgcaagcaaattcagttaatgaaaatctcattgggtgtccaccaaatactgtccacagctcatactttttctttgttaccagctgcctacataacaaggcatgcataagcttacccgacatcgcacacctactgaccgacaaatggaatagaggtcgaaagcaagattgaagaatgaaatccaattcctttgtcccatgaaaaaccttcctgataaaggatagaatatatggtcttgagtatatatttagccttctcctcggatattgatcggtggcaaagagtctattaggaagttttgaatcacactgaattacgagaaattacaacaagagtgagcaaaattcatcaacagagtatatggttttgtcaatcaaatgagtttgtaactaaaatacgaaaaacgagaaccgagaaaccgagatagaatctagaaattataatc

SEQ ID NO: 2049 - DNA, 642 bp, Arabidopsis thaliana landsberg
gccctcggcatgttcttacaccaggaacctgacagttcctccctttgatatgacggagcagattcgccaacccagcttcgtcctcgatgattgggtgatcacggtcgtgagtgtaagaccaatggaagggcatgtttcccgtagaccctccatctgaattggacgtctgccttacctcttgagactggtttagactttgaaaggaagacctacccccacctcttaatcctcggcctccgctttgggacctaccagacgatcgcctgtctacggacacagtgccctctgggttagcagccgtaggttccaccctctcttctcttgaagggacaactcctgatcaatcacgatcagttcagccgccgtcagcacgagcagcttcagacggcccagagacctgagcgacttgattgttgtctgctagaacttctgcagcagaggtcccggtgttagccttagggagcaaaggatggggaggttaaggcagatgagctggagacagtagggctgtttcgagctgcggtcatcgcggcgatagatcaccagcacaaggaggagccccgacttggctcgttgacacgatacttgtcgcctcattctttttggaatagtgaaggctaaagtgactgagttggaggactg

SEQ ID NO: 2050 - DNA, 1403 bp, Arabidopsis thaliana landsberg
aatgtgtaagacggtggatctatcaatctcctgaatttctagattgcacatattttatctcattttgctgactcacttgattcgtgcgttatattgcttaatttgatttaaactctgctttgtgtggttacataggactctgtttcgactgtgtataggaagagagtaatgacttgtgactgtacagagttggagaaggatttcgagaaaaaattggcattcttgaattcgactcagcttgagaatagagagtccatggacttttaccggatatgagttgtacaatgcagagactgatcccgaactgaaagctgttatgagaggacatgggaaaagccattggcttcgtttgaccggaaagaatttatgagttgtaaggagcatatctaaagtaaacgccatgcagacaaggaaaacaatgatgaagatatgagagcattcacattggtgggctgttagcaaatgttcttaacaataattttataatttattttgaagttaagagttttgataagagttttttttttttaagaggtattttgtctcttatataagagcaaaatcttaggcctgggcgttttaaccgaaccaaccgaaccgacccgactcaaccgaactctaaccgatccaaaccaaacccaatctaagactcaaacaattcggttgtatttatctcaacccaaatgggtcggttcggcttgttgggaataggagaaagccaatagagatttccgttcaaagacacactgaatcgtgtaacatcggttaggaaccagtccttgttcgatatttcaataaacttgaacgcgtgagaggcacagtcgtagatcgcaactctctgttggtatacgtaagagctcccatcttcagggcgacacatttaacctgtttcaaccacggattccaaaaagctgtccccttaggactagcccaagagttacaaaacaagaacccatcgcaagcagtgatggttatgtaagcaaatttccagtcacggtaagggataccagaggagtctagcacacgtaacttaatcgttggatcaacgccgtcgagaccgatgatctctatcgaataaatattggaatcggtcatgaagatgaactgaggacaagcacgagcgaagtggtttttgatgaaactcttttcatcgaaaagataattccatcgtttgcaaacggatctgaatcgaacaagagattgggctgcaagccgagacagtatatcttcctctagctcccatggaagcggaaccattacctctggttattttttggggcgtcaacgagatcttcttctctttgcagtactttaggagaagagccatattattatataatttataccccactagaaaagtgacacagttttgttgtcatgattattggattaaaggatattga

SEQ ID NO: 2051 - DNA, 684 bp, Arabidopsis thaliana landsberg
ctcaatacagttgccatttcagtctcagcaatggaaatgaagtccttcaatgtctgttatcagatacataaaactaggtttcaggatccggaggtcagatatctgaagattagttacgtggtgcacaatcatggaactaaactcaaatcataagacgaacaaaaaaccaacatacattacagaaaacttcagaagcaggaccatcagtttcggatgcagtgagctcctgcttcagtttttccaatcttttgattatagcttggatattctgagccagagacttcacttgtatctgaaatagacaagacaatcagatgatgagccaaaggagtagatcgacgacgacggaaaaagcacaaatgcaaacctttgaagctgattcaagactttgaagatccttatagacgtccagtagttctgatgcctcggaagcaaggacctgaagaaagaagagagttaactccaggacctgagcaagaccattttctaaaacaaccctataattgtaatttaccttgcaataataatgcatgcttttaacagtatgtgtatcacttactgaactgtccaacttgactcccactgcaaccacagatggattttcgttcagaacaaataatgtatatgatgcagcggaacacaggcgccgttcttgaatcaaaaagaaagatatgaaacttaccc

SEQ ID NO: 2052 - DNA, 1798 bp, Arabidopsis thaliana landsberg
ttccgttccctgttgccaggttttcgacgagagtgttcgcaggtgcctgcaaaaaggcgacctgccggttgataggaggtgagacgtctatcgaggcgaaatccagacgagttctcagagtaggatcggccggggagacggtacctgtcagatctatggggacctgggcaggaatctcagttttgcggggggaaacctccttacccgcgatatcgcgctctacctcatgtgccatgcaagtggaatagcgtctctgctgacccacaattgtggcgaggttgcgatgcgcaatttcttggtttttggttaagttgatcaagttaatgatcattgcgcggagctcggccaattcactcgcaggtcgcgggcgaacctgattagacaggttggccgggttatctccgtttggaggctgtatcgtgacgtttcgttctccgccccttgtttgcggagggggagtgatttggtcagatccagaagaattcgagttttgggagatgttcttcgggtcactgttatggatagcatcaacctgggctccaggagggagatccgttgggaggtgcccgtccgtaacgtcatcatttgggatctgaactggtaagccagatcccgatgaattggatgaattgggatccatgatcgttggtcacaattgatgtgtttgtttcggtgttggtatgatctatttccgtccccacaaacggcgccaaatgtgggttctgaaatccacactagagatttgtaattgagatgatgagaaaggagggctagatcttcactgaaaccttgagagttatattgctaagaacgactggactttttgtattgattatgacaaagcttttacaatgtgaaaggagattacaagtgtaaaagtatttgtgtgaatgtaagctgaattgaatgtgtcttccaagtcgtccttgctcccttatataggtctacgcatgtggtagctccgtccgggtctgcggagatcctcctagatattcggcaggtcagttccgagatatcaggtccgttcggcgaatatcttcttatcagttcctaggttgttattcgcttatctcccttcatcaagtgaccgggcttatctggcccaagtacccattcgcgtatgtgggctcatcagctgcgtaggtcctctacttggtgggcttagtggacttttgtgggctggcctagtattttcgcagttggattcctggaggggaatccagctccaacaccgttgcaatcgagttcaccgtcttcttccctcaagaatcacttgatttcatcttgtagacttgaccaccactcgaccaccgattcaagattccaaacgttgattccggttcactaagaagtcactcgaccgttggtgctagcattcagcagagccactcggcttcaacagcttttctcgaccaccgatttctgttctacccgattcaaatcgtgaaagaagaactcgggacggtttagtttactcgagtactagattgtactcgactggctagcatccagttttattgttttctccgagactaacctattgacgtttgagctttgagttctaaatctttttcaggtctatcatgagcaattacagtgacagttcgttaaaggatcctgactatcacatggatgaggctgaatcttcatcttcaagaccagaaagagaacatagagaatttgataacttcaggagaaaagctgagatagctcgagggaagagagcaatgagagagaggtatgagctgatagatgaagagctggaggacgggtaaatgcctgagcatactcacaaagc

SEQ ID NO: 2053 - DNA, 770 bp, Arabidopsis thaliana landsberg
  unsure (1)..(770): unsure at all n locations
tgcagattctgcagttacttgtctagaaagaacacgcatatcttcttgaatataacctcgattcaaactccgtctgttgctgtgtattcctcactgtgagatctatccgaaaacaccaatttcgtgatgtggttccttcagatctgacaggaaaacgctcaccaaaaccacaacttgaaactgcacttttcctttcatcttcttcgattctgttttgctttgccccagcctaggatgctttgatcttcttcagtgtgaatcccccttactgttttgaactaaatctccctctcccaatgttttccttcacggtggtgatgatcccttctcttctgtcgcttctccttgtttgagacttctcttctcttctctggataactatggcgtggctgctcttagattaggggttatggtcgtgatggtggctcaagtggtgaagaagaaagagatatagatatatacacataattctcgtttaggttttatttgaggaggttgggcttttaatgggcctaagtggggtttgggtctcacaattctcccccacttaaagagaattcgtcctcgaattcaacattccgggttgagcanagtcgtctttaaaaagttccgggtattcttcatccattattgtttttgatttccactatatctcttgaattccgtctcttttctagcaaccttgaatcgactttgctttctttccactttaacttctctacttcaatcattgaaatgatatgccctctatgaaaacttaaactttaaag

SEQ ID NO: 2054 - DNA, 549 bp, Arabidopsis thaliana landsberg
atggacttgaacaattgagataatataaaacatgacatctatattagatgataaatagcaaaacacatatttaataattgttcaaaagaacattaaagtcaatggaatgaaacaaacgaagatgatgcaattttaacaaaatacgtatgaaatgcggatacttcttcaacacttgaaggacttcgttttcgttcaaaccacatatcttcaaggtttcaatcgtctgacttatcttttcctctgagaatttcaaagagcaaggccacttgttgaagatttcccacagcaaagcctaaccttttcttcgattgttttgtcgctcatttggtaaaagacgtggagaggtttgacaaactttaaagtggtcggatcaaaaccaatctcaacaaccttgttgagtgattcttcaaatttttccgctagatgagcaaggggaacaacaacttctgaggcattcccaattctctcaaaaccaataaaatttctgaattttgattcacctggcttactacccctgtggcaaaagaatgacataagctttttcatact

SEQ ID NO: 2055 - DNA, 501 bp, Arabidopsis thaliana landsberg
catacaagagctaacagggattgtgaaagagctgaaggatcaaatcaaggagctcaatggaaaagtcaatcgagtaccactcaacatcaaggacgcccctaacgatggagccactattctagtcagcaaagaaggatgtgaattcacatcggaatggtctagaggagaagactatcttgataaaaaagaagcttactgtgaggacatggccactgagtacccaattgcagatctgtcaagaaaccctaatgagtatgatgatcactctactaaagaaggagaggagacctcatttcctctctacaacccaccctaagcctaatgagtatgagaaggcaagcttagagacttaaaacaagctcacttgggagcaaatcccatgtctatctctgtacatactcatggtagtgctggccgccacaaaggcaatgaggtcgagtacccacatgctggagctgagaccgaacagggcgactcttcaatggtctggaagcaatcaca

SEQ ID NO: 2056 - DNA, 3644 bp, Arabidopsis thaliana landsberg
attgttatgaagatggttgtatagctttagaaattgttctatgtttcagtgggcagagttgattcccctcactgagtattctttatttacccccttttccccttttgtctctaattagtaagcgtgaggagttgtgtacaatattttgttcgtgtgtgaagtttaaagaaaacgtttttgacaagatcagatgaataacatgttgtcttagtctaaatggcggggcgggtgttacatggagtcttcttttcttccttgtgctcgagtctctagttgagtgcggaatggaaaagactcttaagctagcaatcgagtatgaagtcgagtgatggggactgtggtactcggcttggtggtagagtgatcgagtgatggtgatgatgatactcgaccttgtggtcgggtggagtgatcgagtgatggtgatgtggtggaggtgatgatactcgaccacggtgatgagatcgagtggttgtcttggtggtactcgatcatggggtcgagtagtgacgtgaagtgatgaggtcttctactcgaccagggggtcgagtggtctgttgaagtcgtgaaacatctactcgaccagggggtcgagtggtttgatatgatcaggttcgcttcttccaattagctcgtcaacagctctaaatcagatgaaaacaacacaaatatgcaacatgcatgcaaaactatcctaaacatgcaaagtgatgacaaatgatgagaaatgctataaaactgtggtgatatgatgcaatagtgataacaaatggatgctcatttgaaaaaagaaaaaacatcgtgtcgacgaaacgcgatggtgttgatcgacactctcattttcaaggtaagtcgatttaacctaaacttcatcttcttcatttcagtttttattcaaaccgccgaaatcactcttttctctctagattgttcaccggttcttgtgattttaggctctaatctcattagaatttcatcctctttcgtccccaagtatctatttcatcgatctgcaacatgactgggcagaaaaagaaggcaaggaagagcgttcctccaccttcctcctccgccgctgctcaccaccgccggaccttctccaccgccgccggtctccgcccttcccaaccgcaactacctgctgcagcgcctcaacctcttatctattgatttccatggccaaagctactaacagaaagaattctttctcaaagagtttgggagaaggatgtcaacaaagaattcactaaaggtgactatatcaatcgccctttttctccagattgggattattatgatacttttttctataatgcctagatgagtgtagaaattttgcctactcggtttgcggattttggtttaatgcagcgtttgcagatagagaaatctgttttaggactgctagatgacataggtttgggaaccatctcttgtaggcagtacgatttgtatcctgacctagttagataattcatggcttctgttagggtctactatgtgaatgaaaagaaacgcaatgctcaggaaggagctctaatcttcttcatccgcggtgtcagatacagtctaccactcagagcattatgcgacatttatggctttgacattgatctcactggagtttcactgcctggacagtttaaggatgctcaggttttctagagcaggtttggtaatggaatttatgattccaaggacgcagtacactcagtgattcgtcaccctgttttgcgatatttggttacgctgatcaacagcacactcttatgcaagatggagcctggcaagatgagactttctgaggtgttgttactttatcatgctattccaaatagcctcggatttgaggaggttaaccgtgatgtcaactttggcgttgtctttgctcatcactggtttctctcaagaacaagccctttacgggtaaaaggaaaaactctaagatagttggcagtcttctcactcctatatttcagcattttagcatcagctttgaaggagagaaggtcaacaccatgagattcaatatggatgagacttatttgaagaactctcactggcttaaaggcaacttactgtggtgcttcaaagatgatacatggcagcacatgattcagttacctcgccctgcacatacaaagattacaggagagcatgaggagataggctttcatcccgatccttctcttctgcatgccgcaccacgcaccaggcgacagagaggttcagcttcaagatctgcgcctacacagaccgaggacgagttcattgaccctggtgggggtccgagagttggatcttcctcgtctgctcttccatatcaggtgccttctcctccaccaatcccgatggagccacacgtatttccgcagtacgtcgttgacagtttcaagagcgtctggaacgccatagctacactcactcatcatcgtcgtcgctctcccgcacccacctccagctcagaacatgaggactagccatcctccttatcttgctttgtttttgctttatttcagactattggttatttgttttgaaacttgttgcacttattttcctatgctttgttggaactatggatgtgtgttttagtgatttaacagtctaactggaggatccatgtgaaaacactaaccaaggctctacaacaatgagcagaattcacaaagctaaacgaaacgaccagagtgtcgatcgacaccaacatggtatcgatcgacaccacgctcaggtggcaactcatgtttctctaaattctaactttttttcgttcgattcctctagcttaataactccggggacagtgttatctaagtctgggggagtcagttactaacttcatcttttcttttcttatgagtcagttgtgtcattttaacttagatagtcgttttattgagtcaaaactctctaaaaagaataagtctgggggagaaaaagaacaccaaagaaaaaaaaataaaaaatatatatatatatatatatatatataaagagaggtcgatttatcatggtatagtacaggaacgagtctaaaaggttcttaagcatttacgtgattgatgagacccagcgatgatagcctagtggatatagttgagagctttggtatggaatctagaatgttgcgtgggctaacggagaattacatggtggtcaggatttgattagaagtgtttagtgcatggatttagtttgtatgatcaaggtaataaactagagagattgggagtttctatgtttttcaaacctctttcacagattcaaccttttgttttgcttgccagtctgggggagttgatatgtcctggtttttacagatttctaacatagtttcagaatggtttttagagtctttctagtctttttcagaatggtttttgagtcatttcaggtgcacttacacatctgggaactacagagcacaataaggaattttagaagcttttcagcaatcaagatcttgaagaacgtttttcagaagctggtgtcgatcgacaccacacctgtgtcaatcgacactcttattgctgccaagggaattctcgttttctaccaagtctttgagaagccctgaagtttttcttatttgcaaaatagtccttgcacgtttttagtcacgaatatagctaattgtttgg

SEQ ID NO: 2057 - DNA, 548 bp, Arabidopsis thaliana landsberg
ttaaatttgtttgtaggtttggtaaggacaagggtaagctaactcagaagatcacaaagatttttacaaacaagtttgatgggccatattacagttggagatgtgtgcctactggaagaagagaaagatacttcctcgaattcgcagatcttctacttttgttttgattattgtgtaactaacatcaaactctccttgttttgtagaaaacacacacttgggatccctcattgaccggtgattgaagctaaattctagaagatctgtcaactgcgtatgaaaaacatagtttataaggcagcgaggttacagcaacaacctccttggattgagaccacactgtgggcagtgtgactattgggacacaaaagaagccaacgcaaagaattcaaccacatcattagcacggatgtcttggtcctcacaagcatgtatcggagccaatgtcgttcttacaaatcgaggtagagatggtaagttcttttagctatgaacatttgttttctttacttatacaatgttaagaagttccttgttttgttttcaca

SEQ ID NO: 2058 - DNA, 658 bp, Arabidopsis thaliana landsberg
cgtttctctttcagccgagcccacgcgcttctaacacgtttcatcattttttgcggtctcgacgcgccttcataaatcttatatatagcgagccatccccttgagaatttctcatttgaagttttcgatgaaaaaatcaaggattgcctcattctctctgatctagatattcttcttgtaacctcttttaccggagaatcttcgccgtttctttttaaatatttgattttgccggctagaatattttgttatttcctcgtcttggtagacgtctccgagccaaaaatggattctaaatctccttccaccccgagcgcctctctctacgactccagtgattcgaaccatcaagatgaccttcccccccccatccacaaacgaagggcggtttggacgtcctcggaggacgatgccttcaacaaagatcgaggactttctttatttcggcccgaatgagacggaggatattcagcgtctcaacaaacagagggcttttgagaaagccgagaagaaaaagaacaataaaggccagagggcgatagtgccaaatcctcctggctcgactttgtgcaccgagcggttgctttcggatctgagggctcgattcaatctaggtgaggtcactctgcgtgtgccgagccccgatgagcgagccaac

SEQ ID NO: 2059 - DNA, 635 bp, Arabidopsis thaliana landsberg
  unsure (1)..(635): unsure at all n locations
ctctttaagatactcctcaacttgcagattcttgaactcggacccgttgttgctccttatctttttcacctttagctcaaattcattttgagccctccttagaaagcgttttagggtcccttgggtttctgatttatcttgcaaaaaaaacacccaagtgaagcgagaaaaatcatcaacaattacaagaccacacttacttcccccgatgctaaggtaggcaacgggtccgaagaggtccatgtgaagaagctccagtggtcttgatgttgtcatcacattcttgctatgatgagtgcttcccacctgtttccctgcctgacatgctgcacaaggcctatctttctcgaaacaaacattggttagtcctaacacatgttctccctttagaagtttatgaaggttcttcatcccaacatgtgctagacggtgatgccacagccagcccatactagtcttagctaatgaaccatcaccccttaaaagctaatgaaccatcactccttctanagacagatacatcaacatttgtaaaaaggcaattgtaccccatgtgacacaattgacttacagacagaaggctgtaacaagcgactctactagagatacatcgatatggagtgctagttggtgat

SEQ ID NO: 2060 - DNA, 777 bp, Arabidopsis thaliana landsberg
aatggatgaagctccaagggcaaaccttaagaggaaacaggagcaacaagatgaaccaaaaagatctaaaaagcgtcgtcgtcaaaggtaaattgatcagactgtcacagagttgaacaatgctcagtgttgcgactctttcattgctgtgttttggttgcagagtggcgcgcagcagttctaaattgcactctaacctagatgatgatgacgtcgcaagtcttcatggccaagtcaggcagttgataaatgtaagatgacagatttctgaagcttctggctctctatcttttaacattaatttcatcttatgaattgggaaatctgtcatacctgaggagttgttactgtcctcaaactctgtatcactagctgtcctcatgtagttcctgactcttgatgttttacaggaatcaaatgacttctggtttaagctagttgtcatttttgttttactggaactttggctttgtcgtatggttttatcttcttttgcagacaagagatacagatagtcataatcaagaagcatctcatgaagacgataaacctgctgttgtaacttcagataatttgccaatctctacagaagaatgctcgcaactaagctttggatcaagccctttgagcaacaacgcaggagagacctctgatgtagcttcaaagatggaacattcagatgctaggtattctgttactagtgatttcttttcccaaactatttataccatacttaccaactgatcatgcttgcttgcagaagtactgacttctatg

SEQ ID NO: 2061 - DNA, 631 bp, Arabidopsis thaliana landsberg
atagcctcgcattgatcaaatcgtggattccactgctgggtgcgaaaccctgtccttcagtttgaaagagtccgaccaactcgcgacttctttcaccacgtcgttcggcatgtactgctatgtcaccatgccgttcggtttgaggaatgcgggcgcgacgttaccagcggtgcatgaaccatgtgttcggcgaacacatcggtcgcacagtcgaggcctacgtcgatgacatcgtagtcaagacaaggaaggcttccgacctcctctccgaccttgaagtgacattccgatgtctcaaggcgaaaggagtcaagctcaatcctgagaagtgtgtcttcggggtgcccggggcatgctcctggggttcatcgtctccgagcgaggcatcgaagccaacccggagaagatcgcagccatcaccagcatgggacccatcaaggacttaaaaggcgtacagagggtcatgggatgcctcgcggccctgagccgttcatctcacgcctcggcgaaagaggtctgctctgtaccgctcttaaggaagaccgagtgtttgcttggaccatgaggccgaggaaccctcgagaactgaagcgctcttacaaggcgcctgcttggtgcccagctgatggag

SEQ ID NO: 2062 - DNA, 4619 bp, Arabidopsis thaliana landsberg
gcactatccagcttaagtgcaagccttgtagagcttatcagatcaaccacaacaagagcagcagaagaaactttgtctgaaatggaacagatggatgagcaagaccggccctgagaataattgggttagagcaaaataaaaagtggggtcaaaattttttattgccataccatacaaaacaaataatattattctatttgatatgtatatgaaagagacacgtaagagaaatagagagtaaggtaagattcttattatttttctcttcttctacatttcacaatgaaacaacgtaaatatatataggagggaaaaacttagggagtaagtgtcttaaagataaggtaacctggtgagcaaaacttataagtataagataaggtgatatgatctaatctaaagatggataatcatccatgttttctaacacttccccttgagtatccatcacttttgaggagttacatactgcctcgataaaaaccttagcatggaaaaacctattgggataaaaaccatgacaagggaaaaagagtacagtgacgtaaaattcccctcgaaaagacctcacaaatctcgtagatgacgcattccaatactttgaacatgctttctaaatgtaaaagttggaagcgcctttgtgaatatatctgcttttgagaacgccacgagattgcagttcctccaatggtaaaatcatatccggtttgcagataccctgcatctgcaaaaccaacttgaccaaactcggggtttctaggataatataatccaaaattagtagtaccttgaagataactgatatacctcgattttcactgcttttagctatgattaaggtatagtttttagagtcattttgttatttgtagagtcttttctagtctttttcaggtctttacatgtttgggatgcatttggagattatggagcattctggagcaaaacagacaacttaagctgcggcagcaatccggagacaaaaattgacgtaggtgtcgatcgacacaacccccggtgttgagcgacaccaatacctgacggtaagggaattgcgcaacttattgatgtttgaagattttcaaattcggcccagaactttctcctatttttgaagaagtccttgcacgttttaggtcatatatatagttttaaaagtcattgtttagacctaactctgattatcttttttattcttggaagcaaaaccctgtggagactccctttagagaagattcttctaaactcttttctcttcttaattccatcattgatttcttattcaatcatgttttgttcttctatgatcatgcttgagtagttctcttgttgggtttagagattcttattagggatttggatggattagtagatcaaaaaccctgttaggataatatatttagaattcttcatttttgattattcttaatgctagttttagttagttctagagtaaatagctagaacttgattttaggttattaggtatgcccaccataggtatctaataatggaactattttagatgagcctagtatttagatgcgtgctagtgtccattacttaggtgaacttatcaaacctgattataatgcttgcttagttctagggatttacaagagagttaggatcaaaactattgagcatagtgagtttcgcggaataccaccggttactttatattagtgatttgtgttctagagtggttcgataataatcctaatttactgctagatatactattctgatatttcctgaggatttccctaaacccaacatcttaatcatctgaatctacaatctcttttatttcttgtcttgtcttttacttttattacattctctgtttagctttattcgaaactgttaatctactgtgtgatccgacaactttgtagaattcgatccctaagtgctataacaacctctttatttgagagagtagtcattagggtaatttgactcatatcagcccttatctggttggttcaaaggtaattgtgcatacagatcattcaaaactcaagtaccttatgcagaaaaaggatgctaagccaagattactacgatggattcttcttcttcaagagtttgacatcgaagtacgggataggaaagggattgagaatggagttgctgatcatttgtcaaggatcaagtttgaagatgacgttcctatcaatgattttctacttgaagaaagtatctacttggttgagacaagtttgcaggaaaatcatggcagtgtcaattcacgcgcagatgagagctgcatagaatcagtgtcgattgacaccacacccctgtcgatcgacaccatcgcgtttcacagacagatggttctgcacaatcagtgtcgatcgacacgagatgctgcacatagccgatatgtttacacatcgcctctgaaggcgagattgcagcataagtccaattttcctccatccacatcctgaactccgtcaagtcaagctattgactcaaaacaagcgcttagtgggaggcaacccactggtttgatttttcattccctttctttattttctttatttttgatttatttttcctgccgtcttcagattagaatgccacttgggacagtttcgtttaagtgtaggggaggttcttactaatagagctattatttatctatacttatcatttctcgtatttaagtttatagaggacattctacctgctcataaaaaaggaagagtaaaaaccgttctctttagtttagttaggaatcatgatcgatatttctcttgtttattgcctgattgttgagtggtacaggttcgagtcaatccgactattggaaaatctagatgccaaaccaacagacttgaggatatcctagtttccaacacaaccactaaggctagagctaatctcactactcttccttttacctcttcaaacggttagtattcacagatcttgactccttgttcatacctgatattgagaccaatgtgataaaaagaatatgttcctttccccttataaaaagaaaaatatatatatatatataatgagagattgagacgactttaagatagtgtataggggtagaaatgtttcctatgacccaattattatacattgttaggaatgatcaattacaaatgttggaaatatgccaagggtgtcaatcaagtatgcgagttcccctttgtttactcttcaaaaagaataagtctgggagagaaaggataccaaaagaaaaaaaatatatataaagaatggtcattttatcatggtatagtacatgaatgagtgtagaaggtttttgaatgttagcttgcttgatgagacccaacgatgaaagcctggtggatatagttgtggaacttaggtatggaatctagaatgttgtgcaaacttgcggagaagtacaggttggttaggatttgattaaacttgctaggcatatggatttggttagaatgatcatggcaatggactagagaatgttggaggtttctttgtgttttcaaacctcttccacgggttcggctttagtgttttgcttgagggcaagcaaaagctaagtccagaggagttgatataaacctatttttacatgttttacctatgatttaggtataagttttagagtccttttgttatttgttgagtcttttctagtctttttcaggtctttacatgtttgggatgcatttggagattatggagcattctggtgcaaaacagacaacttaagctgcaaaagcaatccatagacaaaaattgatgtaggtgtcgaacgacacacccctggtgttgagcgacaccaatacctgacggtaattttgagacgcaacttattgatgttttgaagatttccaaatatggcccagaaatttctcctatgtttaatgaaggcccaacacgtttttaagacatatatatagtttttaggtcattgttaagaccctaagctttgggaggctattccctttatctattctgttcttgggagcaaaaccctgtggagactccctttagagaatatttttcttaactctactctcctcttgttttatgcattgatttcttattcaatcatgttttgttcttctatgatcatgtttgagtaatcttcttgttaggtttacggtttctcattagggttatagatgatttagtagattgcccccttgcttggttatctgtaggattcttcatcttgattattcttaatgctagttctagagtagctaattagaacttgatattagataataggtctatgcctaccataggtacttgttatttgaactatcatagatgagcctaggcatttaagaaagaacatgtaggctcatagaagggttctagtttagatactatgtgaactaataaaactttataataatacatgctttagtataggatttctcggcttctctggttatcttagctctaagtatagagagtttcgcgtaacaccagcgattactctaaaatcatagtttgagttcgagaacggtacgataacaatcctaatattagctagatgtacaatttatgtatctctcgagacaattccttagacccgacgctttaatcttctgaatttacaactcatttactggctttattgactggacttt

SEQ ID NO: 2063 - DNA, 582 bp, Arabidopsis thaliana landsberg
  unsure (1)..(582): unsure at all n locations
tagtagatttcctnnnnnnnnnnnnnnnnnnnnnnnnnnnnccacgcgctaaggataagatggagagagaatctcaaactcaatcactaccactccttttgaaatttcactcgacctctgaaacctaaggggaactcgacctcgccgaaaccactcgaccgcctccggaaagaattactccgccgcctcaatcgagtttcacgactcactcaaccaccgattccggttcaccgtgaatcactccaccacgtatcgccatctctcaccaaagagttactcgactcaatttcactcgagttcctcgctatactcgaccgtttcactttgccgttcgccatcactttattctcaccaaactcgaccttctctgcgccgccagaatcgagttccctgcctcgttcatcgtcgaagtctcaggaactactcggttacaaatgcaagcctcgaccgccgaattgtggttccatcccaccaattccgactcaacctcctacaacagagccactcaaattcaccgacggcttactcgaccaacctgattcactatctacatactactttcgtcatatcgtttttgagtag

SEQ ID NO: 2064 - DNA, 590 bp, Arabidopsis thaliana landsberg
  unsure (1)..(590): unsure at all n locations
tgataagaaaaggtaaaagactctaggtgaagtaagctaaagaagtagaaaagtctagtaaagaaaagaaagagttcttgttagctattgaagatgggcaaaagcccttggttttaaaatgttaaatacaggaaccttagttgttaaagaaatccaaatccgctagatgtatcaaagtgttgagaaagcttctcctagagttaagagaaaagaaaagaatgattagaaaaagggtttaaaagattcatgaatgcaaagggtagagttaagttcttatattgggattggagattggataaccattagagcttcatttgatatattctgggtagatgggatcttatctctgtatgcatagcttgtgacttacctttagcattctactaaagcttaatcattttttgagaaatctcctgttactgaagcctattttgtaagggaccatctttgtcccttgacctttactttagccaaatgagttgattgatgatgcattgcttgatcccgttcagacnnntatgatgnntaagggattggtagatttgaaaccatgtatangtcgagcatatgagccggatatattgataatg

SEQ ID NO: 2065 - DNA, 741 bp, Arabidopsis thaliana landsberg
  unsure (1)..(741): unsure at all n locations
cggggagaaatccanaaacccggtttccatcaacaggggaacgtcgtcgaaagaggactaactttaagtttcagcatgggattaatatcaacgcgtggttgcagcccgaggagtccgcttcataattaaatgtgttttgtgttgtgttgttatgtctgtaccgtgtacttgtactgtctgtactattgaaatataattttagtattgtttttttatttaaatttgcttcaatttaatttaatttaaatacttttattatatcaaaaatatgggtttttgtatgaaaaactatccagtttatagtttttgtatgaaaaatacacctctctctacttttaattaaaactataattatttctaatatattaaatgtaaatttttaagaagctgtatttttaatatatttttactatttaggagacaaatacagtttatttattttatctactaaaatatgatattattaaaaatgaggtaattttaaaatttttctcataattataaagaaaaaatttcatacttggaaaatctttctatacagtgttctagaacatttattaatcacttatactaattatcatacaatctaaaaaacaattgaacatattatacttatcaattcagaaaacacttcttacattatatggaatgcattggatcatgttgaaccatcttgatataaacatggcaaaaacgcatatattnggaaacttattataactaaatcatgatatcttatta

SEQ ID NO: 2066 - DNA, 578 bp, Arabidopsis thaliana landsberg
attgatgtaaatctatgtaagaaattcttatggggccactaaaattttatagataatatgcactagatgactatgaaaacgaaaagaatcaacaaactaactatgagctacagtgttttgtcagatggtagatgaaatgaccatttaacctttcctttcaatctttatgtttcatcatcatcaatacaacatcttatttctcaccgtcatcagcgcaacatccaccaccaccctcaacatcactaccaacagtcaagattcaatcgcccaccaccctcactccaaccaaatcaatattccctctaccgtcatcaacataacctccaccaccatcctcgacaccaccgtcacaagtcaaatttaatcacacaacacaaccaccaccacccccactccactgccacaagttagatttaatctcccaccactatcctcgacaccatcgccatcatgctttaataactaataaagagatatttatcaatatttcatggtatacaataaaatcgcataaattcttgcaattatgttctatatatttcatgctattcaacacaatcacatgaaatcttgtaatt

SEQ ID NO: 2067 - DNA, 584 bp, Arabidopsis thaliana landsberg
tatcctgattatgttgatgaacttgtgatactctaggaggctcagacctttttcctgagtacctgttcgtggagtgaccacccgggataacagtgcaaccatgagggtggaatgggacgcccttagctgattaattagatgaacctgggggtgtagttggctttgccggaggccgtcaatgggggccggggcatagtgctcgctctgccaaggttggggtgtagaggttcattcgatttggttttgttagtcatcgaccttggggaggtgtactgcgtttgtacgactggcgaaacctaacgagcagctatgcaccaggggactctttgtaaagggtacgtagtgaaaccttgccgactcaccttggtagtggttgagggtttgatcgacccaaggcataaagggatcacgacttgtaggtaaagtgtgcgacctctgcagagtgttagaaactgatatatcagccgagctcactgttaagagcagcattgggatcatctttgattagaagactttggatacttttatgatgatgattaataatgatgtttataaatctgatctctgatatttctcctttgatg

SEQ ID NO: 2068 - DNA, 535 bp, Arabidopsis thaliana landsberg
atccgaagatatccttcgatcttacttgggttagcttcaataccctttgttgataccagacatccaagaaacttgcccttctttactccgaaaacacacttttctggatttaatttgagaccagcttgtcataaattggcaaacgtctcttgcaaatcggcaatatgattttcttgttttgtgctttttactatgatgtcatcaacataagttagcacattcctgcctatttgagagtggagaaccttggcagtcattctactgaagcttcatatagcatttttgacaactaggagttatgaagcttgtatttggctcatccgcttttttcatccagatttggtgataacccgagtaacagtcttataagctcatgagctctgaagaagatgctgcatctacaagggagtctattcttggtagagggaattcatccttcggacatgccttgctgaggtctgtgaaatcaatgcacattctccagttcccattaggctttttcaccataacaggtgtaagcagccactctggatat

SEQ ID NO: 2069 - DNA, 581 bp, Arabidopsis thaliana landsberg
  unsure (1)..(581): unsure at all n locations
tgcctcggggcaccccgaagacacacttctcnnnnnnnnnnnnnnnnnnnnnngccttgagacaccggaatgtcacttcaaggtcggagaggaggtcggaagccttccgagtcttgactacgatgtcatcgacgtaggcctcgaccgtgcgaccgatgtgttcgccgaacacatggttcatgcaccgctggtatgtcgcacctgcattcctctttgatgaaccctgccgccattagcttgtggatctcttcgccaatcgctctgcgcttctcctcgtcgaatcggcgcagaggctgtctgacgggtcgggctccggcccgaatatccagcgagtgctcggcgacatccctcggtatgccgggcatgtccgagggactccacgcaaagatgtcggcgttcgcgcggagaaagtcgacgagcactgctttctatttggggtcgagcatggagccgatccggatctgcttggcggtgtcgcactggggtcgagggggacggccttgacagtctcgctggctcgaagttccggcatgggcttcacgtctgggactccttggagaggttcccaggtcggcgatgag

SEQ ID NO: 2070 - DNA, 453 bp, Arabidopsis thaliana landsberg
tgtctggcccaaacacttgcttttctccaggctgatcccattgcaacagagttctgcaactccttccatagagcgcctgaaatggtgacatcttcaaactggcctggtaactgttgttataggaaaactctgcatagggcaatctcttatcccatccggactgatcttgcaacgcacaggctctcaacatgtcttcaagaatttggttggtcctttcggtctggccatctgtctgcgggtgataagctgaactgaagttcagatgcgtacccaaagcttcatgcaactgctgccaggcaaacgatctgagacatatacaactctgccaatactgcactgctatagttggtcttgacaggtatgaagtgggctgacttggtcaagcggtccactactacccaaatggaatcgtagccggctcgagtgcgaggcaatccgactatgaaatccata

SEQ ID NO: 2071 - DNA, 522 bp, Arabidopsis thaliana landsberg
  unsure (1)..(522): unsure at all n locations
atcccaaggttatctcttaaccgtgagcacgactgatataccagtttatgaaggtcgcacactttacccacaagtcgtgattcccattttgcccagaaagagccaatctccattgaccactacctaggtggcctggccgggtatcactacatagcctttacaaagatttcccagaggtcatagccgcccgttaggtttctccagtttgataaacacagtacctctccccaaatgaagggtgactaacaaaaccaaatcaagaacctctgcaaccagcctcggcagagcaagtactgtgcccggaccccatatacggccctacggtgaagccaactacacctctggttcctctaattaatcaactaagggcgtcccattccaccctcatgngtgcactgttatcctgggttgtcactccccgaacaggtccttacagagaggttgtcagaaaaatggcctgagtctcctatagtattacaccgatcattgtcggataacatcattgtatcataaatatttaca

SEQ ID NO: 2072 - DNA, 505 bp, Arabidopsis thaliana landsberg
gtcatgcaaccggcgcgccgatgctgcatgcaagcaactgcaccgccacttgcgccaccacctcgcctcctcgattgcggaaccaataccgcgactcgaggcgacccagcgcacgacccaccagcgccagcttggccggctggtcaatgcgaccgaaagtgggccgacagtaatgacggtggcaggcgggcgggacagcggtcacgtcgtcaaccaagctcacgtcccatccgggggcagcaagacaaccccctctcacggcgtgaagacaacgcgcccgtgacccgttcctcgaatggctcgcgcacgccgacggccgccccgccaaccactcgcctcgtcgcattaactccacggcgggacaggcggcacctatggcaggagaagcgggcgacgcttcgccttcgccgtaataaccacaccgaaaaagggaccgggaaagggggatacccgaaaaagatccttcccgtgaaggaccaggctccgagctctttactgatcagag

SEQ ID NO: 2073 - DNA, 561 bp, Arabidopsis thaliana landsberg
tgcacctcgactctagaggatccccctctgatccaagtgatcccgtctgacagcgaagagggtgacgatgaagaagaagacagcaacccttggaagcgtgtgaagaacgagcccgatgtggatgttaagaacgaggcatccatctcgaaccccgaaccggcgatgaaggaacctgttcctgaacccctttcttaaatgttccccgaaacttgaaaccctttgttttttatttttgtatggacttttcttttgggctttggcccgtttttatttaaggagactttccaaatttccttgatttttaaatattcgtctcggagagactctttgaatgcaggtcgagtaggacgacgtgaatgctgccgcgaatcactccggccttgaatggaatcacatctttgaaagttaagagtccctcttataataaaatcttttttggtgcagttatggcttttaaccttcgatgtccggagtccatgcagacttttccatggtcagaatgatcgatgaggacattccgaatgtgccggataggggacgctccccacttcgaactttaga

SEQ ID NO: 2074 - DNA, 580 bp, Arabidopsis thaliana landsberg
gcgcctacatcaacttctatactaccatcacattggactatctctaggacattttaatcatacccatttagtttttttatagaacaatgggaactaggctcgaacaatagttttacaacatttctaagtacataccattcaacatttataaccgaagacatttccataatatctctggacaagtagaagtatatacaatctagacaccgctctaccaagtatagtcccccattgtattcatctagaaattgatgtgattcccaacacactgggctatcggagaaacaccatgtctcacaatacattccacacccctttggagtcaccgattttatatggaacctcaacggtcctctgttccagcgcagctgttcaacataatatataataattctgtgactgggtagacttctttagcagctgcgacgaccattattgcctcttccaaggtaaaaaatagaaatgccaaaataatgcttttaacatacaaagcataaggattttttttcttttacacatttggaaaaaagaagaatgtacacattatcaagtgtggaccacaatacaaaatctttagatt

SEQ ID NO: 2075 - DNA, 591 bp, Arabidopsis thaliana landsberg
caaaacttgcatttgggtccctaaggatatttgtgctaaccttgcaggacccaacatgagttgggtacctaagacccaagcctaaatttgccttgcaggtttatgcatccgggggttcaagctggattattgacagcggatgacaaaccatatgacggggggagaagaagatgttcacctcctacgtcaagaataaagattcccaagattcaataatattcggtgatgggaatcaaggcaaggtaaaagggttagatgtgtctgtctttagaagatgtgatggttcactagcttttaagggtattctagacggcaagctttacttagttgattttgcaaaagaagaggccggtctagatgcatgcttaatggctaagacttgcatgggctggctgtggcatcgccgcttagcacatgtggggatgaagaactccacaagcttctaaagggagaacacgtgataggtctaaccaatgttcatttcgaaaaagatagaccttgtgcagcttgtcaagcagggaaacaggtgggaggctctcatcacaccaaaaatgtgatgacaacatcaagaccctggagctgctacagggt

SEQ ID NO: 2076 - DNA, 438 bp, Arabidopsis thaliana landsberg
tgcatgactgcaggtcgactctagaggatcccctagacaactaacaacaagggcattgaaactatctagtgaacattgcaaatttacaaggctaagatcatcattatcccctatgcaagtgcaaaatgcaacaacctatatgataacattctaaaaacagttcactctatttttttgcaatcattttcgaaaattttcaaatttctatggggtaatctatgccttagattatgcacaaatttgaataagataacatgaaacaatgttagatacatcctgaacttctcccccaaacttaatttccacagtccctggtatatgaaaagttcccagtagaattcaagaggtttaacccggcaatgcccgatgtcccggaaatgccatgatatctccaatgaacaggagtgctaccgcagttctaagctgaagtacatgtgg

SEQ ID NO: 2077 - DNA, 489 bp, Arabidopsis thaliana landsberg
gaatcttactcacaaaagccaccaaaaaataaagctatgacgctataaccacaaatattttgcgtgacttatcgtggttatatcgacttatagccacgaatattcatgcttagccacgaaaattaaagtggctatacatagtttttttactagtatacgaacccgctagatctaagaataggttggagatgacggttctctatttttaacaagcatcattgtcgtgcctacaaagaccagggaaatggctagtccatgttaaaatcgatctcacacacattggatcattttattggagtcttgccgaacactcaatcaccatggcattttccaggtttctgtatctcgcttgaggtaagtaacataatttatcattgttacatttacgtactaattgaagctaacaattaaatttgcatgtattttgtgtaagtttttagcatttgaggtaatcccatcacttcgggaaagattcatagaagaaaaaga

SEQ ID NO: 2078 - DNA, 1331 bp, Arabidopsis thaliana landsberg
  unsure (1)..(1331): unsure at all n locations
aaagaacttcaaggtttgtagtctgctcttatcacacatcctggtatttattagcaacgtgaaaggctcagagtgaactgtactttcatgatctacagaaaaccatggcgttaaagtgtctgtcaatgacatagttattaaagcagtggcagtcgcactgaggaatgttcgacaagctaatggtgagaaattattttctcctcgtaaatgatttcattaaaaataactaaactatggtttgttcccatccctaactatgcgctagattcaaaccttagttcatcctctttaaggaaactcggcttccatgttggattattcttgcaaatgccgtttacctccgttgagagtatttagtaaagatgttttgagattgtaatactgtaacattcaatatgactggtaatgcattttagactcggttttagtcgttacaagtaggacattttttggtgtgagtttgatgtaatgatttgtggattggaatcggnggttgttttttctcttctgctttctcaaacctttcttatggttgcttaaagttctctttctcaatgtctggcagctttctgggatgctgagaaaggagatatcgttatgtgtgacagtgttgacatatcaattgcagttgcaactgagaaggtacacttgtgtgtttgattttctgatcatttcaacagtttatccctcatcatcttggcattttttgcagggcttaatgactccaattatcaagaatgcagaccagaaatctatttctgctatttccttagaggtaattttattctctctgaagttaaacgaatatggaaggctatagaggcacatatgtttgatcagttcttaccatattccatgtgttgttgatcgctatagttatgaattttaatatgtcaaatgatttttggatcaggttaaggagctggcacaaaaggctcgatctggaaagcttgctcctcatgagtttcaaggagggacattcaggtattcatcatttttaagttattaagcatagtacggaattatcaatcatgtgtaacttttcctacttaacgagaaaaccatactttatcgttttgcagcatatcaaatctaggaatgtatcctgtggataatttctgcgcaatcattaacccccctcaggtaatcatagccttaacgatgcaccctgaatcacagattgaagattaagttttgctgtttgtaatttgtggtgtagaggatttagtttaatatttatagagatgcagatgtgtttttttggataataaacttcaggactatcaattgtcttgcaggctgggattctagcagttggtagaggaaacaaa

SEQ ID NO: 2079 - DNA, 573 bp, Arabidopsis thaliana landsberg
ttgacaacaaaaactctattctactattttcaaaatctctcaagtggtagctgatccatttatcggagtgcagtggaagtctttcatggtccaagtccacctttccctttcaattcaccgtcgagactaaatcaagcaaactcaagcaaatggttagtctcaaagggtcaagttgtaacacatctccccctaaacatgtgcatcaccttgcaacggacttgtgaggtccagggagtgttggtacaacttgagcaccataataagcaacaaaatgcagaatgaacctgatcaaatgcatagacacatgtatgctacaattcaatccaagttccgcgaatctaagacatttagctcactacgcaacctgcaaaaggtcttctcatctagaggcttagtgaagatatcggctagctggttctcggtgctaacatgaaacacttcgatatctcccttttgctggtggtctctcaaaaagtgatgccggatgtctatgtgctttgtgcggctgtgttcaacaggagtgggactttgctcagattgtagcaaagtccggaggtttgctcatcaaagtag

SEQ ID NO: 2080 - DNA, 542 bp, Arabidopsis thaliana landsberg
accgagtatttctgacagcagaagaccatatctgcttctcgaatggttgttatttttgaaaaagggtgtccaaacgcaagcaactccaagaacttcatcgtgtatggcccgcaatctcctgtagtcattctcgccttcacagtcgacttccgtgtgtgcgatattaaagcgtatacacagtattagccgttattaaggttgatttccaaagcaacccaatgttcactcttccagttttatcggagcatacacaacatcgacatccttcagccacttcatattgggtacacggtttatgtgtacttcattagcaatgtcggacagatatttaccccatttgaacccgatcttattaaaacacttcttgaagtcgcccacccgcttggtaagaagatgttgtctgaccctgggttaggatcctcagttactacagaccccttggcaatacccggcttttccatgactacccgtgcaagttaacgtacaccagtctatatattgacacatataatcctttgtatgcctattccgagaataggaaa

SEQ ID NO: 2081 - DNA, 601 bp, Arabidopsis thaliana landsberg
tgatattagagtttgagtttaagaacggttggataacaacctaatgatatctagacctactaatcattgtttcctgaaaatactctaaacttcacaaccaacaaacctgctttttgcttactttactttctttttattttttcttacactcttctagcttaatcttgatacttagctcattgtgtgaacaaaagaactttgtggaatccgacctttaaatattgcactcaatctgttatttgagagagaggttttaaggcaatttgaactatatcacttcacatgaatcagaaacgaaagtgcttaaacaaaacataataatcactttgtggctttttaaacaaattaatatttgttacagagtcttagattgattgatataacgttaggggatcaccaatacggaagtagagtcatattgtaggcgcaagaaccatgagaattgtaaagaaatcgatgtttgtaaaaattagttttgtcatgcttaacggtctaaatcaaatgacacataccatgactatagcgattctgaaccgttttagaaatagcctgggtagaatcgtacagcagacaagtacttcgcacgggccgatccaggttt

SEQ ID NO: 2082 - DNA, 3516 bp, Arabidopsis thaliana landsberg
  unsure (1)..(3516): unsure at all n locations
ttatagagaaaactgtcgggatcaccaggagagattggtttgtaaacctcgacgatttgttatttgcgtacagaacaactttcaagaaccccattggtacaaccccgttcaatcttctttatgggaaatcttgtcacttacctgttgaactggagtacaaagctatgtaggcaatgaaacttttaaattttgacatcaagactgctgaagagaaaagattgnnnnnnnnnnnnnnnnnnnnnnnnnttcgtctagaagcatacgagagctctaaaatttacaaggaaaggaccaagtcgtttcatgacacgaaaataacttcaaaatattttagagtagaagatcaagtgttgctattcaattctcgcttgaagctttttccaggaaaactcatgtctaggtggtctggccccttcaatgttagtgcagtaagaccatatggagctatcacgttgtctggaaaaggtgaagacttcaaagttaacgaccaaagactaaagaaatatatggcagaccaaacaattccagaaggaacttctgttccactggaagagccacccaacccccaatgagtatgaggagtcaagctagagactctaaacaagctcacttgggaggaaattccatgactatctttgtacatatctttatatttccttattgtttttgatgcatttggttagtgtcttcaggagataagtataaagagctgagtgaagtggattttggctatgagtgtacagctgtatactcgaccacatagcaatgaaaaatactcgaccatgttttatcttatccacgccaagagatcactcgaccgcggtgctggccgcagtagaagaagagaggtctagtatcctcagagcagtgttggccgtcacaaagctgatgaggtcgagtacccacctgctggagctgatacagaacatggcggttcgtctatggcccgggagcaatcacaggcagccattgacgagcaactacgttcattcttcgactgaggtaagcgcctcacttcaccattgtattatatcatctgttgtgatttgtttcttcattttttgtttctgttattggatttgtcctgagtactctcttccaagtttattcgcacagtggactgtgtgatttaagtttgggggagggctcaggaagtgtgtgttgcattgtgtatatttttgagtctgcattcatctaaggcatagaaaaaccaaaaaaatttgaaaattttcagaaaatgttttcacaaaaaaaaagggtgttcatgtagttgcatcacttttgggatcgagtctagagtgtttcatttaggattattgcatatgcataggggatgatgatgagatagcattgtaagcattttgattcaccggataaactcagtgccctcgttgctagttgtctgttgtgtggtcaatgaatttgaaataaaactgaaccatgcctagattgctctactcgaccacactgtcatgatctgataccattccctatcaatttgaacctgaatctgatctttaattatcatgtctgcatcaaatttgaactcatggataccctaaaatacttggattctcttattcattttgatcactcttgttaatccaagtagctgactctccttattagagcagttaccccaaacccaaacctagactttctttcaagccctatatcacttgtgagtgtttgtgaggtcttattccgattaagcttggtagaaagtgttaggttcgtaacgagagagatagtgtctcatgtagttctagttcgcatttttcggactagataggactaggtgggtgcttatactttgggttgggatgtgtttaaaagaaaaaaaggggttgattcattgatgagaaaaggtaaaggactctaggtgaagtaagctaaagaagcagaaaaagtctagtaaaggttttgggatttgtaaagaaaagaaagagttcttgttagctattggagatgggcaaaagcccttggctttaaaatgttaaaaacaggaaccttagttgttaaagaaatccaaatccgctagatacatcaaagtgttgagaaagcttctcctagagttaagagaaaagaaaagaatgattcgaaaaagggctaaaaaaaaaaaattcatgaatgcaaagggtagagtttagttcttgtattgagatgggagatgggattaccattagagcttcatttgatatactctgggtagatgggatcttatctctgtatgcatagcgtgggacttacctttagcattctactaaagcttaatcattttttgagagatcccttgttactgaagcctattctgtaagggaccatctttgtctcttgaccttttaccgtagccaaatgagttctttgatgatgcattgcttgattcacgttccagaactaatgaatgttaaagggattggtagatttgaaaacttgtgtaggtcgagcatatgagtctgaatgattgattgatgaggcatggctaacgtttttaagtagaattcgatcttgcagcttagaaccactaattccagagattcgtgaccatgtaccaaggtattggtgcagggagcgttttggctttaacttgttgattcgtaatgcctattaggttagctctcgtcaatggtgattgagtctgggactaggttaacttgagagtctctgttgcggtggcactcagatttggttattgaacttgttgcctagggttaatttattgagcatgtcaatcacctgtaaactgaggaaacgaaactactcaattaccctatcctcggaaattctttatcggattgaattctttgtttactctactgttgtttactgcatcttgttatctgtcgcttagtttctgcaattctttcttgttactcgaccttatactcgaccacccagttgtctggcaacagactgtgcagtcgagtatctgtgttttattttctgtctgttactcgacctgtcactcgacctcacctagtgctctgcaaagagctgtgttggtcgagtgttttactctttctgtttgattttctgttttctgcatgttcacttaggactgctagaacacaccaaaacctgttattgctgggcttgacttagtgatttctgatcacatcttgattgttagcatcacacccatttggattgacaacctaaaatactacaacgacatgattggtgttttaagataattgactaaaaacctattatcaatttggcgccgttgccaattgggtgtttgtttattacatttgagatttcatgcttgcttagacaaagtttttttttcaatttgaatttcagttacttattgtgtgtttttcttgtcgtcttcttgttccaggtacatctcggttgtatgcaaactcgatcaacaggcaacctgaacctccttttcaacgataacatcgaccgcatcgctcgcgaactcagggaaggagaaacacagtcaacctttaacaccagcaacaactcgatatggctgacgaacagaatcaacagaatggccctgcc

SEQ ID NO: 2083 - DNA, 4343 bp, Arabidopsis thaliana landsberg
  unsure (1)..(4343): unsure at all n locations
agcacggtagagtgaacgaaccaggatcactaagcttcttaggaatgattttcttctgtatgatagcgctgcattcatgactcaataccaccatctcttgcacttcttgaattctctccacaatcaagtctttcagaaacttgtgagagtctggaattagcgctagagcgtcaacaagaggtattcgcaactcaacctccttaatgttcttggcaaacatagctctatatttgtctgccaacgctttcttgtgacggccaggaaatggaagctgcggtttgtagggaggagggacaaagaccttttctttgtttttgacagcaactggctttggagcagttggtgatgctgctgggatgacaggtcgagtggtcggtcgagtaacgctgtcgagtggcagctcgagtggttgctcgagtgactggtcgagtggtttgtcagcttgatctttctcgagacttaaatcctccccatcttgatcttcactgtcctcagtgaccgtgtttggttcctccctagttgcaagtgcttttacactacgcaaggtgatagcatgagcatattcttttggattctgaactactttgcctggtagttggcttgtttgttgtgtagctgaagaagatgcagaatgtccctctaagtaacggactttggtattcagtgtttccatcttaacattgagatcattgttgctacagtccagcttgttatgtaactcacatatcttctttgccatctccatggagccagaggcttgcccgtgaagtagctgttgtaccatttgtttcatatcagcgtcaggggcagcaggaccttggttttgctgaggtgcaaacccaagtggtggttgctgctggtagttcccttgaaattgctccttgggaacaaaaccttgattgtagagaacaaaaggtttattatgaccttgttgttgttgtggaggatacagttgatcctcaggattagcaacgttggtgctgcggtaagagaggttggggttgttcatcttgaagttgttgtaccctttgtagccaccttgattgttgatgtacctaacttcttctaactggttaacctccccattttggacttgatactgctcgtcatcaacaaggaagtgcacatgcttctgctggctaagaagaatcctgtccagcttgtcattcagcgcattgatatctttcctgtgtttgtcatcagagtcagctgtttctctgacggtcctatcacagtcctcgttgtaattgccatctgattgagcaaggttctcaaccaattcccagccttcttcaacatccttgttctggaaattcccattgctggcggtatccagaagcattctgatgcgtggtaggactcctctgtaaagagtgctgagcagagaggctttagtaaagccatgatgagggcattggttgttgattctgttcttcagccatttcgagtggttgccgaggtacaaggttgactgtgtttctccttctctgagttcgcgagctatgcggtcgatgttgtcgttgaaaaggaggttctgattgcctgttgatcaagttcgcatacagcagaggtgtacctggatcaagaagacaacatgaaaaacacacagttagtaaccgaaaagaaaattgaaaaagaacttgatctaagcaagtctgaaatctcaaatttaacaaacaaacacccaattggcaacggcgccaaattgataataggtttttaagtcaattaaacctaaagcactatcatgtcgttgtagtactgaaggttgtcaatccaaatgggtgtttctctaacacccggaacacggaaccaatcacccaattcacaatggtcaacaatcaagtctccagtagcgtagttgatacagaggggaacccaatccctccaatccagacagatgctcctgaagccgccgctcccgcgaccctagcagaactgaggagtatgatggctcaacttcaacagaaggtaaacgatcaagaacaagcaaatcggtccttagcacagcaactcgaagcagcaacctctcaaggacaaatcaggactacccgtttcggcgcgaggcacattcacgatcgacgggcggcagcggatctcaatcccacacggctcgtattccaaacacctggcaataccacaagacccgtccgcagaacggcatcggaaatcggacgggaccgaaccgagccggcaattttgagaaatcgggaaacacatcgaaacgaaccacaactccctcctctccgagcggagtttaccgaagccgatcgtatcgacgctttggacaatgaagactccgaggagaacattagatgggctgaagaatacgccagagagcaggaaataagcgccatcaaattatccctagtaaaggcagaaaacgagatgaagctcgtaagatcccaaatgcataacgcagtctcctcagcaccgaacatcgactgcattctggaagaatcccacaacacgccgttcacacacaaaatctccaatgcaataatctcggatccaggaaaactaagaannnnnnnnnnnnnnnnnnnnnnnnnnnnnnnnnnnnnnnnnaagtcgttcatcatctctgtggcccgagccaaattcagaccagaagaaagagacgctggtctctgtcacctgttcgtcgagcacttgaaagggccagccctggactggttctcgagactcgaaggaaattctgtggatagttttcaggagctatcgactcttttcctaaagcaatgttcggtgctaatcgatcccggcacatcagacgccgatctatggtcactatctcagcagcctaatgagccacttcgagatttcctcgcaaaattctgatccaccctagccaaagtagaaggaatcnnnnnnnnnnnnnnnnnnnnnnnnnnnnnnnnnnnnnnnnnnnnnnaatccgaattttgaaaggaactaaacttgtccaaaccaccgacaatccgagacgccctgcaccgagcctcggattacgtatcccatgaagaagagatggagctactagctagaagacacgaaccgaccaagcaaacgcctcgcagcgataaacctcagaccggcgctccgaaccacaagaaaggcgcccaaggtggtatgttcgttcaccatgaaggacgaaatttctccggagcccataattaccaggtcgatacaccccgaggcgaagccacccgaggccgagggcgaggcccgcggacgaggacgcggtcgagaatcctacacatggacgaaggatcaaccctcagggaaagagcaagaatattgcgaattgcacaagagttacggccatcacacgtccagatgtcgtagcctcggagcgagattggcagcaaaattcctggccggagaaattggtnnnnnnnnnnnnnnnnnnnnnttagaggcagaaaaaggtaaaaccgagcaggtcaacgctgtggccaatcccgagcagaccgccctcgcggcgaaccccgaaggacctaaaagaggccggggtaatcgcaaaacagacgacgatgaaccagaagctgctcggggaaggatcttcacaattttaggggattcagctttctgtcaagatacggcagcatcaatgaaggcatatcaaaggaaagccgaagcgaatcgtaattggacgcggccatttaatggaccaaatgacgaagtaacctttcacgaaagcgataccaacggtttataccgttcacacaacgatcccttagtcattacattaaccatcggtgatttcaacgtcgaacgagtcctattcgacacgggaagcacactagaatccacgagatcaatccctgacccggtaatctccatctgtcttgatgacgaaaaacccgatgcgaagaagcttttcaggaactcaaaaagtacctggcgaccccaccaatcctcgcgaaacccataatcggggaaccactttacttgtatgttgccatgtcggatactgtagtcagtggagtgttagtccgagaagacagaggtgaacaaaaaccgattttttacgtctcgtagacattcaccggcgcggaatctcgctacccgcaaatggagaaactcgctctagcagtcctaatgtcagctcggaaactgcgaccctactttcaattccattccatcgtagtaatggaatccatgccactctacgctatcttacacagtccaagccaatcgggacgcctggctaaatgggcaatcgagctcagcgaatatgacatcgagtatcggaacaaaacatgtgcaaaatcccaagtcctagcagatttaatcatcgaactacccacaaaggaggcacgggagaacccgctcgacacaacttggctgctacatgtaga

SEQ ID NO: 2084 - DNA, 387 bp, Arabidopsis thaliana landsberg
  unsure (1)..(387): unsure at all n locations
tcgaatgcgaggtcgacgcccggcgtgccctccgttaggggcgctgggaacgtcgattcgctcgaatgttgttcttccaccccgcggggaagatgtcgtcgattccgccgccggcggcggnattgtcggccgccattgtcgttgtcgcgcggcggtggaaggagtatcatgtcgtagctgccgtcgaaggacatgaactcaagactcccgaaacggagcaccgtcccgggccggagaggttgctggagactgcccatctggagcttgacgggaagctgttcgtcagcacgcagcaggcccctacctggcgcgccaactgtcggcgtttcgagaccggggggtccctgagccgacgagtgagtgtgccgcgtgccccagcccagatgg

SEQ ID NO: 2085 - DNA, 1286 bp, Arabidopsis thaliana landsberg
  unsure (1)..(1286): unsure at all n locations
tatggtaaaactgttgaggaagtttatcattaagtttgatttactacacaactgtttattgtcttatgaacctgaaatgataatttctcatgtaacaatgtgagaaagctagtgtaagtgaaacaaaatgatcacacttacgtgacaatgtgagaaggatattgtaactataaccgacctcacattgaaacaactatacttgtctcgcaaataagatgataacatcaatactctttgattttacctcatccacgttctctatataaatcatatatatgaaagttggtcaactctctccatatgaatgacacatcatcacacaagaaaatcacatttgtcattcaatattttttaaattaaaaaattaataaaattaaataagcaaattaaatgtatcatcattcctactcttaattgaattaaaagacgatcatttctctaatattgatatatgcaatgctagaagattcaaaagtgttgacttaaatgacattcaatcatgcgaatactcttcagatcttgttgagttgaagtcaatccaaactttaatcatgagcttatcacaatgttgttgaagtacataaacatggaattaatttatttataatcgagtaaggtaaattttaaaccacacaagtaacatggttacacataattgtatcaaaatatcaaattatgttgttatatgtattcatgatagtaaaaaaatattaacatcttatagataattagatttatacatggaaattagaaattgatatttcaagttacaaatgaatctaaccataaaaattataaatataaattatggatctaatttcattaacaataaaaaaaacataaattagcaaaaataacaatcaatataaatatttttttaacaatttttaaaacaaactcacgcgtagcgtggatactcatctagtacccataaagcataaagttaaatcaaaccaaagtgtgaattcaaaagaacaacaaaaaaaaaaccattaaaattagtttagctttgattgtgcctcaatgcaacctgatacaccactgataagacgacatgtcatcaaaatgacacgtgttaaaatatcattcgctattaaacgtacactgcgtgtcaacataaactgaggaagttaagaactttttttacactgcacgaagaagaccctctcaaaagcacgaggaagggatcaaatcggaaacttaacagaatttagctaccaattactgtctccggcgagatctcatttgatccttcacggtggcgtcgacgtncgggcaacaacagc

SEQ ID NO: 2086 - DNA, 469 bp, Arabidopsis thaliana landsberg
cgacaccctgatgtttaatcgacactcgctcttttttctacatttagaaaagatgaaggttcagctgaacgttcgttctgaagtattgggttgagctgctttccgctacgtagtgtgactgcattgatagatgccgatgtagaagaaggctcagggatacgagattgcagattgttgattttcccattaagatctgtgtacttgctattaaaatcatccacgaactttgtttggtccgcaagaatctgcgcaagcatggagtcgagccgactgtctaaagagggtggagtggtggcttggataggagcaaagattactgaaacatgattctcttaatgcttcactagtggttcttgtcatgaagttacaatagcttactacatcgagttgactccggtatggcttggctattcctttgtagaatagattgatgagttggctctcttggaagccacgttggggacattca

SEQ ID NO: 2087 - DNA, 984 bp, Arabidopsis thaliana landsberg
ttttttaagtgaagccgcgaaaacgaacggaggaaaatagtttaattgaatggccaagattataacgtatgacccattatttttaaaaacgggtcaaaaggatccgcgtgtttttaagtgaagccgcgaaatcaaacggatgaaaacaattcaattgaatggccaagattataaagtatgacccagtattttaaaacccgggtcaaaagaatccgcgtattttttaagtgaaaacgcgaaatcgaacggctaaaaacaatttaattgaatggccaagattaaaagttatgacccatttgtttaaaaggcgagttaaaaggatccgcgcgtttctaaacgagttatttttatgatactaaacttttaaacttatggtaaagttgtaattttagcgaaatccatgcccaattcactaaacgtacgtctcaaataataaagtagatgatatgataaaataatgttaaataaaattaataatgtttttgattttttatatgaaaaattagaatacaacattaatggttctcttgggttcctgttcttcggacacggtctaaaaagttggagattccgatggatggactccaaaggacgacgtctattaccattcaacgacgtcactcaaatcttggcgctttggaatacgaattctgcgactcttcttttcctaaagcttgctgtttttcctaatgtttcgttaattgaaacaaaaacaacaccaattcgaattctccatacctatacaaagaaagatttacaaagcaaactcaaattctttagtcacacaatttgatcaacacaaaaccatgaacaaatgataagactacacaacaaacccttaaaacagtgcagcactgacactatgaaagtacaagtccgttggtgtcagcattctcagagtataaactaaacaattcactaagcactgaacatggaatgttaatctacatatatatgtagcaatgtaaaatcgcacggagtgtc

SEQ ID NO: 2088 - DNA, 2041 bp, Arabidopsis thaliana landsberg
tgtacccacaagaagtgagatgccgatcgcgtacttccgcgactccagaagagtatctcggaggagggagcaaaggacccactcagcccccgagaatgtttgctgaggccacccaatcttcaaagatcaggagctccttctcctcctcgtcgctcgagggtttcttcttcttgttcttcttcttcttggacgctgagtcattatttcgaatacgcttgccctcaaccttatcgctcgttggtagcggaataaccgcctcgggtgcaggcgcaaaagcaggcagatcggcctctcgggccttggtagaccccaaagcaatcggtactgtcacctcgggaataacttccctgtcatgagttgcgttggaggaaaccgcggtgagatttgcaacaaggaacaattacgttagcttttgggaacgcttgcgattctagttcttatactcaatcatacaaatgacatctagtcatatttgactccaagacaccaactaagcttcgtcttgattctcaaacctttgatggtgtagcagaagtttctatgtgtctttgtctttgtatcctctaacaaggacacactatgataataggtttttatggtcaattatcctaaaacaccaatcatgtcgttgtagtattttaggtgtcaatccaaatgggtgtgatacaaacagatgaaatgtgatcagaagtcactaagtcaagccaagcaataacagttttggggtttctaacagtcctaagcgaacatgcagaaaacagaagcaataacagaattactaaaatcactcgaccacaacaggctgatgctagaagtaggatgtggtcgagtaacatgtagagtaacagacaggatatgaaacagctatactcgactgcacagtctgttgccagacactgggtgtggtcgagtatactggtcgagtaacagacagaaaacaagacaatcttactcgactacacagtctgttgccagacattgggtgtggtcgagtaagatggtccagtgattgtaaaaactaagaaacaggcaatgagaacgataagcgaaaacgataaaacagagaaataagatagacgagaaattcctaaggatggggtaatcgagtagagtgctatcctagcctattcgaatggttaacaagcgcaatcaagctatccctagacaatggtgctgcggtcgacccagtttggccttctatgtatctgatcttagatgtcagtgcttcaaccttgatattgatatcattgtaactgcagtcaaccttgttgtgaatttctgccacccttttggataaacccattgctcctgttgcttgcccttggagaatctgctgtaacatgttcttcaagtctgaatctggagttgttgaagctggttgttgttgctgctgtgtgaacctaggtggtggaacttgctgctgatagttgccctaatattgctgcttaggaacatacccttgaccttggttgtacggaacaaagggcttgggttgattctgctgctgtgaagggtagacttggtcctgcgggtttgcaacgctagaagcggtatcaagaagcatcctgatcttggaacgacacctctgtagagggtgctgagaagtgaagctttggagaaaccatgatgaggacattgtgtctggtaacctttgaatcgctctcatcgttcgcagaaagtctcattatttgtctgtatgaaaccggagatatcattccttagtctcgcagtcctggagtttgagaaaaacttagccaagaaggctttcttgcagtaattccaggaggtgatagagccttgaggaagcgacttttcccactgatgggctttgtctccaagagagaatggaaacaatctgagcttgaagccatcctcactaactccattgatctttgttaggctgcagagcctatcaaactcgtccaggtgatcgagtggatcctccatagggaggccgtggaacttgttgctctgaaccatggcaataagaccgctcttgatctcaaagttgttgttctgcacaggtggaggcacgatgcca

SEQ ID NO: 2089 - DNA, 1204 bp, Arabidopsis thaliana landsberg
aacctagactttctttcgagccctatatcacttgtgagtgtttgtgaggtcttattcttattaagcttagtagaaagtgttaggttcgtaacaacagagatagtgtctcatgtagttctagttcgcatttttcggactatataggactaggtgggcgtttatactttgggttgggatgtgtttaaaagaaaaaaaggggttgattcattgataagaaaaggtagaagactctaggtgtctcatcatcactgttttataccatttcacatcatttgtcatcactttgcatgtttaggatagttttgcatgcatgttgcatatttgcgttgatttcaggtgatttggagctgttgacgagcaatctcgaagaagcggacctgatcatgacaaaccactcgacccagaggtcgagtaggagcttcaagatctcaagagaccactcgaccaccaggtcgagtagaggacatcatcacttcacttcaccactcgaccccgaggtcgagtgccctcatctccatcaccagaccatcactcgatcacttcactcgaccgatgaggtcgagtgtcttcatctccctcttctgacaccactcgatcacatcactcgacccccaggccgagtgacttcatcccattaccagacctctactcgatctcatcactctacctggatgtcgagtatcacatcaccaccactcgattgcatactcgactgccagcttcagagtcttcttcattccgcactcaaccagacactcgagcacaaggaagaaaagaagactccagcttatcactcgacctctcactcgaccacctgggtcgagtacagttcttaatccgtcccaatactgcgtcgttttgagtattaggatttcagaatattttgctataagtagcatgtacttaacattttcgagaacaagtttttatctaagttttattccgtagacactttgtttttgacctttggtaattcggatttctctttatctattcagtattcagtattcaatatttgttcttatttcgtttatattgttcatcctgttcctcttgttattactctatgttatcatgttttcattccatcaagtttatgttttcgcaatgatgtctgagtagtgaataggtttctaggatgggttagagtagtttagaattctcagtatgttgggtagttagtttatagatagatccttcggat

SEQ ID NO: 2090 - DNA, 804 bp, Arabidopsis thaliana landsberg
tccggttatttttatgtctacgagatatatttcaagggttgcggatagacctttcctcttcccgaagccctagtttggtacctagccgccctcaaaattgctctaccccagttaaccccaactttctccgaaccattttagggatcataaccgtcgcgacggagaccgggtacatattcagagttcccaaactggtactcaacgatcatgtggagggctctcgcttaagctttgctctattggctgcctcctactcctgctgaggcgagcgactagggacccacatggagaaacgtctgaagtacgactaggtctggcgacatctaaagggggctccatatgtcgatcctctactgtcttggatcctcgaacacaaacacatagcttgatctgagagatagctcgccatatcttgctcatcgtaatgttgttcttcttagtagaggcaattgatgtaagtcaaattaatcctaagaccactctctcaaataagagattgattgtaggattttagggtcgaatttcacaatgctttttgacaacacaatagactaatgttatcgaattaagctaaacaaatagattataaaataaagaaataaaatcaagcaataacatattgagagttgtaaaataagataataaaagcgttaggcttagggtattctcaggaaatagatgatagtagatcaagcacgttaaacaagttcgataagttcaccttggtagataggccaattcttaatacacgccttcaaaccagactcatcaaatagtagttcttgtaatagatccctatggtgg

SEQ ID NO: 2091 - DNA, 2086 bp, Arabidopsis thaliana landsberg
tgcgaccgcatgctcttaagctctaacttggttctccttcaaccaagacctaaagacctgaatccatgattaatgaaagctcttacaaagattcagctcaagccaagctcaatttcccaatacaacaataaaaactcgtcatgatttactccatacaaatttgtctcggaaacatacctataagtcgagaactaaccgttagaatcgtaatcccaccgttgaatatgtagccagtagtaacatgaacgtcttcacaaagtttcatcccgctggcaacgtgatctttgcagatatgtcttatttagaaactcattctctatggtatgacgggaaacatccttgtataacctcaacttgaagctactattttctcttcatcttcttccttctttgctttgcccattctctgattttactaagatctgcttcatctcacttctccttaatgacatgaaccaaatatctttctctctatcttcttccattgcggtgatgatgatccgttctcatctgaaacgtctcgccttctccactaatccgtttacttctctttgatcatctttctctttctcctcaaggcaattcactctctcttaaatcaagttctctttctctgatggtgtttaatctgtctctctcatctctcgacgaagacgacacgttgacatgacacaacggtgtcacaattagcctcggctttctccaccaccacccatgagctctttcccttctctttgatccaataaataaaactcaccacgacctcgtctgtttggtaactcggagacggtggctgcgatcccactattatgccttagggtttctcaatgttttctttctttttccttcttgataacaaatcacagacgacgatatgcgtatatttataaatggatgctcttggactttaaatgggcttcctcatatttccaaaacaaatagcccattaaatgtgggagtggggtgttacaatctcccccacttaaataaaattcgtcatcgattttatggcggtgatttatgtccatataaacctctgacttgtagctctagcaaacatcacatccacatttacggtatacaagcacacgacccttcattaaaacttccagcttaccgtttttaagaatcgacacttgctttctaacgttggtaactcttttgatgcgtaactcttgtaccttagaaaaatttaaacttttcaaccactgaacactagtgcacaaataaacattcttctctagcaccatattaacaaaagatgaaaatctcttttaccttgatatggcttctcatattcctaaatatgcttattgacatggggttccttcccattcctatttttccacggtttctagggctacaggaagtttgggcagccacagggtaacttcaatggcaaccggtttatagggaatgagagttcttcgagctacactccaaagcctgcctttcagaagacatttcctcagagcaacttctagaggacctatggtatttcagcttactaagcccccccctctctccaccctcatcagagagcagaatagaatccatgtttgagtagattctagagagccatacaaagctcgttgttgagtttaatggcaagtttgatgctgtctacacaggttttaacgggaagatcaacaatctgagctctcacataaaaaagctagatgtacaggttgctcaaactgcacaatctatcaagagacaagaggactttcttcctggaaacccttatgctaaccctaggaagagctgttatgccatcttgatcagagatggagatgatgtgtgggaggaattggacactgaagacgagttggagctcgcagctgcatagttggtgtcgatcgacaccctgtggaacactgttttctcaaacgattccatactgaggtgtcgaccgacacacctctagtgtcgatcgacactgggtctggactacaccatatgaagtgagaatcccggtgtcgatcgacaccatatggaacactgttttctcaaacgattccatacttaaggtgcgaccgacacacctgtagtgtcgatcgacattgggtccggactacaccatatg

SEQ ID NO: 2092 - DNA, 556 bp, Arabidopsis thaliana landsberg
  unsure (1)..(556): unsure at all n locations
aaatttttaaatggtcaataagtnnnnnnnnnnnnnnnnnnnnnnnnnnnnnnnnnnnncgcactagggttgcccttcacatggaaagatctagatacaaaaataatatacatacatctgcaatttgatatactagtagtgcaagaaggtaatcatatctccatgatcttctcaaaatacaacgccatacattgtgggtatttatttctgatcaattatttaattaggttggtattcacttatacttagtaattgctaataaaatttggaccaacaaaattaaaagcaatgctcatccttaaccattttccttggtaagccttacactatacttttccccacacttgttgtgtaatgaccatatgggagctcacccttgctataatcacaccaagtcaagaacatataccgcaagatgaggagcatgaaggatgctaagatgagttcggagaggtctaggtcgtcgtctcctagtcagctatagttggggaagatcgtcgccgccttatgatgtatctatatagtcattttcgataaaacttctattatataataa

SEQ ID NO: 2093 - DNA, 1404 bp, Arabidopsis thaliana landsberg
ttcatcgaggaaatataacaaatacgaacccattattttaggtatgtatggtatatacaaacagacttagatgccagagatgccgatccagaagatgaatttcgatgtaatttatcgtcttctgatgatgaagaacaagaagatgaagaacaatattagttttgtgtttatgatatgtacttaagttatttctattaattatgatatgtacataagttattttgaaaaattatgcaaacatttttaaattattttgaaaaactatatttgactaggtatgttatgtttaattatatttttatatataattactatttttgaatatctaaggcccaaaaaaacacaaggcccaaacccaattattaaaaattaaacaaagcgactaattgctgacattttagcgactataaccattctattgggccaaaataactcgaggcccaaatacggcgactaatttgtgacaatttagcgactacaacaatattattgggccaaaaatttcgaggcataaaatttgtgactaatttgtgacaattaagcgactcctgtttaaacaaactgaacgttttaggcccaaaccctttaggcccaaaccattcacttgttctgcgaaaaccctaacaaaaatctctttctcttttcgaaacatccgcagtcttcttcctgagggtgtcttcaatttcctcttcgatttcctcttcgaaaccctagcaaatctaagattcctcttcgttttcctcttaatctctcttcttcttcttcgatttcttcgatttgacctctatctcatctagatctctccttcacacgatgtttgggcgaggtaaaaagaagcaaaccagtcctaaccttcctcagagagcctccacatccacggctggtcgacgacctcgttctcttctatctcagtacgatttcacgccggcagcagaacggtctcctcagctatagacgcctgcatcagaggccgccggtcctcctttacagtcaacggcagctcatgttcggaactatctgccgcctctagagttgttccagcactctggcagtcgacacctgaagtgcaaaggtctgcctccgtagaagtgcagaacaatccagcgactcaagccgcgactactcagcaggttctccggctcctcaacaagaccctccgccttctcagcaagaccctccgccttctccagttcaagagtctcgggctcacagtcacccatcctctcaaggcaacaacttcgaagaatatccacctctgtcgccggatctccagaaggacacacttcaatccctaaacgatctgcttatgttgccggagagggataagtgtgtcactgtttactatttcattctgtgaccgtgttcatggtgcattgatttacttatacttattttgatgtgttc

SEQ ID NO: 2094 - DNA, 4882 bp, Arabidopsis thaliana landsberg
catgcaagtagttctccactaaaggcacgaagttattgtaagcagatcatgacgcgacgggttttcgatgttcattaaaccaaacaaaaatattggacattatcgcatcaagcatggatattaaagaatacttccttacattgtccttggaaacaacacctaccctatttttctttcacggttggatcctccaaataataggccgcaacaggatatctcaactttaaagttctatactccctctcaaatttagctatggtgtaaacccgacttaactccatgaattttaatgcgagtacgtctctgtatatgttattggcatgatctttcatattttgggataaatgctaaatataatactcgtgatgagccgtggaatacacaatacgtatgcctttgatgaggcttgaatttctgtcgctaataaataacaattttagagtatcaggtacaacacttagccgcttctcaaagaaccatccccaactaacatcattctcaccgtcgagtacaccaaccgctatgatataatgatgatgatttggatcttgagctgaggcaaatactagaacaccccaaatccgttcttcaaatgtgttgcatccacaattatcactctcctcatgatatgaataggtactgaaatttatcgctctcatccaatttcagataagtaactgtaccatcatttaccttcttcaacatgtataaataacaattgatatccttgtagctttcttccgggctaccttttaaatcataaatcgcatgatatttccctcttagcgctgtcgagtatgatactttcacacctaatttcgtctgaactagctccatgataattcttggaaccggagtttccaactgtcccagaaaatgatcatgaatgagagctacgactaattgtgggttgccttttcttttcctgagcctactactacctttacttaaccgagtgcaactatgcatcttattgtaccttctaatcgagaatatatcagtattactgatattggacgctcgtaaacgccaagaacagctctctttggcacactttaggacatagcgctccttatccgacttcttaatcacataaccaaaactgttagcaaatgcagctcaatccaccacctcgtgcaatgccgccttgtttggaaattcttgacgtaaggtcaacccaattccgtcttcccattcttttttaaacatacccggttctacagcaggtggcgactcaacatactgttccccctatcagaattatccatagactcatcataccgtgtttcatcttcttgagtcccgtgaacctccactattgcctcaagttgatgttgagttccgtgatcctccactattgcctcaagttaatgttgagtcccgtgatcctccactattgcctcaagttgatgttgagttccttgttcctcttctaataagacgatgagtgcaccatcatccactctcatttcatcctcctctgaattcaactccgtatagttcttaccaacagaactattaccaactctagacaattgctcgggcaattgctccggctcgggcggtttagagatctcctccacaaccaaaacacttctccggttattttttgcggatgttacataaacacagacatcctcatcatcacaaacgttcatttcttcctctactccgaacaaccgtggattgtacctcatatgcaattttaccttatttccatctaatccaagcttcgtcattagcctatcttctaacattgagaaagtaatcttctcccctaatgtcttcatcatcacattatacatgcgaccttggaatttaaaatatatgatcacgttctctttcattgtaacctgccaaaacaatacacatactcagtcaatattactagtattaccgattctagtacattgtcagtaatactagtactaattctgaaatattacatgtgtgagtaatactattacatatatgaaatactacgtgtctaagtaatactggtgctatttaaacatattatctatataaataacggtactactatagctagttcgaccagtattattttcgcgacaagaacaaatattcgatttgagttcaatttagtatgaatcagcatgtgaaatcaattgcttacccattaacagaccaaatgaagcctaaatctatacttaaacttctaatgtaggtgctaaaacacaataacccgaatctaattggattgaatctcaaaatcctcaaaatatgtaattcaaagcttttgaaactctctccatacctggacttagtagattgatgcagcttgcaggaggaaaaaacgacaatgcggctcgccggagctcgccggaggaagaagcccgaagaagaaaacgagctcgtgctcgaggttcgtttttttttttgttttcagtttttgttttttttttcaaaatgttttcagaatattaattattcattcaaaataaaatataggggtaaattcgtcttaacacaattcattaactcaaaggggatatgaagactctaaagtggttttgcagattatttgtcccacaaaagggacacaaaaaatgatcattcgccaaagactcatacggactttggctacaccatcaaagctttgagaagcaagaagaatcttggttagggtttcggatttgaatatgacctgatgtcatgtgtatgattgagtataagaacttaaaccgcaaccggatcttaaaagcctaagtattgtatccttgtaagaagacacaaagacaaagactcatatgaacttcgactacaccatcaaagctttgagaagcaagaagaagcttggttagtgttttggtgtcgaatatgacttgatgtcatgtgtatgattgagtataaaaacctaaaccgcaaccggatcataaaagcctaagtagtgtttctttgttagaagatacaaagacaaacactcatacggactacggctacaccatcaaagctttgagaagcaagaagaagcttggttagtgttttggagtcgaatatgacttgatgtgatgtgtatgattgagtataagaacttaaaccgcaactggatcttaaaagcctaagtagtgtttccttgttagaagatacaaagccaaagactcatacggggtttagctacaccatcaaagctttgagaagcaagaagaagcttggttcgtgttttggagtcaaatattactagatgccatgtgtatgagtgagtatgacaactagaaccataaccagatcttaaaaacctaagttttgaatctttgttagaagatagaaagactaagactcatacggacttcggctactgataataggtttttaagatcaattaatcctaaagcactatcatgtcgttgtagtactgaaggttgtcaatccaaatgggtgtgatgctaactatcaagatgtgatcagaagtcactaagttaagccaagcaataacaggttgtggtgtgttctagcagtcctaagtaaacatgtggaaaatagaaaacagctctttgtagagcattgggtgaggtcgagtgacaggtcgagtagcagacaaaaaataaaacatagatactcgactgcacagtctgttgctagacaactgggtggtcgagtatgaggtcgagtaacaagaaagaattgcagaaattaagcaacagatgaccagatgtagtaaacaacagtagagtaaataaagaattcaatcagataaagaattcccgaggatggggtaattgagtagtttcgtttcctcaatttacaggtgattgacatgctcaataaattatccctagacaacgagttcattaaccaaatttaagtgccaccgcaacagagaccctcaagttaacctagtcccagactcaatcaccattgacgagagctaacctaacaggcattacgaatcaacaagttaaaaccaaaacgctccctgcaaccaataccttggtacagggccacgaatatctggaattagtggttcagacatttcatcgaacaccttttgggcgtggaaatgtctgggctcaaattctagttgattaaaaagcaataggcattaagaacaactaatccagaagggatctatcaatcaatactcaaccacctagcatactgagaattctacaccactctaacccatcctcagaaacctattcactactcagacatcatagcagaaagcataaacgttgaacaagttgaaaacatgataacaatagtgtaacagcaatatgataacagaatgaacaacagtaaaagaaatcaagaacaaatactgaatactgaatagataaagagaaatccggattacaaaaggtctggaacacagtgtctgcggaataaaactagataaaaacttgtttgcgaaaatgtgaagtacatgctacttatagcaaaatattccgaaaccctaatacataagacgacgcagtattgggacggattaagaactgtactcgacccaggtggtcgagtgggaggtcgagtgaatagctgggtcttcttttcttccttgtgttcgagtgtctggttgagtgcggaatgaagaagactctgaagcttgcaatcgagtgtgtagtcgagtggtggtgatggtgatactcgacttcaaggtagagtggtgagatcgagtggttgtctggtaatggaggtgaagacactcgactgtgggatcgagtgaggtgatcgagtgatggtaaggtgatggagatgaagacactcgacctcggggtcgagtggtgaggtgaagtggtgatgtcctctactcgaccagggggtcgagtggtctgctgagattgtgaagcgtctactagacctgggggttgagtggttttgcatgataaggtccgcttcttccaattagctcgtccgttag

SEQ ID NO: 2095 - DNA, 1494 bp, Arabidopsis thaliana landsberg
  unsure (1)..(1494): unsure at all n locations
tgggctgctcaccccctaggtacacgtggactagaaaccaaacaaccgcatccagtttccgtattcccgggaactcaacgcaacaacgaacctctatcgctaatctgccatccgttccccggatactaggaagcgacctccttaacagtccccaaacaccggtcgatccgcgtaacgtcgtggatatggaaacattccgcaattacgcagctcaaacaaacgcgaacatggctcaaatgcattctcgaatgcacttagcagtgagcgatgctcccgacatagatcgcgtgattaaagaaaccaggcgcaccccgttcacggataggatcgcttgctttcgcctccgagacgtcgggagacttcgtttctcggagtacgacggaatgaacgacccaaaggctcatctgagatccttccgttttgctataacacgagcgtacctgttagacgaagaaaacgaagcaggtcactgccgtttcttcgcagaaacctcgtaggtcacgccctcgaatggtttgctagcctcgaagggaactttattgataccttcgaccagctcgccgccgctttcttaaaacagtattcggtacttatcgaacacaggacgtctgaagccgacctctgaagtcttactcaacttcagaacgaatccctgcgatcttacgtcgaaacattcaaagcagtctaataaaaaattgcaaacctaaacgaagaggtagccatagcagcccttcgtaacagtctgtggttctcctctaggttccgtgaggaactcactgtcaggaaaccggtctctttagacgatgtccttcacaaagctctccacttcgccaaagccgaagaggagctcgctgtgctggccttacgattcaaagaatctaaaacgcaaaacgctccccttgcaattaaaaaacccttcaaaaaggaaaaccaaacgcagagcagcatatcttattcgcaatagaagaggcagctgaggacgaaagctagnaacttgacctcggaaaatattgcaagtaccacaagaaaagaggacattacaccgaggagtgtcgcgccgttaaaaaattaatcacagcttccaaaaattaatcctctgacaaagggataggcagtcgtatacggcagccaacgcagcttccaaaaatgctacatgggtggctacgagcatatcaaaaaagccgaccctgtggtactaatgatagaggacaaactcgcaaaattgaaacagtcagatcctcagacccgtctcaacgtggacctcgaaaatcgctgataacgcaggactacatagacgaatcagatcctaaacgatgcgttggggtaggtcacgacctcgacccagcaatacgagaggatctcgtaatctttctcaaggaaaacaaagacacgttcgcctggtcaagcgcaaaccttcgaggaataagcctcgaggtaacctcacacaaactcaacgtcgatccgacctaccgatctataaagcagaaacgtggc

SEQ ID NO: 2096 - DNA, 777 bp, Arabidopsis thaliana landsberg
cgatgctgtggttgtgcacaaaggtgttattagagaataaccaactagtaaagaggaagctcgcgagtttatcaaaggctattcgggtcacacggtggcgttgtgcaatctgtttttgtgagaaacttgaaaactggagttggaagaataggatgggacaaagcagaggtttatttccatgagataccagaacatgtcatcgatgatcttattgatgatgcaataactttcaaggttgctggaggtttgatgcttgagcatccccttatttcaccttttattgattccgtggtgggaggtgttgatacagtcatgggactttctaaagaactcactgaaaaattcattaacgatgtgttgtaggcttgtagctcaagtacattttctcaaaaggtacatgaccactctgcaaaaaatgatttgttaaagtgtacaatgtcttgagaaaccgtggacgactacattttttaaagaaaaagttgcatgtcatgaagttgatgataatgatgctagggttgcattagatctgagaatatttctctaacattgtagagaacatatacatacaaacacttaaattactctaaatatgtcatatacaatgctctattgttacatttctttttgtaccgtctcttttgcgcgaccacttaagacttaagagttaaatggtctttcggaaaacaaccccgggtgacaagttttttgacgagaaatgttagagataatggcattgttggatttcctcttggctatatcggtgaatacttgatttat

SEQ ID NO: 2097 - DNA, 1348 bp, Arabidopsis thaliana landsberg
ttgcatgcctgcaggtcgactctagaggatcccccaatgtgagcgaacagggcttttgagtgaaactttttgtttgcgacccgatccgattcactttctatccaatgttaaaaaacgagctggggtaccggtgttaaagcataaccaggttttctcaagataaagaattctgctcagaaatagtctgatagactttatctcgaatacttgtatagcgctgtaaccgagtaggtgtaaaggatactccgagctgtcgctcatcgtagaaaaagtgtaaaaaggacttttatttatgtcgaagttaaaacttacaggacagataaaagtggaagtatcgatatacggatccactccccccttttttaatggggacggtagctgaactcgtccgaagacgagctgcctatgtacccttttcagggatcaagccacctcgtggaattgctttgcctcttaaataggcgagttcgtagacgttgggtcggacaactttcgagattaagtatggcccttcccagtttgcaccgagcttaccaccgtttggctcggctgtgttttaaaatactttgcggagaacccgatctccttcgtgaaatcttcgttgccgaacgttagggttgtagtgacgagccgtttcattcagataattttgtatacgaaccagggctgaatctcttcgttcatcaatcagatcgagttcgtcgaggagcctttgagtgttatcaagggtgttctcgggggatagactccgtcgtaggctcgacactatcatctcggctggaattatgcatttcgtcccgtagactaaagcaaaaggggtttctcctgtggctcggcgaggagttgtccgatgcgaccaaagtacaccttcgtgttcgtcggcccacgagccctttttagcatcgagccgtttcttcaatccgtcgaggattgttttgttagcggcttcggcttggccgtttccttgggatatcgtggtgttgacttgctaagtcacagaagccttggaagcgggttgatataaactgcgagccgttatccgtgacaatctcataaggtatcctgtggcgacataagatatgtttccacacaaagttctcgacttgagcgtcctttatgctggcgtaagattcggcttctatccatttagaaaaatagtcggtcaggacgaggactaattttttttgcttcgagggatgcataggtccaattatatccattgaccatcgcatgaagggatatggcgaggcgattgatgataagagctcggccggttgatggattgttggcgcgtgcctttgacatttctcgcatcgttttgaaaattttttgcagtctttgatcatcg

SEQ ID NO: 2098 - DNA, 2893 bp, Arabidopsis thaliana landsberg
ttaaacaagaaaaaatatagatcatgattcctaactaaactaaagaaaacgaggttttttttttttttttttggaaagagaataaaagaaataaccaaaataactgcaaaataagaaacaaaaataaaagcatcattagtacgaacctcccccagacttaaacgatagtgtccccagtggcattcaaatccagagaaagcgggaaaataaaatcaaaaataaaagaaaagaaaagaaaagaaaaggaaaagaaaaatctaaccaacgggttgcctcccactaagcgcttgttttgagtcaatagcttaacttggcggagttcaggatgtgggtggagtggtggtggaggattgatgctgcctcctcgccttccaaggcggtgcgtaaatggatctggttggagccggttctgtcgatcgacagtcttctcgtcacctgcaaaagcaacaggagaaacaagctttcaaggaactctaggcttgttatcttgtgaagcagtcttcgaataatccaaagaattaatcaaagataaacaggagaagagagagaagagaacttatcacataagtcttcaagtggtgtgggctgaagagaatgtgcagaatgctctgtatgtgaaacccgagggtgtcgatcgacaggggtagtggtatcgatcaacaccgttgctcttcaactctcattggcgagctgagcgggttggagcgttttttgtggctctgtggtgggattctgatcagtctggggaggtgtgtttatgttggaagcaatgcaactaataggcttagtaagctctgaaccatccatgccaaactccatctccaaatcacaaaccttgagagagattctctctctcttcacatcaaacctagcaccagctgtagctaggaatgctcttccaaggataagaggattcttgggttccttctcatagtccaggaccacgaaataagcaggtattatggagttaccaaccttaacaggaacatcctcaaggaatccttcagggattcgcttggaacgatccgcgaagaaaagagtgatgcgagtaggcctgtagtgagtcatgcctactctctcagcaacagacttaggcatgaggttgatgcttgatcccagatcacacaaagagcggcagaatctgcttgtggagatagagcaatcaagaacaaagctacctggatctaaaagcctctcagtggtctaaccaggagtaatggtgcggatgtactcagctatgtctactctctgtaccttctccttcttggccttaggcagcataattgcactgatgtctctggtaagtagcttagcttcatctaagctaattcctttgtcaacaagtcgcttgacatacctgttgagtgaggcggaagatgtctcagaagcatccttatgaagagtatggaggatcttctccattatggctgtgcacttggcagcatgaatctccttcttagaacgactcttcctcggataagggataggaggaatgtaaacgggctcgggctccataggtacttgcacctcacaaggtgcagtccggatctagtgtcgatcgacactagatgggtatcgatcgacaccgtcgtattgagtcgtctctgagaaaagcgtcccatatggtgtcgatcgacacaggagggtgtcggtcgacaccatctctgcaactgcaagctccaactcgtcttcagtgtccaattcctcccacacatcatctccttctctgatcaagatggcattgcagctcttccttgggttagcatcaggattaccaggaagaaaaatctcttgtctcttgatagattgtgcagtttgagctacctgtacatctagtttcttcaagtgagagctcagacagcatcaaacttgccattaaaatccacaacaagctttgtttggctctctagaatctgctcaagcatcgattccattcttgtctctgatgagggtggaggggggggggcttggtaagctgaattgccataggtcctctgaaagttgctctgaggaaaagtttcctggaaagccggcttgggagtgtagttgggggaactctggttccctgtaaacctgttgccattgaagttgccttgtggctgcccaaactccttcttctgactcaggctcaggctcaatagtcgctttctcagctgcaaagtggacatgcttctttcctgtaagcaagttgtgaaccgaatccaacttagcattcacagctgccatttgattgcctgagatagctccaacaatcttcttcctctcaaagtcagcattcttggtactgttgctactagcgaggttctctatcagagctgagactccattagctttgatgctcagaacaaggtccttaaagcgctcgatatggtccattggctgctcatgagataagccatgtcaaggatgctggctaactaaagcgaagtagccaggcttcagctcataatcgttcctctggaagggtgggggtacgatcgctgatcgattagcatagaacaggttaggcctgttgaaatccccgagagtacgacgtgattccgcaattggaggaatagctgtagaaatctagggttggtgtcgatcaacacctctgttgtgttgctcgccaccaatcgcatatgcgttctgctcccgaaggtgtcgatcgactcccagttggtgtcgcttgacaccgagccctttgcgtctctggcaactaattgctcttgaggcggcctgatcctcattggcatcctcgggtaggatgagtccatgatcacccaatctttgccagcgtccttgtaggcttgcccatcctagctctcgacctcttctgcctccgctcggatgctctgtcagccttgctatcttaaattttcggtgaaacgtccagttttcccaagtttagaat

SEQ ID NO: 2099 - DNA, 1111 bp, Arabidopsis thaliana landsberg
taacttttgattcatcaaaaaatgtgaaagtttagatacatctttgtgttcaatcatgttttgattaggatgaagaattcagaaatttgattatatcttatataggagagagacgtgtttcgctgatttgctaatttgctgattttattgttttaatcttacttctgagagaaccaatagtaatttctggtttcttcgtattcttgcaggttttaaaagctctacatgctccaatgactgtgactttggttcagtttgctgttggtagtgtgctcattagtatcatgtgggttcagtttgttttggagatgtgtcactcactctgatatgttttccttgatatctagttgccatcttgccgcttgttgttgtgtgcacacttggtaatctatttacgaacatgagcctcgggaaagtttatgtttcctttactcataccattaaacccatggagccttttttctctgttttattatctgctttgtttcatggggaggtgagctctttttctgatttgtgtttttctttgacatgttggacaacatcactctcttctcaattataacattgatgtctctcggtctgatggctcatgtgactttctttacggaaggcatcaagttcactccttcatgcattcaatcagctgtgagcttattatatattacgattctatttttttatatccttctcaaatgcttgcaggtcctaacacccaatctcagttttgcagggtgtgaatgttcaacaaatatatacaaagtcttttatcgatgcactctgcttccacgcataccagcaagctaagacttttttctcttaatgactttgttcaaaatttgttgacattatcgatcattgcaaaaatatgaatacaacactgcagaccaaaagaattttactatactcacaaggcactgccactctaacatatagataccatgcggcatgccgatatatagccctattctcgcgccatcaatatcttaaaggcggagatgaaagaaaactccccacacaattcttcagcgtccataataatgagccccttccacaagcccctgcgcccccccgcccactgacgcctcccctcaccctccggccccaatct

SEQ ID NO: 2100 - DNA, 1246 bp, Arabidopsis thaliana landsberg
ttcgttcttctcttatcgaatattctctagcatatatcaggttttgacaaaaacaaatccaacatggttgatgtttgttgtcagttagttcacatttccaccaaaatccaaaaagaattgtcaaatttgtaacgcaatcgacatcaacaatcagttctcattgaatgtacttcacattctattacacatccttaattttttttatgggttttggtttatgaactccaattaagaaaaaacatctcatcttaggatacccatcatgtgtaggccatagaaggtcgaatcacattctcaacatgtgaaaatattttcttttgaaaatacaacattttctcaaaaatctgttatcaatctattaataataggatctgtaaaaccttaataatactatgctttaaaaaaggtaaatatcatgacttgtattcattcatacatgaaaacatcaaaaatagccctctagcaaaacgcttccacctaattgcttagactgcaaatctttcacatgctttgattctaaccacttcatcgacgcgatctgtctctcatcttttgtgctccattccggcaagacctcaataattactttctgcaatagtttctgctcaaatccatctctcagaagaacttcaaggtctttgacgttccccctcaaatctaacaagacactgcatagtccacggttgtaacaataatccaaaatggaatccaagtttatcttttccaatactacggtttcgaccccgctactactgatcccggattctgcaaccgattcctttgcggtgaaaactacaactttgggtacctgattcttccacagtgtgggaagaagcaaggatatgagactgttgtgcattgctagctactatgatctgaataggttggctcacctcagttgttccgagtacatggttgatttgctcaagggtaaaccctttcatctcggtcctctggaaattcaccttgcacatccttggacaaccggcatgtgcaccctctttttcttctatgaatctttccctaagtgatggaatgacctcaaatgctaaaaactacacaaaacacatgcaaatttaattgttagcttcaattacgagaatgtaacaaggataaaacatgtgacttacctcaagcggcacacagaatccgggaataggccatggtgactagggtgttcgggacgacagtattactctgtatttctcaaaagtattccccgaaataaccagtattacatagatcc

SEQ ID NO: 2101 - DNA, 479 bp, Arabidopsis thaliana landsberg
ctcaactccactgcccacttcgccaatcttccggattggtttgggctatggagaattgttcgaagcggttaatttgataacacttcgattgggtgggattgaaaatacggacgaagcttccgagctgaggttaccactgcaagtgcaagcttttccatcatcgtatacctggtctccggatctgtcatggatttgcttatgtagtaaattggtttttgctctccccaatcttcccagattaagactccactaaccgcatggcctgagaccgaaacgtatagatagagcttctcatccgcctcaggtttggatattacaggtggagtggacagatacgctttaagctgtccgaatgcttcttcacacttctcatcctaaagaaactctttgtccgaatgctgcaatccgaccggttaaccgttatacttccttgaaatttcttggagatggcatgttgagaaaagcgttaattttgtttg

SEQ ID NO: 2102 - DNA, 765 bp, Arabidopsis thaliana landsberg
acgtttgaatcatatggttatttgttctctgtattttaagtctctaaaattctaagatctagcaagtaaagaattggaagaaaaataaaagcttcaattaaggtttcagagctacgaaactcataaaattgaataatgaatgaagtttgggcaaaacccatgatcttaaattacgtaagtaaacacatacaaagcaaaaaatctatggtacatatccttaacccaagtcgtgatggtagtgaatccattatcttccgcttgattttgtatttgtcgacaaagagagagaaagagagagaagagaaatgaggagagagtgaatttgtgtttgtcgaaaagggagagaaagagagagagaggagaaactaggagagagaaaaatattataaggagaaagaaataattaagagaagggtaaataggtaaatttatttatacaaagtgcctactttttggaaagtggctaaacgtgtaatatgttttataaaagtgccctataatataatattttcttaaatcaaacaaaacaatagcatataaaaggaaagtctaagtaacataatcaatattgtatttaataaaaaataggtccgcagtgaggagaccctgaagtttggttttggtgttagggttttttggtggatgtaattttgtcggaatacagagttatggaaactttgatgtgaaactgctcttcttactagggcagatcaaaaacagtaatctatttttatggtgattgatgttttaattggaacaattagt

SEQ ID NO: 2103 - DNA, 2112 bp, Arabidopsis thaliana landsberg
cgattcaaagaatccaaaacgcaccatgctccccttgcaattaagaaacccttcaaaaaggaatttaaacgcattttcatcataccttattcgcaatagacgaggcagctgagcacgagagtccagaacttgacctcggaaaatattgcaagtaccacaagaaaagagtacattccaccgaggagtgtcgcgcagctgggggaaagactaaaaaaggttcaaaccccaaagttgaaacccctcctcccgacgagcaggaggaggagcaaactcccaagcaaaaaaaacgagaacgaacacccgatggaagttactctcccccacctgctaggagagaacgcatagacctagtctttgcagaactcgatctaggtggcgggacagtaaggtcagtcaccacacctccccccgccccgcataagaaaaacatgaggtttccattacgtctctcgaaattctagttgaagccactgcgtgacacgaactattgtccttcatggatgcattctccgggtacaaccaaatacttatgcgcccagatgaccaagaaaaaacagcttttattactgaccgaggcacctactgttataaagtaatgccctttggtttaaaaaacgctggagctacttaccaaagattggtgaacagaatgttcgctaaccagctaggtaaaacgatagagctctatatcgacgacatgctggtcaagtcagctcgcgaaaaagaccacctcccgcaattaagagaatgcttcaaaatcctaaacaaattcgagatgaagctaaacacagagaaatgctctttcggagttccctcaggagaattcctcggatacctagtaacccagagaggcatcgaggccaatcctaagcagattgcagccttcatcgacatgccatcgctaaaaacggcacgggaggtccaacgactgaccgaccgtatcgccgtcctcaacaggttcatatccaggtctaccgataaatgcgtccttttctatcagctcctccgaaaggataaaaagttcgattggaatgaggacagcgaacaagccttcaaacaattgaaagcatacctgtccgaaccacccatactcgcaaaacccaaagaaggagaaccgttgtacctgtacacggcagtctcccgaaccgcgataagcggcgtcctggtgagagaagatcacgaaggaaagaaaccgatctattacgttagtaaaacgttgatagacgctgaaacccattatcgagcaatggaaaaactagcactggccgtagtcatgccagctcgaaaactgagaccatatcttcaatcacatcccatcgtagtgatgacgtctcaaccaatcagaaccattctgcacagtccaactcaatcaagtcgactagcaaaatgggccatagaactaagtgagtacgatatagaatatcgcaccagaaccagcttttaaagcacaggtcctagccgactttgtaatctagctcctgttagcaaacttggatggaaccaactctaataagaaatggctcctccacgtcgacggctcctccaaccgacaaggaccgaagtaggaatacaactcacctcccccactggggaagtcatcgaacaatcgttccgactcagatttaacgcatcaaacaatgagtctgagtacgaagccctcattgctggcattaagctagcccaaggaatggggatccgcgatatacacgcccatagcgactcccaactcatcaccagccagttccacggggaatatgaagctaaagacgagtgcatggaagcgtacctcgaactggtcaaaaccttgacccaacagtttgaatcgtttgaattaactaagatccccagaggagaaaacacctctgcaggcgccttggcagctctcgcttctacgtcagatcctttcgtcaaaagaattatcccggtccaaggaatagaacacacgagcatcgacctaacggtcaaacatgttgggagggaatcctcggcaacttgcaacttcacgctagtaacccgaagcaccaccgccgcagccagagctctcgcagcagctgcggaggcaagtgcaacggaggaggagcctgagctcgaaacccccgaacaccttccccg

SEQ ID NO: 2104 - DNA, 884 bp, Arabidopsis thaliana landsberg
  unsure (1)..(884): unsure at all n locations
cactcatgaaggttatatgtgtcttacagcacattacattgacagaaattggaagctcaataacattatcctatgtttttgtgcattccctccaccgcaaacaggaatgaacttagcgatggagatacttgggaaattgaaggactggggaattgagaagaaagttttttccattacggcagacattcaagatgcttgatagggctctgaagtatcgagctgcatttggtaatctcaaagtcattgatgccaaaaaactacaaatttcatcctacagatgctgaatgacatcgactacagcaaatgagtgactttttagagtcgtttgatcaaataaccaatcttatatcaggttcgacatatccaacttcgaatttgtattttatgcaagtttggaagatccaaaactggttaacagtgaatgagtccagccaagatgaagttatcagaaacatgattgtcctaatgaaagagagtttgataagtattgggcagaagtaagtgatatctttgcaatcgctacggtatttgatccaaggttgaagcttacacttgcagattattgttttgcaaaactagatatcagtattcgtgagaaaagaatgaaacatttgcgtgctcaactacgtaaactttttgaagtttatgagaacaagtccaatgcggtatcacctacaactgagtctcgtgaagatgttacacatgatgatgaaactgcaaaagggaattttagcaattacgatgtaagtttcttatgttttgtttttgttagttaatatgcagtttttttatgaaaaacagcaagtcattagtttttatgttatgttattttgatttcttatctttgttataagatttctttgcttttcgcanagcaaacgttg

SEQ ID NO: 2105 - DNA, 540 bp, Arabidopsis thaliana landsberg
  unsure (1)..(540): unsure at all n locations
gaccataacctatagctgtaacattacatacaaatatattttcattatattgactatatattataaagaggggatgttttagtgtacacataaatgcaaaaaatggaactggtttgctctcctgtgatcctatatatattaaagttcagaatataatctgttttactaaaatgagtaattcagacaatcatgatctaccaacttatacagatacctaatctactctattagttagaaatgattgatatcctcttatactcagctgaaattaaagtaggtacactattagtatatctataataagaaagacatcaataataagaaagacgacaattgtnagagttaaaactgagccctcttgagatccatggcgggaaataacgttacagaagagataaaaccggtatgattcagaattaccataccgatattgagccgaataaaccaataattgaattcgaatcttacgcaatagttcactccctaaagacacactatgtatataataaagcttctcttcgacagaatcacacacacttt

SEQ ID NO: 2106 - DNA, 506 bp, Arabidopsis thaliana landsberg
atcttccttgatcaatcctgttaggcacgatctcgtctgcgaatttatggacggtcgcgattgattctctcagaactctctctgatccaatgttaagtttctttttaatcctccatgcacacgaagccaccgaccgaaaccgctgcgatataatcgtcgcagcggtttcgaaggcccgcatgaagtttacaccgaccgctccgtcgtggccgagacaagcgcaatcaacattgaaagctaatttacagatgttatcgaacgcgaatcgctccaatatgtcttggagatctatcaactttccggtggttgcagcttctactaacaccggaacaagcctggtgttgatttcgacggtgacgttgctcataacaaagtcacggagagatttagtactaaattcgtagctcgccgtcttcctctgtttccaccacatatcaccatcggaattaaaaatcccgtggccgagaaaatcctcaagaaccgaagtaaaccaaccacggtaggaa

SEQ ID NO: 2107 - DNA, 550 bp, Arabidopsis thaliana landsberg
  unsure (1)..(550): unsure at all n locations
agnnnnnnnnnnnnnnnnnnnnnnnnnnnnnnnnnnnnnnnnngctacaagctcggaatcagatatcaaccgggtcatcgaagaagctaggcaaacaccttttatcccgcaaattgctagcttgagaatcagagattctcgaaagcttaacttaaaaaccatacaacagtttggaagatccgaaaggctatctcgtaacttccctgattgctgttgggcgagtcgatctgaacaaagccgatgaagatgcaggatactacaagcttttctcnnnnnnnnnnnnnnnnnnnnnnnnnnnnnnnnnnnnnnnnnnnnnnnnnnnnnnnnnnnnnnnnnnnnnnnnnnnnnnnnnnnnnnntttgaaacaatactcaattcttatggataaaagctttcatcaccaagttcaagaacgtactttcgaagctcccaaggatctcgcaacagtcggctttatcagctttgtggaaaggattatggcatgattcgagattcatagaagatttgatactacacaaactngatactattcaagatgcgttatttcgag

SEQ ID NO: 2108 - DNA, 654 bp, Arabidopsis thaliana landsberg
gggtagagaagataccggatttggatatagaggatgatggcaaagggatatacaaggggaaagtgtatgcaagcaaagaagattgccaaatcggtttggttatatatgcgattaagaacatgtttcatttcaagcaaacaagaacaaagtgaaattattttgttcttagttgttcagatgagaaatgtgattggagaattttggcgacactcatgaaaggtactagctactatgaaattaagaaagcaagtctagatcacacatgttcgttagatactagaggacaattcatgcagaaggcaacatcaaaagtctttaaggctaagtacagtgatcctacgtccgtcctgtcccgatggatctacaacaactagttctagaagatttgagagtctctgctagtgttggagagctagggaatcagctttaactagtgttgccgggagtgacgaagaatcatactactatctggctgaatatttgcatctactgaagctaactaatcagggaacaagaacacatatagaaaccgaaagagatgttgaagctgaaagcaaagagaggtttttggatatgtttttagcttttggtgcctcgatagcaggatttaagtatttgagaaggatattggttgttgatggaacacatttgaaa

SEQ ID NO: 2109 - DNA, 2047 bp, Arabidopsis thaliana landsberg
aagccatggctttcttatatttttcacctttaacgacattgattcagttcccaattaaccgacgagcgcacgatctcgagtcggaggtaagtggtgaccattcacgagaagttcttgcggggctaccgactgaggagaagatctcgttcatggattcatggcaatggagatgagatagagacggttaagcagatggtttggagacggtcaaagagatggtgatgcaagaacggcgacagagagaacacaagttgtgaaaccctaatgaggtgtcccaccaaatcacaaacaaactcaaattatgtcactttgtcgtattgggcttatatgggctataagattaataatatcagtatgtattaagcccatgatatcaatgtataagcttaattggtgtaatatcatattactagcggatttttgtctcaggactagtaatatgtagatattttgacggatccggatatccggatgtaattttttttgttatccggctccggatccgggtccgtatgatccataaatttgttatccgtattcagatccgtttagtccggatatccgatttttcggagcggatcacggatccggatccggatattcgcggttagcggattttagtcccagggctagtgtctagcattgaaaagtaaaagatattaggggaaaaagtaaaaaaaaaaacactctttatcatttgagttcagggatctgatgtgaggacaagaattggaagatgttttgaagtgaagggggagtgaaatagatttgacataaaacattggatatatgacttgattaggaaatgtttggatgtgaaaattggagtccaagatgatttttatggggttcagtgttaccaactcttaaagaatgtggctcttattgaacgaataaaaataattgtaggtgtaaattgtgtaacctccaataaaacctttaacaagttgttattggagcgacttcattgaaagcttactgctttcactatcgtcagtagagtccattgattcgacaggcctgctcgaagcactcaacaccaaccaacccactgctcatatttaagaatttatgggacaattcaattcaagttactaaaaaggtgagattggtaggaaaaactggatgataaaaataaaatcacttttttccagtcccacaataaatactatactattgtttagtaagcaatacgccaaaacctataagctatagcttttattaaaagtgaaaaagtgattctatatgttctcttttctcttatcccccaagtcccaacatcgcctttattctccaccttcctttagattattcattctctcttttgtttgttctttttaccgtatcattggtatcaacacaacataattaatatcttaatccattttcgtttatctataaagtttgattcctctggttaaaagttaaaacaaggtcttgatactaatcatactatatacagtatatactaacgttataagattataggtggaaactacaaatcgttattattaaaatagatatatgaatctatctttcacatatttccaaagatcgaatttacacagggcataacaaaataacaaaacaaacacatccctttccccaaactccgaaccagacgcgatagatatctacaaactttctttgactacaacaagcttttaatcaccatcaattctagccacgtgtctcgttcacagaccatctaaaattcaaaccatagttttacacgtcgaagtctgaggatcccacaacgccggcaatagatattttctaccggcgagacccaaagcgttgtaactcgctccactcgtcttgtctacgagaacccgacccgcgtaacccgggtaagcacccgaaccgaatatcccggtacaagccgagacagcttctggagacggattcgttacggtgttaacaagaagagtcgcgatgtttataatcattccgtcaactccgacgtcgccgttaggtgcgactaacggcggagactgaggtccgtagataggctgatgaaacggccacgcgcagtaaccaggacact

SEQ ID NO: 2110 - DNA, 595 bp, Arabidopsis thaliana landsberg
tatcttgaaggacatccacctcaccattcgcgctcgtctggatcctttgtctcgcagcacggcgcatctccctaacgctctgtccttgctaggaacttggttttctcttttctagttcagggatgtttgttttggttttctagtgttgcaggtttcgtcttcccttttgtttgttgcaggagcaggtttgttctcctgtcttgggcctgtggcctttatttgggcttttgccattatatgtttttagttgaatggaaaattatgaattaaaaaaaaaaaaaaaaaaaagaaacagaatactttttttttttattactcacatgttttcagtagttgtgtaattacaattaacattcctgattagttataattaattattattatttaatttgttttaactaaaattaaatgaaaaaacagtgattatacatgtcatcaatccatgtcattaacataatccacgtcattaatcaactccaaaatgcacaaacgtttcggtttcttactgttcatcggcggaaaaaaaactctctctttctttctctctcgatagggaacgaactcttcaccctattccgacgcagttttcgctgtt

SEQ ID NO: 2111 - DNA, 558 bp, Arabidopsis thaliana landsberg
  unsure (1)..(558): unsure at all n locations
ttattctttattaattgggaaggaccttacattgttaccgaagtggttcggaatggtgtttacaggttaaaagatgtagaagacaggcacgcgttttatgtttaaagaagttttatgtttaaagaatgtggaatgtggtgaatttaaagaagttttatgtttaaggaacacgcgtttcttgttatgtacatnnnnnnnnnnnnnnnnnnnnnnnnnnnnnnnnnnnnnnnnnnnnnnnnnnnnnnnnnnnnnnnnnnnnnnnnnnnnnnnnnnnnnnnnnnnnaaacgcgcgcacttcgaattaagaaactcttctcgatttgtagaacatttggactccttgatcgacatcatactgtccggtatccgagcgaactcggagattccgagctcgatccaatctcggnggtgggagttgagggtntgaaaatttcccttgatatcacggtgaccctgcctaacattcggttaatctttttgcggattttcctcctttntgatgtacacttctggtgcttaacatcaagagctttgatgaacgccatcacgatttcttaa

SEQ ID NO: 2112 - DNA, 753 bp, Arabidopsis thaliana landsberg
ggtgctgatgaagactagtttaagcttattcaagggtgcaagtcagcgaaacaagcatgggatacgttacagaaatctcatgagggaacttcgagtgtaaagagaacaagactggatcacattgctactcagtttgagtacctcaagatggaatcagatgaaacaattgtgaagtttagttcaaagataagtgctcttgcgaatgaggctgaggttttgggaaagacctacaaagatcaaaaattggttaagaaactgttacggtgtctaccaccgaagtttgctgcccacaaagcagttatgagggttgcagggaatactgataaaatatcatttgttgatcttgtgggaatgctcaagtcagaagaaatggaagctgatcaggacaaagtcaaaccatcgaagaatattgcatttaatgatggaatggcattgctagctaggaattttgggaaagctctgaaatgtgtagaaagaggtcagaatcgtgacagtacaccctggagcaataaagatggagagagatcacgtggaagattctccagatctaagaatgatgactcaggaaagaagaaggaaattcaatgctatgagtgtggtggttttggtcacattaaaccggaatgtccagtcaccaagagagaagaaatgaaatgtcttgaatacaaaggtgtgggtcacactaagtttgagtgtccttacaggagcaaacttaaagagaaatttcttataagtttcagtgattcagagtct

SEQ ID NO: 2113 - DNA, 565 bp, Arabidopsis thaliana landsberg
  unsure (1)..(565): unsure at all n locations
agactgacctccaaaaaatcctataaatacgaatcacacagaaacagacatgactcaactaatcaaaaacccttttttcttactacatggtttttgacaaacttgaaatcacctaactctgttaaaacttggaatcaagcgcacacatgtaagcttgaagagtagattgaactttacgaccagcttctgagtgatagaaggtaaacaagtcgcggtaatctacgggtcgtctgaagagacgtggatgcttctcgtccacaagttctttggtgcctctatgatatagtccggttttggatacgtgaaaatcatctcatattgctgctngtgaaaagttaggttttcacgtgtccaaaaccagattatctcatattgctgctcttctttttttccgttactcttacttggtgatacggagcaagagttctaccgtttcctaagtgtctgcaatatcaccaagtaaatgattgattactctttatttttaacaagaagattctgaaagagaataataaaaacagttgtgtaccaacattttttttttttaaagaaaaattaaaaaagc

SEQ ID NO: 2114 - DNA, 642 bp, Arabidopsis thaliana landsberg
  unsure (1)..(642): unsure at all n locations
caaggctcacataganagccacccgagaccagaacacnncnaaaaanncatgcattgaaaaagttactgtaatgcttacaatttaactgttagtaattgggcctagacctcttattttcaaaaaagcaaaccgttttagtataaattcactaaagcccaaaattcactaaaaaaccaagaaaaaaaaaaaaaaaaagggaaaccgtgaaagtaacaaagagtaaaaaaataaataaatagagaaattgtcgtctctctcattgtgtcttcttccttagaacaatttgaagaaattttgtttctcaaacaaatgaagcaattgaaggtaataaattttgcgagggatatatttgcagtttgaagtgaaactaatagttggtgttaattttcatgaatatgaccactttgtttcaaaaaagaatcctatagacaaggatctgttacatatttttgatcttgtgaacaaagggtataaaatgagcaagaaagattggagtcaaggatggattgaagtggaacaagtacatgaaggtagaattgatcatgttatgaaacctgcaattgaaacacttgtgtattacagctgaaaaaagaaatcaatggcctttggtgagaaaataggtcttgtctataaaaattgtg

SEQ ID NO: 2115 - DNA, 566 bp, Arabidopsis thaliana landsberg
tcgctgtgtacgtgagttctgatcctggcacgtacatagttcgcattcggtttgccttccaaaaccgggtgtgacactatgttaatggagttagttatatagttgggaaaccttttgttccactttcctttttatctgagaagctgtgtggtctgtgttggagatcagtgaagatgctcatctgttcagtgctgttgaaggattctatactcttttcttatgctgcaagatttgccagatcaattctgatgtgtggttgcattctgcagatgtcaaagaacaggcgcagaggaggaaggcgtgctcagcaggagcgagtcgctcaacaggatgaggtgccccagcagcagcacctgccacccccgcccccgatgtccatcgagcagatgtttctgatgcagactcaggcagttcaagccatcggtcagactctggccgccattcagcagcagcagcaggcaccacctcagtctcagatgcctcagatgcccagagacaagcgtgctgaattcatgagaggccatcaccaatgttcgctcattcttctaatcccatggatgctgaag

SEQ ID NO: 2116 - DNA, 615 bp, Arabidopsis thaliana landsberg
  unsure (1)..(615): unsure at all n locations
tgcaggtgtttccaaacgcgagacatggccattgtgttnnnnnnnnnnnnnnnnnngttaaagtaagggtgaaaaatgagaaggaagaagtcgcggttaaattccttgcatgcgcacatgtttatactcaatttgagttaacgagagagtatgctcaatttaggagaggatttcctaatgtcggttcgtatttggatgaatgggctcaggtggaaaattgggcaaggtgttattttgaaggggagaagtataacatagacacgagcaatgcgtgtgaatcactgaacagtacgtttgggcgttgaagaaaatacttccttttacctttgcttgatgcaatttattttgttgacttgctaaggacaacttgttattgccgacgttttgatgtcaacaagtatctgtgtgtacatgcgattgccgctgcccaaaactttgtggggaccgaatcgatattagatagtctcgaaatggaagcctaacttcgcgttattacatatgattacgtggaaattggcatagctcattacgatttatccagtcccgcaatcattagtttagtaagggtgaaaaatgagaaggaangaatgatttagtaaagaagaaaatatttag

SEQ ID NO: 2117 - DNA, 550 bp, Arabidopsis thaliana landsberg
cggactaaaatacttagtcggataaacgagaaacttcaagctgaaccagctaggtgagctagacaagctaggatgaactagctagctaagctaggtgagctaaaccagctggaagactagctagctcagctagatgagctgaccgacagctcgactgagctcagtgagctgatcgtgtactgacccagctgggtggtccggtcagctgacactcgagctggtggactgtggtagctcacgggtgaagaggtgtctcggccaaaaggtgtaaggtcgagcaggtaccaacgaacggttgcaaggaacggatgtgatgcttcgggaagcatccattcgccccctatataagggaggacgcccaaggcatttggaataatctcacatcatctcacaacatccagaacaccataaaacattcttaaggagtcccaacacatcctagagttgttggtcggaaagggggtgcgggtcggcgagtataactcgaccgaactgatgcgcatctacctcccagtccaacggttcgatggagtgtagaggatggagaggg

SEQ ID NO: 2118 - DNA, 617 bp, Arabidopsis thaliana landsberg
gaacataacagcaaattatgcaagagttaagctaaaataattcatcttatacctctgattgctttcggttgaagtttttgcatcaacttaaccgtagaatcttctatcttcacacatgtgaaaatattagaacaaaataagtggttatagaatattttcttctctgttttggacaaagaccaaagagctggaggaagataggttctttttccacgtgcttggggatgttgatatagctcaaattgccttaagcttactgataagcaggtttttacgcctacttatatgttgaatgtgtgattcagttcaattcccctaaaacacaaacatgtcgatgcagttatagggggtgtcaatctagtccactgtattgctagcaatcaagatgtgcacagaaacaactaagtcaagccagattataatgatggtgggtttctagtaacaatcctaggtcaggattcaaacaagtaaaaatgagaacttacgagccctactcgatcattgtgtcgagtagaatcaacaggttacaaaattaagatctaatatgcatcaacaggggatgcatataggggatgcaaataacaagttaataaaagtgcaatcgacatgggatacaa

SEQ ID NO: 2119 - DNA, 1405 bp, Arabidopsis thaliana landsberg
  unsure (1)..(1405): unsure at all n locations
caggtcgactctagaggatccccctctctctcactagccactatttgattggaatgatctttggacttgggagaggatttgatctctttgattgtgtcttgtattgaatgctatagctcttgtaaggtgtttgatggctaaaaacttggatgcattgaagtgtggtggttggggagtatttatagccccaaccaccaaaacaaccgttggtgagggcttctgtcgcatggcgcaccggacagtccggtgcgcaccggacagtgtccgtgcgccagccacgtcacccgaccgttggattctgaccgttggagcttctgacatctgggccaccagacagtctggcggtgcaccggacaggtcctgtagactgtccggtgcgccttctggctctgctctgacttctgcgcgcattgtagcgcattgactgctctctgcagacgaccgttggcgcgaagtagccattgctccgctggcacacgggacagtctggtgcacaccggacagtccggtgaattatagcggagaggcattcccagaaacccgaaggtggtaagttcggagttgatctccctggtgcatcggacactgtctggtggcacgccggatagtccggtgcgccagaccagggcagtcttcggttgtcttttgctctttttatttgaaccctttcttggacttttttattggtttgtgttgaacctttggcacctgtagaacttataatctagagcaaactagttagtccaataatttgtgttgggcaattcaaccaccaaaatcatttaggaaaaggtttgaccctatttcccttttaggagcctctcgcccttataataaagatcacaaagaaggcacaagagtaaggctaggagagcaacacacacacaacacacaaatccgcagcacacacacgcacagaagtcaagacttgagctcgaaacgtagcacagagagttcacaacttgaacggagctcaaatcactaacacaatcgatcaaatgcgcggaggcggagtgtgagtcttagaatgcttagtgaatgcttagatgtctcctccatgcgcctaggggtcccttntatagccccaagggggataggagccgttggagatcaatttggaaggtcattcttgccttctgtcgagtggtgcactggacagtccggtgcaccatcggacagtcactatagcagtccggtgcgcgatctccttccatatctggcacatctaactgttggtcctcgggaccggttggtgcaccggacactatctggtgcacactggacagtccggtgtgcccaaccgaccattggcatgggccacgtgtcgcgcattgatcgtgcggccgaccgttggccactggcgccgttggctcaccggacagtccggtgaattatagccacgtcg

SEQ ID NO: 2120 - DNA, 1424 bp, Arabidopsis thaliana landsberg
aatattgcccagcaaatattactttgctgtttcggctttgtttttgcaaataattcttgactggttattggtagtctttcaaagttctgatgtcactttgcagatcttgaaggcaaaatggatcttaagattagagctcttgagttagtcgaagagatgaggaccaagagagctgaccaacaggtgaatttgctttcgctattggtttaatgagcatttttgcttttttactttacctatgtcaactagaaagtcctttgtcttgttttttcatgtaggcggtgttgctgttggaagccttcaacaaagatagagcatccttgccacagcccgttccagctcaaccaccatcttccgaattacctccaccggatcctcgcactcaagaaatgataaatgagaaactgaagaaggcagaagatcttggtaagggaaataaccctaatttgtgtttggttatttgtctatggtcatcttaatttagagctcattgtagtggaaagttgaaactgcttaaatatccacggtctagtattccctgccggctgggaatttctactggctaatctaagatttcctaacctataaattgcttaaactgtatatacctaagataaggaaatttcttcccgttgtatgttactatatctatgttaaggaaacactggacttcacgaagttttatatagattgtatggttatttgatattttaggtgaacaaggaatggttgatgaagcccagaaagccctggaagaggctgaagctcttaagaaggtgtgttctctttcttatttctttttcttttccccctacttttattagtcactaataattgttgggcctaaatttgtttcagcttacagttagacgagaacctccagcagattcaacgaagtacaccgctgttgatgtgcgcatcgtaagttaccatcactcctcccaatgatgccttaaagattcacattctttctatatttatcagtttgttttggaaagtaccgttgaatataggaatgacaacagtcatatattaacgtttaggtaaagagtaatagtttatttgagtaaacccgtttgattgctttcataaaagttactatttggaccaaaagtataacatcttcgcatcccctgtttaatgtatctacacattggtttcatcttctaacctcacttattgttcctatatcttctcagacagaccaaaagttgcgtctatgtgacatatgtggagcattcttgagcgtctatgacaggttaagttccttgctcaaactttctgcattattgtttcccttttggattgaaagagaaaaaaggtagaaatagtcttttgactccggctattgtacctcctcctttcaccagcaggctttttgggcaggattacttttgcagctataataaatgtgcgttcttttc

SEQ ID NO: 2121 - DNA, 3928 bp, Arabidopsis thaliana landsberg
ggtcgtaaggcgtggacccccgttctttctcccatacagatagaaaaaaacaacttggttagtcatcgttttatctggttttccaatattatttaggtggttggtctctagtttagaattaagtgtgtctggtctttgatttcttaacgtttagttgatgtgtctagttttgatgtgtgaatgtattgattagagtccgagtgtattgatgtgtgtgagtgtattgtgaagtgtctagtttagttgtgtaagtcctaagagtctgagtgtaatggaaatcgatgaagtttgtttgtttctttcctgacattagctttgaaatttgagttaagacagtaaatgtgaaatggagtgttggagttaagattcattgagttttgaacctctggaacttgttttgatagcagaatgatcgagtggtcgttgataacacttgagcagtctccatgctttgataacctctggaacttgttttgatagcttttgtgtaaagaggttctagttagggtttatgtttagctcagtctccatgcttttatgtgtttctttctcttttagctcattagctcattagctcattagctagctgtgctaagatttagtgaagtgttttggttacttgttatattttggttttgatgtctggttttgattggagaattggttttgatgtttggttttgatattgtcttgtttttttcttaacaatgtattgattagagtccgagtgtattgtgtaagtgtattggtgtaagtgtattagtttgcggtatctagtttagttgtgaagtgtctatctggtttagttgtgtaagggataaacaggtttttcaggtctgcttatggtgaatgtgtgattcagttcaattcccctaaaacaaaaacatgtcgatgcagttatagagggtgtcaatccagtccactgtattgctagcaatcaagatgtgcacaaaagcaactaagtcaagccagattataatgatggtgggtttctagtaacaatcctaaatcaggattcaaacaacaagaatgagaacttttaagtgccctactcgatcagagggtcgagcagaaccatacaggcaacaaatttaagtactgaaatgcaataaaaggtaactcaacaagatgacacaaataacaggtgaataaaagggcaatcagggggtgaatacaaataaatctaagaagaatagaagtcctaaggatggattcattgataagggcaactttagtgttcatcgggtggctaactgataacactgtattttactcattttaggtgtatgtttatcatcatttagctatgcatttgctcattgtataatatcattttgcatcattttatcttattttgcatacttaggcatttaagatcaccttgctttcccattgcatgttttggtgtgttttcaggtgcataaggagctaaaaaggactctactcgatccattcactcgatccaggcagcaaaagaagaggcatcattctactcgacctccttactcgatccaggatgctacagaggaggctgcagtttactcgaccctcttactcgatcaaggcaacctcagatgaagcagcatattgatctactcgcccctcctacttgatccactactcgatctatttactcgaccaagggtgaccatctctacaacacttgttgagctatcaaagcatcttcggatacttgataataggtttttaaatcaattaatcctaaagcactatcatgtcgttgtagtacttagggtgtcaatccaaatgggtgtgatgcaaacagatgagatgtgatcagaagacactaagtcaatccaagcaataaaagttttggggtttctaatagtcctaagcgaacatgcagaaaataagaaacaataacaaaattactaaaatcactcgaccacaacaggctgatgccacaagtaggatgtggtcgagtaatagacaggatatgaaccagctatactcgactgcacagtctgttgccagacactgggtgtggtcgagtatactggtcgagcagcggacaggaaacgagacaactgtactcgactgcacagtctgttgccagacactgggtgaggtcaagtaagttggtctagtaattgcaaaacgaagaaacaggcaatgagaacgattaagcgataacgataaaacagaaaaatcagatagacgagaaattcctaaggatggggtaatcaattagagtggtatcctagcttattcgaatggttaaaaaacgcaatcaggctatccctagacaacaggtttaccaacagatcaattcactcccgtgatagagatcctcaagcaaagctagcccagactaattcccattaacggaatcttactatgcaggcaataagtacaaactgataaagtcaataaacgctctaaacggccaatcccttgggagagagacgaatatctcaggaactagtggatcaagcattccatcgaacacattctgggtgcgggaatgcttaggaacgaattccagttgatcaaaaagaaataagcagttaacacaactagtcctgaagggattcaatcaattctaaaacttaaccattctacagactacggattccacaactactctatcccatccttaagaactctatgtcactactcagacaacatgctcaaagacataaacgcaggtaaatgataatattgcataagtaaagagataaagagtagagaaacaagatcatagatgaaatcaaatgcagaatctgaataacttggaaaaatctcgaaggtcgttcaaataacttgtaagaacaaacaatcttgttgtgtaattcagctatcttcttgtcaaaagccatagcgccagtagcttgtccttgaatgactcattgaatgagttgcttaatttcaggatcttgagctgctggggcttgttgtggttgttgagtgaaccctggtggtggattatgccattggtagcctccattgaccttttgtttagggacataactttggttgtactgaacaaaagtgataataggtttttaagatcaattaaacctaaatcactatcatgtggttgtagtattttaggtgtcaatccaaatgggtgtgatgcaaacaaatgagatgtgatcagaagtcacgaagtcaagccaagcaataatagttttggggtttctaacagtcctaagcgaacatgcagaaaacagaaacaataacagaattagtaaaatcactcgaccacaataggctgatgccagaagtaggatgtggtcgagtaatagacaggatatgaaacagatttactcgactgcacacagtttgttgccaaacactgggtgtggtcgggtatactggtcgagtaacagacagggaatgagacaactatactcgactgtacagtctgttgccagacactaggtgtggtcgagtaagttgatcgattaagtgataacgataaaacagagaaattcataaggatggggtaatcgaatagagtggtatcctagcctattcgaatggttaacaagcgcaatcaagctatccctagacaacgggttcaacaacagattaattcactcccgtgatagaaatcctcaagcaaagcaagcccagactaattcccattaacgaaatctaactatgcaggcaataagaacagacttataaagtcaataaacgctttaaacagccaatcccttgagatatagacgaatatctcgaattaaagatgaaatcaaatgcggaatctgaataacttggaaaaatctcgaattacaggttgcagaagcaaatgtggcgcaaccagagtaaaacagaaaataaaattgaagcaaaaactcaatttcgactagatgtctcaagacagatcaaaagacagctatttatacaaagcgaaataaaatgatagtagacgggccaataacctaatcgaccggcgcat

SEQ ID NO: 2122 - DNA, 475 bp, Arabidopsis thaliana landsberg
  unsure (1)..(475): unsure at all n locations
ttcattgccagaatgaaaaccgccgagcacaaagtgtcgcaccttgatgaggtcagtgaccgattcatgtacttgtctcaggcgagacatacgcgcactgactcgaggtcctcgaaggtggtggagctctggatagagacaaggagtaggttgaagagtggttggaacattacgccgatgctgaggcaaatcctaatcgcttcatggccgagctgaaagattacctcaaagctcgagctcccgagtctgctcctctgagtccgggtggtcataggtcggtcgagtnnnnnnnnnnnnnnnnnnnnnttacagatcaagccggatcgctcctccctgccaaggatgaccgaagatttgaagatctctactaaggacccgaggcgatcaccctttctgctcggttataatacttatgtctggatggctttagccgttgatatgtagacccgtgccaggatggtttatccactttaag

SEQ ID NO: 2123 - DNA, 713 bp, Arabidopsis thaliana landsberg
  unsure (1)..(713): unsure at all n locations
tattgataaatttgactttgtatttcaagttgaagtgactaatttcatttaacgttctttgttatcattgtgtaggttatcaatgacagatttggaattgttgagggtcttatgactacagtccactcaatcactggtnnnnnnnnnnnnnnnnnnnnnnnttattacaaacttgcttgcctataggtggaaaatttgtgatttaatggggtttgctttatgatttcagctactcagaagactgttgatgggccttcaatgaaggactggagaggtggaagagctgcttcattcaacattattcccagcagcactggagctgccaaggctgtcggaaaggtgcttccagctcttaacggaaagttgactggaatgtctttccgtgtcccaaccgttgatgtctcagttgttgaccttactgtcagactcgagaaagctgctacctacgaagaaatcaaaaaggctatcaagtaagcttttgagcaatgacagattaagtttacttatattccagtagtgatcaaattactcaccaagtgtttttaccaccaatacatagggaggaatccgaaggcaaactcaagggaatccttggatacaccgaggatgatgttgtctcaactgacttcgttggcgacaccaggcccagcatttttgacgccaaggctggaaatgcaatgagcgacaagtttgtgaaattggtgtcatggtac

SEQ ID NO: 2124 - DNA, 561 bp, Arabidopsis thaliana landsberg
tcaagttttagtatgatcctttttaaactaaatgagtacctagctattcatacatggtttcaaacattttatcaatcatcatcttttgtcagtcacctcatttccacttattactcaatgtagcagcatggatcaagcagtctcattagctgcgagaagcagacgattcaaatcgagttttaaaaccttgcaaggtaaacctaaacacacgatgtggcgaggcactccgtccccacacacatcaaccgtccccattgattccccgtcaacagaacagggctcaccgccttgggtgacaatgcctcactgaccccgactgccattgtgcagtgaccgcacttgttcccaccataaccggaatgggagaccacgtctcaggtcgctgtcaggttcacttaggtactaggcttaccaatttaccatatttctcggcatatgtttagtacattcaaacgcttgacacacggtaccacaccttaatctttatttccatttccgtcttgtagataatgtatcctcatggacagttgtcacagaccatcatcattctgatataaaatg

SEQ ID NO: 2125 - DNA, 1693 bp, Arabidopsis thaliana landsberg
tatacaatatcaaataatgtagatttagatttctgaacacttgtagaaaaatgatccatttgtaggttaggttggtggtaacgacttataattgggtagagtcctgaagtatttagcaattttaaataagagttagtataaatagattaagtcacatttcgatgaaaattggacataactaatatgaatatattatatcaaatacctgaaataataattttttctttgttgttgcattacttgattgttttgaggtacgccaatttttttgtttcaagaacactcatataacgtccatggtgtccgacttttttgttttttggtcgtccaacaggagcttttctttttaccccacaaattcaatatctgaagtttgaagcatccatgcattagattttaaaagctccttttctttcctccaattttttgagtaacttaatggcttcttcatttgcacacaacgtcaattctatatgatcagtagcaacagatgcaatctcacggaaagtacgacatatatggctatatcgctttccaatcgattccttgactgtttcattaggtggctctgaatgataaaaaaatgtttttcgtgcttttgcctctttactccatcgatttagaatgtagttagatgggatttttctaacatttttcttgtccagcactttcaatgcatgacgacataaaatcccgccaaaactaaagttcatgcaactgcaacgtatcgtctcgtttgcaacatcataattaataaaatgcttccgtgctacaccacgataaggtaatttatattcatataccatctcatacttactaaccttgttggcaacataatcaccaataactatgtattgtttctggaacaagctaaaaattttgagtgtatacacttcctctgcatattgcaacatcctacagtagcacataataccgacaaggtatgcatcatattgaaatcagcaactaattccttagatcgtcgatcctccaacactttctcgtagtgttcaaagaagcacaacaagttataactatgcttcaagtatttttcaaaatattattcatactttcactacgttgtgtgctcaccatatctgctgtaaaagaatgacgttcatataccattgcccatttttctctcagctcaaacaaattcttcaaccatttatcctctatcaagttatgcttctggagcatattactccatgctaataaccaatcttcttcttcctcatagtcatatacacacttactaaaatccatggcaaattgttctgctccatgaaatacatgactcaacttctttgcagcattttggtaaatatgccaaacacataatctatatttgtatcagggaatacctttactatcgcattcgccattgctgcacattggtctgtaagaattgttttttggttgttttccatacattactccaagaaaagtctcgaaaagccacttatatgactcgttggttttatcatataagagagcaacaccaaacacaactgtttgcttgtgatgattgaccccgacaaatggaacaaagggtctatcatattcattggtcttataagttgtgtcaaagcaaatgacatctccaaaaagattgtaatcactgatagaccgatcatctgcccagaatatattagtgatcatatcatcctcatcaagttgcattgaaataaaa

SEQ ID NO: 2126 - DNA, 429 bp, Arabidopsis thaliana landsberg
cagaggtgggtgcggaagagcgaggacgacgacgagtgggagcaacacaaccgcagcgagaaagtgaagctatggcgttctagacgctcttgaaactgtcgacgacgtactgttgaaagacctgtgacgcgaatgaagaagataagagctccttcctgagcgttgcgtttcctatcattcacataggaaaccctaacagaagccatgaattatctaaccagctcagggtacaaatcgtaatgcctacaacagatggttcccaaacctatatcatctagcagtcctaaaaaagatttctctatctgcaaacgctgcatcaaaccgaaatccgcaaaccgattaggcaaaatttctacactcatccaggcattatagaatatagtatcataatcatcccaatctggagaaaaagggcgattgatatagtca

SEQ ID NO: 2127 - DNA, 1296 bp, Arabidopsis thaliana landsberg
  unsure (1)..(1296): unsure at all n locations
aagtgacacaagcactcatggtggattctctgtaccgcgtcgtgcagctgagaaaatattccctcctcttgtatgtctttgatcaaagctactctcagtttcttttgcttcaaacttttgaatctgttttgctaaaagttctaagggtgcttaaaataggatttctcgatgcaaccgcctgcgcaagagattgtagctaaagatttacatgatactacatggactttcagacatatctatcgaggtttgaatcatctaaagtttgttttattagtctaaaagattgaaaacttcaacctgatttgttttctttgatgtaatctgatctcaggccaaccaaaaagacacttgcttaccacaggttggagcgtttttgttagcacaaagagactatttgcgggtgattcagttttgtttgtaaggtatgagtcatactttgatcaaaacattaagaagaattggactttcatcttctcataagggtacttgggtttgcagagatgagaaatcacagctgatgttgggtataagacgtgcaaatagacaaactccgactctttcctcatcggtcatatccagcgacagtatgcacattgggatacttgcagctgcagctcatgctaatgccaatagtagcccttttaccatcttcttcaatccaagggcaagtccttcagagtttgtagttcctttagccaaatacaacaaagccttatacgctcaagtatctctaggaatgagattccggatgatgtttgagactgaggattgtggggttcgtagatatatgggtacagtcacaggtattagtgatcttgaccctgtaagatggaaaggctcacaatggcgtaatcttcaggtaatgacatatccgagttatgctaaactgtttatgatggtcatttcttctgaatctttgttcatggtttaaacaggtaggatgggatgaatcaacagctggagataggccaagccgagtatccatatgggaaatcgaacccgtcataactcctttttacatatgtcctcctccatttttcagacctaagtacccgaggcaacccgggatgccaggtgagtttactgctttctttcatttttttcccatagatctttgactgagtttccggatactaaccttggtggtttgttgcagatgatgagttagacatggaaaatgctttcaaaagagcaatgccttggatgggagaagactttgggatgaaggacgcacagagttcgatgttccctggtttaagtctagttcaatggatgagtatgcagcanaacaatcca

SEQ ID NO: 2128 - DNA, 2130 bp, Arabidopsis thaliana landsberg
ttttgtcacagatctgcttggtgattgagagatctagaaatgaaattaaaggagcagacattgaaatttaaatatagatgcaggatatcatgtagaatcccgtgaagttccttctgttggatcttcaaattgaggactttgactagaatcatcgagtctgaagcgaagaacaagtttttgtaatccgattccagtgcaactccaacagctgcgagagttgccatagcttcggcgatcagtggcgatccggcgaaagaaattggggctgagccttcctggagagtgacgtcctgcgagtctttaaagatccatccaattccagccaatccacctatcttccaagaggcatctgaaaaacatttcccagagagagaagtagaagatgtctgattgatttggcgggtaagttgggttgcagattgggtttgcggatgcagggattgggctgattgccattctttggctctgataagtgcaagttgcagggcctcctccattgtggtctgctttttgctgaagattaggtgatttctagaagtccataaggtccagaatatccaaggggctagcggtccttctccaatccccgtgggaggaagacatgtaagatttttagagcttttgattccttctttagtggagtagatattatccagattaaagatgcgacttaaaaggaaccaattcccagatctttttttgcgaatgggcaggaaaagaagagatgcaacacagattactcacttccgtaatgtggacatttgatatcatcactaacctgacggtggaggagattgagcccaacaggaagagcattttgagcagctttccagagcaggagttttgttttgggtgaacttttgagtgaccagatgttgctattccactcaaatccatccgttgagaggccattgagagctacatcgttgggataatcaatcgggtaagtcccatgatagcctgattttgcagtatagattccatcctttattggtagccacgcccaacaatccgctgcacctagtttgcttggtttcagagttagaatttcttactcgtattgtgggagaatggttctaatgagatccttgttccaatcgcagaaatttggtaataggaggtctgagacagtcatgttttgagtgttctctgtggggggactattggagagagaggtgatgataaagatatccaaggggttctccaaatcggtgtggttatcccagtgccaataagtctgcccagttgagtttttaggagatcccgccctaagcaaatcgtgcgccatccatgtgaagcggagttcgacaccgagcagttgaggagaggagagaacttgcagtatttccctaatagaaccttggctagaaggctagagggctttgtgatcagacgccaactaatctttgcaagaagggccttattaaaggtacggatgtctctaaaaccaagtcctccagtcttgaaggattttgtcattcttttccaagagatccaactcattttctttttctctgtatttccatcccaccaaaagcgagtaagagcgggtagatgaaagcatgtcatggtgtatgtgggcatagcagctagtactgatttcaacattgtgagtttacccgcagatgagaggaaccttgaagaccagctgagagctttctgtttgattctgtcaactatttagctgaagagatccttcttcttcctcccaaagagttcaggtaatccaaggtatttaccctgtcctccctctttttggatagataagatatgctttgcttgaacctttacttcctcttgggtttttgaagagaaagtaatagaggacttgtcttggtttattttctgacccgatgcactctcatacttgtgaatgatctcttgaagtttcttgcagctttttggatccgagcgacagaagaacatggtgtcatcagcaaagaggaagtggtttactcggggactgcctttggagactcttatacccggtaagctgccatttacctgagctttattgcacaaaccagaaaggacttcgctacagatggtgaatagataaggggatagaggatcaccctgtctgatacccctttgtggaataaccaattcctttgcttaaccattgagaag

SEQ ID NO: 2129 - DNA, 588 bp, Arabidopsis thaliana landsberg
  unsure (1)..(588): unsure at all n locations
gcatgaactggaagagattaggcnnnnnnnnnnnnnnnnnnnnnnnnnnnnnnnnnnnnnnnnnnnnnnnnnnnnnnnnnnnnnnnnnnnnnnnnnnnnnnnnnnnnnnnnnnnnnnnnnnnnnnnnnnnnnnnnnnnnnnnnnnnnnnnnnnnnnnnnnnnnnnnnnnnnnnnnnnnnnnnnnnnnnnnnnnnnnnnnnnnnnnnnnatagttttttagtcaattatcctaaaacacatatcatgtcattgtagtattttaggtgtcaatccaaatgagtgtgatgcaaaaagatgagatgtgatcagaagtcaagccaaggaataacagttttggggtttctaacagtcttaagtgaaaatgcagaaaacagaaacaaaaacagaattactaaaatcactcgaccacaacaggctgatgccagaagtgggatgtggtcgagtaactcgactgcacagtctgttgccagacactggatatggtcgagtatacgggtcgagtaacagacaggaaatgagacaactgtactcgactgcacagactgttacagacactgggtgtggtcgagtagatggacgagtgattgt

SEQ ID NO: 2130 - DNA, 802 bp, Arabidopsis thaliana landsberg
gggaacagcattgtcagatcaaaggtgtttaagtcgaaaccaaaatcatcaggtgttacgatggaatgccatgcagttaaacaagtgacaccagaaggccctatactcaatgtgattgacactcctggtacgttgtgccatgggaaaaaggtcattaaaatcctcaacttattgaaaatgttgatttaatttctcaattctcgacgaaataaaatatatatcaaacttatgttgattttccaaataaatacccaacttttgttgacataagtttgatatttatttcgtttggtcgagagttgaggatttacattaacgctttcaatagttgaggatttttatgatagtttttctgttttatcattgcacatcttgacttttttatatgtcatcagtatgtaactaatgtggattggggttggttacaggtctatttgatttgtcggtatctgctgaatttatcggtaaagaaatagttaaatgcctaactctagcggatggagggctacacgctgtgctcttagttttatctgtaaggactcgaattagtcaagaggaagagatggtacttagtaccttgcaggttcttttcggtagtaagattgttgattaccttatcgttgtttttcacggggggagatgtattggaagatgacggtatgacattggaggattacttgggtgataacatgccggacttcctaaaggttggtaatttgtgatcaaatttgtgcactctacggaaacagaggtttcagcttcgtgacttatttatatgattttctttggtttcagagagttc

SEQ ID NO: 2131 - DNA, 586 bp, Arabidopsis thaliana landsberg
gtatcgctaccacaatgattaagtaacagatggttttgattttgtgggtaactgtctacgatatatgaaagtgtggaaatacaaagtcctgatcaaggctgaagttatctatatagaacgtatacaaaaaaaaagcaagacaaatcggttcctcaatttggtgaccttatcatttgagcgacaaattcgggtttctaaatagagaacaacgagacttgtgtttcacgtccaacgacatttaacaaaaagacaaaaaagctaatctagagcaaatcactaagctcctctctctgatatcgctcctctctttcagagaccacgtcattcatgttgccttttggagaccatgctggttttgagccattgttagtgtgctacacataagtgaaaagagagacgaagtaagataagagatgacaaaagaaatttgtagtgttggaaaggggtgttgctacttaccactatctgaatggtttgaagcttcagattgaacaggtattcgattcagtggatcccttgtgtctgcattgcttcttggtcatgatgatgctgttgatgcggtattactcattgcatgctcgttgtg

SEQ ID NO: 2132 - DNA, 565 bp, Arabidopsis thaliana landsberg
cattcttatgctagtcgtaactttctgttttgccttcggaggcgatagtgccacaaacaagctggtcgctctgtatgagcagcgtctgagccaggtcccctcggcgagtgagctcgaagaaagaaagaccctcatccgggagctgacgtcgactgtgaaggctggtcaggaacgcgaggtctcgttctaggtataccttggttttgacttgtttgtatataattcatcgatgattcgatgattctgacctgattgtgatttcaggcggagatcgagaggctgaaaatagagctgcccacttcaaaagacctcgagaaaggttatgccgagaagatcgggctcatggagatggagatcgggggtttgcaagccgacaagaagacggcgaggaacctgattcatcgcttggagcagaggagggaagtgattgtaagtgattgtttttgcgaaaaatgataatgagtatcaaaaattttcttgtattcttatctcgaaattgttaagtacaaaaagaggtacgcaagcgacgatcttgcgtttgatcacgagtagggacctgtcgata

SEQ ID NO: 2133 - DNA, 498 bp, Arabidopsis thaliana landsberg
gtgaatcaagctgaaaagaaacctgtggtcgagtaaatcttacggggtcgagtgagattgatgaaatcagtacagctggtgagtttagaaggtctagtgctttatcggtgagccggaattgggaggaacaaaaccaaaaatcgggggtcgattctgctggatgtagtcgagtagatcttcagaggtcgagtaaaggactcgactgcggcggcgcagaaacggtcgagtgtggcgagaacaaggtgatggcgaacgtcgaagtgaggagctcgagtgaaattgagtcagagtaactctttggtgagagatggcgattcgtggtcgagtagaatgattggagagtcggttacgtagcggtcgagtgattcaggttgaaccggaatcggtagtcgagtgagtcgtggaactcgtctgagacggcagagaattctttcaggcggcgatcgagtgatttcagcgaagtcgagcgcggctataggtttcagaggtcgaggggta

SEQ ID NO: 2134 - DNA, 583 bp, Arabidopsis thaliana landsberg
ccacaggctgtctccgaagataacaccgaggttagcatatattttgattatgggataacaattatcattctgattcaacattgtatcctgattagtttagtttaaacaagttgatacaactcgtatacatgtgtcactaatatacctttctgcgtttttttcgtgttaacaaataatttctgtaattggattgttagggtgataacaatttatcgattggttaacgcacaacttagcagatagtttgattatgggttaacaaatatcataatgtgtcaaattttttctccatttgtcacgattttttgtaattgttgtaattgtcggtaggtctctaacggcgacaccgtcgaggacgacctctcccccagatgggatgttaatgtggaagcggatgttaacgaggttagattattaatcaaatattggtttctatttttttctcctccagatctggtgagttttgtcatcgttgtgttagcgttgtttgtaactttttattttttatttatttaaagtggcctaatattagctctgtaactggagcagtcacttcttccaaactttcgggcgataatgagga

SEQ ID NO: 2135 - DNA, 395 bp, Arabidopsis thaliana landsberg
gatataggagaattttgacaaacggatgacgaatttcggcaccagtcatcgttgtaggtgggcggtctatcactacgatgtctaggcgtattggatggtcaggagggagaaattgtcgatgtttatcgaaagacgaatatttgccaccccttttcaaccaaatgaacctaagagcttctgtaaggaaaatggaccccaggccatttggctaattaagttttggtgtttgatgaacaacacaatccgtgaactaataagttttctagtgtttgtgtttgtagttcacaggatgcaagttttacttggactaaggaattgaggaaagcaacacctcaaacgaagacattaagaagattcaagaaagtcaaagtgtgttgctgcggactgtctgtgtg

SEQ ID NO: 2136 - DNA, 685 bp, Arabidopsis thaliana landsberg
gaaaacatgtcgctaatgcagtggataagatacagctcatggttcagttttatatttaagggatgcctacagtgtggctaacggattggtccgattgtcgggacacccaggaacaaagaactgtaagagcactgtcaggtaaccaccttgcggaccaaccccatagaaagcataaactggtttcgcgaagtggccttgttttggaaatgtgcttgacactcacatgtacaaactgagcatcacctgcagcagtcgccctctctgatcggttctaagcaattaagttctgatcctctgcaggagcctgagatgtctcttcaataaccaaaaaagcttctggaactcagagccaagcctaaacattgagaacagccccaacatgcttcatatgatccacacagttatgtagctgagttgggtctgggacttgaacaagagtcaacatgcagatgttgggcgatacagaagagaaacatccagggaaatccaatattatttcgttctgactggatttacagtgagcagttcattggattccatcaccattttgttggttgtggttgaaaaaaaaaaacaaatgtggatttgaacaaacctcttttctaagagtcttccatatggatatgtaaagatcttgtatagctatactgttgaatagagacaattctcatatattttcgcaact

SEQ ID NO: 2137 - DNA, 2688 bp, Arabidopsis thaliana landsberg
  unsure (1)..(2688): unsure at all n locations
cgatggactcatttgcgtgatctgtaaccttgtgtcattcattagaccacctataggatcaatatttctaggtttcatttcaagacaaccaatctttagacgaagcctatggttaggcaaccctgaaactttaaaactattcaaaaagtcaggagtcaatgccggattatttctaccgccaatgtcaactgggtctacactgtctgaacataagaatgtaaactcctctcctgaaaattaaaattttagttagttacagtaaagaaggaaaagaaaatagaaacactattcataaaagtaaataaagttacaaatcaatgcttctgaattagtaaataaccttggaggttatcaagcatggtctcaattatttggttgacatcttcgttggtgggacataatattgctctttcttgaaaaaaactggatcattttgttcatgtatctttgtaatatctccatatatctttgtgcatatggcttctattggatcttttgctttcgtaatcagaaattcagaaggaatatcgatcaaagcctccccatcatttggctctgaaactctaccatcacctactgctaaaatccactttgaaaactctttaatatctttcgcttcactatcactcaaaccttcagaataaagacgcatattctttgtcagagtcaatactttgcaatgactccaaaggtaagatcaattaagggcatacataactatgtctaccctatcagcaccggggattactggtagaacttgtcggaaatcacctccaaagacaacaaccttttcaccaaaaagtttattatcaccattcccacaaatatctgacaaactcctatccaatgacacaaaacagtgtctgctcatcattggagcttcatcccatataatcagagaagcttctttgactaaattagtcctatctgaaccagctttcaattacatgtagtaaactcaataggattaagaggaattccaaatatagagtgagctgtcctaccaccttctaaaaggagagaagcaataccactggaagtagtgagtgttttccaaagaaatgttttacctgttcctccaaagccataaacaaaaaaatactcccccaacattttcattcactgcaccaataatatcgtggtaaatagacttctgctctagagtaagcatcttaatccatttggcatgtttttctgtcaaattatcatgatcataccctctctcatctaaaatcaagacattagtatcaaacctcagatctctaggtactagtggcatagtcttataatatgtaagtgaactaccattccttcttaaaatgtgatctatctcttgtagagcatataattgtttctcctcatccgacaaaattaaatctgtaaacaacatataactaaatgagttacaactaagcaaagcaagtttatgtgaatattgcattgtaaaacaaaatgaattaaaattgaggttttaaaatgatattagatgttacctggtctattgaaatattgcctcttattgttttttatatcttcagagagacgtggtcacgttacagcccacacattttcaggaattatcatagcatctaacattattaccaataactgacgtaaataccatccactgctccaaaaacttgttctctttaaatcatcaatgtattcctgatcattatctaataagcctaatgtttcacaagcatctttccactcttcatataccacaccattaactgtcctgagctcttcaaaacatcttgaacctggttgaacatcgaggagtattctcaaataatattcatcttctatatcacgaggaacatagtttattctccctatagcaaaaccttttttctcatattaaatttcttttcttttgaatcataggtaaatttagttgggatgtctgcataagtcagcttcctagcaatcttactaactttatttaattcgaaccaagcaaggaacataaagcatctagatcacttcgattaacactgtttctacttcttcatcgcctttgaaataaataaattgttcccctagcaaatggaacgaaagcttcatcacagccatagatctataatgtataggatattttaatactctccaggatgcttcgcaagtagaaacatatttgaaattcaaaattatacaatcataaggaacacaaatatatgtattttatagtaataatactattaactttttaattaaacatacctgcaattgaaatagtcttcgacttcattcttcttctttgtctctaatccatctcgatcagcattgtccctctgtttaccctttcctttacttttcgaatttaaagacgattcaacaacaacagtaacacaatcgggtcctttatgaatatacttgaatatgtatttcacagaacctaattggttacaccattccacgttgatgtgagctatgtatctcagtgatagggatctattataaggaatgacatatcagttatcacatttaaagtctttcttctcaacaaagttatctgttcttctccttatgtattatgcaaatccttctttatcaataatggttttttgaacatgatcttttgtataaaagtttgaacactttccgttttccatacatggacatttcggggtaaccacaccacanggaccatgaaccatagattctttatcacttcaaatagct

SEQ ID NO: 2138 - DNA, 1586 bp, Arabidopsis thaliana landsberg
  unsure (1)..(1586): unsure at all n locations
atgctacctttttgtttacaggaaaccttagcggggaatctgtaaacggcgcggccgatgatctttaggccaaccagcttagattttacagctcttgcaaatactgataatgtttattatatatgatttcctatgaaaatagataaggatccgccctatatacgagtttttggtaacgttttattcgtatatatataatgtaaagattcaacctttttttataatggaatcgattgttgaaccaatgatattattagtctagtccaagactaacacaactcgtgttctcggaacgggttgaaaagccttaggccacgaacacgaggaacagattctcgcggttggtcgactatgtgaacggtcgtgttccgggcacttggttgactagctacgggggtctaacgtgacgcttccggatttgtccttagttttaggacggttcgggggtattacagtcgtggtcgtagggaattggaatgacgaaggacctcctgagcatgagtggaatgagattttttttatcgaaaacgttcagtacgttgttgtttattatatctctaccttttctttattgttttagctaggtgcttcgttatttaaacaagctgttaaagttgtaatatttctttcaggggtgataaactgacatgccgtcttccaaaagcatatgcgaacgacttctttgacaattggcgccattgtggtgacaagatcataatatgtgtcatgaggtttgcgaagttggaagtggatcaaggtattcttatatatatccaattattattttgtattttttctaaatatttgtgtatgtatcccaaaactattatgtcctattttatagaggattagcgagccacgacggtgcacgattgtacgagagttttattgaaccctccatgtgctgaagttagtcggatcgagtccatttttgccgaggctaaagatgagtttccgtggtgataacacgtgttttcccttaggaattaggtttactataacataatgcttggttttgttatatttgcgtttacatctatgaaatctctatcctatgttacgttagcattcatgatctcttactttttattgataacaatgctgcttacaattatatccttttcatcgtgaaactttttaacaaactatgaacaattagacctattgaatacaatcgatagaattgccccatgcagatttaatattctgttagatatatattttaatgaactttttaaatacatttataaatattaatacgtttaacagaaaataaaactttcaagatttagaaattttataaattcctttcgatagcttcttctccccaatcaaaatgcggaaaatctaatgtaataagttaaaattccatgtcgatttgccatatgataatattaaatctctcatacgaatgtggtacagttaattacgttcttatcttccatatatttccaaatatttggaaattttcatttttacctttttacgagagttatttatattttcctgaattatattagtacataagaatgttaatcgntcatataattctccttttatcatttcatttttttaatatattaaca

SEQ ID NO: 2139 - DNA, 2509 bp, Arabidopsis thaliana landsberg
acttcccggacggtcaatacttccgctgtatgcagccgactctttcttaagaagtggaaacgtttcttacttattctcgagggtcacgcgggcgttttcctttccatcgagcccacgcgcctccaatgcgttttgtcatttattgcggatccgacgcgcctttaagagttttatatatagacccctttaagaaattcttatttgaagctttagaagaagaaaaaaattaaggtttgcctccttttctctgattttgatattcttactgttttctctttttcccgtgaagctcgccatttctctgttattttgaatttcccggttagtcatattgttgtttcttcgtcattacttatctcgtcagtcgtctccgagccaagaatggattctaagtctccttcgaccccgagcgcttctctctctaactctagtgatttacaccatccggacgatcttcctcctatcttcaaacggaagatggtctggacgtcttcggatgataatgtcgtgtcgtcttcgaacgcctccgagcagacgacacctttcacggctcggaaagacaccactgctgacattgctcgggaattggacttgccagatgatcccgagccgcctcttgtccgaagaacccttgctccgggggctgacaaacctaggacgtctaactggctgggcgcatccgagccgttgatgccgtagataaagattgaggattttctttacttcggcgagaatgtgacggagaacatcatgcgaattaccgagcagagggcttttgagaaagccgagaagaaaaagaagaagcaaggcaagagggcgataatgccggatcctcctggctcaactctgggtaccgagtagtcgctttcggatctaagagcccggtttaatcttggcgaggtcactctgcgcgtaccgaggtccgatgagcgtgctgataatccccccgagggcttctacactctgtatgaggtatttttctacggttgtttcttgtggcttccgatcccgaggctggttttggagtacgtgacgtcgtaccagttcgccctctcccagatcacgatgcggtccttgagacatctgctcgggatttttattcggagttatgaatctgagactgacattccgctcgctcatctgaaaaatcttcttgagatccggcgggttcccaaatccgaagtggattggtattacatctctcctgtaggaaggttattgatgggttcccgagcaaggtcgagccgtataccgatcacttcttctttgtggtcctcgaagatgttgttcatgacgacctcctcgggacggttctgacgagatggggaactttgggtagttgtagctaacaatttatttgtgcccgacgcggttttatagtttctttttccaactgtagttttccacacgatttccttttgacttttcacgcgttatccgctcggaattacgattggttgaagcatttctctcgggattgagtcgaacgagcgctccgtcttcttcacggcgtttcttgtccttctagtttggaatctttggaacatcgtacccagttcttcgttgatatgcagtcaaccaagcttactctgacggaggtgtatgcgaagaagaaagaagataaagagagacgcttggaagaggagaaacgccttgtagaggcagggctgatttcaatgcgggcggcctctcccgatgcgactcaagaccgggaaattgttcccaatgttacggccccggttgatccgacgcctgccgaggctcaagaggtcgacccgactgctgctacccctttgctcggggcagttgtcgcattgccggcgagcgacaaggcggtgggtaagcgcactcggacggacgattctgcgtccaagaagaagaataagaagaagaaggcctcgggtgctgaggcggaaaaagagctccttgggggatgcgccggtcctttgtttcctcctacggatactcttctagagtcgcggaagtacgctgaaacggcatctcatttcctgcgggtaggcgcatatataactttttcatttttcgtccttatgtctggagttccgatcctgtaactttctttaaatttgttctccaggctgtcgccttgatgaaccggatggtgcattcgtacaattcggccatgaggactaacatggaggcattcaataggttggccgaagaagatgctcgagttcaagctgtcgagcgggaaagagatgaggcgctctcccaagccgccgcagcgaagatggcgaaggaggagggcgagagggaggccttcgtgaaccaggcgaatgccatcaaaatggccgagctcaatctgagggcgcactccgaggttgttcatctcaaacacatgttggccgaggcgaggggactccgtgatagcgaggtggctcaggtttctcaaacggctaggcacaaaacttcagaggtttttatcgccaaactcaaagccgccgagcagaaggtgtcgctccttcacgggatcaacaaccagttgatg

SEQ ID NO: 2140 - DNA, 602 bp, Arabidopsis thaliana landsberg
gacatcaaattatgtgagttaaaccatactttatacgggaaaatgttcattttattctccaactatttgtaattaacacaattattccttaacttgtcgttgacttaacaaatttggtcgaagtttactagttaatagaaaaatattaaattactcgattaaaacctaataaactcagaaaatcctaaaatttctcccaaattgaaagtcattccttcgaattagaagctttttcttcatctatttatcgtactctcgtcaaaatatgcaaattcaattttaatttctacatgtttatcaatcgatcttcagaaaaaattaagtagagttcttagattgagagaaattttgaggattttatgagtttattaggttttaatcgagttatttagcatttctctattaactagtacaaattgaccaaattggacctaatttgttaaaataagcattttctctactttatacctcatatacttgaacaatgtggttggttcataaatgttttttgtttcagacttgataaaggattacatagagaatagaaagctgtatattttggtctcattggatcagatacaggagttagcttcaaagaacac

SEQ ID NO: 2141 - DNA, 450 bp, Arabidopsis thaliana landsberg
agtttaagagatcttatatcgactccagaagatatgccgtttggtggtaaagttattcttttttttggtgattttaggcaaattcttcctgtcaccgttgcagccggtagggaactgaatgtcaattcgtcactcaattcgtcttatctttggcagcattgcaaagttttgaagttgacgaagaacatgagacatgaattttccaaatggatccttgcagtcggcgtgggaaaactaaatgagctaacgatggagtaactcggatacaaatatcagatgatattcttattcctgaaggagacaaccctatagaatcgatcattagagcagtctatggtacaacctttcctcaagagaaatctcctacgttttcccaaggtagagctattttgtgtcccatcaatgaagatgttaactcaattaacgatcatatgctttccaaactaacag

SEQ ID NO: 2142 - DNA, 1757 bp, Arabidopsis thaliana landsberg
  unsure (1)..(1757): unsure at all n locations
aacctctcgttcatccactctcgattaaaaacaccactactggtataattatagtttcccaccattataagaccaataacaaaaactaatatatttttcttatgtttttttttttaaaaacgttttttctctaagatatattgtttgtgttgtgaatgaattttgtgaacgtgaaattttcattatatagacaatttttaagtgactaaaacgcgactacattatgtagtcgtctaaaatcggtacaccaacttacaaaatgctaaacatgtgctttttaattgaaacttacgtctattttgcgactatggttaataacacaccggaatagtcgtaaaatagtcgcttgttcgcgactactacggcgggtcgttcatgtagtcgctgtttagcgactaatatacggctaactttggcgacaagcagaattagtcatatattagtcgctaattagtcatatattagtcgctaattagcgactattacggcgtctcgtctgtgtagtggtaatttagcgactaatgaacaactctaaacctattagttatactatagtcataaaattatagctgaatagtcactaaatatagcgactattactgtagtcgccggttgtagtcggtagttgactgttttcttgtagcgcggattactactgcaactagtgatgttaatatgggctaacccaccctatttatacacatcccatttattttaaaccatttaatcccatttaagtttatagcccatttaaccttgctcatatgaatctgaaaaatccatttgggcccatataaacccattgacaaaaaacctgataaccaaaatctaagccacaaagaaaaagaagacttcacttaaacgacttttcatacaagaagcttctgtagcagaatatgtgtcactttcacacttgtcttcaaagcaaaacctgcaccaatagccacaaagctcatacctcaattccagcagaaaagaaaagaaaagaaaacattgcagaattgtccatcttgcagcattgcagaattgtccatcttgcagcattgcagaattgctcatacctcaagatgggttcgctttagacaaaatgataatgtttccatgaatcgtcattctcttgctcttgaactctcatagctggtgtagtcattatcttcaacagtacctacaattcaacatgtaaactgattataacaattagtttaacaatacctaagaacggatctagctagcatacactaagacttaataaatatgtaatcgtgatagtagctagacagagtccaatgcttaatctcatagacattcacatgtaacatgcacacaaattattaccttcatcttctgcaaaaccacgtaaccaattacgtgtgcatagcnnnnnnnnnnnnnnnnnnnnnnnnaagcgattcctatatggtgtcaatactctagagccaatactaaaagctgactcggatgataccatggtaattagaatgctgagaatatcaagtgccatttaagctaaatccccaagccgatgttggttgtctttccaatacttcaaaacatctaaatttgaaaaagttttccactctagtcttggctcagccaaatagatatccaagtgagtctttgtgtcattgacaccagattcaatacttctttnnnnnnnnnnnnnnnnnngcattacaaagatcaacactcagtctttgtgttgttcaagcaatccaaccaaaatcacataaaatatttctaactttgtatatgacaat

SEQ ID NO: 2143 - DNA, 517 bp, Arabidopsis thaliana landsberg
ccgtttgtgtataatcttcttttcgatgattgcactactctcatttcttaacacctccattccttgaccttctttgatcctctctgtaatcatatcctttatgtatttgtgggaatcttgtattagcgcataataatccactagaggcattgtggcttcaagatctttcatttgttaatctaagagaggctcttacttctttatcagttgcttattgaatcttccttgaaattgtagtgaaggcttgtagggtggaggaacaaagactttatccttggttttagcagcgacatactttttaatataaggaggtattgcctgagtaggggatcgggtactacgatctagtgatataagtcaacttacccttaaaccacactctcaaataagagatcgtcgatagtactcaagagtcgaattccacaaaattcttttgttcacacaataagctaagtatcaagattaaggctagagagtattagaaaaataaaaagaaagttaagtaagaaaatagtaa

SEQ ID NO: 2144 - DNA, 557 bp, Arabidopsis thaliana landsberg
taaaacgctttactattgtcaactgtttatggttttataagaattgtcatgatttttatgtgattttaaaggcataaacagcttacatggtttgttaaaagcttttaaatggagtttacttgattaacaatcgtttaagaagaagaagttaatgtcagaaaatgatttataagggattttaaaagcttgtaaaagtgtttaacttgattcacaattgttaaaagtatatgtaagtggcataacgaaatatttacaaggtattttaaaaggattttcaaagacgttttaaacaggcttttacaaaatatgttaaaaaggtaaattattggaattactattaaaattacttgtaaagtttgatagtaattttagtaaacgacttacaagacattttaaaagattcaagttaaaagcttgtaaaagtgtttaacttgatttacaatcgtttaaagtatatgtaagtggcataacgaaagatttacaaggtattttaaaaggatttaaacagacgttttaaacaggattttacaagagattctaaagggtaaaatattgga

SEQ ID NO: 2145 - DNA, 830 bp, Arabidopsis thaliana landsberg
tctctttcccgcaagcgtttgtggttgcgggcggtacggttaggttaaaaaaattgaaaataattctctttttaattaattaaaatagttatggcttccgctcaaaccctaatcagtaatctaatcctttatatatcttattcttattagaaaaccctaatcaatatattgtaatcatattctctcaattatggcatccacctaaactaatgaaaatcaaaatcaagaatcaaacgtaattatcatctatccttttatccagtcattagctagtgtaattctttgaatatttcattgcatcattgtttttttatattttgtattcttttgagtttttgattgaatacatgttttgatttgttttctcgattaaaaaataatccggaaaacccgctagttcaacgttatttacagtttatcacactatttgatgcaatttttggtgatgtaccaaatacataaagtattaagctttttcttacaaaatttatttatttttgaatttagtgtcttatttatggttttaattattaagcatgttcaatttttctaatattatcaatttatcataataatacattgtattttgatttcttttaatagtaatatattatatttattttggttattttttatttaattaatatttcacccgctggtttaccacttataaaactcccgtaaacgtacctattatcaaacactcaaccagtcgttcaaaacgcttgataacgcttaaaaccgcaaccgcccgttttcacaaactcccgcaaccgcaactgcatccactgcgtttaaaccaatcaggaccttagaagtcatgttttggg

SEQ ID NO: 2146 - DNA, 657 bp, Arabidopsis thaliana landsberg
gtaagattttttaattattcggcaggtgcaatgtggagattcaactattgaataaataattcaacacgggcattgtggatagtcttagactatgaacaatggtcttttcattaaacaccctccacattatcttctttctcttccacatcctttcctttttctttcacataataattcaatacccactcaaattttatactctacaatggtattttataagagaatttatctctaataattcaaagaaaaataaaatatcagaaatttcagtaacaaataaaagcataacacatgtcctatctacatttaattcgcctccacaatttctatctctaactatttaataacaagtggcaatgaggggtccatttttaacaataaaacattattgaatccgttcaacaccatttaatcgacgtaagagttatttctttatacaatatctcattgtaagcattcagttattgaattaattttctcaatatatcattgtagatagtcttataagtatgcagacttggcagattgagggagatttttataaggctgatgtggatagcttgagaggcctcaatgagcttcttttattagtatgagattctatctatgtaaaaattgagcttcatatccaataatttgccatctaattttgaccat

SEQ ID NO: 2147 - DNA, 2399 bp, Arabidopsis thaliana landsberg
atcatttagtatattaatagcaggtacaaatgaaatttgtttgctttccttaatttgcgtgaaaataatagaatgacattctttgtgaaacatataaatattgaaagttttgtaaaatttgattttcatagccatttccaacttggtggaaaaagtacattactttctaaatttatgtgaaaaatggtaaaatgacactctttgtaaaaacatatagaatttcgaaagttttgttacgtttgattttcatagccatttttcaacttggtgaaaaagacaagacacgagtaagccaactttctcgatcaagccgatttgttttttacaaatgtcattctttttctataaaagcattcaagattattaaagtaatattcattgggctacttccagaatatgctcatataaaatccatcagaatccagtccaattacaccaatctgatcaaaaatccgatcaaaaccgagggacatagagaccagaaaacccgattgaacccgtctttcaaagaagcatcgattgaaactttattatataccagaaacgatccgttaagaatatagaaacctaaccataccatcaatgcgatgttttgtttagtgtaaaaccgaataattgtgtatccatatgaattatatatatatatatatatatatatatatatatatataaaattataacaaatttatgatcgactgtatataaaaatacaatatttaaatggcaatgcaaacggcaaggaattatattatttgcgtagagattgtgtgtctttgcgataacatgtttaatagatctttaagtctatgacaactcgtcatattgatcatagaagaataaataattacaactggctaggggtaacatgtataacactctatcttttgtcaactcactcactatatacatatatactcttctctcctcctaacgcagaggcacaagggcaataagaaaagagagagatagataaatgacgatgatggctctgctcttgaactcgacgatgactgtggctatgaagcagaatcccgcgaccgcggtatcttttatgcagactacttgtttgggatctagtttttctcctcctcgtcatcttcaagtttcgtgtgttgccactaacccgaggcgagtttttttctttttagatcttcaattcttcgcgttgatctcaatgtattgttaataactttttcactcattgggttttatatacttgcatattaacatatgttctataaattacaataagacacgaacctgatcaaaataacagtgttcttaattaacgatgaaaatgttacagcaagacgtttcgacccatcaaagaagtatcaaaccaagtgacacacacaataacacaagagaaactggagatcttcaaatcaatggagaattgggcccaagaaaacttattgggtgacctcaaacccgtcgaaacttcatggcaaccacaagactttttgccagaaaccaaagacgaagaccgattctacgaacaagtgaaagagctaagagatcgaacaaaagagatccctgacgattactttgtagttcttgtcggagatatgatcaccgaagaagcattaccgacttatcaaacggttatgaacactctcgacggagccaaagacgagaccggtgttagtctaacaccgtgggcggtttggcttagagcatggacggcggaggaaaatcgacacggtgatttgttgaataagtacctttacttatcaggtcgtgttgatacgcgacatgttgaaaagactattcaatatcttatcggatccggcatggtacgttctttttggtattggccaaattgttacactcccataaatataagtgtgcttaaaatgtaaattataatttctttgggaccatattgataatgtttataattatttttcaggacaccaaatatgagaacaatccctataatggctacatctacacttcttttcaagagagagcaacttttatctcccacgccaacacggcgaagctagccacgacatacggcgacacaactctcgccaaaatctgcggaacaatcgcggcggatgagaagcggcacgagatggcgtatacgcggatcgtcgagaagctattcgagattgatcccgatggtaccgtacaagctctagcgagtatgatgaggaagcgaatcacgatgccggctcagctgatgcacgacggtcgcgatgacaatctgttcgatcattacgctgctgtggcgcagagaatcggagtgtataccgcgacggattacgcagggattttggagtttttgttgcggcggtgggaggtggagaagttagggatgggtttgtccggtgaaggaaggagagcacaggattatctgtgtaccttgccgcagaggatcaggaggttagagg

SEQ ID NO: 2148 - DNA, 493 bp, Arabidopsis thaliana landsberg
ggctcattttcattcacgactgcgtctagcagtgagcgatgctcccgacatagatcgagtgatcgatttttaggggcaccttgttcacggataggagcgcccattatcgcatctaagacgtggggagactccgtttcccggagtacgacggaacgagcgacccaatggctcatctcagatccttatgttttgctataacacgagcattcctgacggacgaagaaaacgaaccaagtcattgccatttcttcgcagaaaacctcgggatcacgccctcgaatggtttgctaggctcaaaggaaacctaacttcagaacgaatccatgcgatcttacatcgaataagtgagaacaatcaaatcaaagttggcgaacctaaacgacgaggtagccatagccgcccttcgcaacggcttgaggttgtcctctagattctgagaggaactcactagtaggcaacctgtctgtttagacgatgcccttcacaaagcttt

SEQ ID NO: 2149 - DNA, 3322 bp, Arabidopsis thaliana landsberg
tgctttttcctgtgaaatatgtgattttctaggccacattgaatgcatcctacgcaaggtaattaacatttcattactggtttcatttttgtaacgatgccggtcgtgaagacgatgacaatctactctttattatataatccacaggaagcgccttccccattatacttgaaagatctttacgcttgcagaaaagacaacacaaattcaacaaatcaagatgaccatgatatcgataagatagaaaccaaacttatggtatgaattttcattacaatcattacactacactcttttcatttattggttgtaacttcccttcccttgactattcaggttaataatatgaacgggcatattcatatcatgagactcattgatttcagtgaacttgatgataatgcaaattgcgacatatgcacaacaaaaatacttggtagcccatgtaaatgtgagacatgcagcttccaggcacataatttttgcgcagagctggggcgacgaccattacagcatcgagttcacaaccatcctttgacactcttgccaaaggcccctgcaggtgcaggggttactatgatttgtgacatttgcacaaatgatataaaagggttcaatctcttttgtcggctatgcaattttgtcatccataccaattgcatatttagaggtaaacatttatttacagagtctcaaaggggacaaaaaatcattggaagctgggaaaggagtagttgcattcaagaaaagcatgagttggatcaaattatggtctccaagtcgtattccatggcttgcgccatttgtgaagataaggtgtgtggaaaagacaagaccatacacatgtcatcgcttgatctttcaacatttgtgcagcggctgatcagacaaagctcacttgtttcatgtatggtgtgtgaagatgtataccatcctctgtgtttggaagttgaaaggcaaacaacattctaccatctaattcatcctgatcacgaccttggagtttcatttgtaagaggatccaagtgcagagcatgcaagctggaaattaaaaagtatggctatcattgttcgacctgcgaaattagtttccatattaaatgcagcaaagcggtaagtttgatcaagcctcacatccactatttctatcacttttggattgctgtctcgacgatcactcgaacttgcggtgtgtgcgctaaaccgtgcggtgtgtcgttctatggatgtattgtttgtgacttcaacgcccatgcagagtgtattgggtttccaacaaatgtgaagaaccaaaaacatcagcacactctcgtggaagataataatcgtgtttttcctagttgctgctctctctgtggagaaagtattgggtataggaaaaaattcggaagcagatgctccaatgtgttttattcatgcgaacactgtggtgacgattttcacctcaaatgcataatgtctacggtaaaaaatccaatcagtcatctagcagaactttaaccattgactttatccgttttgttttcgattttcataaactttaaatgttttttttccgtgtcatacaaggatgaccgtgaagctgcaacagaggaagatcaatatggagacatatatcttatgtacattgagcgtcatctcttggagctgttaaaaagtgagtcttagtttcgtaccgcaacttctgttgttctgaagttacgtcaacttcttctcattttattcttatctttgtttcaacagatgatcaacgaagacagtatacatcttagttttgtctttacacctcactgtatgaactaaggaagcctacttcccttatctgaggttttgtctctttgcttgatttgtgttactttttcagagtgccaagtttgatgctggtgtgcttgtaccactctgtttttctctaagttgtttttaccgtgtactacttttcaaaatcgtacatttaactatcttttgtgtcattgggttaactcaatattggattaaatgatattcttgaagaaacatgaatttacaagaaaaacagtgactaacccaatacaaaattagttgaacttttcttccgagtctggttcctctatgatactgattctcgaatgtagtctagagccttgtggaatccccaatggcggattttcacaagtacaattgtcaacagcaaagagttcccattccttaatcccacatttctccaatgcagactgcaatctctccttttccttctctgccgggtaagaaccatccggtgtcacaagcacagccccggtgtaagactgtcctgctacacgggccgctccattgtaatggaacagtccccaacttagatcatcagatacatccacaatagtccaaaactcatttgacaccacaccattgtccaaaacactgaaacgaaatgttgcaggtatctttcctcgcttaactgagtatctcctccttctccacactagcttcccttcaagtgttctgacctgaaacacgggttcataccaaaacgacgacttccctttccctctgtaaaaaagctggtactgacatggaaactgatcataagccgggttttgtccagccacgacgcgccagctccattccgattcccctaaccacccaacaaacaagtcttccgctgtatcatgacacaactccttccctcgaaaactcgtcatgggaggcacataaggcttctcagggatctttgcatccaattctaaacaattgtgcttctgtagtacacaaagagagaatgcttcaaagtaaggactctcataagaagcaatgcatctgtagctacacacctgatccacaggactacactggttcaaacactgaagagcttttcgacaattcggatccaaaagacagttcaaaatctgaggtccacagtttttaaccatacaactaagcgtagagaaacctttggacctcaagttttgcaaaacaggaactggtcttatataagcgttgatgatcacgagcaaacaaaaccttatgtcatcagagttacgacgttcccaagcatctcccactgtcttcacaacctctgttacttctttatctttattcacacttccaacatcagttcctccaagcctgttcatcaaatttggagaagactcaaagcaaatcatgttcttgacgttttgactgttcgtctgaatccaattcacagattctgagttattaacagcaacaacaaccaagatatcagtctgattcagttcctgtttcaaagtcaaagctctctgatcatttgaactcaaaatttcatcatcaaagacgagcatttcatatccttcatcaacccatttcaatc

SEQ ID NO: 2150 - DNA, 503 bp, Arabidopsis thaliana landsberg
gaattgtttgagaacctagctcagtcaaatggaaattacaacgaggactgcgacaggatcataagatgattagatgactcggatgacaaacacaagaaaaaaatcaaagcgcggaatgacaagctggacatgattcttcttagccagcagaagcatgtgcacttccttgttgctgacgagcagtatcaagtccaagatggggtgggaaaccagttagaagaagttagctacatcaataatcaatatgattacaggagatttattaaggacttctccaagatagccaggccgttaaccagactattgtgcaaggagacggagttcgaattcgataaggactgcctcaaatcatttcacgccatcaaggaggctttggtatctgctcctgttgttcgagctcctaattcggactatccgtttgagattatgtatgatgcatcagattacgccgtaggagctgtgctaggccagagaatagacaagaatcttcacgttatatatta

SEQ ID NO: 2151 - DNA, 437 bp, Arabidopsis thaliana landsberg
atgatggtgatttctcacgaatgaagaagaagaagaagaagaagagcgtgatatatttttcgttttttggtttatttccttttttttctcttagagcagagtatttttgcttcattaaatgatgatttgatatatactcttattaatctaaccgctgaggattttcagttttatagaggcaatctaaattagatccgatttccatttactaatctcaatctaaccaataaggaaatttcgttttttttttttttgatataacgtttacaagaatcaacttctttttgcttacaaaatttatatatcaaaagataagagagaatgatgaagaatatcaactccattcctaattttattcaaagtggtttgtttgtatacaaaacagagtctgttcctaacatatgttgggtggtttgttgctacaggcaatcttcgtt

SEQ ID NO: 2152 - DNA, 896 bp, Arabidopsis thaliana landsberg
cagttcaaaatctgaggtccacagtttctaaccatacaagtaagcgtcgaaaaacctttggacctcaagttttgcaatacaggaactggtcgtatataagcgctgatgatcacaagcaaacagaaccgtatatcatcagagttacgacgttcccaagcatctcctacagtcttcacaaactaaaagaaaacagctgtttaccgatcgactaccatcttagtcaccttcatagtagccgacgttagtcggtaatcagctgttttcttgtagatatatatatatatatatattatctgcaacctatgttacttctttatatttattcacacttccaatatcagtccctccaagcctgctcaaccaatttggagaagactcaaagcaaatcatgttcctgacgtttttgctgttagcttcacactatgtctatggttttccgaaaacaaaagcttgattatgcggaaaacaaaatgccaaatattttctcttaaaataaaatataataaagaaacaatatcaaaacaataatattccacaccaacaatcggagaaactcactactaaataggtagtgtacacttgaagagaaatcaaacttggcaatcagagtaatgaaaaccacagattcaagatccaacaaataaacacatgttgaaaagttaatccacaaaatggatcataaacataggtagaagatagagaattctgaaacataactttagttcactgaatttgcatttaagagagggaggcataacaaattaagactcatcagagtcaagtcttccaacacgccaccttttattgtaaacacgataagaaaacgacaagagattgaggaataacctcagaatcagataaggtaatattcagttttcagtttcggagagggaggc

SEQ ID NO: 2153 - DNA, 454 bp, Arabidopsis thaliana landsberg
aacccgtggaagaggttttgaaaacaaaggaactcccaacttaagttctacaactatatgcaccaggctttcatcgctgggtctaatcaaacaatctaacattcaagatccttctagactcattcatgtactataccatgataaatcgaccattcttttattattattttttttttctttggtgttctttctctctctgagacttattctttttagagagtaaacaaaagggaactcgcatactggatcgacaccctcggcatttttctaacctttgtaattgatcattccaaataatgtataataatggggtcataggaaacattcctacctctatacagtatctgaaaatcctatcaatctatcatttctttttctttttataaggggagaggaacactttttctttatacatgggtctcatatcaggtataacaaggagtcaagatctatg

SEQ ID NO: 2154 - DNA, 537 bp, Arabidopsis thaliana landsberg
gtttgcccagtggttacccaaccaacggctgcgtatgtcgcatgttattcctgcagtgaagaagggcattgttccaatgtttgtccgagtaagaagacaggccaagtgaatccaaagggccattgttattggtgtggaagccaagcccactactctcacgcgtgtccaagtaaacccacaggacccgacactcagcacaactcacgacccccgccaccatcaggagaaagaggacccccgacgaaacgtcaagcgacggttgctaacgtgtatgtgttagatttagaatcgacagaatagttgagaccgaagcaccttgccctataggagtggttgtgttagaatagcaccattcgcttaagagggatggttgcattatcaagacactactcgctagtattcgagagagttttagagagaactttatgaacatgtgtgttgaaaacgaaccgcatgtttcatagtgttgattggaagatcgtagtgtgtggagcttggagagtatccaagttaactccataagcatgctacggttaa

SEQ ID NO: 2155 - DNA, 582 bp, Arabidopsis thaliana landsberg
tatattactacaacaatcagtcatatcatcaatcctatagtaagattcattattactaagcaaacagatgtattcttatgcaatgaatcatgaagcataaaaatagaaacttgtaatcgaatctccgtagatcacactctcaccttggccactcgctgatgtagaacacagcgtttcagctgcctcaaagacgccctaataactcttcaatgaaccgttaaagtagtattatgaagctctccaccaaaattcgtcttgatcggcatagtttcagacctccaaacgttgcctcgaagaagccaatacgaaatagatttctaggtttgcaggttcaccagattctatagtcacttgtctaggaagaaacgcgcatatcttcttgaatataacctcgattcaaactccgtctgatgttgtggattcatggaactgtgaccttttcaaagacgtctgattggacatctgaacttttttcgtacgacaggaatcagcctcttaaaaccccaacttgagactgaaatctgatacttagctatttctgggttcagaaactatgactattgtgcaactttaaacacgaat

SEQ ID NO: 2156 - DNA, 567 bp, Arabidopsis thaliana landsberg
actctgtttttctttatataacagtcaaaccctccactgcagttagagtctttgtcttcttttcttcattttccggcttaatcagaaaccccttaacgagagataaccgactgcttcaatcttcaattgacttaaccaaaaccaacttcagagtttgaatcagacataaaccaacaacaaaaaccacctggaaaaagcagaaaggtcactcttatgagaaaatgaatcaaagtctattacattggttgagatacaaccaactttacatctccgtgcgagtatatatacagataggcagtcatgctagtcaatataattattgtcattcacctggcacattgtgacatcggttacattgatgtaataatcgaatgaaaaaatatatacaaatgatataagtaagagttgtttaccttccatatctctttgtgactaagatgatctggtcttggataaaagattgctgcataatcaactccagaccgagaataaagccaaaaattaacacctagagccagaccatcagtaacttacaatgagaaggagcgagttataatacagaaatgt

SEQ ID NO: 2157 - DNA, 9325 bp, Arabidopsis thaliana landsberg
gtaacgtcctgccaaacccgtcccgccaacccgtcccgtaaaaaaacccatttattttattaatgttgatcttatttatgatatgtttatgaattattgtctaaatattttgtaattttgtagtaattaaatgctatcaaatatctctgcggtttgatgattataatcgaattgttatagtcatggagaaaatcaatatcaaaaataataattttgtagtaattaaatgatattaaatattttggaagttttattttagtaactaatcgtgtagttaatgtgaagagatttagggaaaattgttaaatgttaaatatttaatttgaattttatttatctaattatcaaaaacaaacattaaaatccagtgacagccgttccaactacatgatttatttcacaaaatagctgcaaaaatgttatatgtggatacaacatttaatgacaaagataatcaacggaaacggtcaacacataacaacttgcacgatacacagatttgatcaactatataattcttttaattttaacatatccaaaagattcaaaaagaaaaactcgatccaaactagcaacatcacgctcacgcctaggctaaaaatctattaatcttcaaaagtctttcttatgaacactgcaaacaacaacttgaaaagtcataaagttttagataatgacgcgttattggctatcgcttaccggagtggctcataaatacaaaagaaattacaataaacaatacgtaaataagtcaaagtcaaatatatttagtcaactataaccattaatcgggcaaaaccttttagctgtcaaaacaacgtgaaaacgatatttgtatatatccgggagattatcatcaagaatcagtagataagagaatgatttaatcccctgactattacaattttggtgtaataaacaatctctattggtttttattctttgttttaatttctcatgacctatagagagaattaggtagtttcgaaaattggctaatcaacttttgaaaactactgtctactttgctaaaattctctacacttagtttcggataagataaatgtcggactaatagttaatcccttgacaatctttgattttataaaaggtttagttaatctcttctctatataaatattcatacaccagctttcaaaaatatataatccaaacaccaaaaacaaaatggagaaattgctcgtgatctctttgctactactgatctcaacatcagttacaacttcacaatccgtgaccgatccaatagctttcctccgatgtctcgatagacaaccaacggacccaacaagtcctaactccgccgttgcttacatcccaacaaactcttctttcaccactgtcctccgcagccgtatacctaacctccgtttcgacaaacccactactccaaaacccatctccgtggtggctgccgccacgtggacacacatacaagctgctgtaggatgcgcacgtgagctctctctccaagtcaggatcagaagtggtggccacgacttcgaaggactctcttacacttccaccgtccctttctttgttctcgacatgttcggttttaaaaccgtggacgtaaatctcaccgagagaacggcttgggttgattctggtgctaccctcggagagctttactatagaatctctgagaagagcaatgttcttggatttccggcgggtttgtctaccacattgggcgttggtggacactttagcggcggaggatacggtaatctgatgagaaagtatggtttgtcggtggataacgttgtcggctccgggatcgttgattcgaacggaaatatcttcaccgatcgggtttcgatgggggaagaccgtttttgggcgattcgtggaggtggtgcagcgagctacggtgttgtcctcggctacaagatccagctagtaccggtgcctgagaaagttacggtttttaaagtcggaaaaactgtcggagaaggagccgttgatcttataatgaagtggcagagttttgctcatagtacggatcggaatttgttcgtgaggttaactttgactttagtcaacggtacgaagcctggtgagaatacggttttagcgactttcattgggatgtatttaggccggtcggataagctgttgaccgtgatgaaccgggatttcccggagttgaagctgaagaaaaccgattgtaccgagatgagatggatcgattcggttctgttttgggacgattatccggttggtacaccgacttctgtgctactaaatccgctagtcgcaaaaaagttgttcatgaaacgaaaatcggactacgtgaagcgtctgatttcgagaaccgatctcggtttgatactcaagaaattggtagaggttgagaaagttaaaatgaattggaatccgtatggaggaaggatgggtgagatcccgagttcgaggacaccattcccacatagagcaggcaatttgttcaacattgagtatatcatagactggtcagaagctggagataatgtggagaagaaatatttggcactcgcgaatgaattttatagattcatgaccccgtacgtgtctagtaatccgagggaggcgtttttgaattaccgtgatcttgacatagggtcaagtgttaagtctacgtaccaggaaggtaaaatctacggggctaaatatttcaaggagaatttcgagagattagtggatattaaaaccacgattgatgcggaaaacttttggaaaaacgaacaaagcattcccgttcgaagataataagtacgagatgaatgttgtaagttgtgaagttgtgatcctgtgacatgtaaataacataaagaaatgtattgaagtctttggtttgatatattgttattaaatgtattatgaaatatatttaccaaataaagttatatcatgaagtatatatagttaacgaacaaaatcgacatacattactaattgtgctgatccatttttaaaatgttacaaataaatatcctaaaaactcactgtcatgaccaccgctatcaccatcttaaacaccatcaagaagtgttttcgtttatttcttacatgacaggataagtataacacactcacatgcacgtcaagatgtatacattcattgaccaagacattcaacgtttctctcaatcaatactaacggacaacgcgggatttgataaaacaatacttgcacgttacaaaaatctgctcaaattcatattccttaattttagatattaaaaaaggttcggtccgtacaaacatatctaataatctcctaaattttgcatatatgaacactgcaaacaataaactttgaaaagtcatatatgtagataatgacgcgttttggctatcacgtaccgtatgctcaagtcaaagtcaaatatatatagtccactataatatttaatccgtactaataaatttagctagaatataacgcgtgaaacaaagattgttaactgaagtgtactattgaacgaatgagaaccttggattaccaaaaacggattgtttactgaagtgtactattacagtattagcaagttttttttcttctttttctttggcgcagacatttgtatacaaaattaatccaccgtcaaaaacaagaagcgatttcaaattacaaaagaaaatcaaataagataggactgattgcatttttaaaagtatttgccagctgattgtttacagaagtatactataaatctataataagagaaatatataattaataactcattgaacagataagaactttggacttggatcacttaaaatcctctctatataacaccacgagacaagctttaccaatatatacaatccaaactcccaaaaataaacatcaaaataaaaactaaaaatggaaaaattactcataatttgcatgttactaatctcagttttagttgcaacttcacagtcccaaaccgatccagagactttcctccgatgtctcgtaagagaaggatcaaacccacaggttttcatctccgacgtcaccttcatcccatcaaactcctctttcaccaccgtcctccgccgccgcatacctaacctccgtttcgacaaacccaccaccccaaaacccatcgccatcatcacccccaccacgtggtcacacatttctccggtgctagcttgcgcacgcttgttccctgtccaggtcaggatccgaagcggcggccacgacttcgaaggactctcttacacctccacagctccgttcttcctcatcgacttgctcaacttcaaatccgttgacgtgaatctcacggaaggaacggcttgggttgataccggcgctacactgggagagctttattataaaatcgctgaggaaagcaatgttcttgggtttccggcgggtttgtgtactacattgggcgttggtggacatattagcggcggagggtacgggacaatgatgagaaagtatggtttgtcggtggacaacgttgtcggctccaggatcatcgactctaatgggaacacctacttcgatcgaatgtcgatgggggaagagcttttctgggcggttcgaggaggtggagccgcgagtttcggcatcgtgatgggatacaaaatccggttggttccggttccggagaaagttacggtttttagcgtcggaaaaaccgtcggagaaggagccgttgatcttataatgaagtggcagaacttctctcatagtacggatcggaatttgtttgtgaagctgactttgactttagtcaacggtgcaaagccgggtgaaaaaaaggttttagcgactttcattgggatgaatcttggcgggtttgataagacgttgaacgttatgaaccgggatttcccggagttaaagctgaagaaaaccgattgtactgagatgagatggatcgattcggttctgttttgggccggttatccgatcggcacaccaacttctgtgctactaaaccctacggtcacaaaaaagttgttcatgaaacggaaatcggactacgtgaagcgtccggtttcgagaaccggcctcggtttgatactcaagaaattggttgaggtggagaaagttgaaatgaattggaatccgtatggaggaagaatgggtgagatcccgagttcgaggacacctttcccacatagaggaggcaatttgttcaacattgaatatatcatagactggtcagaagctggggatgttgtggagaaggatcgtttggtacgtgcaaacgagatgtacaaattcatgacaccgtacgtgtctagtaatccgagggaggcgtttttgaattaccgtgatattgacataggatcaagtggtaattccacgtacgaggaaggtaaaatctatggggctaaatatttcaaagacaatttcgagaggttagtggacatcaaaaccaagttcgatgagataaacttttggaggaacgaacaaagtattccggtccggaagtaataagttcaattcacgagtgttgtgacttgtgacatgtattaaagtttttagcaaaataaacatggattaatatgtattgttgtcaactgtataatgatctctgatttgatgataaaatacaagtggttgttaacttgttctcctacattgctaatgagataattctatcaatgatagtctatcatatagtaataaaaatacatggattggttcatttcttatcaactgattttaaatggaaagatcgtaattcatattaacacacatgtattttgtatatttcatgcacacttaagatttttgtttacataaattttgatatcattatgatttcaagatttggctgattgattcttgattatatcattttccatatcctactattttttgttttcaaaatatcacaattcccataaaatttcaattagccgaaaagatgtcctaacattacgtgaaagtttagttaaatcacaccaattattaccattgtcaaagttggaaatatttggccgaaaaatcaaaagtacactttctcaaaaagccaaaaattctctatttatccaaatctctaacaaaaaactcaaaagtgaaaagaaaaaagaatgaacaaaatgtatcttatctttcttctattcttcgctgcatcgtactcaatgtcattgagttctgcagattccgtaactatctacgaagattttgtccaatgtttcaaaaacgtgacaactatcaccgacaatgatctctccgacgtcgttttaccacgtactagcgtttccttcactcctaccttacgcgcctacatcagaaacgcccgtttcaacacctcctcaacgccaaaaccgtctatcatcatcgtgccccgtgtcgattcacacgttcaagccgccgtgatctgcaccaaaacgcttaatctccagctgaagattcgtagcggcggtcacgactacgacggtctttcttacgtctccgccgtgacgttcctcgtccttgatctctctaacttccgaaacatcaccgtcgatttaaacgacggaggaggatccgcttgggtacaaaccggcgcgacgctcggcgagctttattataggatctgggagaagagcgaggtccatgctttccctgccggagtttgtcctaccgtcggcgttggaggacacgttagcggtggtggatacggacacatgattcgaaaattcggactcactatagatcacgtcgtcgacgctacaatcgttgacgctaacggtcagattcacgatcggaaatcgatgggagaagatctcttctgggcgattcgcggcggaggcggcggaagcttcggcgtcgttttagctttcaaagtgaaactcgtgaccgttccaaaaaccgtaaccgttttcagagttgataagtctgtagacgaaaatgccctcgacatggtttataaatggcaattcgtagctccaagaaccgacccgggtttattcatgtagagtgttgttatcatctccgacgcagaacaaaacaagtacggtgaacactaaactcagggcgttgtatcttggaaaagcagacgacgtcgtttcaaagatgaatgaggagtttccggagttgggtttgaagaaagaagattgtaaggagatgacgtggatccaatcactcttatggtggatgaatcatgtagacgtggacaaagtcaaaccggagatattactcgagagagaaccggattcggctaaatttctcaagagaaaatcagattacgtagagaaagagatgactaaaccagaattaaaccggttgtttcagaaattggcgacgttagatagaaccggtttggttttgaatccgtatggagggagtttaaacgtgaccgcagtgaatgcaacggcgtttccgcatcggcacaaactatataagatccagcattcggtgacttggcccgatgctggaccggaagcggaaagactttacattggtaatttaagaacgacttataatattatgactccgtttgtgtcgaaaaatcctaggagttcgtatttgaactatagggatattgatatcggggttaatgatcatggagcggatagttatcgaaagggagaaatatatgggaggaagtattttggcgagaattttgatcgattggttcgtgttaaaacggctgttgatccggataatttctttagaaatgagcagagtataccaactttacctcttaatagaagatagataactttagtccatgtaacaatagtaacttctttatagtgtttctttatgaaacttggaatattttttaatagatttagctgcaagctatattgtggcatatgtagcacacgttttgaaaaataccatcctttctaagttctaattttctatatcatatgttggttttagtttgcttcataatacactccatgattccatatatcggaaaagagaaaaaccaaattagactgaaccggaactggagttaaaaccggatctaacactcagcaaataacaaaaagaagaagaataacatttcagtaattatacatacatacacactcttaaactagaacccaagacagaacaataagaaaagttatggaacaaatataatgaaaattatacattgatgaaactccataggatgtgtagggttcagttcctgtcagtaccgtgcaaagcaaggaaaagaccaatccagataaagataatctttgtgccggagaccttcaactttgaatttccattaagaaatggaacgccagagagattgttctggttgagtcgattcgtaaagggttgattttgagcagatgatgatgaagaagaagacgaagaaatcggttggttgaatccagttgatgatggttgattaaacccggttaaaggttggttaagggaagaagaagtagatggctgaccaagaattggattgttgagtccagttgatgatggctgattaaatccggttaatggttgatttatcccggttaaaggctggtttaccgaagaagaagtagatggctgaccaagaattggttgcttcaaaccagttgatgaaggttgattgaatccgattaatggttggcttaacccggttaaaggctggtttacaggtgaagaagaagaaggttgaccaagaattggttggttctggttcacgcttactcctcctgttggttctaatggtgtggtgattttggttacttgtgcagcctctgaaattgatgataccagaaggcagaaaatgattgtgagcatacatctcccggttttggcgaatttcatgtccattttcttgagttttcccagtgtattttccggtttactaaacagcagaacttatagacagacaaacctggagttgttagcttctttaagattgtctgaggagttgatggagagaaaaaagaaagttgttgacctgaaacacaaaatccaactaaacctccatatagtgtctttgtttctgtatcaactattacatcactgttttgtgcttatatgctgtgtttatatacaagaatgatagaatttatctataaatacagaagaatttgatcaataaccggttctcaaaccggacgtgttgcgcctattggaaagcgaaatccataccatcaaggacatccaaatcactagaagagttctgatctgaaagatcaacttttggagagtttcctgtacttatattcagtgcccaaatcttgaatcctttcttgttcttcttcaagccgactaactcttgactcttacttagatttggaccatatcatatactttggactctgtctaacagcaacctgtcttctagagaaagctggtaaaagtaggtgaagtcaggggagagtgatagttgcgtgttggatgatgattgctgttgttgag

SEQ ID NO: 2158 - DNA, 428 bp, Arabidopsis thaliana landsberg
aacctcctaccttgtaagaagttttcatttttacggttatataataggctggctccattgatctttttttttaaccagtcttttttacatttaaatttgggatttaacggctgttacgtgttttactgcaggagaattcttggaactggtttgagtggtccgataccggcgtcgttttcaaacttaacttctttgacagagctgtatgtgttgcattgttgtcataatcattatcgttttactgttgctcttcctttccttttctccacatattcatatactatatgtaggaggcttggtgatatatccaatggaaattcttctcttgaattcatcaaagacatgaaatctctaagtatattgaaaggcagcttcaacttgaacttctaggaattgatctggttctctcctccctgtatttaacattt

SEQ ID NO: 2159 - DNA, 646 bp, Arabidopsis thaliana landsberg
ctctatactggataccatgagtgcacattgcagcctatcaagaaatcttttcattttttataagaaactttgcttacctttcaaacggctgcctcttttgctttcctgagagatgttcgaccatacaagacctcatggcgtgtccaagtgaaggggcttcactctaggcgtcaatacactagcatgatttgtgaaacactcgagttagagacggcagactcacaagtaagtgaattatacatttttgaggcatttgaatgctaccaaatatgcactatgttattgtcatgtgctaattatatgttttctgcttatactagggtgtcaagattcatgcatcagttaagaaggacttggttagcaagtatgtgaacttgagattctggaggctaacaacaaacctaccacaaagcttgacttcgaattaagggacgacacgtaagtctatatacctatgttttaaatcctcacgaatgtaatttggtaggcaatatctctgatatattgcttggtttagagctgatcgaatgtcctgtactttatggagagcatttgctagagagcttttagtacatgtgaatctgctgatggtcaaatggatatttgtgttctgagatttgcaaagataagtcctacacaggtacat

SEQ ID NO: 2160 - DNA, 395 bp, Arabidopsis thaliana landsberg
aagcatatgtctcgcaacggatgtctctcgtaacttgaaataatcttcactcttttaatatataactaatttattatgtaatactagacattggttatccaacctttagcttcttcatacagttttgtatgtttgtgtaacgattataaattggcttctctattgtgcagaaacattctgtgtgggaagaattgatgagtcaattccatctgatgattgttcacttcttttttttctaactgcccagttctgtggttctgatgagtcggaatatacatagactttggcagagatgagtatatgtgaccctgatgtttgtttgtttcgaattggtttgacccttatagaattaactaattttgtgtctatagtacaacctccatcatctatcgcac

SEQ ID NO: 2161 - DNA, 851 bp, Arabidopsis thaliana landsberg
gttaatttgtgttttaacagaaaatttagtttactctagttatctatttcgattgacaatcattctagttattttttcaaagttttcaggcaaactagataaacttcttaaacttataatatggttaagtttgggttttatggtcaattttaatgtctaaggttagttcatttgatttattcttcatggttaagcatacatttcgaccctaacatctcttctaaccaaaggcttaatatgttcatgtttttgtctaaacttagttaatattatataaagaaaaagcttcttacacacatagagaaatttttttataaatactacttgttaatgccgttgtttctccaataattaatttagatccgagaaatgttacgtttaatatttttcatattagttactgctatttgttctacgaaaactgaagcttgcaagaaaaatgcaatagtaatcataaagtgtctcaacgtgttgatggatgttgaactctactctactcgacgtgtcccaactatactaaagtgtctacaatcatggctctctaccacataaaagttaaaagtggtatatccaagaactaatttgatcagttcatgaaattagttcacgacatgttacatgtggataatgttcttccaaaatctgttcatgagatgaagaagctcttgaagctttttggttttagttataatttgattttcacatgattgcatcctttattgaaagatgtttgaggagtttgttagctgtccaagccatagtccttcgagatggaagtaagataagcatactagagaggaaaagaaggggttcccgcaaaggttcagagggatttttcgatctaaggatga

SEQ ID NO: 2162 - DNA, 509 bp, Arabidopsis thaliana landsberg
cgcctcgagtgctttcaggatactatccctaggcgaattttggtatcgcttcgggtaaacgatctaactcgcacgaaacgagtcgttcaactacaaaccgacaagaggtacccagctcggaagaaacttcacactaaggccaaaacatcttatacctaagggaaagacttagacccgacgcatggaaatgatatttggaaatctttaaggatattaacaacagagagaaaatcccgcgaagatctccagaagataaagatttatcaccgccgcctcaaagataacaacgaatctccaaagaatatctcgaggggcggctcaaagccttatataaagcacctcaagggacaagtaaaaggcagatacgcacaaaaacgctctcaacttcaggctatcaaatacgctctgactttgaaggcaaaacactaattttcatattctaaaacacttgtacgatcaaatccttactattcaataatacaaccaagaacagcgtccgcgtaaacaac

SEQ ID NO: 2163 - DNA, 2013 bp, Arabidopsis thaliana landsberg
  unsure (1)..(2013): unsure at all n locations
atccagagaaacagagaaaaataaatcaaaaagaaaagaaaataaaagaaagggattgaaaaatttaaccagtgggttgcctcccactaagtgcttgttttgagtcaatagcttgacttggcggagttcaggatgtgggtggagtggcggaggattgctgctgcctcctcgccttccaaggcggtgtgtaaacggatctggttgaggcagcttgaggtgtcaatcgatactctagggtgtgtcgatcgacactctctcgtcacatgcaagaataacaagagaaacaagccttcgaggaactctaggcttgttatcttttgaagatgtcttcgaataatctaaagaattaatcaaagataaagcaggagaagagagaagagaacttatcacaaagatcctcaagtggtgtgggctgaagagaatgtnnnnnnnnnnnnnnnnnnnnnnnnnnnnnnnnnnnnnnnnnaggggtaggggtgtcgatcgacactattgctctgcaactttcgttggcgagctgagcgaataggagcattgtgtgtggctctatggtgggattctgagcagtctgaggaggtgtgtctatgttggaagcaatgcaactgataggcttagtaagctatgaaccatccatgccaaactccatctccaaatcccaaactttgaagatcctacctatcttcacatcaatcctagcaccacctggggctaggaatgctcttccaaggataagagaatccttgggttccttcttctagtccaggaccacagaagtagcagggattacggagtgaccaaccttaacaggaacatctacaagaatcccttctaggattcatttggaacgatccgcgaagaggagagtgatctccagtcggcctgtagttagtcatgcctagtctctcagaaacaaacttaggcatgaggttgatacttgatcccagatcacacaaagagcggctgaacctgcttgaggagatagagcaatcaagaataaagctgcctggatccgggagcttctcagtggtctaatcaggagtgatagagcgaatgtactcagcaatgtccactctctgtgccttctctttcttgaccttaggcaacagaattgcactaatgtctcttgtcagcagtttagcttcagcagagctaatctcattgtcaacaacccgcttgacatacctgttgagtggagtagaagatgttttagaagcatccttaggaagagaaatgaggatcttctccatgatggttgtgcacttagccgcatgaatctcctgcttagaacgacgctttttcggataagggacaggaggagtgtaagcagtctcgggcttcatcgggattcgcacctcatatggtgcagtccggacccagtgttgatcaacactagaggtgtgtcgatcgacaccttcgtatggaatcgtctcatagaagaatgttctatagggtgtcgatcaacacttgtaggtgtcggtcgacaccaactctgaagtagcgagctccatctcgtcttcagtattaacttctttccacacatcatttccatctctgattaagatggcattacagctcttccttgggttagcatcaggattaccaggaagaaagccttcttgtctcttaatggattgggcagtttgagctacctgtacatttagctgagttaccataggtcctctggaagttgctctaaggaaatgtcgtctggaaggcaggcttttgagtgtagttcgaggaactttggttctctgtaaacctgttgccactgaagttgccatgtggctgtccaaacttcatgtagcctagaccatctatgtagtagactccctcttctgactcaatctcaggctcaatagtctcatcctcagctgcaaagtggacatgcttcttccttgaagcaagttgtgaaccgaatccaacttagcattcacctctgccatctgattgcccgaaacagctccaacaatcttcttcctctcaaagtcagcattcttggtgctgtgttaccat

SEQ ID NO: 2164 - DNA, 770 bp, Arabidopsis thaliana landsberg
  unsure (1)..(770): unsure at all n locations
gtatattctaggttttggatattccgcttaaccatttggttaccagtatagtttggtttggttcccatttggttttggttagtttggatagaggttttactaagccatttgattattttagaaactttggtttggatacggtttggtttggtttggtatgttattatgtatttatagaaacttcggttcgtatacggttcggcttagccacacatctaaactgttcaatactcgatcatttataactttttcagaaaccgatctaatcgatcactcgagttttttccataaacaaaaactgatttatggttatttattgatgctgataacacgatatctgctatactggtaaggaatatattttaaatataaatatatacaaccaagtaatttcgtaattttcgatgtccaacaacccatcaattggccaatttttgctctttatgtacgtttttctaggtggggatcgatcgatccaccactcatccgccgaagtaaaatgtccgccagctcgggatcgatcgatccaacactatcgatgaccagaccggttttccttaaccgggtctgcaacatttctaaaaacctttctataagcaattttagggattagagattcatcctttttgacaatttggagaagatttctaaactctattcttaattattctatttgaatcatgttttctttcatatctctntgcttgatttctattgcaatgtctgagtaacaattgggttttagggttcaaagtaggaagtcaatgaat

SEQ ID NO: 2165 - DNA, 640 bp, Arabidopsis thaliana landsberg
  unsure (1)..(640): unsure at all n locations
aacggtctatttccccacgagaagtactacatcatactagatagagcccaaactttaactccggttcatatatccataaaatcaaagttctatttctatttctccccgaattaaaagtttcgaaagctaaaaccccataaaattgggtaattggtttacaaactaaacccgacataataccacataaactcaacataacccaaattaaaactcgaaccaatctaaaaccgtaccatatgtcactcgcccaatttcttcttcttctttactaaaacgttttaatggcttcaccaactgtgtataaatccaaccaaacaaaataacagatctgacaattgctcatatgaatgatcatctcttgtgtcccttttgtgggacaactaatctgcaaaatcattttagagtcttcatatcccctttgagttaatgaaatgtgttaagacgaatttacccctgtaatttattttgaatgaataattaatatttctaaacatagacttcttcttcgggcttcttcctccggcgagctccggcgagccgaattggnntgtcgttttctcctcctgcaagctgcatcaatctactaagtcncagtatgtgcatcgagttggagagagcttcaaaagctttgaatacatat

SEQ ID NO: 2166 - DNA, 546 bp, Arabidopsis thaliana landsberg
acacatggatcacttgaagattttaacggtaaccatagatgatgccatgattttggaaaggatacaaggtattgaccgattggcgagtagtattcgaggtttatgtctaacaaatatgtcagcacctcgtgtagtattaagtacgacagctctgggaggtcttcaacaacttgcaattctgagctgcaacatatctgagataaagatggattggaaaagcaaagaaagaagggaggtttcaccaatggagattcatccatctacaagtacaagttctccaggcttcaagcaactctccagtgttaatataatgaaattggtagggccaagggatttgtcatggctgttatttgctcaaaatctaaagagtctacatgtgggcttttcaccagaaatagaagaaattataaataaggagaaaggatcgagtattaccaaagaaattgcctttggaaaattggaatcacttgtaatatataaattgcctgaactcaaggaatttgctggaattatcggactcttcttacagtagatatttggtgtcaa

SEQ ID NO: 2167 - DNA, 1276 bp, Arabidopsis thaliana landsberg
ttggggaactgaggtttgatttagcaaacaatctcgattttcttttgattattctcaaaataaagtctttttagggttctaatagagtcgttaacaagtgataatgaatgttataagttcttttaatgaatgatgacaacatgtttattttggcttggtcaacgaatttctcatgttttaaatggtagtcaacgcttacttcatgtttaaaatggccacatataaagtcgatgtttaaaatggccacaatttaaaacttgactaataaagtcgttaacggatgataacggacgttagaagttccgctaatgactgataacggcatgtctattttggcctggtcaacgaataatcattttgaaaagttagtcaacgtttagttcatgttttaatcggctgcatacgaagttagtgtataaaatggccattttttaaaagttgggggattaattgacatttttcccgaaaaatagaacaaatgttactgtaaatgataaccaaagtatagaacaaataataacaaaaattaaaaaataaataaattattttctaaattaaatattaaacgaatatgagtgtaatttaattttttaattcataaatgtttaattgttttcctgtttattcttcatcaaatttgggaagaaacaattttcttctacgattctttaaaaaataaggaatgattaggaataatatgagatccacatgttacaatttaaaaaaaaaaatattgctaaatggtgaaaaaaaagaggaacaataaggaacaacattgttcatgctcattattttcttaaaaagtggttagcaatcagacccataatagacctaacctatcgttatcagttccactctctctacacacctttttccctttgttcgacactaatttcaaaatggaatctctaaatccattacgttcattctctcaagctatgtcgagaaatcgatcacatgtatgatgttgtctccttcttcctattcgattattatgttaaattgtatcttgttctttgtctctgtcttatcatacgttagtgttagttctcacttcgaactatgtctcaagcttgttcttcgactttgttagtgctaattttgatctttgcctctcttgagtcacttttgtgttttgattatttttctttgtatacttcgtcgtctcttttgatttagttttaggtttttgttcttcttcactaactctatgttcatttgtttgtggtttttattgttaatttgtgtgttcttaattaaagttgcttctttgtac

SEQ ID NO: 2168 - DNA, 2595 bp, Arabidopsis thaliana landsberg
ggatgacatgctttaccatatagaagatgaaaaggtgtggtcccaagcagagttttcatttctgttctgtaagcccacagtgcatcatctaacttgtaagaccactcctttttcgctttacccactgttttctcaagaatctctttgatttgcctgttggaaacttcaacttgaccgctcgtttgtggatggtagggagtagcaactcgatgttgaactccatactgtaaaagcaatttcgcaagaatcttaatgaaatgcttacctacgtcactaatgactatgcgtggtactccaaaatgagggaagatgatagacttgaagagtttcatgacaaccgctgaatcgttcttcggactatctatagcttctaaccatttggagacataatccacaactactaggatgtagagattcttgttggaaggtgggaagggtcccatgaaatctttaccccaacaatcgaagacttcgacttcgaggataaatttttgaggcatctcattacgcttgctgatctttccccttctttgacaagggtcacattgcgatatgaacttctgagcatcccgaaacattgtaggccaccaaaagcctgcttgaagaactttggatactgtgaaatgaccaccatagctagagctgtgacaatgcgataatatatgaaataacccgattttcactgattttatctacgtgttaggtataggattttgagtctttatgttatttctcaagtcttttttgtgtctttttaggtattctatgaaatgggacaacaatggagataatgagacattttggagcaaaagctaaggaaaaggaagctaaggacgattttggttcaggaatcagcgaggagtgtcgatcgacacactgtgggggtcgatcgacaccagtttcggcccagcaaaaaccctagacgccttcgagtttacagaagctcaagtttgccccagaagatttccctatttgcattattagtccctggacgtttttagggtctatatatattgttgttacacctaagtttcttttatcaagtctttttatcaagcttttgcaaaaccctattgtgagagacataagctattcatccattgttcttgagaaattcattccagttcttaatacagagaagagatcccttctttctcattttctatttgctgtgtttatgctttcatactctattatggtgtttgcttcaatcaatatgtctgagtaatctgcttgttaggaatagggtttctcattagggattcatatggtttagtagattgccccctctgctaggttatctatagatttcttcatctttgattatgcttaatgctagatctagagtaattaactagatcttgaatccagacaatagatatgcccaccataggtatctgtagttggatctattattcgatgagcctggtttataggtgtgtaataagaatcggcctatctactagtgaacaatcgaactcgttaagaatgcatatttaggttaataatctctcggcttctctggttattcttagctatagatatagggagtttcgcggaacaccactgattattccataattagagtttgagtttaagaatggttcgataataacctagctttcattagatctactaaccaatagtttcctgagaataccctgttcctaactcttttcttaatcatttacaacacaatcatcctgctatctttttactttgttttcttactatttcaatcatcacctgctagcttaatctcgacatttaactcactgtttgaacaaaagaactctgtgaattcgatcctaaaatactgcaattgatctcttatttgagagagtagttttaggtaatttgaaccttatcagaagtcaaccaaaatccgtttcagaacagtttatgtgcctcagatgtttgacatccggacaaagtcttccctatctcggcataaaggtatctcggcgtcattggaaagctagaagagtcaagattaaagtcgaagtcgaatcgtagcaatccatgaatccgttcagaagttatggcttgaagagtgaagatatgtcctagaatcgcggttttggaaatgatcaatttaaaaccgccgaccaaagagacttgaacccgggcgtcccctcaagtcttccaccgacctctagggcgcacaaccactccttcccttcctcttgccgccgacttccatcaaccctaaaagcccaggaacttggcccatcacttattaatcaatggaaagacgtttctaccctttgacctaatgaagccctgtaatacaagtttagggggaaccctagaaaacaacctcgaaaaaggctgcctcatgcggctctcaccgccccaaaagtcgtcctcctcctgttcttctttagatctctgttttctattcaattctgtattctcgacttgtaacaggaagaagatttataaagctttggaattccagagaagatctctaaacccgtgtggatactcatactctcttttatgagattttttattcatatgatgttgtgttctttgagtatgtgtgagtagatctctagttaggttctaggggggtttcaaagggtactcatg

SEQ ID NO: 2169 - DNA, 696 bp, Arabidopsis thaliana landsberg
gaatttaagaaattttagcctgggttatttatatttttttggtttttctactgtttcagaactcaattcctttaacggaggcagccacctgagataggtgaagttgttgatgagaactaaagatgcatcaccagacccctatatatcgttttgtttaaaaacttttctattaagactttgtttatgtttttattgactttcttatgcattatttctgttaaacattaacttttattatgcttccttaatttaatgcttactaaataactatagttccgtaaacttagatcaaattataactgtttttagattggtcaattattcggttattttgatttaaattatgttgatattttgttgattttaacacaatgtatttggattgcaaattttgattacaatgtatactaaaatatgagttagatatctatactataaaacaaagaaaaacaaaaaccaaaccttagagtttattagaagatttgtccaaagaattatgtccttaaaagttaaaacgttagagaatcttctaagttgaaaacataaattatttcaactcttatctcttaatcaagcatcctttagtttgtgttccaatttgcacaataatagagtagataaactaaattagaatatatattctttatattgtgccataatagaattaaattatagattcttttgtaacaataattt

SEQ ID NO: 2170 - DNA, 14814 bp, Arabidopsis thaliana landsberg
ccaaggaggatatcctactagtttgaagcagttttcggcgagatgaccaagacgcccacaatgagaacaaacaattgcagaatctttattttcggtgaggctgcgggtccttggagtagtttgaaccgcaaaactcacaccatcgtttctttcatcatgtaaacgacttaaagactttgattcttcgtcttgagtcaaggtgttgtaagcttcctcgagtgaaggcagtggtacccgagagagaaaagcggacttgacggctccatacatggattcgtctagacccatgagaaattgatgcagcttgtcttcctcacgctcttttcttacttcctccattgttttagcttgttgataatctgccaagcttctccacaattgagagagtttcccatagtatgtctcaatgggagttcctttttgacgacatgtagctaactcggttttgagtctttggatgcgctgtccatttttaactccaaaccgtttttgaatgtgtgtccacatatcatgggaatcgtcgaggtgtgacattgaggtagctaagctttcatgaatggtgagtttcatccatgaaaccacaagagcattgttagcaatccaatcatcgaagtcaggatttgtttcgtcgggctgaggaattgtcccatctgcaaatccaaactttttccttgctttcaaagccaaacgtaaatttgtggcccattcatcgtagttaggtccacgtaagagaggttttgaaattagggtgcctggattgtctccggaggtaagatcgtatggtgagatggtacggcgaggttgtgtggtagtcgaggaagaggtggtaagagccaactccgtactcatcgtgagaaaagtttgtcaaagaagtggaaacaaacgaattttagaaacaactataacttgcagcggaattgacagatcacagaatcaagaaacaaaaaccctttagtagtttaggttttgctctgataccatgtcaagaaggagatgaagatgtaaagacgtttctaattaatacgtaagagaggcaatgccttatatacacaacatgatttaacctagtgtagctatacaatctaagtgggctcgggagaggcctcatagcccaatataaacttcttttaaaaatgattgtaaatctctttaaaaacggttgtaaatctcttttttaaaacggttgtaaatcattttaaaaatggttgtaaatccttttaaaacggttgtaaatattttcataataacagctactgcagctttttcaatacttttaaaatctttttaaaacagcttgtaaatcgttaaaaaaaacttttaaaaagcatgtttaacattttaaagcccttttccattcaaatcaaagcacctgttaacccaaacaaccattatacaataattttgttaaacaggagttgtactaaataaacttcataaaatttgttccatacagatgttcataaaatattcaaatgacaaagttttatgaaataagaaacaaaagctgctaaatctatcttatactccactactttttgattagaaatctgctacttctacaaagtgactgaccctaattcggtggagatgtctgtaacaccctaaacccaatcccttgaacccaccctttttgttttgttaaaaacaaaagtccatggagcccatacaagggtggagtgaaagcgaacgttactttcatcaccgttaaacaacggtttgattgggtaaggaaaccctaatctatttatgccttctttctactggaattgtttctcttagccattgaatttgtggcagttagatcaagttagcttttgggttttttgtgtgaatatgtgaaagaatgaaacagttcaagtagtggaattggtgatccgtttcccgtcacgtccgaaggagtttgggcgagtttttaacggttctgaatagatcccgttcccacgttttcagaacagttttcggattcaaaatcggaggtaagatcgatcgggaaatcgcgtttaaattggtgattaatcacagttttcagagccatatttttctaagtatctgaaactttgcagtttcaggtagaggctttaaagatctatttcccgtcgaatctgaaggaatcagatcgtgaatttggtgtctatggaaagatcttgcttcaagaaacttagagtagctgacagctcgtccatcggatttaagctccatccagaattgaccttagaagtttgcccggaatcatctcaagttgcagaaacctagatatcagttatgatgcagcatcttcagaagagcgtgggagattcatgtgaagtctgatcgagatgaaactttgtggagacgttcatgttactactttgtatctgatataggtcaaattgccttaaaaccactctctcaaataagagatcgtcgttagcacttaagggtcaaattccactgagctctcgatgttcacacaatatacttatgatgtttttaaataagctagacaaagtaaatgaatgtcacagataaataagctagacaaaggaaatgaatgtaaaagacaaataagcaagtaaacgagctgtagattcaagtgattaaagtgtcgggtctaaggaattgtctcaggagatagaaaaattgtagatctagctaatattaggattgttatcgcaccgttctcaaactcaaactatgattttagagtaaccgatggtgttccgcgtaactctctatacttagagctaagataaccggagaagccgagaaatcctatactaaaacatgtattattatcaagcttgattagttcacctagtatctaaaccagagcccttctatgagccaacctgttctttcttaaatgcctaggctcatctataatagttcaaacaacaagtacctatggtgggcatacctattatataatatcaagttctaggtgatcaatctaaaactagcaataagaataatcaagatcaagatgaagaactctaagaataatcctaaggggtttttgatctactaatccatctaaatccctattgagactccttaaacccaacaaggtgattagtcagacatgataacagaaacacaaatcataatctgaatagtttgcagagatgaagtagaatagaagtaaaaggagttcagaatcctctctgcagtgattggattcttctcacaaaatgtatctcaatctctaaaacaaaacttaggtctaacaatgaccaaataataaggtatattcgtgtctaaaaacatgcagggactactttgcaaataaggaaaacttcagggcttctcaatgacttggcaaaagacagaaattctctcgatcgaaataagggtgtcgatcgacataggtgtggtgatcgagataggtgtggtgtcgatcgacaccatcgcgtgaaaaaacgtcttagataatcttcattgctgaaaagcttccaaaattccttattatgctccatacctcccagatgcgtaagtgtacctaaaatgactcaaaacatacgaaaaagactagaaagactctaaaaaccattctgaaattatgttataaaaagaatatgttcctctccccttataaaaagaaaaatataatgagagattgagacgactttcagatagtgtataggggtaggaatgtttccaatgaccccattattatacattatttacaatgatcaattacaaatgtgtgaaaaatgctgagggtgtcgatccagtatgcgagttcccctttgtttactctctaaaaagaataagtctgggggagagaaagaacaccgagaaaaaaaatatataaagaatggtgaatttatcatggtatagtacatgaatgagtctagaaggatcttgaatgttggcttgtttgatgagacccagcgatgaaaccctggtggatatagttgtggaacttaggtatggaatctagaatgttgtgtaagcttgtagagaagtacatgttggttaggatttgattagacttgttaggcatatggacttagtttgaatgatcatggcaataggctagagaatgttgggagttcctttgttttcaaaacctcttccactggttcggtttttgtgttttgcttgagggcaagcaaaaggtaagcctgggccagttgatataacccgattttcactgattttatctatgttttaggtataagattttgagtctttatgttgtttctcgagtctttttagtgtcttttcacgtactttatgcagtgagacaacaatgaagataaagagacattttggagcaaaagctaaggaaaaggaagctaaggacgattttcagttccatattaagaggagtgtcgatcaacacactcatggtgttgatcaacaccagtttcggctcagcaaagttcatgacgctttcaagtttacagaaaaggaaatttgccccaaaagacttttctatttgcattattagtccctagacgttttatagggtttatatacattgtttagaccctagttttctattatcaagctttttgcaaaaccctgttgctgagagacataagctattcatccattgttttcaaagatccattcagttttgaatacagtgaagagatcctttctttccctcatctttattggtgtgtttatgctttcatactcaattatgttgtttggttcaatcaatatgtctgagtaatctgcttgttaggaatagggtttctcattagggattcatatggtttagtagattgtcctctttgctaggttatctgtagaattcttcatctttgattatacttaatgctagatctagagtaattaactagatcttgaatccagacaatagatatgcccgccacaggtatctgtagttggatctattatttgatgagtctggttaataggtgtgtaataagaatcagcctatctactaaggtaaacaatcgaactcgttaagaatgcatatttaggttgatagtttctcggcttcttcggttattattagctatagatatagggagtttcacggcacgcccaccagttattccataattagagtttgagtttaagaatggttcgataacaacctagctttcattagatctactaaccaatagttttctgagaatacccagttcctagctctttattaaatcgttcacaacacaatcatcttgctgttttcttactttgttttcttactatttcactcataccctgctagcttaatctcgacatttaactcactgtttgaacaaaaaaactccgtgaatttgatcctaaaatactgcaattaatctcttatttgagagagtagttctaggtaatttgaaccatatcaaagtgctttaatcgtttccgttgtttattcgctattgagtatgggatcactagctaacaattgtaagaaaaaaaaaatgggatgggttgtttcaatttggtaacagtgcaatcacggttttaggatgtgtaggaaaattaattgatgaattattttcctgatgattgattatggagtgtttagtcaattgtgtgttggtgagtcctaacatcatcttctccgagccttaaatgagattccacggtaagttgtttgtgatatattcgtttgttttagtttcttagccatttgttcttgagtagcgcagatggttagaggagctggagttcgtggtcgtggtcgcggtaggggacgagtcctcgagggtacaggcgagagtgatggccacagtgccacagttgagcagagtgtgggttcgcagcctgagtttgtggagcccggggttaggaacggtcttggtgccgatatagctggtgcagccggagtgggggctggtggagctggtgtcggtatcggtgtgcatgccgttggtgctgagggcccaggagtgatgggtgtcgcagccggaggagcccaggttccagaggttggtttggcgggcctgctgaggcagttgatagagcggctacaaggtgtggtaccaatgcaggctttagttgcgcctcgagtggcggaggtgaagcagagggttgtgagagatagagaattgcagagcttgttttaagtcactaagcttgactcttacagtgcttagtcagaaaaaaggttgaagagaggaacaaagaaatcctcatcttcagtggttgaattttcagtgcctgaatcatactctgcatcctctcttgacatatggaaggatgagtactcatttgatctttcttcaaaataagcttttttctgaacattagagtagtcttcttcttctgaaccaggctcctttgaccaatcctcaatttcaaaacttgtgtagcctttaaccatttcttgaagttctagaatggtgttgtttaactcttccatcttatgagttaactttccaattgtatcctcctgagctttatatccaatccacaactctaggagttcttcagcaacataatcaagaatctagtgtttttctttagcagaggggttggtggttggttcaggtacttctggagaataagtcggaatagggatttcctcctcactcaacaacttgctctctaggcttctttcctctaagttaactcctttctgatcttctggtgcaaaccattctgttgtgaaatcttcgttctccttgatagctagtgcagtttccatcttctctacgtcaataccatttgaaaatttattaactcttttttcaaatttattaattcttcagcttcatcacccttgaagataatccctctatgactctgctttgccatttaattttttttctcatctcatactagtcatcttctgtaggatcttcagtttgagctaacccttctattgctctcttcttgtggtcaaaagttctctttagcttgctgagttgagaagtatagttgacttttggtggggttcaagcttctgtttcttcatcaacatccatgtccagaataccaaaactctgacctcctgtcgttgatttcccttaatcttttctgatgtcaaacttcatcttgatgcctttttcaaggttcagattaatttttccattcctgacatctatgactgctcctgctgaacctaagaatggctgcctaggatcaggggatccttgccttcttcatctacgtcaaataccacaaaatctgtaggtatctcaacatttccaatcttgacagatagattttctattagaccatgaggatgtgcaacagaagcgtcagctaagagtaaatctaagttgtagaacttgtattccatgatccctaccctttaagctgtagagcgaggcataacgctaacatatgctcccaaatcacaaaggcacctattgaatgtcaatggtcctagagagcatggtagagtgaatgaaccgggatcatcaagcttcttaggaatgatcttcttctgtatgatagcactgcattcatgactcaataccaccatcccttgcacttcttgaattctctcaacgatcaagtctttcagaaacttgtgagagtctgggattagtgctagagcgtcaacaagaggtatccgcaactcaaactccttgatgttcttggcaaacatagctctatacttatctgccaatgctttcttgtgacggccaggaaatggaagctgttgtttgtaaggaggaggaacaaagaccttttctttgttcttgacagtaactggttttggagcagttggtgatgttgctgggaaggttggtcaagtagtaggtcgagtaacgtggtcgagtgacttctcaagtggttgctcgagtggttgctcgagtgtctggtcgagtggctgctcgacttgtttgtcaactcgatctttactgagactaaaatcctccccatcttgatcttcactgtcctcagtgactgtctttggttcctctctagttggaagtgtttttccactacgcagggtgatagcgtgagcatattcttttggattctgaattgcttttccttgaagttggcttatctgttttggagcagaggaagatgcagaatgtccctctaagtatcggactttggtattcagtgtttccaccttgacattgagatcattgtagctacagtccagcttgttatgtaactcagatattttctttgccatttccatggagccagaggcttgcccttgaagtagctgttgtagcatttgtatcatgtcagcgttaggagcagcatgaccttggttttgctgaggtgcaaacccaggtggtggttgcggctggtagttcccctgaaattgctacttaggaacaaaaccttggttgtagggaacaaaaggtttgttctgaccttgttgttgctgtggaggatacacctgatcctgaggattagcaacgttggtgctgcggtaggagagattggggttgttggtcttgaagttgttgtatcctttgaagttgacttcttccaactggttaccctccccatcttggacttctaactggtttccctccccatcttggacttgatactgctggctaagaagaatcctgtccagcttgtcattctgctcgctaaaaagaatcctgtgtttgtcatcagagtcagctgatcactgatggtcctgtcgcagtcttcgttgaattaccatctgattgagctaggttctcaaccaattcccagccttcttcaacatctttgttttggaaattcccattgctggcggtatctagaagcattctgatgtgtggtaaaactcctctgtaaagagtgttgagcagagaggctttcttgaaaccatgatgagagaattggttggtgtagcccttgaaacgctcccatgcttcatagaagctttcaccagtcttctgtgaaaaaccagagatctcatttctgagtaatcatcccaggtggtgattgagtcatgcggcagattcttctcccagatgtgtgctttgtcgcccaaggagaatggaaacaaccggagcttgaatccgtcttcactgacaccattgatttttgttaggttgcagagcctatcaaattcatccaagtggtcgagtggatcctcaattgggagaccatggaatttgttctcctgaatcatcgagatgacaccactcttaatctcgaagttgttgttctggatagcaggaggtgcaattcctttcctttgatgatgggcccgtggtgcatctccagcaccaatgtttgcagggccattttgtagattctgttcgtcagccatttcgagtggttgctgaggtacaaggttgactgtgtttctcctttctctgagttcgcgagctatgcggtcgatattgtcgttgaaaaggaggttctgattgcttattgattgagtttgaatacagcagaggtgcacctcaatcgagaagagaacaaaaaaaacacacagtcagtatctgaaatgaaaattgaaaaagaacttgatctaagcaagtctgaaatctcaaatgtaacaaacaaacacccaattggcaacggcgccaaattgataataagtttttagaatcaattaatcctaaagcactatcatgtcgttgtagtactgaaggttgtcaatccaaatgggtgtgatgctaacaatcaagatgtcatcagaagtcacaaagtcaagccaagcaataacaggttttggtgtgttttagcagttctaagtgaacatgcagaaaacagaaaatcaaacagaaacagtaaaacactcgaccaacacagctctttgcagagcactgggtgaggtcgagtgacaggtcgagtaacagacagaaaataaaacacagatactcgaccgcacagtctgttgccaaacaactgggtggtcgagtataaggtcgagtaacaagaaagaattgcagaaattaagcgacagataacaagatgcagtaaacaacagtagagtaaacaaagaattcaatcagataaagaattcccaaggatggggtaattgagtggtttcgaatcctcagtttacaggtgattgacgtgctcaataaattaaccctaaacaacaagttcattaaccaaatcaaagtgccaccgcagcagagactctcaagttaacctatttccagactcaatcaccattgacgagagctaacctaacagacattacgaatcaacaagttaaagccaaaagctccctgcaaccaataccttggtacagggtcacgaatatctggaattagtggttcagacatttcatcgaacaccttttgggcgtggaaatgtctgggctcaaattccagttgatcaaaaagcaataggcattaagaacaactaatccagaagggatctatcaatcaatactcaatcacctagcatactgagaatcctacactactctaacccatcctcagaaacctattcactactcagacattataacagaaagcataaacgttgaacaggttgaagacatgataacaacagtgtaacagcaggatgataatagaatgaacaacaacaaacaaaaatcaagaacaaaagctgaatactgaatactaaatagataaagagaaatccggattacaaaaggtctagcacacaaggtctgcggaaataaaactagataaaaaacttcttttcgaaaatgtgaagtacatgctacttatagccaaatatatcgaaaccctaatacttaaaacgacgcagtattgggacggattaagaactgtactcgacccgtgtggtcgagtgggaggtcgagtgaatagttggagtcttcttttcttccttgtgctcgagtgtctggttgagtgtagaataaagaagactctgaagctcgcaatcgagtctgtagtcgagtggtggtgatggtgatactcgacttcaatgtagagtggtgagatcgagtagtggtctggtaatgaaggtgaagacactcgacctcggggtcgagtgatgtggtgaagtagtgatgtcctctactcgacctgggggtcgagtggtctcttgagattttgaagcccctactcgacctcggggtcgagtggtttgacatgatcaggtccgcttcttccagatagctcgtcaacagctccaaatcacctgaaattaacgcaaatatgcaacatgcatgcaaatctatcctaaacatgtaaaatgatgacaaatggtataaaacagtgatttgatatgatgctaaagtgatgacaaatggattctcaaaacatgcaaaatacacacttatcaactcccccaaacatagtctttgcttgccctcaagcaaacaatcaagaacaagctggaggtgaggtttgaaaccggggactcagagccaaaacaccagataaataagatgaaatgagtgtccaagttgatagttctaagctgcgatacgatggaattctactcaaaaacgttagtcaagccttgttatcaatcaatccgactcttatgctcaacctacacatgttttcaaatctaccaatccctttaccattcattagttctggaacgttaatcaagcaatgcatcatcaatgaactcatttggcttaaggtacaggtcaagagacaaagatggtcccttacagaataggctttagtaacaggggatctctcaaaaaatgattaagctttagtagaatgctaaggtaagtcccaagctatgcatacagagataagatcccatctacccagagtataacaatgaagttctaatggtaatcccaactcgtgtcccaacttaactctaccctttgcactcatgaatctttcaagctctttttcatatcattcttttcttttctcttaactcaaggagaagctttctcagcgctctgatacatctagcgggtttggatttctttaacaactaaggttcctgttttttttttctttaaaaccaaaggcttttaacccttcttctttagctaacaagaacatcattcttttctttaacattcccaaaacctttgctagattttttttctaacttctttagcttacttcccctagaattctttccctttcctcatcaacaatgaattccctcttttcttttaaacacatcccatcccaaccctcattaggcgtttaaaggctcctccaaaggacagaggttccttctggaataaactgatctatcatgtattttttgagccgctggccattgactgtgaagtctccattctttccagctagagtgataacaccataaggttggactgcagtaacagagaaaggaccagaccatctagacttgagcttgcctggaaaaagcctcaagcgagagttgaacaacaacacttgatcaccaaccttaaaatctcttgagactatcttcttgtcatggaaagacttggtttgctccttgtagattttggaactctcataggcttctaagcgaatctcgttgagatcgttcagttggatcaaccgcttctcctcggcggttttattgtcgaagttcaggagtttaactacccacatggctttatactcgagttcaacagacaaatgacaggattttccatagaggaggttgaaaggagtcgtgccaataggggtcttgaaggctgttctgtaagcccatagtgtgtcatcgagcttagcagaccaatctttccttgtacttcccacaggtttctctaaaattgcttttatctccctattggagatttccacctgcccgctcgtctattgatgataaggagtggctaccttgtgctttactccatgcttcttcaaaaggttctcaaaacccttgttgataaaatgtttccctccgtcactaatcacaattctcgggactccaaatctagggaagataattgtcttgaacagctttagcacaactctagcatcattggtgtggctggctatggcttccacccattttgatacatagtctactgcgaccagtatgtacttgtttccgtaagaggaaggaaacggacccataaaatcaattccccaaacgtcaaagatttcaacttctaagatcggattctaaggcatctcattccttctgctgatgttccctcttctctgacatgaatcacatttcgagataaattcctgagcatccttaaacattgatggccaccaaaaaccagcttgcaggattttcgacattgtcttgaacgttgcaaagtggccaccataggcaaacccatggcaatgcaataggatgccttcaatttcgtcttctgagacgcatgtcctgtagatcttatctttgcagagtgtgtagagataaggttcgtcccagtagaaatggttaatgtccttgaagaacttcttcttctcatagctcgacagatttagaggctcttcaccactaaccaagtaattgacgtgatcagcataccacggaagcttttcttcaatcgaacaaacttgttcgagtgatttccaaatttgagcactctcgttaagttgctgaattgccattagctgttcttctggcatggagtcgtcaatagggacctcgtcttcagttctcatcctagacagatgatcagctacaccgttttcaattcccttcttatcaactatctccatgtcaaactcttggagcaataagatccatcttaacagcctaggtttggtatccttcttcgcatatatatgcctcagagcagcatggtcagtgtagactgtcaccttagaacccgctaggtagcttctaaatttctcgaatgcaaataccacagctagtagttccttctctgtagtggcataccttacttgtgtatcatccatcgttctgctcgctggcccaaaactgctcctattgcataatctgaagcatcacaaatgatctcggatgggaagtcctagtttggagcttggactattggggcagtgaccaaagcttccttgattaacttaaagggtgtcaaagattcttcatcaaatgcaaactcggtttccttgcacagcagtctggtgagcggtcttgccaacttggagaagtctttaataaatcttctgtaaaatccagcatgaccaaggaaacttctgatgtccttcaccatttttggtggctgcaactgcatcatcacttcaatttttcccttgtcaacctctatacccttctctcatatcttgtgacccaacattatgccttccttcaccatgaaatgacacttttcccaattgagaacaagattcgtctcttcgcacctggtcaataccctgccaagattcaacaaacataaggagaaagaggggccatagaccaaaaaatcatccatgaaaacctccaccatctcctcgattaaatctgaaaatatagaggtcatacacctctgaaatgttgcaggagcattgcataaaccaaatggcattctcttataagcaaaggttctataaggacatgtgaaagtagttttttcttgatcattagggtgaattggtatttgaaagaaaccactatatccatcaagaaaacaatagtatggatgattagctaaacgttcaagcatttggtcagtgaatggaaaaagaaaatgatctttcctagatgcagcatttaacttcctataatcaatgcacattctatgtccagttatagttctagtagggatcagttcatccttttcatttttgacaacagtcattccaccctggtactatcagagatagggtagatgacaccagcatcaagaagtttcaaaatttcttttttctctacttctttcaaattgggatttaacctcctctgtgcttcaatgatagaataggattcgttttcaaggtggatcctatggttgcataaactaggtgaaattcccttaatgtcggataatgaataaccaattgctctcctatactttctaagcttagataatagcacgttcacttcatcatcatttaactcggcattaatgatcacatggtaagtagagtttggaccaaggaatgcgtacctagaccttta

SEQ ID NO: 2171 - DNA, 14451 bp, Arabidopsis thaliana landsberg
  unsure (1)..(14451): unsure at all n locations
ctaaaactacgcaaatgacaaacacagcaacaaccgtgtagtcactttgttcactcaccaatgaaacccacgagacaagttcttcttaacttttctaatcttccacttttgacaagtaaactggctaaccctaataagagaccaacgcttctcttatatcttgtcttggaaaacggaggatgcttcactttatccaacaggtccaagtgtagctcctcatcattatctagacactaggaccatgtcctatgcctgacgacttcgtctcctttgtctaaagtgatacgtcttttcttcactccaaccaacacgccacattggcaaaagcaactgttgctttcccgcttcctctgttctgctctgtgttatttcagacacgcctgtagaacttcagacactctgtttcttcaatctccccctttttatctgagtgtgatacctcaagtaatctgcaaaagagtagagaccacaatacaagccaagcaatattccataccaaacatagaaaccaaaggctcaagtttaagcaactactgccaaaagacataaccatttaaacatgaaacagaaatgagttcttggttccatacataagaccaatcattaaacacacagaagatccgataagaagccgataaagaacaagatcagggagttttcacaaacacacaaaaacaatcagtgacaaactccccctaacacaatgcccaactaaaaaaaaaatgaccaggactaagcaattaagtgctgtcatctaactcatcatcatcgtcctcttcctccacattctcatctcccacatcatccggaacagagtacgacacatcagaatactctccccctgcttgagtgcacactcatataaaaaaccattctcaaaagataacagagtgtaagttgaatgagagaggcttacctgccagacgaacacgcatcattgtgagagatgcaatgagggtctccagagctgcatccaaggttggactgtcagactgtagcaaaggaacaggtttcacttccatggtgaacttcatcggtgcagacgaagtggtatctccttcatcagagcggacaatgcgctgaaagcgcagcatttgatcaatcaggttcggaaggacaagacgaagagtagaggaggggttcgcaactacattcgaacacgcccaaattttcatcaaagatgagattgccgaagttgaacggtagagctttggccaccatgtaaagcagagtcatcctctccggcttcagaacagaacggttcacagtgggactccaattgtgacagcagatcttgttgagcagagctagctcaggagataacagccgagaagtgagcatcttccaggagttggctttgccgtttgacagagcaatcgcaacttcatccatggactcaggaacttgaatctcagacacaccacccagcggataggaaggattagggagctgaaacatttggttgatgatagccagggagaattcatacatgtttcgtctgacgaaaactgagtaggcaagattatcaccttcttcaccatcgggaaggtttgcatagaactccatgacaacctcatgcacataagagtcaatttcggtgacagtaggaagcaaaccaccattaaagagaagttgctgagtactcgcagtgttgtttccatccagaggaaggaaacgcatgtcgttgaagcagcgattcccgatgaccttgtagtgcccaagaccttcctcagtcagaaaacagctactgtagggagtctccgatgagaatttgagctctggatacttacgatcatgaacagcaagaaaccgacggttctctcggttacaagacagaaagagaggcggagcaatctcggtgacatcaccatcttgcagatctgaagagtcacggacaagtttttcagattgtccagcagtagaggcagatcggttggatttcctgcttgacagatgtcggagagcaggagcaggcgctttagatctagacttggcagatgcagccgtacactgtgtcttgcgctgagtcggagcagagaccttggacttggttttcttagacatgcagatgcctggttcagtcttgggaatgaacattggagcaaccggaggcggtggagggtcagaaggagtcgcaacggaaggctgaccagcaccagagactccagttaacgaggtcgcttcttgattgatagtgacttgtgttttagagaaagaaaccctttgaattttgaggtttaagtagcagagaaggagaatgagccttctgtgagagctgctaggtttaagaggcacgagcgcatcaagggaaaccctaaaacagcacgaaaaccaagacaggctgcaatacactaaaccagatccgttaaacaacagacagggccttataccaggcccaaaaacaaatcacaacagaaacccagagacgtagtagacaaccaacatatgtacataatatgattgcaacataaggtaggactaaaccatatagaaccacaaatttaaccaaatcaacacttgaaattaacagccactgtcattcaagaactgtgattcaaactgaatgtgagatctcatcaaataatcctctgaatgataaaacgtagcataatcttaagatatagacatatatactatatagcttaaagagactcctactaggcaaggaacccacatgcgaaatgcatccaagcgagaaggacagattccaaagtacagaggtgcataacttacttttagtatggagaaaatagcagctttctggcccagtgagatgaaccatacacactgatcaagacaggatagtctacactcgtcatactctccaaagaagcaacctcatgatgtgtgtgggtaacacgacgagggggattggtagagcctgtaatgaagaacaatgttttgtgggggtactcatagatacatatataccccaagagaagaaagaataccaatccctttcctgccaacacacaacctttattgttgttgttttttctttttgaactttcatttgttcattccttcaggccttttttttttttctttttgcctttttttattattacacataacacacacatcctttttggaagcttcattgaggaagagcatgaagagcagctatttttcttgaaatgaagtaccagaaagacaaacacaatagatatatatatacatatggatgaaaacataaagctaatgcaactctgtacaaaggaacctattgcaatagctttaacaccaagacacattagtattcactcagcccaatcgattttttcannnnnnnnnnnnnnnnnnnnnnnnnnnnttttgtaaatatatcagctaactgtttttcagaggagacatgagagatctcaacaatcttgttttcaacaatcttgttttcaacaagctcacgaatgaaatggtgtctgatgtcaatatgctttgttcgagaatgttgcacaagattctttgatatgttaattgcactcatattatcatagtatacaagcagggtgttagaggtcataccgtaatccagaagcatctgtttcatccatagcaagtgagtacagcagctccctagtgaaatgtactcagcttctgcagtggataaggatacacagctttgtttcttgctgtgccatgaaactaagttgtttcccaaaaagaaacaccctcctgttgtgcttcttcgatcatccaggtttcctgcccaatcagcatcacagaatccaacaagattttgattagtttgtttagagtaaaacagaccaacatcggttgtacctttaacatatttgagaatacgtttcacagcattcagatgagactgctttggatttgcctgataacgtgcacacacacccacactgaaacacagatctggtctacttgttgttaagtacagaaggctcccaatcattccacgatacagcttctcatcaacactcagaccagcttcatctgcagacaatttagcagtagcactcatgggagtttttgaggtcttagctgtctgcatcccaaatctctgaatcaaccctttggcatacgtagactgagagatatgaactccttcatcagtctgtttaatctgtagacccaggaagtagttcatctctccaaccatgctcatctcaaactctttggtcatggattccacaaagtcagagacaagtttctgttttgtgcttccaaacacaatatcatccacataaatttgcacaatgagaatgtccttttcatcaacaagaatgaacaaggtcttgtccacacttccacgtttgaaacctttttctattaggaacaaggtgagacgctcataccaagccctgggtgcttgcttcaacccataaagagcctttttaagcttgtacacatgatctggaaagtttgaatcttcaaagcctttaggttgagatacaaacacttcttcttgaataaccccattcagaaaagcactcttgacatccatctgaaacagtttgattttcagcaagcacgatattccaagaagaagacgaatagattccagcctagctaccggagcaaaagtctcatcaatatcaattccttcaacctgagagtatccctgagcaaccagtcgagctctgttacgtgtcacattgccttcttcatcagttttattcttaaaaatccatttagtaccaaccacattgacatgaaccggtcttggaactaaatcccatacttcatgacgactgaactgatttagttcttcatggcaagcttggtaccagaattcatcttctaaggcagtttcaatgttgttaggctcaatgcttgacataaaacaggtaaacagaatcatatctctgtaattcatcttttatccccctggtaactctgtttccatccaactctccaataacgtcagtttctgagtgacttttggggactgtgaggctagatgatgatgtacgtggttcagtagtctgttcaacatcttttgaagttccagattcaacaagagatgttgaatgtcttgtttcctctacttgctcatcatcatcttgttccaccgtgaagagtcttgtaggatgcttgtcatcaaacacaactttaactctcttcaatctcttgttgtagactctgtacgtcatactgtttgtggcataaccaagaaatatcccttcatcacttcttgcatcaaactttccaagatgatccttatcgttcagaacatagcacacacaaccaaaagtatggaagtagcacagatttggtgacctccccttccatatctcataaggagttgtacttgtccaaggtcttacgtacaccctattcacgatgtagcaagcagtgttgacaacttcagcccagaatcttggtgacacattgttcccatgaatcatagctctagccatttcttgtaaagttctgttctttctctcaacaacaccattctgttgtggtgttctaggtgcagagaattgatgcctgattccttgaattctgcagaatttctcaaattcttcattttgaaactctccaccatgatcacttctgatttgaacaagattccctttcttagtctgaagttgtaaagccagaatcttgaaactttcagctgcctcagatttttcttttagaaatctcacccatgtgaaccgagagtagtcatcaaccagaaccaaaatatacttcttaccactcaagctttctgtctgaactggccccataagatccatgtgcaccaattcaagaacactagtagttccaatatgcgtggccctcttatgttgcactttaacttgtttgccttggctgcaagctttgtagacaacacttgtacaggcttcaagttttggaattcctctgacaacatcagcatgtacaatcttaaccaagctttgagtattcatgtgtccaagccgttgatgccacaaatcaagcttggatgtgattgcaaacaaacagacttcagagtctttccacatgtagcagttgttgcctgaaccaactcctgatagaacattgttgccagcaatatcgagtgcaacacatccagtctttgtaaacgtaacagttaagtcatcatcacacagttgacttatgcttattaaattagcagtgagtccctcaacaaagtacacatttgacagatgcggttgatcatatatctcaatcttcccttttcctttaatgcttccttttccaccatctccaaaagtgaccttcccattgttgatgacagaaaagtcatttagaacagattgaacaccggtcatatgacgagaacacccactgtcaaaataccacgttctgttgtcttaagaaacagctgaagtataagccactttggcttgtggagtgcagtcctccaattctgaaagattccagttgcaaacaagatttgcctcgtcttgcatttctttgttgaccagattgcagacactggcgtaatgcattttctcttcttcatacattctttctaacttgtaattgtacctttcagcttccatatcaccatacagatctttcttcttaatccacacagtgcagaatcttgatggctcaatgtagcactttgctaaattccacagtgttctgattttcgctttgaatgggcagacaaagttgatgactcttccttcttccttgttgatctttcctgtataaccttgataacccaaaccccttggttgagaattagttctgcccattgccaatatcttgtctagactttctgaccctttgttgagcatcctgatctgcttgtgtttgtcattcaactctctttccagaagtttagctctatctctttccctgtgacactcttcctgaaggcagtcaagtttcttttgatagtagtcctgtgaattcccatcaacagtgattccactcagtttctgcttatcctctgagctcacattagcaagttttgcttctagagttagcttttcctttaccagctttagcttgtccttacttagttgcacccagctgtcatataggactctgtattcatccttgggattcaattcctcatcacaatcagaatccgtgtcactcataaacttgcttgagtcagaacttgccataaacgccacgaagtttaacagctcttcaccttcatcatcagattctgaatcactgaagcttatcaaagatttctctttaagtntgctcttgttaggacattcaaacttagtgtgacccacacctttgcattcaagacatttcatttcttttctcttggtgattggacacctcggtttaatgtgaccaaaaccaccacactcatagcattgaatttcctttttcttttctgagtcatcattctttgatttggagaatcttgcacgtgatctctctccatctttaatactccaggatgtactgtcacgattctgacctctttccacacgtttctgtgctttcccaatattccttgctagcagtgccattccatctttaatctcatgaaactgctcagagccttgatctacattaaatgcaatattcttcgaaggattgactttttcttgatcaacttccatttcttcagacttgagcatttccacaagatcaacaaatgatattttattagtgtttcctgcaaccctcataactgttttgtgggcagccaactttggtggcagacaacgtaaaagcttcttaaccaatttttgatctttataggtctttcccatgacctcagcctcattagcaagatcacttatctttgaactgaacttcactattgtttcatctcgttccatcttgagatactcaaactgagtagcaatgtgatccagtcttgttctctttacactcgaagttccctcatgagatttttgtagagtatcccacgcttgtttcgctgacttgcacccttgaatgagtttaaactcatcttcatcaacaccattgaagatacgcattcatagcccttgcattaaactttgattgaagcttctcttctgcagtcctgttcgccttcggtttagtgattttgaacccatcttctgttagatcgaacggaggttcccatccttcctctacagcagtccaagcatcttcaccttgtcctctaatgatttgtgtcatacaaactttccagtatccataccgcttagtatctagcagtaataccttgcctgtaccagtactaacatccgttggttccacaactaggatctaacctgttcagatatactaatctcagattggttacccgctctgatactaattgaagtaaaagaaccctaagtactttgacaagataaagaacacaactccaataaacacactttattagaacaactttcaaactgatcaatcacagataagtttggacagtattatgcaacatcaacaacctgatttgctactgtcagatactaaaactacccagctcacaaacacagcaacagccgtgtgctcactttgttcactcaccaatgaaacccacaagaacaagttctacttaacttttcttctcttccacttttctcaagtaaagtggctaaccctaataagagatcaaaacttctcttatgtagtttctcggaaaagacaggatgctctactttatccagcaggttcaagtgtagctcctcatcattatcttgacactaggcacacgtcctatgtctgacgcatttgtctcctttgtctaaagtgatacgcctttccttcactccaatcaacatgccacgctcgcaaaagcaactgctactttcccgcttcctctgttcctctgttctgctctgcgttgtttcagacacgcttgtagaacttcagacactctgtttcttcaatcaccccctttttctctgagtgtgacacctcaagtaatctgcaaaagagtagagaccacacatacaagccaagcaatattccataccaaacatagaaaccaaaggctcaagtttaagcaactactgccaaaagacataaccatttaaacatgaaacataaataagttcttggttccatacataagaccaatcattaaacacacagaagatccgataagaagccgataagaaacaagatcaaggagttttcacaaacacacaaaaacgaccaggactaagcaattaagtgctgtcatctaactcatcatcatcgtcctcttcctccacattctcatctcccacatcatccggaacagagtacgacacatcagaatactctccccctgcttgagtgcacactcacataaaagaccattctcaaaagataacagagtgtaagttgaatgagagaggcttacctgccagacgcagctgcatcgttgtgagagatgcaatgaggttctccaaagccgcatccaaggtagggctgtcagtcggtagcacatgcactggtttcacttccatggtgaacttctcagtgtagatgataagtaggaggcctacttatatgctgaagtgaggttcagttcaattccccttaaacactaacatgtcgatgcagctatagggggtgtcaatccagtccactgttactactagcaatcaagataacaactaggtcaagccacattataatgattgtgggtttctagtaacaatcctaggtcaggattaaaacaggtaaaaatgagaacttaagagccctactcgatcattgggtcgagtagaaccaacatgtgacaaatttaagtaactaaaatgcaaacaacaggggatacaaataacaggtaaatgaaagtgcaatcaacagggtatacaaataaatctaatagaagttctaaggatggattctttgatatgggcaactctagggttcatcaggtggctaacaggtgaaaggtagatacccttgacgatagattcaaaaactggatcaatccaccgtcgtgacaaagatccccataactctaccacttcctaatctcaactgccgttgatgaaacatagaagagcagggtttaagtaacaatctaccaaagccaataagtagacaagccaatgtcatagtcgagtctacaaatctctggaattcgtagatcagacatccatttgaacgtcttttggacgctagacgtcaatgatcgaatctcaacattagccaccgaaaatcgcataggggccaagcgaatccagaagggttctaaccgaatcttaaccacctaactaacctagagattaccctaatctactccatcctcaagaaccctaatcattactcaaacaacataactaagaacacaaacccagaaattattgaaatcataccaaaatgtagatctaaacaagctaaacaactttacttaaagaactaaatgcaaaaacgaaatagattaagagtaattaagttttgaagatttaagaacacaaagaaaaactaaaggataaaagctagctcctttggaaaaatcccaaagtgatctatttatactaaaatcttagaaaccctagattcactagaagacaagagacttgaggcggtttgggcgagtgctcgatcttggggatcgagtaaagagggtgctgcaaagtctacgccttagtgtctatgcttcgagtgatcaattggtcgagtagatgcttcttcctttcctatctgtatgctcaactgtctgattgagtggggaatgaggaggatccgaagacgctttgaatgatcaacaagtcttgtagagtaggtcgcccttgatcgagtaaaggggtcaagtagaggatcgagtaggaggggcaagtagatcgatctgttgcttcctctaaggccgccttgatcgagtagaatctgctgcctcctctgtggctgcctggatcgagtgaatggatcgagtagaatgctctgctgcttccctccttgttggatatagtagagtgtcgagtagagcccttttgagctccttctgaccctgaaaacacaccaaaacatgcaatgcgtatgcgagatgatcctaaatgcctaggtgtacaaaataagctaaaatagtgcaaaatgatatgatacaatgagcaaatacaaagctaaatgatgataaatacataccaaaaatgagtaaaatacagtgttatcaatcttctaacaaggaaacactacttaggcttttaagatgtggttgcggtttaagttcttatactcaatcatacacatgacatcaagtcatatttgactccaaaacactaaccaagcttcttcatgcttctcaaacctttgatggtgtagccgtaaaccatatgagtctttgtctttgtatcttctaacaaggatacaatacttgggcttttaagatcgggttgcggttctatttcttatacccaatgctacacatgacatcaagtcatatttaactccaatacactaaccaagtttcttcttgcatctcaaacaaaactttgatggtgtagttgaagtctgtatgagtctttggttttgtatcttctaacaaggaaacactacttagacttttaagatccgtttgcggttctagttcttatactcaatcatacacatgacataaagtcatatttgtctccaaaacactaaccgagcttcttctcgcttctcgaagctttgatggtgtagccgaagttcgtttgagtctttggctttgtatcttttaacaaggaaacactacttacgcttttggtaactggttatgattctaggtcttatactcaatcatacacatgtcatataatcatatctgactctaaaacactaaccaagcttcttattgcttctaaaatcattgatggtgtatccgaagtccgtatgagtctttgtgttaaacccgcctgccttgtaggccaagacggcatgtttttcatcagatcttgccaaaacattttctttaaacttcacacacgaacaaaatattgcacacaactcttcacgcttactaacctgaggataaagggaaatagggggtgagtaaagaatactcagtgaggggaattaactctgcccactgaaacatagaatactttctaaagctatacaaccatcatcataacatataaacttagacacacgcaataaacctaacatgctttaacttctaataccacatttataataatcatcttatatatatatatatataaacatacacatcgttaggtcgagtcatcctcgtgacgactagaacctcatgagtggagactggccctcgtggctcagacactcccattccgggctcgtcagccgttcttgaccagctgttaacccgtcggtccatcactgtccacatcactagggagaccacggcccatagctcgattctccccagtcttacatacaaacatacataatcatcatatatacatacttatacttaacattctcatacataatatatcatagtcagacatcatcaccatacatgtcaatcaataatcatcaaatcatatcatcacatcatcttatcctatgcaatcagatctaagccttcatactatgcgccaagaagcataacaaaagaaaatgctaatatgtttcgcaaataccaccctcaccttagcctagttgaagatgaagaacatctttattctcctttctctccttttagaccaactcactataagagctttaactgcatactcttgagctccaccttgcttctccatcaaccaaaaccttactccatgagtcctaaaggcttctgcaaagcttcagctccaaccgaacccgttttccagtcaaacaataaaatcatgtcatggtttactccatacaaaactgtctcagtaacatactcataagtcgagaactaaccgttaaaaacgtaatcctaccgttaaatatgtagccagtagtatcatgaataattccacgaagtgtcatcccgatcagacctcacatgaatctcccacgttcttcgaagatgttgcatcagaactgatatctaggtttctgcaacttaatatgattctgggcaacctttcaaagtcaaatacggatggagcttaaatccgatggacaagatgtcagctactttgagttccttgaagcaagagctttgcatagacatcttgattgtgatctaattatttctacttcatcgggaaaacgtgataacactgtattttactcattttaggcatgtatttatcatcatttaacttagtgatcactcattgtatcatatgattttgcatcacatttagctcattttgcatacttaggcaattaggatcatcttgcattcatattgaattttttggtgtgtttttaggtgtagaaggagcttacaaggaaatctactcgaccctctactatcaaacaaggagggaagcagcagagccatctactcgaccagtttactcgatcaaggcagccacagaggaggcagcagattctactcgaccccctactcgatcctatactcgaccagtttactggatcaaaggcaacctactctacaagacttgttgatcattcaaagcgtcttctgatcctcctcattccccactcaaccagactactcgaccaatttatcacttggagcatggaggcaaaggcgcagactttacaacaccctctttactctatctcgaagattgagcattcatccaaaccgcctcgagtctcttgtcttctagtgaatctagggttttcaacattttagtataaacaggtcactttgggatttgtccaaaggaccaagcttttatctcttagtttttctttgtgttcttgaatcttaaaaccttaattactcttaatctattttgtttttgcatttagttctttgagcaaagttgtttatcttgtttagatctacattttgatatgatttcagtaatttttgggtttgtgttcctagttatgttgcttgagtagtgattagggttcttgaggatgtattagattagggttcttgaggatgtattagattagggtaatctctaggttagtcaggttgttaagattaggttagatcccttatgaatttgttggcccctatgtggttttcgctagctaatgatctagtgtgggagtctatgctgcctcctctatggcggcctggatcgagtgaatgggtcgagtagaatgctctgctgcttccctcctagttggatagagtagagggtcgagtagaatcgttttaagctccttctgcaccagaaaacacaccaaaacatgcaatgtgtatgcaagatgatcctaaatgcctaagtgtgcaaaataagctaaaatggtgcaaaatgatatgatccaatgagcaaatgcaaagctaaatgatgataaatatacacctaaaatgagtaaaatacagtgctatcaagtttgcaaagaagattatctgcttgaaaaaccatctattttgattgaggacactatgtcttcgaagacttctagatgatctagtggtgattcattagaagcacctcgaaactttcctcgtgaaacaagattataatatgcagggtgaatagcaaagtcttctcttacaaaaggaggtagatggatcgctgatcgattggagtagaaaagatcaactctattaagtcgcctatggta

SEQ ID NO: 2172 - DNA, 2768 bp, Arabidopsis thaliana landsberg
aataacataaattaagataataagatataattgggaaacatgcatctatatcaaacgtgaattagctatgcctgtctccttagagaaatatcaaccgccaaaaagtaaatcagtggtagctattaaccccgtcaaaatgtcaaaaaatgaaaaggaaaaaaaacttaataatgttagccaaaggaaaactaaagtaaagaacaaagacaaaagggacattagccaactagtttaatcatgaagatcccgattcatcaaagttaggagtgttaagtaattacatttacaaataaagacaaaatagtgatttagtcaacaagaaattctaaaatacaaaagactcatgcctcgggcccttaaataagatcaagtccattttttgggtgggtaactaatacgtacgatcaacctttctatagatacacgcatatataattgttgtttactaaagctgaacaaatttaagtcgtattatgttaagaaaattctccttttttctagacacagatgtttgggatgggattgggctttcttttctctctcttttttttttttttctttttttcctttttttgattgaacagatttttgtttttgtttttattttttgtcctacaaacgcatttcaataatgatttttctttgacatctaatattgtctgaaaactataaattgttttctttttgatatttttacgtattgtttccgatgcatatcgtttttgataaccatattttatggagcgaacccaaattaatggttgatgatataggtgattggcaaagtgaacacaaaaacatgtaaagactttgaaacaaattgaatactttaaatttaaattcacatttgagtgatttgagagagttaaaaatctctaagaactattccaagaaaactcacattgccttcattttgtacgtttgtttctctaaatccaataagtatgccttttttataaagagacaaaaatacttcacagccaagattttaaagtacttgcttggttcataaagaagcatttgctcaccaaaaacaattaaatacgcaaatccttacaacatgcataactcatttttttttttttttttgtcaatcgcacatctcatcttcaaggattagctagtaatataggtaagagactttatcttgagaaattggttgtgtattaattggctcgtcgataccgaagatttgatcaaatctagctatgagaattggagaagtaaaatcttactctcgtgacctgcttattatgaatatgcatgagaagtcgtcaacgattggcaatacaaggtggaatagactcgtaaattttgaaataaatataattcacaagttaaatttgagatcatgcgatggcaaaaattaggatatgaaaattggtaatcagttttgaagtaatgcgagtgttattaagagtttaaggtatgtgggttggtcgtcgattacaaatatgaaatatctttaaatatttttcaaactttgaatagaccatatacttatatactgtacgggcaaagaattgaatgtaaaaatgggcacggccgccaaaacaaatgaatcttccatcctagatgcacacgcttagaaatatttcgaaagaaaccgtaactgactctgaatcccggtaatcccgcgggatcacctccacctcctaatcctccaccccctggttttccaaatcttcccccaaatctcctacgcccgaacctacgtcgcaggctacataagtgtgtacaaaggttaattataaattgaaatcaaattgtaacgcttcttattaatcacgttggcagttgttctaatgatatatcatgtttcaaaaaaaggtaaacatgggttgtgatagaatagacaactcaaaagttagaagacgaaacattaaaagattaatactagaacattaatgtgtacagtgtacgatactcttaaaaataaatgaggtagtatgtcaaaagaatcagagatagacaaaagagaattaaacaagtttttttataaaacacaaaaatctttagtttttaaaaatttcacttaatgaagcacctgaggagagaagcggcggccatcgttccgagtgcgccaccagcggtgagtcctgtggttatgacagcagtggctatcgtggctggtacgagaatcggactgaatatgataaaaagcggtgtggttatggttaatgccgtggctgaacctgccagtgttagacccgctaacactaagaagactatagagaccacggcagcaataaccacctgaaaaacctccgacactaggaggatgagaaaagaaaacattttgggatagatgttaaatttcaatgactgagatttgttttgatggagttctttggctcatactttatcattaaatggttgttaggggtctatacatgcaaaacattgggagtaagtagagatttacgtcacgtcacctttgcttttttgtttttgtttttcggttgtcatgtttttggaccatcttttctttcttgtaaaaagctcaaagattaattgtcgtgttgcaattcacgtttacggttgaaacaacctaaaataggtgcttcgaaagaaatccaaggaggcaaaattttgtggaattttgaatactagtttgcttgattttatcgaaactctcatgcttgatgaaattgcaatatgcctgtttaattttcaaatctcctaaattaaatttgtaagagaatcttgtgaggttggcccagtgggagagtttagataatatacaaaaataaatatcgtcgacatga

SEQ ID NO: 2173 - DNA, 12269 bp, Arabidopsis thaliana landsberg
  unsure (1)..(12269): unsure at all n locations
gtaacgtaaaaaggtttttgattaaaagatagttgagtctacaaagaggaaattcaggagtttaaatagataagaagagaaggggaagaggtagtcttgggacaagctccatgatgactcggaaaggaaaaatatttaaatgagagtttgaacaagaatgagccttagccttccaaattcggggtcgtcttaatggtcttgggcgggattgataatgggggatttttaagtgtgagtcgagcctcattagaaacctactaaggaaaacccattggggcaaaaccttagaagggaaaaagagtacccaagtaacacctagccaattaccaattgtcttgagctgctattgagttccaaacgcttagtatgactttgtttggatgcttgcccaagtggttaagaagtccggtaacagcttggttgagaagtctagtcttcgaacgagtcataggactggttggttccgtacaaagcttcctccgctgcaagctgctcctcagctacaagctgctcctcggctacaagctgctccattggttcaagttccaagtcttgtctcacaatagcatatcatgccctcaggtggctaacaggcgaaaggcaaataccctagatgatagattcaaaaccgggtcaatccactctcgtgacaaagacccccataactctaccacttcctaatctcaactctcgttgatgaaacatagcagagcaggctttaaacattaatctattaaagtcaataagcaatctaaacatccaaggtcttggggttgaatctacaaatctctgaaattcgtagatcagacatccatttgaacgtcttttggatattggacgtctatgatcgaatctccacattancgaacgaaaaccacataggggccaagcgaatccaaaagggtactaacctaaacactaaccacctaactaacttagagattaccctaatctaatccatcctcaagaaccctaatcactactcaagcaacattctcaagaacacaaacccataaattactgaaatcatatcaaaatgtagatctaaacaagctaaacaactttacttaaacaatcaaatgcaaaaaagaaatagattaagagtaattaaggttttaagattcataaacacaaagaaaaattgaaagataaagcatagatcctttggacaaaccccaaagtgatctatttatagtaaaatgttgaaaccctagattcactagaagacaagagacttgaggcggtttgggcgaatactcgatcttggggatcgagtaaagagggtgctgcaaagtctacgtctttgtgtctatgctccgagtgatcaattggtcgagtagatgcttcttcctctcctatctgtatgctcagatgtctggttgagtggggaatgaggaggatccgaagacgctttgatagctcaacaagtcttgtagtttggtcacccttggtcgagtaaacgggtcgagtagaggatcgagtaggaggggcgagtatatcaatctgctgcttcatctaaggctgccttgatcgagtaagagggtcaagtaaactgcatcctcctctttagctgcctcgatcgagtagagaggtcgagtaaactgatgcctcttctctagctgcctggatcgagtgaatggatcgagtagagtcctttttagctccttctgcacctgaaaacacaccaaaacatgcaatatgtatgcaagatgatcctaaatgcctaagggtgcaaaataagctaaatgtgatgcaaaatgatatgatacaatgagtgatcaaaaagctaaatgatgataaatacacacctaaaatgagtaaaataaagtgttatcaaatcccccaaacttatatcttgcttgccctcaagcaaacaaaaaatcttaagttgaaggagatgtttgaaggtggggattcaaaaaccgaagcatgcatatagaatgggtaagctcactgtccaggtagctaattctaggttgcaagatgatagacccttaaaaaacaactttagccatactcgtcacaatgcaacctaacaacctgccttaatctattcaagcattcacattaaacagttccctttaacattcattaagcacgaacagtggatcaatcaatgcaatggttatgaactcacttggtttcaggcttagggtaagagacaaaaatggtccctctaatgatttggtcgaataacaagggactctcagagaaaagattgagcttcagcagaatgctaaaggtaaaagccaacagacacatacaagaacagactcccatctattatgaaagctcagaagatgatcccactcccttagatgtcctaactctacccttattctcattctttctctcttttggttcaagttctcaagggtgcttctataaaatcattcaaccgtctagcgggtttggttttaaacaatggtaaatttaaggcttttcttctaaacttatagcatagaggacgttttacccttgtttttgaatcacaatgcctaactttctttgaattccaaaccctttactagactaacacttttttgtattccccttaagaactctaaactattactctctttttttttcttttttttttcattcccattatatttcccattaattccatacacaatcccaatcccaaatacaagtctccacctagtcctacctaacccaaaaacgtgggtaggtctacatgaaagattactcttgtcggctcatacctaacacgttataccaagctcaatcggaaaaagacctcacaatcacacacaaattatctttcgcttgaaataaggttaggcgcagagtatgggaaacaactctaataagtgagagtcagctacttggattaacaagagtgatcaaaatgattaagaaaatccaagtatgtatatggtatccatgagttcaaatttgatgaagacatgataattaaagatcaaattcatgttcaaattgatagggaatggtatcagatcatgacagtgtggtcgagtagagcaatctaggcatggttcagttttacttcaatttcattgactacgcaacagacaactagcaacgagggcactgagtttatccggtgaaccaaaatgcttacaaggctatctcatcattatcccctatgcatatgcagctaaatgaaacactctagactcgatcctaaatgtaatgcaactaaatgaacacttttttttttctttttttgaaatcattttctggaatgttttaaaattttttttggttttctatgccttagatgaatgcagactcaaaaatatacacaatgcaacacacactcctgagccttcccccgaacttaaatcacacagtccactgtgcgaataaactttgaagagagtacccaggacaaatccaatcacagaaacaaaaaaatgaagaaacaaatcacaacagatgatataatacaatggtgaaatgaggcgcttacctcagtcgaagaatgaaacgtagttgctcgtcaatggctgcctgtgattgctcccaagccatagacgaaccaccttgttctttatcagctccagcaggtgggtactcgacctcatcaactctatggcggccagcaccgctctgaggaaactcgacctctctccttctgctgcggccagcaccgcggtcatgtaaactacgagactgcaaaagtcgtctgctcgtactgctagatcgagtgggtgtggttctcctcttcctccaagattcacgaggctcgaatgatgaatgcctcgcatggacatgtggaatctcctgctcactaggctcaggccaagtccgctcatcatatctcctcgaaggcatgtcctgagggagctgtccctgcggaatagctgtagtggaagaggagcagctgagcttgtccttaagaaacttgatagccctgaagaacttggcgagttacttatcctgtttcttgcaccacttctataacttgctgttgttcttgtgagcttcactaaaactcttgctctccctcgctggaggtatatggtatatgctcactgaaatgatacattctcgtgtcaaactctacttcatctgtttcatccgtctcatcaacctcttctgttgtagctccttccgtgtgagtgatctccttagttggcaaactgccctcgaaataaagatcttcaagcgcaggcttgaagaatcaatgttccttccctcgagaatcctagtagcatcaatgcaggggagaagaatgttggcgattctaatcgatgaatgctcgaacctgtagcggtggaagtcgccaaccatgtcatactccaagaactcacatcagcgcaaatgatataagtccatcattctcggtgctaaccctggttccttgagcagtactccacaagcttccagaattggtgtcacaacgccacctacgcatagtgctcctctcacttttttcttgccgtttgtcaatgcccacttcctgtatccacacaggtggatcaacagaggaattactggtggcgcgttgttgagatcgcctctcaggacattctttccctttgtacggcggagaatccctggaagcgcgaaatctatcatcttcatgtccgtgttagacatggtgcctgtagactccctggggtaaaaaatgttggcaaccgannnnnnnnnnnnnnnnnnnnnnnnnnnnnnnnnnnnnnnnnnnnnnnnnnnnnnnnnnnnnnnnnnnnnattgttcccaatagtagcccacaaatccttaagctcttccctgtcaaacctgggtttggttccctttccactagggaaaccaaacagttcttccaacttcttgatcgaaagctgataccgctattcatccactaagaacgtcaagaaccctaaccccatggtatccagctcaaagtccgtgagaccctcatacatctctacttacagtgtggaaagaaactcaattgtctcctccttatacgtaaggttaagacatgagtgtctccagataacacttctcgaacaaatgatgcacgtcctccagtaacccaactcggctaaagtctcatagcagggatacctcgttccccagaagtcattcatctcaaagaatctgatatactcctccactgtaacctcgttgggtttgttcagcagcttcttctccttgcgccatgactctggctcatactcagtttcgatgtcctcatcaatcagctcatatctactcgacatcgccctctttcctctagcggtttcagctcttctttgattacgtcgagcagcggagcgtttaaattcatccctgaagctctcataagtatgttgctctctcggtctagtggatcaggactccgcttcatccacattataatcagggtccatagaggattctccactgtagttactcatgatgaaacctgaaaacagacgaaaatcaaagataaacattaatacgttagtcccaacaaaaccaaaacccaaaccaacagagtaaaccggtcgagtgaaccaatttttttttttttttttttcggtttggtgaacttgcggtcgagtgactccttggttgtgtgaatggagtgcgcttcgcgatcgagtgaccttgagaggcgagagatggtgaagcggtttaaaagaggtcgagtgactttcggagatgatcgctagttgctttgtaatcgagtatgtgtggaggttatgattccttggtcaaacggtgatgagcgagagccaatgagaggtcgagtgaaattggaggagcggtgattcgagtgattgtgctggtggagaggcggaggtgctcttgccgtgaagtcgagtgagtaacggtggtcgagtgaatggagtaaagcggtgaagttgatgatgatttgaaatcgagtacttggtgataatcggagtgagcgatgatgagagagatgcagtgaatcgagtgaagtggctatgaatgagaggtagtgaagtgggactgtggtcgagtgaagtatgggctagagagatgaagcggccaagtggtgcggcttggacggaggagaaggtggtgcagcggtcgagtgcgtttgttgaatcgagtgactcggttatgaagatggtggtgaagagatcgagtaaagtttgtgagaatgacaatcgtgatgagaactcgagtgatgttgaactcgcgccaagaagagaagtcggtgagatagctttgaaaaagaagtgagttgcggcggtcgagtgatggtcttggggtagaggtcgagtgattgtgacgaacacttgaggacttgaattgcaatgagcgactatgggagatgagagagttgcaaaaagtttggtgtttggagaaagatgaggtcgagtatatgaagagggtggtgaggaggtcgagtggttgggagtatgagagttgttttgttggtgatgatgaatgaggatgggtcgagtttaataggtgaggtggagataacaaagtcgagtaagtgataagtgaggagggtgatgtcgccgaggtcgagtggagtgtagagatgggataaggtgagggggtcgagtgggtgtgagaagaaggagttggatttcttgtctgttggttaggagcgtgggagacatagggtgcagcagtgggtccctcgcttgtctctttgttctgaatcattactctttcttcactaggaaagtttcagaaaatcctaaaatttgctctaaacttgatgaactctctataagactctgtagctcctgttggtcgagtaaaatgatgatttaaaagttttttaggtttttaaacatcactcatactcgatctctaggccatcagtagagtaaaagttttgaatttttactctaccttcacgttattcctttcttcctgagaaccacaaacacaaccaaaacaaatcaaaaataacaagaaagtaaaaatttatttacaaaaaatagtcatgggacttcctcccaagtgagcttgtttaaagtctctagtttgactcctcacactcattaggcttaaggagggtgatatagaggaattgaaatctcctcttcttcctcaatggatacagcaatgtactcaacatgctctcttgacaaatctgtagttgagtacttaatatcccttttcttgtaagtttccttttgatcatctcgatagtcgtcttctccttgagtactcaccgtgtgtgttaactctcttatagctttgtcctgccatatagacttctccttgagtactaacctatcatttgattgcaaaatgcgtgactggagctgtttggtggaacatgacttctctggacaagttgaaaggttactcgagttgacggtcgagcatagtggtcgagtatgagttgagatttccttgtttgatgccctaacctctgttttcgatccaaagaattcttttcctactactgccttgtgtgagtctaatgacttatcatagctcaaagtctcactagggagatgtctagcttcaccactcctagtcaaagcagtttcaacctgatctttagaagcaggctcttctaatagttccttagctagctgacccttttcatcaactaagaaggtatggccgtctattgttggtttcttcatatcatctctgatgtcaaacttcattttaaaatcctttcccaaattaagatatatctttccttgcttaacatcgatgcttgctccaactgtggccaagaagggtcttcccaagatcagaggatctttaggttcttcatccatctcgagcacaataaagtctgtaggcacttctactccattcatcttgataggcagatcttcgagaatgccatagggttttcttaaggtcctatcagcaaggatcaaggataggttggattgcttatattggacgaatcccagcttccttacgatggtgagtggcattaagctgactgaggcccctaaatcacatagacaattgctgaaagctaattgtctaatagagcatggtagagagaaagatcctggatcttccaacttttcttgaacaatcttcttttgggtgatttcactgcactcttgaattgacgccactgttccttgaacttctttgatcctctctgtaatcatgtccttcacacgtttgtgtgagtccggtattagcgcaagacagtctactagaggcattgtgatttcaaggtccttcaattttttttccaagagagcttcatacttctttatcagttgcttcttaaatctccctggaaatggtaatggaggcttgtagggtggagggacaaagactttatccttggttttagcagatgcaagctttttaactgaagaaagtactacttgagcttgggatcgagtactgtgatcgagtatgggctcctctaatgctattttagcttgaatttcattctgaacaaaatcctccccttcttgaacttcactgtccctagtgatagaggtagaggcatgtcgagttggcagctctcgatcatggcagatattgatggcgtgagcattggcgtactcctttggattctgtattgacttccctggaagtcctgtgacttttggagctgaagaggatgcagaatgtccctctaagtatcggactttggtattcagtgtttccactttgacattcaggtcattgtagctgcagtccagcttgttatgtaactcagataattcttagcaatttccatggagctagatgcttgtccctgtagcagctgttgtaccatttgtttcatttcagcatcaagagcagcaggaccttggttttgctgagttgcaaatccaggtggtggttgcggctggtagttcccctgaaattgctgcttaggaacaaaaccttcattgtaaggaacaaaaggtttgttctgaccttgttgttgctgtggaagatacacctgatcctgaggattagcaacgttggtgctgcggtaggagagattggggttgttggttttgaagttgttgtatcctttgtagccgctttggttgttgttgatgtagctgacttcttccaactggttaccctccccatcttggacttgaaactgctcgtcatcaacaaggaagtgcacatgcttctgctggctaagaagaatcctgtccagcttgtcattcagcgctttgatctccttcctgtgtttgtcatcagagtcagctgtgcctctgacggtcctatcgcagtcctcgttgtaattaccatctgattgggcaaggttctcaaccaattcccagccttcttcaacatctttgttctggaaatttctatttctggcggtatccagaagcattctgatgcgtggtaggactcctctgtaaagagtgctgagcagagaggctttcaccagtattctgtgagaaaccagaaatctcatttctgagtcttgcagttctggcattggagaagaactttaatagaaaaaccttcttacaatcatcccaggtggtgattgaatcatggggcagattcttctcccagatgtgtgctttgtcgcccaaggagaatggaaacaaacggagcttgaatccgtcttcactcacaccattgatcttcgttaggttgcagagcctatcgaattcatcaaggtggtcgagtggatcctccattggcagaccatggaatttgttcccctgaatcatcgagatgagaccactcttaatctcgaagttgttgttctgaatagcaggaggtacaattcccttcctctgacggtgatcacgtggtgcatctccagcaccaatgttagcagggccattttgttgattctgttcgtcagccatttcgagtggttgctgaggtacaaggttgactgtggttctcctttttctgagttcgcgagctatgcggttgatgttgtcgttgaaaaggaggttctgattgcctgttgatcgagtttgcatatagaagaggtgtacctggatcaagaggacaacaagaaaaacacacagttagtaaccgaattgaaaattgaaaaagaacttgatctaagcaagtctgaaatctcaaatgtaacaaacaaacacccaattggcaacggtgccaaattgataataggttttttaagtcaattatcctaaaacatcaatcatatcgttgtagtattttaggttgtcaatccaaatgggtgtgatgctaacaatcaagatgtgatcagaagttactaagtcaagccaagcataacagatttagatgtgttctagcagtcctaagtgaacatgcagaaaacagaaaatcaaaaagaaacagcaaaacactcgaccaacacagctctttgcatagcactgggtgaggtcgagtgacaggtcgagtaacagacagaaaatgaaacagggatactcgactgcacagtctgttgccagaaaactgggtggtcgagtatcaggtcgagtaaaagtaaagaattgcagaaactaagcaacggatgacgggatgcgctacacatcagtagagtaaacaataaaatcaatcagataaagaattcctaaagatgggataattgagtagtttcgtttcctcagtttacaggtgattgacatgctcaataaattaaccctagacaacaagttcattaaccaaatctaagtgccaccgcaacagagactctcaagctaacctagtcccagactcaatcaccattgacgagagccaacctaacaggcattacgaatcaacaagtaaaagccaatacgctccctgcaaccaataccttggtacagggtcacgaatctctggaattagtggttcagacatttcatcgaacaccttttgggcgcggaaatgtttgggctcaaattccagttgatcagaaagcaataggcattaagaacaactaatccagaagggatctatcaatcaaactcaaccacctagcatactgagaattctacactactctaacccatcctcagaaacctattcactactcagacatcatagcagaaagcataaacgttgaatggaatggagacatgataacaacagagtaatagcaagatggtaacaggatgaacaacagtaaaacgaaattaagaacaaatactgaatactgaatactgaataaataaagagaaatccagattacaaaaggtttagaacacagtgtctgcggaataaaactagaaaaaaaaacttgtttgcgaaaatgtgaagtacatgctacttatagcaaaatattttgaaaccctaatacttaaaacgacgcagtattgggacggattaagaactgtactcgacccaggtggtcgagtaggaggtcaagtgaatagctggagtcttcttttcttccttgtgctcgacggtctggttgagtgcagaatgaaaaagactctgaagctcttaatcgagtatgtagtcgagtggtggtgatggtgatactcgatttcaaggtagagtggtgagatcgagtggttgtctggtaatggtggtgaagacactcgacctcagggtcgagtgaggtgattgagtgatggtcaggtgatggagatgaagacattcgacctcgtggtcgagtggtgaggtgaagtggtgatgtcctctactcgaccagggggtcgagtggtctgctgaggttgtgaagcgtctactcgacctgggggtagagtggttttgcatgatcaggtccgcttcttccaattagctcgtcaacagctctgaatcacctgaaaacaacacaaatatgcaacatgcatgcaaaactatcctaaacatgcaaagtgatgacaaatgatgagaaatggtataaaacagtgatgatatgaagctaaagtgatgacaaatggattctcaaaacatgcaaaatacacacttatcagccggctcttgagttcagcaataggtcattttccccaatagaagggccaaaccgttctattgttgattcaaaagcagctcgccccatgggtagctcataaagaattccaaatcatgaagcatctcaagaaatgagctacttatccgatgttgttttctgttgctgcaaacaacaaacccatcaaccaggactattaatgcgagactcaacttcttccatgttgagaatcgctttcgaggcttagcattgacatctccccttagcatgtcaataacatccatgactgtcactatacacttctccccaaataggcgattccaaacagatagacatgcagggtcttggtgagcttctacctcagactctgttggaagcttatcacaattcaagccggttctgatttggaattcttgcagagagaatgagggtggaaaccccccatatacagtccaccattcacgctttcattgtgtcaaaagttgtctaacaagaaatccatgaataaattttgcagaatgagaacac

SEQ ID NO: 2174 - DNA, 3790 bp, Arabidopsis thaliana landsberg
tctacttcttatcaactttgaaataaataaattgttcccctttcatttggaacgaaagcttcatcacagccatagatctataatgtataggatattttaatactctctaggatgcttcgcaagcagaaacatatctgaaattcaaaattatacaatcataaagaacacaaatatatgtattttatagtaataatactattaacgttttcattaaacatacctgcaattgaaatagtcttcgacttcattcttcttctttgtctctgatccatctgtatcagcattgtccttctgtttaccattttctttatttttcgaatttaaagacgattcaacaacaacagtaacacgatctggtcctttatgaatatacttgaatatgtatttcacagaacctgattggttacaccactccacgttgatgtgagctctgtatctcagtgatagggatctattataaggaatgacataacggttatcgcatttaaagtctttcttctcaacaaagtcatctgttcttcgccttctgtatattggaaatccttctttatcaataatgttcttttaaacatgatctttcggataaaactttgaacactttccgttttccatacatggacatttcgggttcaccacaccacaaggaccatgaaccatcgattcctttatcacttcaaatagctcagggtctttcaatttgtcaggaatctctgctgatataactttatcaatgtgctctgctttggtcaacttacactttgaatccagccaaattagtatatgagcatgagggagtcttcttttttgaaactctatagtatacatagctgcaattacacagaaaacatagtaattattataggtatcaaaaaatatagacataatatttcagagtaaataaaacgaattaaaatctgcttacatgtacttgtctttccaaataggttttttttagttcaatcaagcttcattttgaagatcttgcaaataatcccaggtctatcatcaactctcaagtttcgctcaccacaaaacctaatcacctctggccactttggattgcacgtgaatgtgataaaataatttggaaacccaaaatgtttacacaatgtcatcacatccaaatacatgttcctcatatatctaggagcgcctgtaaaagtagctcgcaaataacatgctaatccttgttctttcaaatcactatttccttcctctgaagccttttgcacagaattgtaattatctaccctcatactactctagttaagtttgatgtaaccaagccggttagattctattgctctataagaatccaccaagaattgctgccacagccttctcgacctaattaaaatatgcttctcatgttttctttcgtgaattctgaaagcaaaccatggccttatagatatgcacttgttcttgggttttttaccagactatgtttgatgtttctcaatgcctgttatgaatccatcttcaccataagggaacaaaagaggatattgtaaaggaagataacacgaaaggatttcactaattctttgtagtttccttgatttatcttgcacaactatatctctgcttggcatatctatagtgaaatctcctggaatcaacatggctacctctgatgatgttggtacattatacaccctgccatcattttcccgtttactaactattctcatatgcaaagtctcttctggattaacaatgaacatgtccctagcagtccgtaagtgtgatacataagggttgatactattcagcaatttggtcacaacatcaataattttctttctcaactctttgtttttatacttgttagcattaacaccattactattaagaatcaaataagtcaagtttagaacagtaaccaatattaaaaaaatatcacctgagtacttccgatttgttatcaacttcattctttgtgtctacaatatatgattgcatgaactttggaggtatatcattgtctggtttcaaactccctatcctatggtaattctctccgtgagtctggaacatttggaggaccatcactggctctcacactattttctgtatcaccaccaagtgatgtaaaagaaaatatcatattgtaagctagccctgaaacaacccgacccgttttttttttgttttttaaatcataattaaatattcccataaatacttaattaaatcaaccaataaaacaacgctaactcgcaagttaaaaatagggaatgtgacacgtttaggcacttttagagaattttattccttttgaggcacttgtcagggatgaggcacttttccaactttttcattaaacttttgaccaatttgcccctgaaaattaaaaaattataattaaaaaaaaagtttcatctctccattccttttttttccttcttcttcgtcgcttcttcttttctctctctctctctcttctcattatgactttggtttctttccttgcaaaatcaaacatttaagagtttatcaaaatcaaacatttgagagtttatggaaaactcaagttggcaaattccagtgttaaatttcatatccattcgatcgccttgtttggtacaatttgattctttcttgataaattgatgtttcattgaacgtctaaccttaaaagcatattcttttgcttatgagaatcacttatttccacatggttacgttttcgtggacacgttatcatggagacaaactatccaagcttcgaacaccaattatttctgtagaacccaataatcttagatgtctccaaaacccaagaacaatctgtagacattgctttcaaatagcaacacacaaaaccgaactagttaatgatagtttagtccatgataaattgtccacttagacttgaccatatggagtaatggtgaaacatgacatagaagcatgacaaacactggaacacaaatggttcatgtgtagagctttcatcaattgtttttttaatgaaaagagtgtcattggtgatgcaagaatcacaagttggtcaaaacaaatcatgtgttttttttgcttattcaacacattagttcacttgtatatagacactcaaaatataacataaatgatcacaaattcaagggaagaacgtgtccacaagtcgttgtccacataggtatgttcatttaactctgttaagatgatcttcttgattggattttgagataaaacggtaaagaagaacgtgtccagaaagtgttgtccacaaaggtctgttcatttaactctgttaagacgatcttctcaatttgattttgaagttttaaaatacaagtccaagtttgattttatatacaaaacatctcaaaatataacataaatgatcacaaattcaagggaagaacgtgtcgagaagttgttgtccacataggtctgttcatttaactctgttaagatgatcttctcgattggattttgagataaaaaggtaaagaagaacgtgtccagaaatcgttgtccagaaattgttgtccactgaggtctgttcatttaactgtgttaagataatcttctcgattttgcaccaaatttttaacatctatatcttaaacacaaatgtagaaatcaatctaacatatgtgaatgaaaattaatctcagatctaagctaaaacctctatcaatttcacataaccagaactagcaacaaggttcttcactaagtgaatcaaccatcaaaaaacttatcccccgtttatgatgaacacataaaaaaaccaaattttctgaaaagatacaacccaaatataatcatgaatcaa

SEQ ID NO: 2175 - DNA, 7097 bp, Arabidopsis thaliana landsberg
gccctgtcccacttgaatccatccctgacaccaatctttcttgctgattctatatcctttgatcataagatcaaaaacatccaacatatccttgccttcaggattcttctgtgaaaccaagtggtcgtattcatgagtatgaacaccaactattggtgtcacttcaacctgcaaagataaacaaaattccaaactgtgtaaaaataatgcacaattcttaattaaccttttaaaatccgttgtaaatagtttaaattgcttttaaccctttgtaaatccttaaaacttgattgtaaaaactattgtaaaacatactctttatttataaacagtgtttaaaacataaaaaaaaccacagctaagaaaatgtaccttgtcaccatctgctatcattgttatagcttttgcacttggaaacgatgttgatctccattggagaattaatggaatatttccactagatgattcatctctagtgccaaacttttctcccaacttctgaactgatgataatgcccatatctgaattaattgaacaaatccaaatagaccatattgtttccttaacaaatagtcattaccgattctcttcacttcagttaccaaatatgagtacacaatctgcgcccatggatacttacagaacttttcgaaatcagtagctctcttcagattctcaattggcagcatggtagtcggatttcgagctagcaatatgccctccactagtaacaaacccgccaatctcagtctctcctctggctgcatttttttggaacgcttttccaaaacatatgtaagatctaaaaaaagtcatttccttgttaatccacacatcttttttctgctttcccttcaaagtctgattatcttttatccaccacttttctttcttctttctcttcacatttggactgcttcctgatgcatcatccattggaagtcctgttgttatgataaactctctcaaggagaatcgtataggttgatcagcaaatacaaaccacaattcgtcattgtgggttagtatccttctctggagtaaatgatgaactatatggcttgaaaaggctacgtccatttcagcaaattccactataggacccaagaatgtgtccattaatgtgttgaactctatcggctctaaagcttccctgacattcgagacaattttgttggatgaatgctttgatacccttgtaatattatctacttcgctgtctggttggaacagtcttgtagggaagaacaatttctttgtactcatatttctcaaaacctgattaaatacattaacacagtcattaaatttattatgcatgtgtagttttcgaaacataaacatagtcattacaagtcgttttaaggactttaaaaacccttgtaaaactatttttaaaagtcattacaaatcgttttaatgactttaaaaacccttgtaaaacacagtaattactccataatcctttttaaagaccgttttgaaaccattccaaaaacaaaattttaatccttttcaaagaacacagccgctaaaaatagaaacaaaaaacccttttccaaaccaactccaatcagttattagtcatgtaaatcacttttaaaaagcttttaaaatccgttgtaaatacttatcaaacactgcctatcctttaaaacgaatttaaatctttaaaaccccattaagaagtctttaaaatcccttgtaaatacatatctaacactgcctatcttttaaaaacggctaaaaatctttaaaacacgatttataagctttttaaatcccttgtaaaaacacataccttttcttcttcctcttcttttccttcttcctcttgcttttcccaaacatcaatctatttactgttaaagtttcaaaacgaaaaaactttgaaattgctacaacagagaagttaatcggcattcgaaatcttctttgaaggtttttggaacccaaatatcaaactttaaaacataaatctatcaaaattatataacaatttccaacactccttcaaaatcccaaatatcaatttattttacttgtttcgttttcaaccgaaaaacctagaaatgctagaacaaaaaagagattcggcaaaaatcgaacaaacccaaatgttaaacttcagttttgtaaattaattaccttcaattgcttcctttttgctggataatcggattttcttcagattgttgaaaggaagaagacgaagacgacagtttctattcttcttttttttttgttacttttttgttgtcttttcacggttcccttccgtttttgtttttgggttatagtgaatttttaggctttagtgttttttgggcttttagtgtttttttactaaaacagtttgtttttctaaataacaggcctaggcccaattagtaacagatacagtgtttaacattactgtaactttttcaacggttgaaattctcttttaaaaacggttgtaaatcattttaaaaacggttgtaaatcttttcataataacagctattgcagctttttcaacacttttaaaacgcttttaaaacagcttataaatcgtttgtaaatctcttttaaaaacggttgtaaatcattttaaaaacgattgtaaatttttttcataataaccgctactgcagctttttcaacacttttaaaatccttataaagcagcttgtaaatcgtttaaaaaccctgtttaaaagcatgtttaaagtccttttccattcaaatcaaagcacctgttaacccaaacaaccattatacagtaattttgtaaaacaggagttgaactaaataaacttcataaatcttgttccatacagatgttcataaaatattcaaatgacaaagttttatgaaataaaaaacaaaagctgataaatctatcttatactcgactactttttgattagaagtctgctacttaaacaaagtgactgaccctaattcggtgaagatgtcagcagccaatttattcataacgttttcaattatgttcccttcaaggtttgaatggatggtatacattaagtagcattccataaacttcagcatatagataccagactcttcatttctaggagcatacaaccaaaaaccaaaagaattacttaagcaaagaagttatagaagtcaggacttacggaatattcatttctaagactatgatatatttaaagaagttacttgagaaaagtggtcaggactttgatgctaaatggagagacatccatgtcttcttttttgaggatgttccgaacaatgtatggcatagctatagagtaggcagcaacatattttttcttgacttcttctgttaaataagaagctgcacattcccatatacaaactgtcttctgttccaagtggatgaccaaggcaacccagcattttcctttgatacagaaaggagccaatatgcacttggtttcttcctctattatcagcttactgatttcttcagactgaaactgaaatccctctttgttatccaaaaactccatgtatgactcatcaatcacatttaagaaagacgatccaacaaatacaactgatttgtttttgaataattctggattgctttccttcctcgttttcatcaactccaaagctgcatcaacatgctaaacacaacaaaaataaaaattatcatattagaaaacccctttaaaaacgattgtaaaatatgcaaaccctttttaaaataccttgtaaatcattctacgccacatacttatgttctttaacgattgtaaatcaagttaaacacttttaaaagcttttaaaatcccttgtaaatcattctatgccactaagttctgcttctaaaacgattgttaatcaattaaaccctttttaatagcttttaaaatcccttgtaaatcaatccttaccactttctaatccgttaaaaacgattgcaagtcatgtaaatcttttttaaaataccttgtaaatcattctttaccactttctaatcttttaaaattgtttataaaccatgtaaccctttttaaaatcccttttgtaaataacttaatgatgctttaaaaactatatgtaattcatgggttaccaattttacaaggatttttagacataccgttgctgttattgctttccctggcgtctctaggattgtaaaccactttgtatctacattatttcccgcgattgatagtggcctacaacaacaaaacagtcaacaatgatgcttcttccattattaaaaaaaactcactatcttactaacaaaactcacttgtttttccttgacttcttccattcagccaatttctcaagtcttgtggcatcaactttcgcaaatggatgcaaaattggatgcttcttcttctcagctgtgaaaggtgcttgggtatgaatggaaggaaccgtaccccgcttactctttctttgcggagcgggctgaaaatcatcattgtggccatcattatcagcgttatcaccatcattggcaataattttccttttcttactctgtgcctatcaaaaataataaaaaaaatagatgtttaaaataccttgtaaacaaaattttcaaaatcataataaattagatactaacctctttccttgttggaacatcaacatcagcactatcaacttgtttctgcctctttctcggcacctagaatagtaaaaaacaccaattaaaagtacttttaaaatcccttgtaaatatcataacaagacaattgacaaattttaaaaacagtactgttgcaaatactaacctgttttcttgttttaagattatcctcagcatgaacacttggtttaactctcttgttctgaagttgcatgaaagataaacttttaaagatttgaaaaaaatattataaacatttggttagataatacaaattttttaaaatgctaacctcattttttcctctgctagctctcttcttatccttttgaacatccagactttcttcagacaaaatattgaaatttggtgtagaggatcgtggagtaggagacttatccttgaaaagataacagaatgtaaaattataaaaaggatactaatcatttttgcaagacttttagagatataaattactgtacttttgatgattcttcagctacttcatcaccaacatcacgttgggtgttttcatcatcacccggatagctcccatactgtgtgtttggctctctgattgaatcttcaaatgattcattgtcattctgcaacaaaataaaaacaataagtcaatcattaatataattagtagacctttaaaatagcttgtaaagattttcaattacctctgcttttctttctagtcctccttcttcttcagcctgcgaaaaaaaagagtacattgtaaaggtttactacgtatttaacctttaaaatacattgtaaaacctttcctttcaaatagcttttaaagaaacatttacaattacctctggttgtctttctagtccttcatcttcttgttttctttcttcatcttcctcagatctctgattattcttttcctccattctaatgtccaaaatcctctcaatcagctcgactctcttgttaagatcttcaaggattgtcaaaatcctgtcaagcttctcgctatcagatattttgttattgattttgttttgacctacttcttcaagggcagcacaaacatcaatgcatcttgtattccattcagttttcttcaatctgtagcccatattaacaagtcccaaaatatgttggaattctatgtcgtctgtgtggaaatcaggaactaaagacttgaattcttctgggtttccaataattgtattcacctccatctgcgaagatacaataacattacaaatcttgagaaagcagaacttcaaatctaaaaaccatttaaagaattctgtaaatagacaaaagcttaccttagaaacatcatttacaaggtttacgatcttgaaaaactctggagtagtagtgattttccacttcaatatcaatggagattcagattggaattctttatcttcaactccatatgttgcaccaaatgctggaactgcgctcaacacccatattgttagcgcgagtccaaatcctctcaaatcatatttctcttttgccgaaattttctcgtccattctcagaattgaatttgatagaacactgaatgcttctttaccccacggttgggctgtgtacatctcaaaatcagaagcatgctgcaatcttggcaaaggtatcttctcttttccatatggtgtcaaaagaattccttcagtcaacactactgcagcaagacacaacttttcttcatcttcaacagcaggttcaccttccttaggttttaaaaacaatcgatcttcgagatcaccaagagtataggatcctttactagcccaaaagtatggttcttttacaggatcccttgtaaatcattatctgccactaacttatgcttcttaaacgattgttaataaagtaaacccgttttaaaagcttttaaaatcccttgtaaattatctatgacacttactaatgttttaaaaacaattgtaaactacgcaaacagttatgcaaatgccttgtaaatcattctacgacagttaattaagctttaaaaacgattgtaaaactttattacctgttgtgagatagaactctctcaaggagaaacggataggttgagaatcaactctaaacaaagagttgatcctttagtcttcactctctgctgcataaggtaataaaaaaatttcccagaaaatttgattcccctctttgccttcattctcggtcccaattcaactaaaggacccagaaaagaacttctaattttctcgaatagactctcctctaacgcttcctccactttcttaaccaaactccaatcagaatgttgctgaaccatacccattgcaatcgattcgtcaccttctttatagatctgttcatgtaatgtgaggatttcactctctgaatccatcttcgaaacatgtacaaaataaatcagattcgaactgaaatttagatataaattattgtcggatccactatataatcgagaatcatattaccgtagattccttccttggaattggaaaaatggttggg

SEQ ID NO: 2176 - DNA, 2062 bp, Arabidopsis thaliana landsberg
gattattttattttgcggttgaaatgtttttgattcacaagatatgtaaaagtgttttctgtgcttgtagcttgggagataccatgtgttgcattgttgggagtcgtaaatacatgaccatattacacgttgatgagtaaggttttgcgttggttcgaagaggaagagttagctgtcaaaaaagaacaagttgaccgtctaggtgatgaataagtttagaagatgagtttccaaagccatgcaatttaggtcagttcttccatttttagttttaaatttcttacacattttagtcttaattttgttcttctatatttgatatctaatatttgttgacaacatcattgtttgggttataatgtgtatgaatttctttgcaatttagatgtttttgttaatttatttaattttctttatatgatggattaacacaaagcaatatccatgacttgcatcacaagctttgaactttcgctctccctgatcaaagcttgtgatgcaagtcacatgatattgcatggtgttaattatacaggccaaatacttaaatacatagtcttcaaaccaaccacaaaatagtatcagatcatgccaaacccaaaattgtgtagccgtgataagtaactcggtataacggtaactaggttgaacacgcccggtatgaatcgtttcagtacttttgtgtgccaagttttttattccgattcgtttatgtggaagaggttaaaaaatcagcgtctaccaataacagactgttttattctttcaaacccggtacaagcttcagggttcttgcattggagatcatggaacaacaatgtgatccggttatgtctcaaaactgaaacttggtctttcttacgtatccccaactttggtattttcatagagttggtcagatacgaagggaagctaggtcttattcgtcactggataacaaagatcaagaagattatcacggattatgggttttaaagagcaggtgaggaaagccgtggataaaagtgaaagatattaaaagcattggattaggtcagattgtgtggactcaaagcaacgacgtcgtaatgatttctagttgggatcgtgtttgcctttacaaccgtaacacagagacgttgaacttagttcatacaaacaaggattttgcctcttacgtttgtttcctgttttgttctgattacgagaaggttgatcttgacgaaagaagaaatggaccgacaaatgcaaactagttaacaaggctcaacctggggtataaaaataagggagattaactgtgatgggtaggaaattaggtgttattaccagaacacgacagaactttttttaattactgttatattttcgaattttttttattacccagcgtgcccctactaaacgttaccggaaaaaacgtaattacagggaatgccactgccacgtcagaatttgttgacgtggattaaatgaactcagccggctgagttacggtatgttgcggcggtatgttgcggctgacttacgtcaaaaatatatgagtcataacgaaacggcgaagtatgagtataactcagccagacgttacggctgagttgtaaaatgttgcctgagttattgtataactcaggcaacggtatggttgagttaaggatggtcggccgagttataagaagttataagataacccagccaacaatatggctgagttatgagaaaaaggctgacttatttcctcgacgcggccgagttatagttttgattggcttagttatggaaagatgtgacggctgagttatggtcgagtgctataaatcagccgccaatagctggattacgatataactcagccatgttatggatgacttatttttaaaagattaattactataatatcatgcagttatggccgagttgttgaacgttacggttgagttagttgagttacgacatacaacggctgaattaactttgttttttttcctgttttaattactgtaatagtattcatgtcacggctgacttaaagatttgcttcatggctgtgttatgaactatttgtttggtggctgacttgcac

SEQ ID NO: 2177 - DNA, 6957 bp, Arabidopsis thaliana landsberg
  unsure (1)..(6957): unsure at all n locations
agggataacacacctttcgttccttacaaccaaggtttcattcccaaacaacaatttcagggtatactaccagccgccaccaccacctgggtttggacatcagcaaaaccaaggtcctgcttctcctgaggctgatatgaaacaaatgctacaacaactgcttcacgggcaagcctctggctccatggagatggcaaagaagatatctgagttacataacaagttggactgtagctacaatgatctcaatgtcaaggtggaatcactgaataccaaagtccgatacttagagggacatgatctgcatcttcctctgctccaaaacagataagccaatttccagggaaagcaattcaaaacccaaatgaatatgctcacgctatcaccatgcgtagtggaaaagcacttccaactagggaggaaccaaagacagtcactgcggacagtgaagatcaagatggggagggtttaagtctcggaaaggatcaagctgacaaaccactcgaccagtcactcgagcaaccactcgaccagtcactcgagcaaccactcgatctgccactcgacaacgttactcgaccaacaacttgacctatcttcccagcagcatcaccaactgctccaaaaccagttgctgtcaagaacaaagaaaaggtctttgtccctcctccctaccaaccacagcttccatttcctggccgtcacaagaaagcgttggcagataaatgtagagctatgtttgccaagaatattaaggaggttgagttgcggatacctcttgttgacgctctagcgctaatcccagactctcacaagtttctgaaagacttgatcgtggagagaattcaaaaagtgcaagagatggtggtattgagtcatgaatgcagtgctatcatacagaagaagatcattcctaagaagcctagtgatcctggttcattcactctaccatgctctttaggtccattggctttcaacagatgcctatgcgatttaggagcatcagtcagtctcatgccgctatctgtcgcccaaagattggggttcactcaatacaagtcctgcaatatatccctcatcctagctgtcagatcagtaaggattcctcatggtttgctcgaaagcctctcaatcaggatcggtgctgtagagataccaactgactttgtagtcctggagatggatgaagagcccaaggacccgttgattctagggagacctttcttagccactgcaggagctatgattgatgtcaagaaagggaagattgatctaaaccttggcaaagactttaggatgacctttgatgtcaaagacgcgatgaagaagcctgccatagaagggcaactcttttggatcgaagaaatggataagttagctgatgagttactggaagagctggcagaggaaaatcatcttaacagtgctttaaccaaaagtggtgaagatgggtttctgcatttggaaacattgggataccagaagctgttagactcccataaagcgatggaagaatcagaaccctttgaggaattgaatggatcagcaacggaggtaatggtaatgagcgaagaagggtcaactcaagttcaacctgcactctcgaggacgtactcaagcaaccactcgaccttgtctaccgacgaacctagggagccgatcattccaacttcagatgactagtcagaacttaaggcaccaaaggttgatctcaaaccacttccaaaaggtctaaggtacgcattccttggtccaaactctacttaccctgtgatcattaatgctgagttaaatagtgatgaagtgaacctgctattatctgaacttagaaagtataggagagcaattggttattcactatccgacattaagggaaattgccctagctgatgcaaccataggatccaccttgaaaacgaatcctattccagcattgaaccacagaggaggccaactcccaatctgaaagaagttgtgaaataagaaatcttgaaactgcttgatgctggggacatctaccctatctctgatagcacttgggttcctccagtgcattgcgtccctaaaaaggactgttgtcaaaaatgaaaaagatgaactgatccctactagaactataactggtcatagaatgtgcattgattataggaagttgaatgctgcatctaggaaagatcattttcctttaccattcattgaccaaatgcttgaacgtttggctaatcatccatattattgctttcttgatggatacagtggtttctttcaaataccaattcaccctaatgatcaagaaaaaaccactttcacgtgtccttatggaacttttgcctataagagaatgccatttggtttatgcaatgctcctgcaacatttcagaggtgtatgacctctatattttcagacttaattgaggagatggtggaggttttcatggacgatttttcggtctatggcccctctttctcctcatgtttgttgaatcttggcagggtattgaccaggtgcgaagagacgaatcttgttcgcaattgggaaaagtgttatttcatggtgaaggaaggcataatgttgggtcacaagatatcagagaagagtatagaggttgacaaaggaaaaattgaagtgatgatgcagttgcaaccgccaaaaacggtgaaggacatcagaagtttccttggtcatgctggtttctacagaagatttattaaagacttctccaagatagccagaccgataaccagattattgtgcaaggagaccgaatttgaattcgatgaggactgcctcaaatcctttcacaccatcaatggtgctttggtatctgctcctattgttcgagcgcctaattgggactatccatttgagatcatgtgtgatgcatcagattacgcagtaggagctattttaggctagaaaatagacaagaagcttcatgtcatatattacgccagccgaacgttggatgaagctcaaggaagatatgcaacaactgagaaggagcttctagctgttgttttcgcatttgagaagttcagaagctatttggttggatcaaaggtcactatctatacagaccatgccgccttgaggcatctgtatgccaagaagaatactaaaccaagactgttcagatggatacttctattgcaagaaattgacatggagatagtagataagaaaggtattgaaaatggtgcagcttaccatctgtcaaggataaaaattgaagaacccattccgatagacgattcaatgggagctacagtgggaaagagtttcaccacttgaatgctgtttaaggaggatctccatggtatgttgatcacgtcaattacttggcatgcagagtagagccttccaacctgaccagttatgaaaggaagaagtttttcagagacattcaccattactactgggatgagcattatctttacactctctgtaaagataagatctataggagatgcgtctcagaagatgaagtagaaggtatcctgctgcattgccatggctcagcatatgctggtcacttcgcgacgtttaagacagtgtcaaagattcttcaagcaggcttttggtggccaacaatgtttaaggacgctcagcagtttgtttcaaaatgtgattcatgccatagaatgggcaacatcagcataagaaatgagatgcctcaaaacccaatcttgggaagtggagatctttgatgtatggggaattgagtttatgggtccattcccatcttcatacggtaacaagtatatactggtcgccgtagattacgtatcaaagtgggtcgaagctattgctagtcctaccaacgatgtaaaagttgtgctgaagctgttcaagatcataatcttctcgagatttggagttcccagggtagtaatcagtgacagtgggaagcatttcatcaacaaggtctttgagaacctcttgaagaagcatggagtaaagcacaaagtcgccaccccttatcatccacagacaagcgggcaggtgtgagatctccaatagggagataaaaacaattctggaaaagactgttgggattacaaggaaagactggtctgcaaagctagatgatgcattatgggcttacaggacagccttcaagacccccattggtacaactcctttcaatcttctctatggaaaatcatgtcatctacctgttgagctcgagtacaaagcaatgtgagctgaggagaagcgattgatccaactcagtgacctcgatgagatccgtctagaagcttatgagagttctaaaatctacaaggagagaaccaagcttttccatgacaagaagatcatcactaaagatttccaggttggtgatcatgtgctgctattcaactctcgcttgtaactctttccaggaaaacttaaatccagatggtctggctccttctgtatcactgaggtccgtccttatggagcggtcactctagctggtaagagtggagattttacagtaaatggtcaaaggctcaagaaatacttagtagaccaaatccttccagaggtgacatcggttcttctccaggaacctcttgatgattaaaggagtaaaggagtcaaactaatgactttaaacaagctcacttgggaggaagtcccatgattatctctgtaaataaattttttcttgtcttgtaatttttgatttgttttagttgtgtttgtggttttcagagaaaagggaacaacgtggagatagtgtaaaaattcaaaacttttactctacagatgacctggagatcgagtgtataacctggtggagtacaaaaattataaagttttatgctgcgtctggagacacggaattcgagtacatcagtcgagtatacgtgatgtttaaaatccaaaattttaaaaaaacatcactgtactcgaccaacaggagctacagagacttgcaaggatttcttgcagtttacagtagatcttttgcagatttttttcagtcaacagagtgtggaccacgcgctgaggataagctggagagagaatctaaaactcaacctagacaactcattttgaaacatcactcgacttcacaaaatccactcgacctacctctttttatttcaccaccgacactctaatctctctacaccacgaatcgctgtccaaagagatactcggtcctgacaatatcactcggcctccgagagttactcgacatccgcgccgccgtcaccagatcatatcttccgtcactcgacctccgggaaccactcgacctctgcgcttccgtaatcgaccgtcgaagtctccgtgaccactcgattacgaccaagctactcgaccacaaactatcactcgacctcgactattcactcgacctctgcagcagcaactcgacccttgttcttgaaagcaatagagccctgaagaactgtcagagtgtttactcgacctctaggcttcactggctgaactcaacctccacaacttactcgatctcctgaagcatacccactcgaatccagagacgatactcgatccaaatcgtctaaagggaactcaagaacagctctgtctactcgagtacagaattgtactcgaccaatagggtttatttcattgcctattgataacaattttggtttcattgctatctttgagactaacctattgactttgagctttgagttttaaatttctacaggagaatcatgagcaattacagtggcagttcttctgttgatcctgactacaacatggatgagatagagtcgtcatcttcaaggtcagagagagaacagagagaatatgaaagcttcagaaggaaagctgagatagcccaagggaagagagcgatgacagagaggtatgagcttataaacgaagatctggaagatgagtacatgcctgaacagactcgcagagctaccaaacttctgcacaagcccgacgtattgcctgctgaggaatatgttaggcttttcaagctgaacgagttctgtagcataaggtatccttgctcgacctcacttgcacaactcggattgttggaagatgttcatcacctgtaccagagttgtcatctggacactctgatggcttatccgtatgtagcgtatgaagatgagacaatacaatttctctccacgctgcaagtagagctctaccaaggtatgacctctgatgagttggattgtgaaggattgggattcttgcgattttctctgtatggtcatgagtataggttatcaatcaagcgcttggaaggattgtttggcttccctagtggaacgggatctaagcccaagtatgacagagaagagnnnnnnnnnnnnnnnnnnnnnnnnnncagctctgtaccgctgaatgcttccaggtcaaagagcaatcagatacgcagccctgtcatcaggtacttccagcgttctatagccaatgtactctactcccgagagatcacatggactgttactaactctgatatggagatgatcgcaatggccctcaagggaactcttcgccaaactaagaatggtatgtctctccaaggtgaaatcaatgacacacctctctctgtacttcttctgatccatctgtgtggatacaagagttgggctgtcagcaataaccgcaagagagcaggaggcgctctgtgcataggtggtgttgtgacaccgattctgatagcttgtggagtcccaatcatatctgtcggactcgagccgcgagcaatggatatcgagcacctacgtcactgtgaattcctggagtttgcaatggttgacgacttccacaggttcaggtttgagcactctacaaacaggagagctaacatccttctccctagccctgaggttacacgaataatagagggagataatattgattttcgacctgaggttggacgcctctactatgagaacgcctcgccattagatgaggaggatcttctagaataagctgtttccgatgggatggat

SEQ ID NO: 2178 - DNA, 4790 bp, Arabidopsis thaliana landsberg
  unsure (1)..(4790): unsure at all n locations
tcaagcaatgatcatcaatgactcatttgctaaggaaaggtcaagagacaaagtgatcccttatagattatgcttcagtaaaagggatctctcaaaaaatgattaagctttattagaatgctaaaggtaggtcccaagctatgcatatagagataagatcccatctacccagaatatatcaaatgaagctctaatggtaatccaactccaatcccaatacaagaacttaactctaccctttgcattcatgaatcttttaagccctttttctaatcattcttttcttttctcttaactctaggagaagctttctcaacactttgatacatctagcggatttagatttctttaacaacaaaggttcctgtttttaacattttaaaaccaagggcttttgcccatcttcaatagctaacaaaaactctttcatttctttataaatcccaaaacctttactagactttttctgcttctttagcttacttcacctagagtcctttaccttttcttatcaatgaatcaaccccttttttttcttttaaacacatcccaacccaaagtataagcgcccacctagtcctatctagtccgaaaaatgcgaactagaactacatgagacactatctctgtcgttacgaacctaacactttctaccaagcttaatcggaataagacctcacaaacactcacaggtgatatagggcttgaaagaaagtctaggtttgggtttgggttaactgctctaataaggagagtcagctacttgaattaacaagagtgatcaaaatgaataagaaaatccaagtattttaggatatccatgagttcaaatttgatgcagatatgataattaaagatcagattcaggttcaaattgatagggaatggtatcaggtcatgacagtgtggtcgagtatagcaatctaggcatggntcagttttattttaaattcattgactacgcaacagacaactagcaacgagggcactgagtttatccggtgaatcaaaatgcttacaaggctatctcatcatcatcccctatgcatatgcaacgatcctaaatgaaacactatagactcgatcctaaatgtaatgcaactacatgaacactcttttttttttttgaaatcattttctgaaaattttcatttttttttggtttttctatgccttagatgattgttgactcaaaaatatatacaatgcaacatacacttcctgagccctcccccaaacttaaatcacacagtccactatgtgaataaacttggaagagagtactcaggacaaatccaatcacagaaacaaaaaaaatgaagaaacaaatcacaatagatgatataatacaatggtgaagtgaggcgcttacctcagtcgaagaatgaacgaagttgctcatcaatggctgcatgtgattgttctcaggccatagacgaaccaccttgttctgtatcagctccagcaggtgggtactcgacctctgctccttcgtcgcggtcagcaccgctctgatgatactcgacctctcttcttctgctgcagccagcaccgcggtcgcataagctacgggactggagaagtcgtgtactcctgctgccagaccgagccagtgcagccttgttctttctcccgagctcccgaggctcgaatgatgaatgcctcgtagggacctgtgaaactactcggtcactaggctcaggcctatggtgacttggctcaggcctatggcgacttggctctggcgcgtcatatctcctcgagggcatgtcctgaggaggctatctcctcttaacagtggccctagacggattagcatcacattcgtcttttgaatcttgataaatcttgatcctttccagaattgaatttctcacatctttgtgaggatccgagatcaggttgagaacttctattagaggcatcaccgcttccatctcatcaagctgcttttctacaagagaattttatctttctatccatgctttcctgaatttccatggaagagcacgtgaaggtgatggtgccggcttgaatcgttttaccatcctctctatgatggctgctttctcgtctaggttagactgagtttgaaatttcaatctgagtagaaacctccccgacctgaacatcactgtcctcggtgattgatgtggagacatgtcgagtaggcagctctcgatcataacaaatggtgatagcgtgagcggtggcgtattccttcgtgttctgtatggactttcctggaagtcttgttacttttggagcagaagttgtcgctgtttgtccttccatgtatctaaccttagaggtaagtgcctcaagtttgatattcagatcgttaaaagtgcaatcaaccttgttgtggatttctgccatctttttggcgagatccattgcacctgcagcttatccctggagaatctgctgtaacatgttcttcaagtctgaatctggagttgttgaagctggttgttgttgctgctgtgtgaacccaggtggtggaagttgttgcggatagtttccctgatactgctgattaggaacataaccctaaccttggttgtatggaacaaagggcttgggttgattctgctacgttgaaaggtagacttggtcctgcgggagcgcatcattagagcatctgtgcccaaaaatggtcgtgttcgtaaagcagaaacatagacgaactcctatgaatgtggaaaaaatacccgcttagtcaattccaatcggagtggattgggcaagggatatagaactcttgagtcaaaacaaaaattcaggttaatcgaatcattttttttcgtttggttgttgtggtagacgtctcgttttaagatttattgatttcttattttcagtacacttattacttaatagttccatgtttctattactaatagtttctaatataataatataatattaatctgattaataactagtaattttttttatttctgtttatgtttaaaaaaatttttcgaaaaatctcttcgtttttaaaatgatgacgtatcaaaaaatccagtaagactttaccatactcatcttacttagtattagatagattgaattttggttgaatttaattagatttctttttttatttttaaacaaggccgtgtgataaaaaaagtaaccaagattgagtggggatacaaaaaaaaaagaaagtattatgaactttttgattgtagctagtgaacgaggaaaattcatataaaaaaattacaactatgaaaattaatgaagaaaaaggtttattctaaattataaattaagtatctatctcgatatatcgatagatagtgattggctccattgaaataaaatgaaattttccgttttattctgaacgatccccaggacttatggtttatgatatggaaattttttttatgaaccgagcaattaaaagtaacctgttagaaataaagaatacaaaaaaaagtaaaaaaatttatccaattattttgattttaatgtgattttttagaataaatttcttagttagggctatacggactcgaaccgtagacctgctcggtaaaagagttcgaacttattattatcaaaatgattcgaactctttcaaagacccaacatgcatttttttttgcattgggctctttcattaactgatcgaaagatcagttagtctaccatattttttcttaaaaaaaagataagaaatggttccaagtactctgattgattatttttgaattctaatacaatacagaagaactaccaaagtgtttcaaagaagggttctcttgacgtaggtttgcttttggtctagatcaacttaagttaaatatagtctctaacatcctgattaaaaaatcaaacatgaaacttgatacaccttaaggttcataggacgaaaagatcatttttgagttccttatactcattactacccaaccagccaacactgggtattcaccctatcaatatctcaaatcaatgatgggttctattcattccctacctaacggggtactttaataggacctaatgtcaggctgttgttctcctcttttttcctaaaaaaaagtcatggagtaagacatcgatttcttaataagatcaatcaattagtttgattgcgtgatggactcctctgaaaaactttggcgcacgtgtaaacgaggtgctctacctaactgagctatagcccttgtgtttgtgatacacattttatcttatcatgtagataatttcttgtcaagattaatattacatgatcgaacattatatctctttgatctcattgtttattggtattgcttagaaataatattggatttataatcctatcgatgtgataggtatcccctttccttctctttacaatgataaataacctacttaactcagtggttagagtattgctttcatacggcaggagtcattggttcaaatccaatagtaggtataacttattagacaccatgatcaatggtgtctaataagtttttgtaaccagctttttttattttattgtttttatcgtctttcgatcctattttttttatacattctttttttttacacgtcagctagttacaaaatcaaatcgtattgagagcctcgactcgtgtccgagctcgtctgagagctagattagcctcaattgtctgtctcttaccttcagcttttctcaagttagcttctgctatttcaagagtttgctgagcttcttgtggatcaatgtcactattcttctctgcatcatttactaaaatagtgatttcagtattgcctattctaacaaaacc

SEQ ID NO: 2179 - DNA, 5563 bp, Arabidopsis thaliana landsberg
  unsure (1)..(5563): unsure at all n locations
agttgtcattgctcgctgctagaatgggccctcggataaggtctcatgaaacatattttgttggtaacttaaatcaccgacccttctttgttcctcatacaaatggtcctcaagcttatatatccggcttcccaggttcacactattgtcagataaggctccaatcttcgcatcacagtccttatccgaatttgttatttgcctcagcaatgccttagtgttgatggtgttatcttgggcgctcttaaggtgtctctcctgctcctcttcgatcttcttgaacctttcttcgttagcttcagcttctttaacccgtaggttttctgatttcttgaattttacaaagaggccgtcgactttactcaagagagtaacttcgatgtcatcgagccttgcattgagctttcttgtatccaaagcttgttgatctaagaattggctcaccaagatctcaaggctttcttcatgagtcttgtgcttccaaggcatgtgagaacggtctcaggttggtagcaagggcaaaacgggcggttggtagtgttgggccgaatacctatctttggcacttctcggatagggggtccgaaaacgacttggttggcctcttctggttgcatcaaggtccttaccggcttgaataggatccaaacttctcttaggtttagcttcttctatggacccaagttgcctgaagctagagtttgcgggaactcctccactggtagtcggattgccatgcaagagtggacattcgtgagctcttcgtcttctccttcttcactagaaaattcggtgagttcatcactttcttctgaaagtttttcgaatcggtttccttgactctcaaggcaaagttcttatttttcggtttcaaggctttcttctctagaattgtgttcggccatctagtattcttctaatgagatggcttcttcttcttctaagtcctcttcttgctcgatttggtcttggggaggaacattagggattgaaatccctagggtttttattgggtcaagatttccattttcggaataggaatttagatcttatcctttttgcactaggaatccgatttctttttttgttttcctcctcatatcgggcttgggccttaggaaactcatcttcttcttggcaagattggttgcttttccattccgacaattcgtttgatttggtgagcttcttctctagctcctccatcttccaattcagatgactctcaactgtatcaacaacaaatccaacattgacgattctcgtgttttggtcgtggagatcgtcttgatgattgaggagagtgttatcgatatcaacaagtgtccccaccatatgttcgagtcgattagtgaggtcatcgaacttctcctcaaatttggcttccatctccattagctttaagttgattctcttcacatcttcttgatggctatcaacaaagtcttggagaagaccaatgagtctatcttctggttcagcagtttggtagggctcattagtttggtaagcataattattcggatgaacatctacaccaaagtctcgaatgagaccaatgagtctatctttcgcctcggcggtccggtagggctcattagtttggtaagcatagttgttcagatgaacatctacactcatcacctcttgcaggtatccttggtcatatccgagatattcatgtcgggcaactccataaggatgagaagagtgaagtcctccgacgcgttgacctccgggaatgggctaaccgaggggttagcttgtgggcggttctgaatgaaggcggcggattgatcgttagagtagtgatcggcccaaaagctcctccattagacagccaagattgccaagactcgccatgcatttgggatgcatcaggcgtgttgtggtcagttgagaaatgtgatccacggtttgacccatgattcacattcgggtagtagctattcggataatttcttgaattcatcctttaagcttcctgaaacaaagaaaaacaaaaacaaaaacttaaaagcaagtgtactagagttcactctagttcttggacttgtggaactaagaatctctccccggcaacaacgccaaaaagattgatgcgtgttttattttgcctcaagcgtttacctgaaagaccacacgactactgcaagtgcacagtatatcggagtagtattttaggatcgaatcaacgtggagagaagtagttcagagaaatccttaagaagagagtgaagctaggaccaaaataaaagagagggggttgttgtatgcaataagtaaccaaaattaaagacaagtaactaaactaaactgtaagcaataagagagaagcattaggtctgcgggggtttctcctgatgtcatggttcaataaataaggtatagatctcaatctaagtgataatatggttaggtttgtttacttccaaattctcagacatacgaaactctatcaagactagctaaccctaatggttaatcggtgaaaggcggctattatcactaatatcttgcgtactcagttgccctatcggttagtaggtgctaaaatggtttcaaaatacaagagcaaagtattaagttccaattcgattctagtccataagtccctatcactcggcgggtgtgcaacgacattttgccaaagaatgaaatacctaaggtcaagtactaggtgacgttccggacatacaagcattaagattcaactcaactagaaagaatagtgtaaacgatcaaacaaaacaatagaaaccgccaacttagacttttgatctattagtcctcatgatatcccctttgaaaccccctcaaacccaactacagatctactcgctcatggtaaaggagctaatcaaaagtggggttgagtaaaccataacaaaaagatgaataagtaactgatcaggccgagtagtgggctttaggacaggagcctaatgacggcggcgcaaagagggaatgacttgggcgtgaccaaatggtatgtggtgagctactcggagctgcccggttcaagtctcctcagccggatgtgttttggacttattatttccaaatcgccgattctaggacatgtcttcactcttcgggccatatcttctaaaaggcttaatggattgctttgattcgacttcgacgtgaatcttgactcttctagctatccatacatacagaaatatctcgttgacgtgatgggaaatacctcggaaggatgctaaacttctgaagtactggagtgatcgtcttttgatactcttagcttcaaaactcttaaaaccttcttggcatctagaatacgtgtttctactcttattggctatagaatggtaccaaattctctctgaaacataagaaaacaatagctaaaacgggccaaaaagccgctttatcaagtggtnnnnnnnnnnnnnnnnnnnnnnnnnnnnnnnnnntaattggtcgagtagctgctctcctccttccccagtggtgtgatagagtagagggtcgagtaagctccttttgcacctgaaaacacaccaaaacatacaatatgtatgcaagatgatcctaaatgcctaagtgtgcaaaataagctaaatgtgatgcaaaatgatatgaaacaatgagtgatcactaagcgaaatgatgataaatacatgcctaaaatgagtaaaatacagtgttatcacaccactcttttagctcctcaataaggggttggaggaagacatcgagactacctcgaggatgatttggcccagaattcaaaattgtaagaaacaagtattctgtattcatgcacataccagggggtaagttatatggagtgaggatcataggccataacgaatgattacgagacatgccaaatggattgaacccatcaatacacaatccgagataaacgttacggggttcttcggcaaacaggggatataacgattggaaatatctccactctgccgcatctgaaggatgattcatttctccctcctttgatttatgctcggcatgccatcgcatagccgcttccgtcttatggctctgataaattctcttcaatcggtaaccaataggtagatacaacatacgactatatggtactttggttctttgtctttgaacgccataatccattggcttccatctttgtgcaccacagaaccgacattgatcttcctttttgtcttctttccagaaaagcatacaattgttttgacaaacatcaattgtatgatatggaaggcctaaattgcgcatcaatttctcggtctggtaatgcgaactagtggcttggtttccttctggtaaaaaatttatcaacatttgacaaaccgaatccacacacctttcactcatattatgatccgccttattttgcatgactcgagaagctaacgataattgtgactggccttcacgacaaccatcgtataatggagtgtttgcaccgtctaacaaatcataaaatttctgtgaatggttacgtaccggttcttcgacattcttataactaccatcctcattatagttatcatcataccccacgttaaaattaaatgcatcgttcaccatatccacatatggatcttctacaacattacccacttcttcatgattctcactaaaatacgtcctatctgtgtaactagttccgatatccatattcatttcttctccatgcttataccaaacataaaaatcatgcataaatccttgactaaacaaatgactactaactcttctacccgagatgatgtgtttttcattcttgcatacactacaaggacaatgaaatttacctcgactactctgtactattggctgactattagcgaatgtcatgaattgctcaactcctgcgacgtattcggctgacaaattccccgtcacttcatcaaatctcttgtacatccaatctcaatagaaaccgccagtaccgccataattgtagtttcccgccattatacaataaagtaactaatttttttttttctctttgatgttgttgttgttttgatttgttggtgaaagaagagttgcgtgaacgtttattatataggccaatttttgtgactaatttacgactacaactaaataattagctgtacctacttaccaatgcgaaacacgttttccatctactttatacgactatggtgcgacgtttctacgactacaggccgactaagacgtctagtcgtcctgtagtcgtcaaattagcgactaaataaaatagacggtagaatagtcgttaattagcgactaagcaacgacaacattatcccttcaataatataatcatcaaatagtcgttacttgccgactctttgccgactgcatacgatagtcgtaaaacaacgactatgtaactacaatttttcgtgttgtcgcatgcgagtcgtaaatccgtggccaaatagtcgtataatgttacgactacgtttgttgtcgctgattgtagtcgtcgtttacctgttttcttgtagtgttggtaaagagatgtactatctatccatgatcttgaagggtagcttgaatccgtccaaatcggtaccattcctcgcgttat

SEQ ID NO: 2180 - DNA, 2972 bp, Arabidopsis thaliana landsberg
gtaatttgcttcatgggtataacataaaactggctttgtagtagcctaaccttaatctgatgtcaactcgtaggaagaattgctggtggagcatttcagtgatttgatcaaattcgtgaagaatcgagcttgtaagcaacttgtttctttcttgtcttcacgtactcatcgtgtgttaagttgaaaaaccactaaactgtaagatatgtggcagctgaggattcgagcttaaatccagagaggtccattacaattgctgaagtagagccactggtgaaggactttggaagcagatggaaaacagcaatcgagttgatggacaaagatatcataacatcgttcagtaacttcttgtgtggtatggatattttgagagctgcattgacacaactattgctctattacacaagactcacagactgcatcaagaagatagatggtggatctgctctgaacagggatcttgtctccattcaatctatcatgtacgagatcaggaaatactccaagactttctgaaagattacatactccaaaaattcaatactccagttagggggtattaccagcggcttcgaccacatcctatcctctctagctactggcttcgctccttaatgaagagtatgtaagataagtcaaatttttcaaagtgaatctaaagccagtattatgggtcagtaatgtatctatctttcaaaccagtaagagttcctctaatgtctttcttttgctaaattctccacaattatctgaccaatatgtttggaattaatttcataaaatagaaccaaaagacaaacatgatctcagatttttgaaaaaaagaagaagccattttgctttttaacattttgacaaatgagagagtataattctctattatattaaatagtcgtcaaccttcacatctctactgctctagtccaacaagcctgaaaggttttcttgcttctttatcagacaaaatcatgagctcctgtaagtttagcaaaatcatcttctgtaattgaacctttcttcagtttattcagtaagctataatctccattcatttcttgttcatcttgagctgtttggatagtttgtctttgcctccccgttaaatttctctttctcgacgctttgttagaatcatcaaccgcctctttggagcttttcttgcgtttccctctcttttcttgttgcagtttgtctttccttgctaataagttttgctgcctttgtttctcccgagatttgttcttgaattttatgtcctcaaacgtgatgccttggacaggtgtaaaaccgacaatgtcaattctgtcttgtttaacttcagatatgtaaggaaaagacaagatgccatatcccatggctaactttccgatttcaagtcctttccaactgtaaatttaaggggaacaaaagaatggagttacaaaagctaacatattttagcaactcaaggaaagaaatgaacctgaaaatgtaagagcattgatgctccttataagcacggacaaaggaaacaaatgcctttaatcccttctccaacacttcccggtccttgatggctagtgaacgtatctgcattttacattgtagcaattattattaaaccaccctgtggccgagagcgagagagagagagagagagaaaagagatacgtaaacgatgcctggaatgtcaagtccacgtgcagcgacatctgtgcatagaaggacaccgcttgatgcctctgtaaacgaagctaatgcattgtctctagcattctgatccatcttcccatggataggaattaaagatatggacttcagggcaggaatttttgaaagtacgagtccccagtagtcaacagaagcacaggtcatgaagaatctgcagcgttacttagactatttataaggatgcttcattttatataagtctgtgtggaatatttaaacttacactataagctttttatcactgttcttgatgaggagatcaactagttgtgatgattttttatctgcttcgcattccatatactgtagagacaaggagaaataaaccgctaagaaacgcatcggtaggacatgtaaagatagaacatcggtttctactaaaaagaagtatatacatatgcaacacatatgatcaataggtattttcaatacaacaaacttgctaccaagagaagggaatacaatagagctacgaagagaatcgtataactactggatacttacaaattagaaggaaatccttcgtaaatcaggtcacagtaatgctaaatgataacgaaggatacaacaggaaaactaactactctgaaacatattattacataattatatattgaacttatgctacctcaagatgaagaccagaaggggttttcgagtttgtcaattgctgggatgattccgacttcgacttagctcgaacttcaactctcacagggttcctaagcccagccttggcgagctcttcaacgccctctgtttgtgtagctgaaaagaggccagtcctcctctgctttggcaagcgtgagataatgtaattcacctgcctttggaaccccatctccaaaagcctatctgcctcatctagaataagaatctacatacgcaaaacgattcagtttaagtaaaaaaactaaacttttaagttgtttagacaacataaccacaccaagctatagattcaacaacatctatcttaaaacaaatccttgattgaagaaaagtacctcaagatttcgaaaatccagaatctccattcgttccataatatcagaaagtcttccaggtgtaccaatcaagacattgcatccttcttcttcaataatcttcatgtcagctttcacctctcggcctccaacaagcaacacagagttcacatttgccaaagtcgaaacacatgcgtgtgcgacattatattatctgcgtgatagctctctcgttgcgatataatcaccccatgacctgtatttattttaaag

SEQ ID NO: 2181 - DNA, 2620 bp, Arabidopsis thaliana landsberg
catggcaacacactcttgaatgctaacattcaatgtaggttgtaatccataacttgtttccattatgtcacatattgatctaaaacaataaagagacattctgtaacaacctgtcccgtgggacccgccaacaggatgccacgtggcagagtgtggccacatgggcgggtcccacgggacgggttgttactctgccacgtggcatcctattggagctgcagcgcatcgaccctaacctctctccttgggccaccaaatccaccaggtaggttattggtgcgcttggcgttcctcgaaccaaagacctcaccctttaacaaccttcccacaggttaagctgttcccaattaatctgcagatcaagccaagggcaattatcgtttcaaagatcctacaccccttagtagtgaatttatagtttaccaaggagtttaactgatgcagacccacatgtagaaaccaaatgtgctttgatggcatcatcaaaatgctttaatggatgtgttgcccctttgatggataaactaaaatatgagagtccactgctttagatgaggtattgattgataacgttaaattcggggatattgatttttctttttttttaaaacgcacttttacaccaatcaagataatttaataatattttacatttttcggaaaaaagggagaaaaaaaaacgcaaattttagacagataatagagtggaacacatttcaaaatcagacccatccttttacccgtggtccaatacaaaaacgccgtatgagttgagtaaatacatctttatttttatttttattttaatttttattgtaagagttttcttttcctatatatacacacatctctctctttctaagaaagcaaaaacttttctttttcctaatctatcttcacatttctctaactatttctacatttaaggtaattacttcaatatatttctttattttaaagtttctataattgaaaagagattatttgattccatatctataaatttgtggttttaaattcaaattttattatagtaataggttatgtagttacttaatttagaaagaaagaatgatcgttaattatcatagtaattgttaagataaacatacatcgtggagtttgcatgtattagttaaattaatattattcgctaatttgtaatccatttaacttgatttgtctaaattatacaggtctgttaattatgtaactaatttcaatttagtaatgtttcatataatttcttagttattttatataaaataacgtttatatatattaaatatattttgtacttgaatatatatacttgaatttattcataaaacgaaaaataaatagttaatagcttatcaaatttgtttcaggaaaattatttcgatttaaatgattttagatatgtaatctaatcgtcgacggaacacaaatccttccacaagaatcggttcaactcatcctgaagtttcagctcctccctccgaaacaacagtgcgggtaaatttacttttacttctattttttgtaaagaaaaatatttattaaaatttgacataataaattacattgtattcactaaatttgtagaataaagacaagtacaaatggtcatacattcaagaaaaaacattaattcaattgttcgacgaagcaattgccatgaataattatattcttaagcatcttacttcaaaaagtagagtatatggttgaaaagtttaatcaagcgttcgacaaaaatataacttatgttttcttcaaaagcaagcttgatgaattcaaaaaaagttacgagagatggaagtttcttacgcataaaattggcatcactgttgatcctgagacatcaatgatatttgcatctgacgtatggtgaagagaacaagactttgtaagtacatataaattttttactcatcaaaatatcttttaaaattttggtataaaaatctaattgattctataattttagagatgtaaattaacaaaaagtatcattttttatgtgtaaaagtaaagcctgagttacaaggaatgtattggaatcgacatgataatgcatcattaaacattatggcaatatgcgatttgaatatgttatttacagatatttggaatggagcaccgggatcatgccacgatacaactgttttgcaaatggcacacaaagtgattctgagtttcctttgcctccgtccaaaaaatattatctcgttgattctagctatccaaacaaataagaatttctggctccttatagatcatcacgaaaccgcgttgtgagatatcatatgtctcaattctattatggtcctcctcctaggaatacacatgaattattcaaccaatgtcatacatctttacgttctgttatcgagagaacttttggagtttggaagaaaaaaaggagaattatttctgattttccaagatataatgttcacattcaaaaaagagtgataatggctacaatgagattacataattttatcagaagttcaaattttttagattcagattttgtagatgtaatgacagaaacaaatataaacaaccgagattttgagcataatgtaagcaacatggatgcagcatagtagcagatggagaacatatacgc

SEQ ID NO: 2182 - DNA, 4387 bp, Arabidopsis thaliana landsberg
  unsure (1)..(4387): unsure at all n locations
gtcaccaccactagtgtagattgacccccatcacttgttgaagcagaattatctacaatagctacgtttcaagctggtatcactgccactatctaatccacttgacatctgcacttcgacaaagtcaagctattgactataaagaagcgcttagtgggagacaacccactagtatgagttatgttttcttttctttttatttacattcttcttatattttccttgcttacttcaaatttgaatgcactggggacaatgtcgtttaagtttgggggaggcacttactaactacgtttagagcacagacacacctcctctgactgctcaaaatcccaaaacagagccacacataacactcccatcagctcagctcgccaatgagagttgcagagcatcagtgtcgatcgacaccatgcctgctgtcgatcgacacccttgagattcacagacagaggattctgcacatcctcttcagctaacaccacttgagaacctatgtgataagttctcttctatctcttctcctgctttacctttgattaattccttagattctttgaagtttgcttcacaagataacaagcgtagagttcttcgaaagcttgtttcccctgttgttcttgaaggtggcgagaagagtatcgatcgtcacaccattgagtgtcaatcgacacctgcagctgccccgatcagatttgtctacacatcgccttggaaggtgaggaggcagcagcaatcctgcaccattccacctacatcctgaactccaccaagtcaagctattgactcaaaacaagcacttagtgggaggcaacccacttgtttgatttttctttcccttttcttttattttcgatttatttttcccgctttctctagatttgaatgccactgggacagtgtcgtttaagtctgggggaggtccttactaattatacattaatttttgattcttattattttcttcgtttttgagtttattgagtcatttttccttagtttagttaggaatcatgacctatacttctcttgattattgcctgattgatgagtgctacaggttcaagtcaatccgactattggaaaatctagatggcaaaacaacagacttgaggatatcatagtttccaactcaaccactaaggctcgagctaatctcactgctcttccttttacctcttcaaacggttatgatgcggacatcaaccttacttcacaaaccgcgaactgcatcctgtaccagaagtcccagagggtatcatgacacgttcaaagcctaaacaattgaagaaaatgttcaacttagctgtgcaagatattttgagatccctagagctaggagtaaactggtccttagcaccccataacggatatgatctaatagacgaagaagagcttgttgaagcattcacccaaatgagtcttgaacgaactactcccccaggtatgaaatatcgtttgacaggttcaaggacctctagaaaccaagagaagactttggagcttcaagagatagacgattcaagtgtcacatctgaaagtggtcgacagagtcaagatcaagagcaagacatcatggacatggaaaagctcgaagacattgatcaagctactcaagaggaactccagaaagacccctacttcaaggaaccagccagcaaacaagcacaagacttgattccagaagtacctcaagaagtactacaggaagtgactcaggcgtcatctattgggcctaaaacgcatctaggtaaggtttattcagtttatattatctttgcaggtccaaaaagcccagacaatggctagagtcaccctcaatcgtgctcctcaagagaacttaattagtttccttattttagcttattttctttctaaaaacaatgggttttgtgttttgattatatttgctttcttgttgcatttttacatttaatttcggccctagggctagctgaaggactcttataaagtccccctgcagcagttgaacgatttttcacctttgattatcaataaagaactgcattttctcacttcttctctttaagtgttcttaagagaataagcttgttctttgtcttgtgtgtgcaattcaccaaggccaagttcgtgtactgtatcagagacttatcacatctctgtggtgtacttcagtccgccagcacttcccctctaatagatcccacacgagagaaccgatcgccatcatgttagatctccatcttcgaccatctttccttcacaagagagaagcgaccgccagcttgtgaagccaccatctctatcagatacaagctcaccactgagtcttgtatcatcttggtatcagagcgcagttgcgcttcctttgccaggtttcatcgtttcttatagcctgccttactttctgaatcagtttctacattagtctagtttctgttttatttaaattaaaaaaacaaaaaacaagtatttcagtttcattttatttcgtgttaagtatttgtttttgagtttcgtaatattaatcaaaaatatatatatatatatatatatatatatatatatatattgttaactttgtactacatcagcaagtgtgtcagaaagtgattcaacaagttttaggtttcttggttttgatctttcttttctattgttgtggtacgttgatttctttgttgtttttgtctaagcacaggtcagctttatgcatatactatgggagaggcagcagaaattccccaaaacgccgtaatgcaattgatggctactttgacggaggagttaaggggattaaggcaacagctaggccgtttggagcagccccatcctagggttgaattggggcaaaacttggctcgttggaatgcccgcgaggaggcagaggagtttcctgacttggatgatgatgatgatccaccacccgaccctttgagacgccaacatcaacggagagaagatcctagtactaatcaatctcgttctcgtgacattatttgtttcaaatgtcaaggtaggggacacatggcgagagaatgtccgaaccaaagggtgatgatcctcactcctggtggtgactatgagtcacaagatgagcaagatgattctgatgagcatgaggacgttgagtatccagatgtaggagagctccttgtgattcgcaggacattaagcgtgtttgtcaaccccgaagagaaggtgcaacgagaaaacatcttccacactagatgcactatcaagaacaaggtatgtaacttgattattgatggaggctcatgtactaatgttgctagcaagtatatggtagacatgttacgtcttcagaaaacaaagcacccgaggccatacaagcttaggtggctcaatgacgatactgaactgaaaatcgctgaacaaatgactgtatcattcagtgtgggaaagtaccaagatcaagtcgtttgtgacgtagtgccaatgagagcgggacatcttctccttggacgaccatggcagtttgaccgagctacatgtcacaatgggcgtaccaaccattactctttcaccttgaatgaccgtaagtacaatctcgcccctcttagtccctcaaaagttcatgtcctacaaattcacatgaacaaggaggacgaggtaagaagttctagtctttatttaagctctaaagatgtttgtaaaaccatgagtgccaagggcaccgtgctctaatggttttaaagaatgtcttagtcaggataggtgatcctgagctaccctctgaagtactagctgtgctagatcggtacaaagacttattcccagaggagattccacccggactaccacctattcgtggcatataacatcagattgatcttgtaccaggctctgctttacctaacaagcccgcctacaggatgaatccagaggagtctaaggagcttgagaagcaagtgcgtgacctaatggacaaagggtacatcacagagagcctcatcctgtgtgcagtacctgtcctattggtcccaaagaaggatggcacgtggagaatctgtgtagactgccgtgcaatcaacaatatcaccatcaagtaccgataccccattccgagactagacgacatgttggatgagcttagtagtgnnnnnnnnnnnnnnnnnnnnnnnnnnnnnnnnnnnnnnnnnnnnnnnnnnnnnnnnnnnnnnnnnnngtggaagacagccttcaagaccaagcaaggtctctacgagtggctagtcatgccgtatgggctaaccaacgcgccaagcaccttcatgcacctaatgaaccaggttctaaggttgttcatcggtaaatctgntgttggttactttgacgacatacttatttacagtaagaggtattctgatcacattcaacaattagagttaattctcaaaacgct

SEQ ID NO: 2183 - DNA, 3284 bp, Arabidopsis thaliana landsberg
aaaaaaaggctgttaaacctgatactaaccacgaaagtcacatagaggcaaatgtatacactaccaaaacagaaaactaggcagcatcataaagatatatacaaatcaaatgaacaggaagtgattcccagtaaagaaatctaataactcatcaaaatccaaacgtatcatcgctacgaatgtgttttaacttagtgaagaagttgaaaggatcatacttgaatttcttcccagaatttctctgagactgtcggaccggagttacttggactggtggtgttaattgaactggtggtgttacttggatcttatcgtccaagaattctccatcctcagacaaaacatcctcgttgtcaacttcaggtgagtctgtctctgttggttggctaccaatttcaggactcgccagcttcttcaccgaagctgctcctccagcaccgccttggaaatcaaactcagtattctctgcctgaaaccaaagaattctcctgatcatgttaaacatctctgtcgcaaccatagtcttaaagagaaaatgtaaaaataggtgaaatgtatcaacctgagctagttctttagggaaatcaagacgagcttcttctggattctcctcttttgtcccaatccaccatgactcagagaacacaatctatgtgcattaccaaaacactcaagagtcaagatacagtaaaacagagagagatctccgaatatgtgaaaaagcacaagagactaaccatgttatcaaaataatcatcacataagacatttttgcctcctctagagaattgaagagtcaagtatctgttcttcggatacaaaatcgttccaaaaagtttcatacgaccctaaagaaccacaattttcgaagattaagattcacagtactagtagcaatgcctcaacattgagaaacaccaattaggatctaacctgtgggaaattaaggtagaggacagggtttttggtagataatcgatcgagatcgccgatggtagcggcggagataggagcgagaagaccagggaaggagaagagaaagcgattcttgcgctgagatttgcggatgatgtcggtgccatggtgtttgagaacttgctttgaaggtttgagagaggaatgagatttcgccggagaatcagagagcaattggttatcgagagctagggtttttaatctcttcctctgttttgactctgcgtcgtctttgtctcctccttttgatcctcctttcttcgacgatgaagctcgtaccattactgcttctgcttcttctactctctctaatttttcttcgaaaattcttcttttaaatgtctttgtcaatttaacaacaaaaaaaggcacaaaaataaaaatgtcatttttgaactcaaaggaagaagaacaacggatctttcaaaaaaacagattgtaaccaactttagtgatataatcatattcatgtcacgttactttcacattgcgagatcaaagcgaaaaaagacaaggaaggaaaaggtcagatgaattggatgttgttgcactttgatgagagtctggggagagtcagtagattagctcgcaagaactcattgttgttattgttttctgcgtgaacaccaactttcacagtttcaagacgttccaacttgcccaagaaatgtctcatctgttccagctcttgaaaagaacctccatactctgaaatctcctctttctttccaatcttcctctgcttcttagggatgcaagcacatgcgtctccgcatttacttgttactctgtggacaaaaccctgaaaccagagaccaatttgacatgaatgggcaacacaaacaacaacaaaagaatctcagcaaggaaaatgataagaccttgatgactaaagtgtgcagatttggacaactcctgatcaaaagtggcattacttgccaaccatttcgcttgttactctcaatagataaattaaggaggagattgttgaacaccggtatggatttacagcggaaatgaaatacctgatttatatatccagaaccatatataagtgaaagactttgcaaactagcttttctatatacaatggattatcaatctccacaaaccaaaaaacaatcaatagatagacgaagaagtagtagcaaaagactaacctcaagggaatcaggagacaagtgaagggttgtaatgttggttatacccgcaactagatttgtaacatcaccataataatcaaaaggaacattaaaatcccaaccataaacatcaccatcattatcagacgaaccataattgttaaatgactccaatagtctgagattcagcctggcttcaacaagcgaattcaaatcaataaggtcataattttcggagagataactagaatagtcaaggtagacaagacttggtgctataaaacaaggttcttggtgatcctcatcctctttaaactttggacaatcggtaaaaaccacaagtctcttgatggatgcacatttcacaaacgtaccgctagatagtaaagcattagaaagttcagatacagcttcacgaatgtataactcttccaatgcagggaagccatcgaggaggttacaatatttgtcaaaaccaatctcgaaagaagatgagagggaaagtgatttaagggcagggagaaacacagtctcaacttgaaaatcatatctaccggatagtgtgagcttaaccagtgtgttgctcgtgaacagctctctctctacaaatataaatgattcggcgtgcaagtgtagttccaacaacccacgttccattgcagtccaaatccaacggcggtatgtctcgtggcagtcacatctacatctacgaatatgacacacagacactttcttgatgggagaattgcttaacagagcaaatgtcttttctacgaaatcacagaatcgatgtgaaccacttaaagcttcttcttcgttgggataaacaaccaccgactcatcaaagcagaggttgtctacaagacctagcagattcctccacctcttggacagaaccgatgtggaagcagccacttttgtcggaagcaaagacaagattttgccaagtatctcatctggcaaattgcttatcgaatctctaggagaagttctcatcataaattaggagtttaattacacctctacacgctaaagcaactcgtggaggctcaggctcacaacaagttctttttttcctattgaatgttgttaccaaaaaagaaattcacaatctaagatggatcctttaaatccaaggagaaagtgtaagtcaagaggagaacgaaa

SEQ ID NO: 2184 - DNA, 858 bp, Arabidopsis thaliana landsberg
agtatgtaaaatacttacgctggtaattactgatttcaaatttatgaaatggaaaagatcccaagaaggaggtgggaaacatatatgcatattaaaacgacatgatatccaacttgcgaaaaagtatgggcctgcattgccatgttctacaagatggtgcaacagaaagttgtgccaacagaaatagattggtttgcaacagttggatcctctttcctcgataagactacttagacactcactagaacataggaatgatccaccatacgcgaaccaacctcttcaatgatcctgccatccagaagaatcgatcaaccagtctcttaccttgacagacaaattaataaccataatcttttctccagattgggaaaaatagagaagaaccctaaccacgcaacaacataaaaattcttctacaagttcgtgcagagcaagggaaaacatcaaaacggagtggaagaagaaagggggaaaccgtaaaattgctaaagggactcactcgataagggatttgcgaactagaatttcacgggacaagtggagttctgcgagataggggaaaatctcagcagacaaagacggctccagtgacagcaaaatctccttcacctgtctaagagacgagagcttcactgccaaatcgccgtggttattagcagcggcgaggagagagagcgcctgtgccctcgctgtcgcggcagccggagccgccattactgaattctagattcgtccggcggaaacgtcaaatacggtgccgtatcgcagtggcggttaacttttagggtttttcaaggttgaagaagaagaatcttggcgacacagaagcagcagcacacaagagcaattgggcgt

SEQ ID NO: 2185 - DNA, 2889 bp, Arabidopsis thaliana landsberg
taagaacggccagccaaagtacacaaaacgttgcaaacataattcgattgtaccaaaacaagaagacaatgacgggagaaccttctttatgcattagggggtgtggcttcttcagcacgtcacagacgaagaacctctgttctaagtgctacaacgatttcttaaaggacgagtctgccagatacttggccactttcaacgtcaacacgaaagccgctgaagaggtcacggcgcaagaggcgacggtactcggtagtaaaggcggttgtggtgaagaagaaggataagattataagaagagtagtagtagatgcaaagcgtgcaagaagaaggtggggttgctagggtttcactgtagatgtggccacttattcttcgcgtctcaccgttacccggaagagcattcatgtccatcggattataaatctgccgccattgacgtcttagcaaaacaaaaccctgtcgtcaagggtgataagctcttcagactttagtcaacccttcgatgcttgtgtttttttcttaacttttttttctctgccattggtattaaataaaataatttagttcttataacttaattacattgtgttcgattagtgagaacgacaaattgttagtttgaaactagaatatttatttttctagtgattactcgttcgaaatattcgttaaaacttgacgttgagcgaacatatctataaaacaaacaagatttagtcgattgttgcggattgtccatgggaaatttgtttgagtaatggaagcattaaggccaaagagttgttcatccacgccctccactttccactaatcttccgggttgtgtccagagaaacttcagggttctcagcttctggattcttacacataatgaagttcatggaccttgttgacccgatcctagtgcatggattcagtgctgaaatttagataaagcaatgacgttaatgtagaagtagaattatgattaagtagacctaggcaccttttttttagatgaaatatttttgcaaacgtttatctctttttataacaaaaaattgtaatcatcatttgttctaaatgcaaatgacagactcaaagaaaaaaccacacgattgtgtctcacgttgatttggagagtatggagagtaaagtaggaaagaagaggtgaaatgagaagagaaaataggaagtcttccttggcgagcatagcatctcagggtaatatctataacatttgtgactgtttcatcttccttgacaacaaaacgaataggtccactactccctaccactttgatgcttacaagcaacctattttccgtcaaatttggtatcttcttcttcatcatcaatctcgatttctcgacttttttcacccgaattatatccatctttgcttttttgtttagttttggtgtgtgatgattagttcaatcccctatttaaacttattacacaagctgtataatttagtggtgcttattaggttaagtggagagtattagcagccagtggattgttaatgtgggtttaaaggataaactatttctttcttgttttataagttcccaacacggaatctgatgattggtgtctacgttatttatttttttacttccagccatctcaatctcaatgttcttgcaagattacaaagagagagtatcgtgagaatcttgaaacagtaacattcactatcacttttttctatggattcttacataacactctcctaaccgccggtgatgaccaatactttctctcttgatcatgtgcctttagccgccttttatggtcccccaaaagcctttggaactgatttttaaaattgatttaccaaagctttaaaggacaacaaagtgcttagtgggttcctactaagtctgctagttctggtacaatcttttcccccaaaaacttgcaaatgagaaatatatatggtttgataatgtcaaggatgtaataagcatatacaaaagaatatattcggattttttgaaaaataagttgaaagaattgtagattatatcgacatgtattatacatatgtagttaagcagtgaaagagagaaggtgctctaaactgatctaagtttcaaaaccttatttatttttcacatctcaagcagaaactcaacacccaccttaaataatcagttgtttccttgaggaggaccggtcatggttcccatcagtttatcatccggtttgggagtagaagatgcctttggcgtttttggtcctccctgcaaaaaaaaaaccggctcttatctccacggatctttcaacataaccattcgttctgcaagagagtgtcacttacacttccttttgagccaagtaacctccggcctgaaggtgctctcgctaatgatgaaatggccactgctgctacagttgccacacgaatccttttatgcacgtctatatactcatctgtttcatccacaatctcctcctgcaaaagttcttcaaacacatcttgtaatgtgatgataccaattacgtctccatcctcaatctcctctgaagtatgtgagaacccctgtctgccggcctcgctgatgaacgattgtccattagccttgtcgatgcggacaatgacactgtcgtggtttccttctcgctttagtaaaagaggtgcagtcaactcggagttgttacttgagacgttgctttcaccgctattttcttcatgcaaagttgaaggatgacctttgcttttccccttaaccttcacaactgcagccatgtgactgctccctttttgaaactcattcagaatatcatacagaggcatattagccggaacccctgttaatcattaatcacaacaggaaacttcatttttcacagagatgcttaagggaaataatatgaaaaatatagcaagcataataa

SEQ ID NO: 2186 - DNA, 2997 bp, Arabidopsis thaliana landsberg
ccttttttaaaaattttttttatgaattgggggttttgtgtttttaaatttgatctctgaattatacgaagtaacccaaagcccaaaagcatttaagcatggggactccttttccctttaattaacataatctgtttcatccgattactattataaatcacaatttacttctttaataactacaacaactcttgtctctccatctgtcagttttaaattctccttctttctcttaactaattatgtttacgtctttacgattaattaaaagtgtataaaaaaaagaatcttattcattgccgagcaactacaaatcaaagtgtaaaactataaaactttgttactaatataaaattgacttacaaatcaaagtgtaaaactatacaactttgtaactaatataaatttgactaatttcatttttgtttaatcttattttattttcactaaatctttatacttaactactaatctaatattacatattagtattttaattaatatggtgataatttctgtgaactctcaggtaaaatttaatagaaatcacaagtggggggttttgggatttatatcagtaaaactctcaactacgcctggtctgaaatgtttccttaaattctttaatgttctcgaccttttctgggttttaggaaaaagttaaaaaaaagctctctttttgtctgggttttaggaagaagaaagctcctaactttatcattatataccgtcgagttcgatctgagaatgatcagatttcttaaaatccttctgatttgtgtcagcgccggaaaatgaaccgtgacggcgccggagaaggcgactctgtttcacacgaacattcaacatctaaaaccgatgaaaaggccaagacagttcctctctacaagctatttgcgtttgcagattccttcgatgtgtttttgatgatatgtggctcacttggagctattgggaatggagtgtgtttacctcttatgacattgttgtttggtgatctcatcgattcctttggaaaaaatcagaacaacaaagacattgttgatgttgtctcaaaggtaaaaatccaaactttttttgaactttttgattgtgttcttagatcacattttagtactaatactgtgtcttcttatataggtttgtcttaaattcgtctaccttggacttggaagacttggagcagcctttcttcgtaagtaataagttaactttagtttcttttttgtaagtaaaagcacttttgattatctttaaaaattcttttttggttatagaggtggcttgttggatgattactggggaaagacaagctgcaaggataaggagtttgtatctgaaaacgattctaagacaagacattggattcttcgatgtcaaaacgagcaccggagaagttgttggtcgaatgtccggtgatactgttcttatactagaagctatgggtgagaaggtaaagaaacaaacacagcaaaaaaataaaatgaataaactgaagttactaaagatttgaaactttctgcaggttgggaagtttatccagttgattgcaacattcttgggtggatttgttttaccgtttgtgaaaggatggttacttacacttgttatgttagtttcaattcctcttctagctatagctggtgcagctatgccgattatagttactagagcttcttctcaagaacaagctgcttatgcaaaagcatcaaatgttgttgaacaaactttggggtccattcgaaccgtaaaaatgcttcctattcccttttctgttttgtgtagcgtttatactaaactttctaacataaaactataaccaagtgtttgtgtgttttatctaggttgcttctttcacgggagagaagcaagcgatgagtagctacaaagagttgataaatttggcctataaatcgaatgttaagcaaggtttcgttacgggtttaggtcttggagtaatgttcttggtgttcttttccacctatgctttgggtacatggtttggtggtgaaatgatactgagaaaagggtatacaggtggtgcagtgatcaatgttatggtcactgtggtctcgagttcgatgtgagtatattatatattttttctaataggtcttaagacagtttgaaacggttattttgtgattaatctattttattttccttgtacagagctttagggcaagcatcaccttgtctaactgcatttacggctggtaaagctgcagcttataagatgtttgaaacaatcgaaagagagcctttgattgatacttttgacctaaatgggaaggttttagaagatattcgaggcgaaatcgagctgagagatgtgtgttttagttaccctgcaaggcctaaagaagaggtttttggcggattctctctgttgattccgagtggcacaaccactgctttggtaggagaaagtgggagtgggaagtctactgtgatcagtttgatcgaaaggttttatgatccgaattccggacaagtgcttattgatggtgttgatttaaaggagtttcagttgaaatggattaggggaaagattggattggttagtcaagaacctgttctgttttcttcaagtataatggagaatatcggatacgggaaagagggggcaacggttgaagagatacaagcagcgtcgaagctagcaaacgcggctaaattcatcgataagttgcctctaggtttagagacattggtaggggagcatggaactcaactctcaggaggacagaaacagaggattgctatcgcgagggcgatacttaaagatccgcggatcttgctgttagatgaagcaacaagcgcacttgatgcggaatccgaaagagtggttcaagaggctttagataggataatggtgaaccggactacagtgattgtcgcgcatcggttaagcacggttagaaacgctgatatcatcgctgtgattcatcgtggaaagattgggaagaaggtaaataacataaaccttttgattca

SEQ ID NO: 2187 - DNA, 751 bp, Arabidopsis thaliana landsberg
ctttgtcattaccaattcccaaagcatctctcaaattcataagctcatcagtagctgcaaaacgatgaagagcggaatgatattaatctacaagaaagcctggtgaaatcaatatatatactattaccttttctgattatcctttcacgtgagcttgacatgccactctgaacactcttgagtatgttaccagaagcttggctctgcagccatttgattagaatcaatcaattggtagctctaaagtaagaggagcgaggtaacagtaaaacccacctgtccagcagcattcttaacgaatgtaacttcagtagaaaaattgaaattctccaaaatcctgccacataaatcacatgacctgcaacacgaaattcagaataagaaagctcctaaatccaacagaaagaaacagatgagtgaacaagacttacaatgcagcatcataggggcgtattccgggaacgttcttcccacaatgtttacaccacaccatagctcccaaactcagattttgaggcttgaatcgatgcgaaacaacagcttccaatcttactgatcaataaagcctaaagcttccaaaatctaaccaaggtcgaatttccatcagaatttccaaaattggatgaatgaggacaaaaaccctaaaggggaagttgttaattttcacactagtggcaaatatgagatgcattctgaaacccatgaatatcgaatcacacctaaagctaataatatcttgctctaaaccaac

SEQ ID NO: 2188 - DNA, 3389 bp, Arabidopsis thaliana landsberg
  unsure (1)..(3389): unsure at all n locations
tttttgataagtcgaaaaaattctcatgttttttttttgttctgacggataggatacctttcattgggcactaaggcataatcatagtcataacgttagtttacaaagctagcttagcaatggctaatatataagtcggtttaccaaaactaaactggcatcccaacaacatgatcgttgtaaacttgtatatccataacactctaacatcaaatgccttagcagacacttagctgtcggtcactaagtttatgttatcatcaacgtacaagtgaactatgaacattttctattttaaaatttatttataaggacaacagagcaagaccaaaagggatcaaccatgagctaggaaggcaagaatcaagaaggaagaaaccactgagcatcgtagaagttgaagttggagagaccgtggaagcgtttgatggtctttgttataagattgaagacacagatgtcgaggcatgacgattctttgtgacggatacgatcaccacgggtgaaataaatggagttaggctcaataccaagggtatggtcagcaggcacagtaatacccaaatcaagaaagagggcctcatcacctagagaatgcacctcaagaagccaggtgtcgagggttttcgggtcaagatctttaggatccctcttgtacaaacggaacatcctatgacttgcagaggtacctaaatcgaacgtatagacaagcaaaacttgacctgctcttgtaacagcaatgcctttgttagatgggatacacttcaattggttcctactttcacgtttgttggggtcggattcccccacaagcaagaccgagccaaacagtctaagaataacaatcacctcatgattaaacatatgattggcccctagcctagaacaaagcacctcgggaccttattcgatcgaccgtcccgaagagagtttgcaaaatggctcgggtgttaatcatatgaacacagcccgagccaatcatgagaacgctgcgggaaacatctatgtcggctcgggagacagccaactgagcttaacggagtcatcaagcgcgccccgagccggtacataccgtttgccccgaagccacctctcaaacgacttgtaaaaaccgttcattctccaaggatcatttccggtaaaataggatcttttatgggactttcggaaatgataaaggagaatctttgaagataatgtcgaaatcaggaaatctccccaaaacctccgaagaataaggagaatatccttaggacgattatcctctagaaccgacctaaggataaataagaatcttccgaagaatatcgctagagaggcggtttaacgaccctatataaagtgtctcagggacttcacaaaaggggatctttggatactcagaagaaacacataactttatacctagtgagaactacgaatggcttgatcccttcacagggtacgtaggcaatctatcatggatgcagctatacctttttaaaaacctaatgtatttcataagagattagaacatcttttgtagtcgagtcttggatagaatacctaatgaagagaaattggtagatttgttttccctctctaaacaaatctattgtgtgaatccttggttcaacaattggcgccgtctgtggggacgacaaagaactctcttcgcatatcattcatccaaagtattcgatgtacgctcatcaagccaagacaatcacatccgtctacttgcggggggatttcccgtcaagatacaatgaaccagatgacgtacaaccattccacggattgccccggagatcagcgttccagggaatctaaccgtaactccatcggatatctctgctcagagttatcgccgtttttctgaagtcgatgctgtctgtttcttaacagatccgtccgaatagaccagttcgcctcggggccgatttcccggcaaatcacagggaatctcgtaagggttaataaatcaacggatcgcccacagagtcatcttttcggaaaattcgacctcgccttaatctaagatatatgatgagatatatatacgtttacctcaggcaagtgcagtttgtcacaagatccaactctataaaaccagtcagcttcgggatcgttttccttgaaaatcctgatgaactaggcagtgatatacctatctacagatcgccccaagagtcagctttctaaagaagccgacctcgcctcgatccgagctgtctattaggagagatcatcacttgtctgcactagacacaatttccctgacaaatccgcagctgtcggaacagccaacttaagaatccaactccaagcgacctggaaagaaacaagatacgatctacgcgacaacggaaagcttcgagttttatagagacctatctcatctctataggtgaattctttcgatgaatatcgctgattttctactgataagcctctaggtcagagattcagttgtcaacacggttgacttggaagagagtttcccggcgagttaaagagagaggagtcaatctacgtgtcgatttgaagccctgagctttatctttccaacgaatctaacctagatccaatcgaagcaatcttccaagcgatattggcgtttctttcaagcgcagattcgtctctatccgaccagccgaactcaggctcaatttcccagtgatctagagagactcaggagacgatctacagatcaatttaaagccctgaggctcctcttttttttttttttggtgattcaccgggagatggaagncccggaatattattaaaaaagaaaaaaaacaaagcttacaaccggactcgtcttggtcgccttgacccaagactatcctcatgcaaaatcacctctaaatcatccggaacatcaataagagaatgaaaacctaatggtaaagaaaatgcatagttagctagaccgtcggctagacgattagcctccctatacacgcgagtgattcggacaatccagtccttcgataataagccatggcacaaccgcaccaggaacgacagcggatgttgatcaccgatccctgtcttgagaaaaccaactaccaactccgaatcaacttcgagctccacacgagtcaacgccttagtccaagctaggtaaagtccataataaaccccccacagctccgctaaaggcgctgagcatctcccgatattaagcgcaaagcctccacaccaatttccagctccatcccgtatcacaccacccaccgtcgctaaccccgggtttccacgagaagcaccgtctgtgttcaccttataccaacccgtacttggtgcgacccatccaatctgcctctccactcttgtcggaatcccgttaagcactgtagcccttgcattcgccacaaatacttccttcgcgacatccttga

SEQ ID NO: 2189 - DNA, 3378 bp, Arabidopsis thaliana landsberg
  unsure (1)..(3378): unsure at all n locations
acgtttaacttcgtctagagagatcgtttttgtgagtgttcggctcatttcttcggtcactaacacggggacttaccggagaactgagtcaaaaactcgaggatttgtcgtagaaaaaagagtcttgaagtaatcctctgctaagtgttcgatccccaactcattatccacccataggccatcttggttaagtaagcctagaattttatttctagcccttgtttgtttcgtagaagcatgaaaatattttgtgtttttgtccccaagtaggagccatatctccctacttttatgcttccaaaaaacctcctcgtctatgtaagcctgacagagcttccattttagggcaagtaagtcttcaatagaaaaaatctcatcttcgtatggtagttcaagctaagaatgtagttcaagaatgagcttctcgaaattgttctattggattttttccaaatagaaatagtttgtctacaattcctaatcttttggaatattggaacgccctctccacgagagggtaaagcccatccttctttaacaaaatctttgaatcctagtgtatctatccaacgtttatcaaagataaagtatttataaggacgatgagatttattatgaatggatgctagaaggggtctatgatcgaaacccctcaattgtnnnnnnnnnnnnnnnnnnnnnnnnagatgctatgccattcttcatttcccataactctctctaaacgacattgaataaggttacgtcgatttcggccacccgatccactactctttttccctatccaagaaaataaactccctatagagggaaaatcaatcttcccacaattttcgatcatacatcgaaaggggagaaagaaggattcagatctccgttttcctcctcatttttcattatatcaaatgatctcaatgaagtcaccaatcataaaccatggctcagaccgaagaataccaatacgagttaaacgctcccaaaccaattcttggtattgaactcccgaatccccataaataaaaataataaacacgcgatttccatctataaccgtttcaatatcaatcaagcgatcacatacaaagataaacttaaccggatagtttcgagaatacaagagcaagaccaccactgttacctataggttcaacagtttgtaaacaatcaaaccctaacgacacctgtagatcttgaaggtgcgcaaggagtacatacgacacatgtcttccagtcaacgggttgtagttttcgcacccaccccttggcaattccatgctaagattctcatgagttagtatggggggaataagtgaccccagcgtaacacatgaaccagaaactttggtctttgtaaacaagagagctccattacgagaagtcgaatcagcccgtctagaagaccctcgtttcagtgggccgacttatttgccaacctcttatttggggaccttccattcaagtgatgaaactttgttgtaactaaattaattaggagcctcagttcttttcttcttgggctctttaatctccttttttgacgatccagtcgagacagaggcgctcgtcggaggaaccgtagcagtaataatctgagaagcccgctgagctttcaaagcctaatcgtacgccaccaaaatcgcgaccgaaattgacaatagtgtcagatctggcgaccccttacgcaactgaattgtgcactccgacagacaatcctaaagttcttcccccaaaaggtcatcgtcttcaaagtcttgtgcattggtctttctctatttgacattgaaccagcttggtctttctctctttgacattgttagaagaaagcaaagaaacagaaagcaagaaaaccgacttagcttgaagttagaatgattagaacggaagtactgcttatgcaggaattatcttcaaaagaaaacaaatatcctatgtttctcatttacgaatagaactcctgagacagaaatccgaaacagggagaaaagcagagctgagagggagtaaagagagaatagaagtcctacagcaggaagaaagacattggaacaatgccgcaaagaagatggttccataccggggagagctaattctttcctaaaattgctaaaaagagttaaaaactcttttttttttttaaaccattagctgtgtttagttattttgggactccgtgtctgggagagaaagaacatattcttttaaatcccactagctttctctaaccgagaaaagttcgttacaaataaaaaacctttagagttatatacttatatccaagcattgacactcttagcaataaaacactgtttaaattaataaaactcaaaacaattttaaactctatgaacttgagaaagatgactatatgaaccaaatcaaatattataatatataattttggtttcttaacaaatttatagaagatcaaattttaagagaatggtcaaagttttcacaaatatttatctaaattacactcaaatgtatgtattaaataattacatatttacattaaatatttttttttgcaccatatgggaaatacaacattattttttggttaaattttgaatgactttactatttatttatttgttacgtaatgatacatttaataggaatttgggtttaagatttaattctgttaatagtttatttaataaattagacggcttacatacttccaacatcttaaaaacgttttcatatgtttattgtcatttagttgcataaaaaacgaacgatacaccaatattttctttcgacaagccaatataatagaacggattattgttaaaataggcacatttttataaaaactttgaatttaggtactttgccagtgtacttcgaaaaagagtatttctgttaccgaaaattgacctttctacccttctgtgcattaagcgggatctgggtaattcgaaattagctctgacgtttgaagcgactgcttcgactgtagatgcgcgaatcagagaaataagggcaacgaaatatgtggatgaaaatgaaagtagtcactgttgtgtggacatatttaggggtcttagtgcgtagtgtaccatttcacagaaggaaagaaccaaaattgattgtctctcagatccgaaaaatcttgaagtatcgttggtcaccgatcgaaacagatccgaagaattgatgaatcgaaaggtaatatgttgtcaaatagagattttcgaaatcgccgatgttgattgatttttggtagaatagttatgaatatttgctaatagcatccatacttgatttagtaggagatggtaagttgttaggaatattgatcaagtgaacttcaatttatatgtagattagtgatttgttaagtgtttgtgtttgtcatgtttgtataaattt

SEQ ID NO: 2190 - DNA, 1938 bp, Arabidopsis thaliana landsberg
agttggtcatgtgttccatgggatcgacgagaaagatacttcctctagtttgcggtatagtttttttctcttgcattcacttaaatgtttagttgttaattatcttcactaacatcatgtctttgttatttgtagaaaacacaccattgggatcctttgattacaggaacagttcaatactattttgaagatatatgtcaaagacggatgaaagatatgattagcactgtgaggactagtcgagagtgtcctaaatggatcatcgattcccatatctgcgaaacgatgtgtgcatactgggatactgaagaagcaattgcaaagagtctgacatattccaaggctcgcatgtttgactgtaatgggctcggtcctcacatccatttatcaagtccaacgtcgtacgtattaacaaatccaacaagaaatggttaataacttcttgtgatctatgttatttgtttttcatagtccattgcaagtttagatatttcctaatccttgttcatttttaacattgaaggaagaggagttaggaaaggacggtgagtcttggttaggttttcatcaagccccataccaaaccagatggtacttatgtcgataggaaggcggagaagattgttcaaaattatgagcagatattgcaacagaagttgtctgaaatggaggcagagacttcaaatgtttcagacggggaatcacgaccttgggagctcacaacaaatgaacttactgtcatctttctagaggtaaagattacattttcataattataggctgcatattctcatgctctttagtaattgtttgtctttcttttcatagttcacagagacagattcacgagaaaactattatggagtgggcagctttaatgatagtcttctggatctagtcactggaaaacgcaaactcttaggagactcttcttatttcgtggcattgcaagagcaactgaacgaagctcaacagaaaatcgaagagcaagctgcttataatgcaaaacgtgaggcagagcaaacaaaggctatggctgagcagaaggacaagctggagcacttttcctccactttatggcgactcattcacctgaatcaactacagaacctatctcatctccaactcattcttaagttacttctccccctttaaaactctcatgaacttgtcaaaacttgttatcttttcagaatttggtgcaatttgaatcttatatttggttacaatattaatgaatttggtgtgtgtttgaatcatgaatttggtgtgaggtttagtttggttttgaaattgttaagaatttggagaaaacattacaggaataggcaatataaatcaaaaaaataaaatgactttttattttgtctgaaatcgtagtcgttaattagtcacagagtagtatataaatggtcgcagagaaatcctacatatcgctgttcatatagtttagtcgtaacttagtcgtaacatataacgactattttacgattaatattacgactaatttggcgactaaaattacgactattaaatttagcgactatcgatttgcgacaacagtggttagtcgtaaaacagtcgtaacttatcactttacgactactctgcgactaatattctagtcggaattatttccgtgttttcttgtagttctatggttaagttctttggttcagaaaaatcattaatgttcgattagtcgattcaagacttttcggttgcattgcctgctcgttatgggaaattgtatttttcttgtttgattcgtttatgttgcggatctgatttaattgattaaatatgaaattgatatgttaaaaacggattttttttgtagggttcatatatcacgtacgcattcaacatttccatagttgcattattcttcaatgttgataggttctatatggatagaaccgtaaaaataaaataaat

SEQ ID NO: 2191 - DNA, 3842 bp, Arabidopsis thaliana landsberg
  unsure (1)..(3842): unsure at all n locations
cttaaataagaaaaagatttgagttttatattatgatctggattattttcctatgtttatttgacatctagcacatgtggttatagaattatagcttgggcagaataagttgtgcaccgaactgcgggtgaatggtaacgactgtttgaggcgcatgaacatatgaaggagaaagctcgaaggtgaatgtctgtagaatcaacgccattgccatctttgcctctaacatggcaaaattctggccgatgcatatcctcggtccccatgcaaatggaaagaaggagacttggttctttgttgcctttgaaagaccgtctttgaatctatctggcttgaactcccctgcatcagtaccccacagctccctgtcgcgttggattagcagaattggtagacttatctgaacgccgcctggtagtgtcaggtcacctagctgcatctctttgtgaatggctcgggtcagctggactactggaggatatagcctaaggacttcatataatatcatcgtcatctgtgagggatcaaatctttcagcttcaatgcaacaaaagaactcacgtcacttgaaggtttttggttcggtttacttacaactttgagctggttcaagccttctgtatcaggttctttatcgccaaaaacttgcttcacttcctctcgtgcacgagcctgccaatcttggtggtggcttaacagcaccattgcccagaccagaagtaccgaagttgtctcttgcccggcgaaatagaacaacttgcactcctccatcacatcctcagtactcattccatttcctttggcttgccccaaatttgattcaagaagtattcccaacaaatcgtcgtttggtgctgctttcccagcttctctcgcccttaaccttttgttaacgatccctttcagtataacttggatttctctagctgctgctttcatccttctattactcttcgtagggagataactacacaaacagaagacagagagaatatgagtatatgacacatcatggttcacaatctgtaatagtttgcagcactagtgaagttctaaaaccaggcaggttgagatcttttattaccgatatccagggatgtaaactttccaaaaagcttgtaagatgagatgtactagttctgcttgtagctcaaagatcctctgcccttctttgtagctgctgccaaaagcagtacgagagatcacatctccagtcatactcacaagccaaggccaaacgtccacctcaccggacgaccctttatccgacactaacttgccccattcgccaacaacctcgttgcagctctggtggaacgcagggaccatattctatacatagaagttagaatgcacaaattagttgagaataaaatgagcatacaacttgattcatgactgaaaaataaagcttttaanctttgatcttctcaaggtggaaagcagggttgatgattcttcggtgttttgtccatttatcaccatcataactaacgagtccagccgctattaatctgcccagaggaaacgtatgtgccttctggaaatcataaactttgttgaacacttctttgatttgctcaggatccattatggtgattgttggtatgggtccaaaccatgtaaagaaagtcctccctgtttcaaccacatagagatacgaaagttgaaactttttctagatactctacaaaatagttctaaacaaagaggaatcaagatgccaaccgggaagcataccatgagtcttgagcatttgcaacggataaggcacgatacgtggtgtgatatcatctgttaggttgatgggtttggatcttgcctcagccagcatgctaaaatttctcttcaaatcaccgacaagaggcgtgtaaggagttccggcaagaccttgtcttctcaggtaactctcaagcatctttggtttaagccaaacccactgtaaagttctccatacccaccatgacacaacaactacagctacagaaactgttaccgatgcaactgatatctccattttctctaccagagagagagagagagagaggtagagaatttgtgaccattctcaggatgtataaatgtttagaatttcggagaagatatggatgtggtgatgacatcacccctgatgtcttaaatactttatattttgatattttgggcaattattttgtaatgactaattaatttttgctttacttggaccctcacagtcgtgccaccaaggcgcaagaagcaaatttggacttcgtgtgaaaagcgacgaaaataggaagacatatattggtccatgcgtttcactctttttcttggaaatattttggtttgtcaagacatatgtgagcacaaagttctgaattcaattaataaaaagatttgagttttatactatgatctggtttattttcctctgtttatttgacaagaacacatgggattctagaattatagcttgcgcaggataagatgtgcaccgaactgtgggtgaatggtgacgactgtttgaggcgcatgaacataggaaggagaaagctcgaaggagaatctctgtagaatcaacgccattgccatctttgcctccaacatggcaaaattctggccgatgcatatcttcggtccccatgcaaatggaaagaaggagacttggctctttgttgcctttgaaagaccgtctttgaatctctcaggcttgaattcccacagcatggtgtcgcgttggactagcattataggtagactgatatggaattgtttcatctgtgaatggaaagtatatttgataacaacaaatagggtttatacgaacgattagagcttgtgcatgataagaggagcaccgaactgtgggtgaatggtgaagactgtgtaaggtgcgtgaacataggaaggagaaagctcaaaggagaatctctggagtatcaatgccattgccatctttgcctcaagcaatgcaaaattctggccaatgcagatcctcggtccccacgcaaaaggaaagaaggaggcttggttctttgttgcctttgagagaccgtctttgaatctctctggcttgaactctcctgcatcgtttccccacagctccgtgtcgcgttggactagaaggataggtagattgatcagaacgccgcctggtagtgtcagatctccaagctccatctctttgtgaatggctctgctcagctgaggtattggaggatatagcctaaggacctcatataatatcatcgtcatctgcgtgggatcaaatcattcatcaaaaatcatcaaaacacaacaaaagtcaccaagaggtttatgatttgcttttacttacaactttgagctggttgagtccttctgcatcaggttctttatcgccaaacacttgcttcacttcttctcgtgcacgagcctgccaatcttggtgttgacttaacagaaccattgtccaaaccagaagtactgatgttgtctcttgcccgacgaaatagaacaacttgcactcctccatcagatcctcggtactcattccgtttcctttcgtttgccccaaattcgattcaagaagtattcccagtaaatcgtcgtttggtgcttcaccagcttctctggcccttaaccttttgttaacgatccctctcagtataacttggatttctcttgcttttgctttcatccttctgttaccttttgttgggagataactacagaaaaagattggcagaaagataatgttaacacgattcatatctttaaggaatagattgcgacactttaagatcaagagtcaagctcagaaggacctatattaaatcagataagttgagtttttcattacctatatccagggatgaaag

SEQ ID NO: 2192 - DNA, 2680 bp, Arabidopsis thaliana landsberg
ataactataaatataacttcaagaagaaattacaaggatagaaaacaaatgcaccttcttggtgtgttatagaaaatataatgtttagtgttcattccggtaatgtcagttggtatgactcagatcttagaaaatggtacagagtttcgggattgatatatctgcttatgtcacatcttgttagctatcataccaaatgtgagggagattgagtttttacatgttgtggttactactgtcccaatttcatatcacttgttgagctgttatgaccctttgaacaaacaaaggataaataatctcaccttatcttggctttgggggcagaacaattctcaagaaaattgaagctcgttatttcttaagaatggggttcaagtttggcttatgtgatgtgatgccactttaaatgttatttagcttgagttgtctatgttatcaggctgagacttttttttttttaatggaagatagcataatagacacttcgattattttacaaagcaaacacaactcaactttgttcttcttcttcatcacactccacactacacgcaacttccaagtttagggaaaatgaaataatcggatgaattcaaagatcatttaatttaccttgcttgaggaaacattcccgaatcaaaattcgtcatagctggatccgtgacactactggcgccagaaccaccaccggctcttgctctgcttacactctcctttagctcagcaactacatgactcatcctcggtctattcttagaactagaagatgcacaagccattgctacttcagtgatcttccatgccgaaccagcatcaaacctctcccctagctttggatccacaatgcctctgatatctcctgtcgacagcattaaagtcgactcagttatgtgtatgttctctgctgttgttcttgaacgtgcaatcaccggttggcctgtgacaacctctaaaagaacaaccccgaagttctaaacatcacttttctcgcttaattcttgcggtcaaatggtaccttcattttgtaaaacaatgtctacagcagcaaaagaccagtgaccaaaacaaagtagcaaatagactgacctgacaagtaatctcctaaggttccattagccataaactcatagataagcgccatcttcttgccttcgtggcagtatccgataagagcggttaggttcttgtgatgaactctcaggagaagttcgacctgatcatacacaagttggtggatatcccgattactacagaactcacttaatagagactaaacctcttagtgtataagagagttacctctgctctgaactcttcgtacccttgagccgatgattcagaaagaatcttgacagctacttggtcatcatttaagacaccatgatatacttttccaaaacctccttgtccaagaactctctcaaagttgtttgtaactttcacaacttctgagtatttgtagtatctcttagttgtgtccattggcccagtcctgacgccatcaccagaaccacctgtaaagatctcataagaatatttcttccaagtaaacttagaaatcaaagaagaagcaatgtaggatcgtttcttgatgtttttaccatttcgatgtctcttcttgtactgcaagaacaaagctattgctactacaagaccaagcactcccgtgacagatgctgctaatagaatgatgtacacactcttttttgtcttctcatccggaatttgacatgaagcagacacgcagacatagcacccgataacttgtttccttccaagtttctgcagacatatatgtgatatgaatataaattcctcaagttatagtgaagtcagtgtctatgtaatctacatttcctgttgaaatgttgtttgataagcccctgtaatgaaattttggttgcatcagtttcacaaatctgtatacaaaagaattccatatgaaatcgaaaaatacgaacaaaatatgtaacaatgtaaggtttgagaacgctgcatcaatctctccagtcaagccactcgaggataaatttctgaagatcaacaaactcttgtgagaacaagacatacagatcaaagacatatacgagcatttgaagaggatcttacaaagaaatgattctcggagactcattatcgacatagctgcagttaatatccttccaagggtattttactggagcacaagggtccccaagccagctcttcttcactccatacttggacaggaatggagttttgaagataaagatcaaagtcgagtgctttcgctaaattaccgtagttagcgtacatgaaaacgggttctgatcaagaagaagataaaatgaaggtttcttgtggtatttcctcactacctatatcatactgtaattcattaagaagaagttgaaggttacttgttgctcaagaaaactcaagaatctgtaacacttgcattaaacttgtagcgaggaatgtcaaatatagcagagagatatagaagcacaaaacaaagaattctatatataacaagaagtagtcattctctctcaaatcataataagctaatatctcacattgttgagaactaggttactcaccaactgtcaagatagattgaacagctacaccacatgcttcagcagaagccatcaaaccgatagcgaaaagaccaacagatgatactttgtcttaa

SEQ ID NO: 2193 - DNA, 3347 bp, Arabidopsis thaliana landsberg
  unsure (1)..(3347): unsure at all n locations
tgtacccaaatttccaattatttgattaattctgacaattttggatcgtcgtatttgttctgcattaaaaaaacactgacgtgtaaattttatttatcccaataccgtttacctttagtcaacgatttttttcccaccaaagtccccaaatacactcgtttgcgtttaaacctttcacttgaaactctgttttagactcttttatttgttagacttttttgtttgtttcgtcgttgttgttttttgaccaaaccaccatgcgattcgtcgcgccaccgcctcgttccggcgataactcaccgtcaccttcaccatcttccggtatatccgaagagattctctcccgttcttcggatcctcctttagagtttagtcctccattgatcgccatggtggtggttctagccgccgcttttctattcgtaacttactctcgtctcatctcccgccgttttctttcacctctattccgtcgttttagaaggtggcgatgccgtcgacgccgtctccttcacttatcttcagcttcctctgcttcaacttcatcctccgatctccgatcattttcacctttccctttcgactcttttcattactcttcttactcaccttacggattagacgattccgttatcaaaactttaccgctgtttctctactccgccgctgcttgcaccggaaaaccgcggtggggaaaaccttcgccgccaattgcagagattgtgctgtttgtttgttggaattcgaagaaggtgattatgtacgaacacttccgttatgcttccatgcttttcaccttgaatgcatcgatgaatggctccgatctcaccctaactgtccgttatgccgtacggcgattctcggatccgccggagttttaacgcctatgtcgccgttcgttccgttaatggctcctcgaattcgtccgagtctcgatgatgaagagaataacgcgatcatcatccgcggcgaaatcacaccgtcgcggagcaattggaacacaatcgctgccgatacgacgaacgatcaggagatcagagcgtcggtggaagagcaatcatcaccggcgatttctcggttccgggagctgaagagatcgtactcgttcgaatgcgagagagaatctgaatcagagagagtaacgatggagccagcgacggtgtctccatggagataccggagatctacatggaacaaacgtcaatcaccgttcggaaacctaatatcgaaatcaagagtgttctcgttccgttactacagaagcacgaaatcaccgttcttccgacggagatcatcggcgggagtgttttacccgatatcagaacggattccagcgacgggaagctcatcgcggcgaacgaaatcgatgacgagtccgatgttcttcagaacagcaccgcactcatcgagccggttaagatgcggagatccagaggcactgttatcgccggagagatggagaagaagagacacgtgtagggcagagatgtaagatgaaatttggccggtggtgatgataaaaagaaatattgaagtggaaggagagagcattaatggaatgtggggtttaagcatttaatggaattaaaatgancgaaccagaagaagatagagagattcagaaattgctcagctgctcacattcacaacaaggttcgtttatttattactatttagtataaataaataataaccatacctttatttcttcacctctcttatttaatgctgctaaaatacggatttcatttatgaatatgatataacgtatagtcatagagaaataaataatttgttactatgtacgttgaattttcctgactaggatacacactttcttatattactatgggtctcagacaaaagacgccaagacgatgaaggttttggagcctgtacgacggcgttttggctgatgattcgttttttcctctctttggagttatcaaaatgcattaacttcaaaagctgccaaagttatcatagaaacgaaagtcaacaacacattgaatttcgtttctataataactttacatcgtcggtggctttactgttttctgttaccgaattttatgttcaaacttttagctgtcgatttaatttttgaccaaatttttttgatgatttattacatattgatgaataacgttaaccaactgagattgagaagatctggatcaattgcggccctgtaagaataaatattatgggctttttagtatattggggtttagtaagaaaaatagaacaaggtttaggagatcgcctgaacgttgaggtcattgtaatcttgctggtgcttgatctgaagctcatgttaccttacctggccgtggagggttgtcttgtccaatctggtcaattgaggggatctccatacttggcttattttaccataccatgcctggcttagtggtagaacttgtaaggtgaattgggtgatagtggtagaacttgtaaggtggattgggtgataatttctagttgtacaacttgtaacttgagtgaaaaaaagaaaactcagagaagagatagggtgaaagcttcttacatgttttctgaatcacttttttcattgaattagaaaagcttgattgatactgaaagaacatgacaaagataaaattaagagaaacacacgcacagaaagaaaagagattacatgtagacagtgtttagtgccctcttttcctgttgcctccagctcgctcgatttgaaccaaacttggaacataattaagaataactgcccgacatccatccatttcatctactccaaatcccacttctgtgacaacattatcctccccaacaatgtagaccatgtctttgaccttgttctcatcaatcaatttctcacagaacatgacgactttcttatcctcgtctagcaagaaacttaggccatgccaaaaaccaacgtcaggcttcggatacaatgataacaccttgctccacgacaccacattgacctcaccaatcttacttgtcacccatacctccgtcttggatgtagaaccgccctgtactaacaccgaaagcttcttgtctccgacaacggaaagattagaagcctcaaaaccatgcacttgacaggggggaggcagagaaacataaccaaatttctctgttccaaaatcaaatttgatcaaggttatgcgaaggtccggtggccttcgtcttctatctatacccaaccagtaagtgtttcccttcaaagagaaacactctctaaagtagtccatgtagtggggtggcttgataatatcatcaataaccctccatgagtcagagctaaactcgtagatttcagaatccttgtctaaataattaaagctcatggcttt

SEQ ID NO: 2194 - DNA, 2731 bp, Arabidopsis thaliana landsberg
tttttattcatctagagataatcattacctatatgtgtactttgagttcatgataatatgtttgatgattacaggggtttttggatgtcgaaacaagagcagattggtcaagttttgatgattattgtaggtatgacactcaagttttacatattagcgcatatacttttactttatatatcagcttcaatattttcttttccatatgtgaacactatcaatattttcttacataatctagtcatttctgtttctatagtagttttagtggaataaggaaaacttaaggaagtcataacttgagatatctgttagtttgtcttgcttatgtgaaaggctataatatggtctctcaaatattttctcttgtaatttagaaaaagagatagacattactattaagatctttgtattggcactgaaaatgtctacattcgattatctttttgtaaggacgcataacttcaagtacccgcttatggtcaagaggttgtgttgtatgataatatcaggtgcccggcccgctgactgtcttgacatacttcaaccagctgctttatcttctgagatgatttcaaaggtgagttattgaagatgacaaataaatacattagtaactgattttgaaacgtttgagtcaaaatacactgggctgatctcatacatgacaagttatgcaaactttgaattacgtccccggagtttcttgtattcaatttgattgttcatgcattacaccatgtgaagctcaccttgttatgatgaattcattggctccactgagttgattggtcgtatagtcactggctttttaatgtttcagatagaagacgggtatggtttattatggaatgccttcaggaaggcaaatttcaaggatgacgatgttgcttgtatccttagagctatattttacatcaaatccattttatctccaacgttctgttttctgttatctctttgctatttacagttcttaacatccagaagttctgacaaaacaatggtatacggctatactcgctcggattcgtatcaatgcatttcgtattgacctggttggaggctcatgtggcgaagaccttctttcactagctgcagcctctgttgaaggtgaaggtgcagttggtcatgccgtttatatgctaccatccttctacaatcatgactgtggtaataatattcactttttgatcttttttaatatgtcgggttttcgtgaagaaattctttaatgtaccaacatcataagccaaatagtcttataaatctttttcgttagacaattagcaaattttttgaagtaattgcaaggtaagagaaaagaataggagtagaagattataacagaggtttgtatagaaggagagttatactgttagggtaaagaacatgatcagataaagttttactgagaaactagcaaagtatttttttttacttagaaactagatagttcaaatccatgtgagtctttacctgaattgtttttgtaaactgttgagttcatctattatgcgggtacgacatctattacgccacaaaaatcttcatctatttatgaaaaagaaagtgatgactagtttgaatgtccacagatcccaacgcgcacataatttggttgcataatgcagatgcaaggttgaacactctacgcgatgtcgaagaaggtttggtcttttatacttataacaaagatttttaattagcatttcacttcaatcttgtgtgcatttcacttgattggtaacactacatgcatattttcaggtgaagagcttcggatatgttatatagatgcaagcatgggatatgaagcgcgacaaacaatactctctcaagggtttgggttcctctgcaactgtttacgctgccagtccactgactaactgattaactcttcctctcctagtcatcttcaattttcgtgtatcttatataatatatgtgagaaaacgaggaatcaagaaaataacaaaataaactatatataaattcttaatggttttctaaaactatatatcttaaccaaattattttcaatcattagatagtgaaacacatataatatatatattaagcaaaaataggaacaaaaaagtgcatttaaaaagatagccaaattttattacataaaaaaagcttaacaagataaatcaacaaagaacaaaatcagaagaataaaaaaaaccaatcataaaaagaaattattgcactcatgcttcttcttaaagaaacaattcaaaatcaataataaggcgtcttgtagacatatggtggtggtggagacttgtaagtgactttaggagaaggagagtagtatggaggaggtggggagctgtagacgtatggtggtggtggagacttgtagtgaaccttaggagaaggagagtaatagggtggtggtggggagctgtagacgtatggtggaggtggggacttgtagtgaactttaggagaaggagagtagtatggtggtggtggggaactgtacacgtacggtggtggtggggacttgtagtatacatttggagatggtgagtagtacggtgggggtggggagctgtagacgtacggtggtggtggggacttgtagtaaacctttggagaaggagagtagtacggtggtggtggggaactgtagacgtacggtgagaggtggggacttgtagtataccttaggagaaggagagtagtacggtggtggtggggagctgtacacgtatggtga

SEQ ID NO: 2195 - DNA, 1407 bp, Arabidopsis thaliana landsberg
  unsure (1)..(1407): unsure at all n locations
aagctcttcagctcgcttttaagctcttcaagctcctcggctcgtcctcaagctcctcagctcgtcttcaagctcttcccatcactcgtcgcgagatcctcgactgcatggtccacctatctcgtcgcccagctcgtctagaccttcagcaaacaactcggtttgtccaactcgtctctctaccacggttcatccagctcgtcgcgagatccgcggcgtgaagtcagcaagtattttaatacgtttgattcgatgtattgagtataaatacgagtcgatgacatttgtaaaaggggacacacattgtactgaaactatactgaaatacataaatacttttcacttgatcactgttggtctaacaagatttaagaccttcacgaaacaaccacaaaattctaattgcggattacgacatccacacaaatcaaataaagataatctcagatatgatggaatagtactagtacttgatagtgattttgattgtcaaattttgtaaagagcaaaaaaattgaagtctagaatgaaagatgactcatatgtttcgaccaagctagtcatgaacacaaacaagaagagaaatgattagttcgtgattgagagattatgaatattcataatgttctaaaacggtttatgtggtcccctaaacattatgcagccacaaaccgtgacaatcattttttcggacattgaaattagacattttagttttgactggccttcggcaatattaggtacataattatcaaagttaacatgactccaaaaattaacatatgttttttgatttaaatgatttgatggtaatattaaggttttcatgtcttagagcaattttatttgtggtttctagatataagtttcttaacattaaaacaacaaaaataatattatctaactatgtgagtttcttgaatagttaagaaattctctccaaaatttcctatataaagtattttagagatgactttttcactaatcaaaaagcccacacattcttttataataaattttctctctttaaaataaaagacttatgtttagaaatcatcaatgggattgttcttatgttccaagtgctccaacatcgactttcaagataatagtctttgtggttaaggtgacaataattcgattaattttgggtgtgagtcgtgtgactatcccacgaaaataaaattgttttgccaatttgatggtaaaatctcacgataaaaactcaaacaataacagcctaccaaaaaaaaaactcaagaccataacatgttaaatttaaataaataaatatatttttggtttcaataatattgttgtagaagttttaaaatattttagagattaaaatanaaagaaacacattgattaattacaaaattaggggctccttataccttttttttt

SEQ ID NO: 2196 - DNA, 1354 bp, Arabidopsis thaliana landsberg
  unsure (1)..(1354): unsure at all n locations
tcgatcaacctagtattgatctttctctctctacaagcatgcaaaatgcgccaactatggatttgcccaggccgctgacaatctacttaatcgtcaatacgctcgcctcaacttcttcagcaccgccaacgtttctgcgataacacagcctacacgaacgccccaaccacagacgatcttgttattcaagattggcgcgatgaaataagaaactatatcgcagattgcataatcctgacagataaatgggcagcccgacggttacgtgcccgcagcgtgtagtatacattgttggatggcaatctccatcgttggaacgctgttggggtacttctctcctatcttgtcggtgacgaaacattacaagttatgcgtgaaattcacgaaggcactggtaggaaccattgagaaggtcgtgctttagcactttgcgtacgtaaacatggccattattggcccaccatgctctctaattgcattaagtttgtcgccaaatgcaaaaaatgtcaaacgcatgcacctattattcacgcacctcgatactgttgaagaacaacgttacctcactctccttcgcatcctaaactaccagcaggccgcgataaaattttacaacaaaaaggtgaaatcccgctactttgtcgaaggtgatctcgttctctgcaaggtgtttgaaaacaccaccgagataaatgctggcaagttaggcgctcactgggaaggcccttatctaatctccaaagtcgtcaaatccagcgtctatcaattacttcaattccttgttcttagaactcgtccaaccttaaacgctactactattgtaccgctccgcatcactaccgcggcacactatcaccaccatctgcatcattccgcgtcccaaaaaaaaatattcggtaacaacccttaccgtatcgaactacggattacttgatcccttctaaagggtacgtaggcagcccttcgcgggcacatctataacaaaaaaaaatgccgaacaaagtttacaataccgaaagagataaagcaaatagcataaaagcgacccccatcctcatgccacttcggaaggtcacaacgacctaagtaccaccaatccttgcttcgcccacagtcgtcgtcatcgatgcctcgtcctcaaannnnnnnnnnnnnnnnnnnnnnnnnncaagaagatcggtaatctcaagagcatcgaccacttcgcgccaattgtttttgtcaaccttaagctcacacatagtcttcatcatgatttctctaacttttttgatcaactgcttcaagagtttctgagtacctacaacttgacattgcatgaaaagagattcgttgacaacacgtctgtcaagga

SEQ ID NO: 2197 - DNA, 639 bp, Arabidopsis thaliana landsberg
tcagtattcgttacttcttcatcgtttgattcatcggaaactcaaattccgccggagatactctcttccgatgctcttgctccgccgtgttcgtgttgttcttcttcgtctctttatcttctactcctttgtagtaaccatctccccagccgaggattactctgttaattctggtggatgaatcgaagtcgtgtgaaatctaaaaatttgttgagattgggtttgtgtgtatgtaattagattggcgatatgtgtttccatagataacaataaaggtgatttgcggttgattggattttgagagattggaaatattacacgggtttgaactaaccaatcaaaatttcggtttgaaataataactaaattgaagtaattgaacattgttttgcgtttcttgatagagagagattttggcttcatcaaaacacgtggtattcttcttcttcctttctcctttttccttgcaccccaatttgtttcaccatctgcaaaatacgatttgagttttgatagatccaaaatacaaatgatcaattaatcaaacgttcatgtgtgacgttcatgatatttgagttgcgtgtcgttcgtgaagcaatcaaaaagttgattgatgatgtcgtgtccctcatgtcaaca

SEQ ID NO: 2198 - DNA, 1512 bp, Arabidopsis thaliana landsberg
caccaatattaatccatgtttatatgtatcaatatgatcaacagggaaattaaaacaaaacaagtaagaattgttagaccaatcatactaatgaacctctaatataacctaactagtgacaatctaaaataaaataaaagtgcacggactacataatttatatgaaaatacatatttgctgagcagacagaacctaagtgccaaacagaaaaagacaagacattattgagatttggttcacatctaatcaaatcattcaagggacagcgcaacaaaaatccaaaattaagaatttaactaagaatcatccccacaatcttaagactactttgattagtcttgtctagactaactaagcaaacagcagtacttatctccctaacctctatgacaggttttggtttagaagttggaacaagtcacaagtgacacaagcagtgacgcaatttaattagtttacaagttgattacaagcaaaaatcaggtggtcactagtcacactcaatgtaatttcccagaaatatatgatcagaccgtagaacacaaccctacattctccaataatccaattaaatatatgcttgcgcttccattaatgtcaaaacattatacatttatatctttaaatgattcaatatatgaaggtgcttcgagttatttaacaaaatcatggagcctacttgcaaagatttagtaatagagcccaacaggttggtttgtaccttggtaaagcattatatgatgtttgttatatgtcctagctgttcacctagagggtaatcctttctggttaaccgtggcgtgaactgttctggcagctgccactgctgagtctcctcgtttcactattttctcgagttcttccaccttctctgacaacaatctagcatttgtggtagtggcatggaccaacttgttagcagtctctagggaagtgcagagctgaaatagaatgggaagcaattaagaaactaatttacgtatacgttactagccacggaaacaattcatttgcttttccctcttctaaaaaaaaagaatcccatattatatatatttttcagatattgatttcgtaccgacatgaaaagaccaaggactttcatcaaaaggaacagaaattaaacaaaaagaacacatcaaactctttcaatatcaaccattgatacgattggtgtatcaagaagaacaagaatgaaagacaaagcaaaagaagacacgtgcaagtgaggaggcacgtgagaaggaagcttacttgaagaataagatatttttaggatctagtataaatactggctctgaaggtttagagaggttcaaggtgattgttgttgaattgtgtgagtctcacatgagagacttgagagctgagctagtgatgtgctagtctctctcgtgtattgtgtgtactggtttggttaaggaatcggaggtatcgatattgaaaacttatcaaccatgtcctcttattcaaatttcaccgaatatttgtaaaatcatggcatggaagac

SEQ ID NO: 2199 - DNA, 802 bp, Arabidopsis thaliana landsberg
atgaatatttaaataaataaattatgattatatcattgtctgtatttaaaattgggaatcattctctatggtatataataagcaaatgaatatttttttagttttttagtctttttaaactattaattatttaaattatattttgacccagtaaaaagtatttatgggtccgccgcataggcaggtccaaagagcaaagattaaagaggccagctgacccaactaaaaatctacatttgtgttatagccctttaaaatttatgatattatttatatttcatatgttttaacccctttaaaattacaaatttgatgtaaaccttttaagttttattatatattttcttctactttgtgttttgatacttttagccttttaatgtgattcacccataaatattgaacctaatttgcggtatattttaaactaataatatttttttaaacttgttagtttttttttaaaaattactaattattttaagttatattttgatatgatataaagtatttatgggtctgcctacgcgtcagacccaaaaagattaaaaggggtcagccgatccctctaaaattctatatttgtattgtagccctttaaaattattttgttttttcccttttaaaattacaaattcatatgtaaactttttaagttttatcgtatttttcttctactttgtgttttgacactatttcttacatgtttttttttttttttggatttacccataaacattgaacctaataacgggtatttttttaaagagatgagttcttttttttttagtatgcggcttgt

SEQ ID NO: 2200 - DNA, 698 bp, Arabidopsis thaliana landsberg
gaattcgtccttaagcttcttttcttcatctttcgctccaaaatgtcttctcatcttcattgttgtccctctcaatagaatacctgaaaagactctagaaataacaaaaagactcaaaaacctatatctaaaacatagttaaaacagtaaaaatagggttatctcaactccccagacttagcttttgcttgccctcaaacaaaacacaaaagccgaacccgtggaagaggttctaaaaacaaagaaacccccaacatagtctattgccatgatcattctaaccaaattcatatgcctagtaattctaatcaaatcctaaccaacatgtacttctctacaagtttacacaacattctagattccatacctaagttccacaactatatccaccttgctttcatcgctgagtctcatcaagcaagctaatattcaagaaccttctagactcattcctgtaatataccatgataaatcgaccgttctttatatttttctggtattggttctcgtcccagacttattgacaccgttgacatatttccatatttccaaccgttgtaattgatcattcctaataatgtataataattgggtcatggaaaacattcctacccgtttacactaccgcaaaatatatcaagcccctttttttttttttttttatcagggggaggggggaaaacctgcctttttttaaa

SEQ ID NO: 2201 - DNA, 416 bp, Arabidopsis thaliana landsberg
gatttcccgcttgatcttacctctgattttggatcgaaaaactgttctgaaaacttgggaacgagatctatacagaaccgggggaactggcccaaactccatcaaacgtgacaggaaacggatcaccaattccaccacttgaaccttttccttctttcacatattcacacaaaaacccaaaagctaacttgatctatccaatcaagccgttgtttaacagtgatgatccatgacgttcgctttcactccacacttgtacgtgatcaaaaacaaaaccacatgctccaacaactccaagttgatttgatgttcttaggttaataatgagttgctggagatgatgacgtgagaaggctgcggaaagatgacgacataagtatatatacatacacatgtaacaaaatccttattttttt

SEQ ID NO: 2202 - DNA, 407 bp, Arabidopsis thaliana landsberg
actctcttcaattctgggttcgagcttcgtggttttaaaagcttgtaattttgtgtgatcaagctcttgcgacgccgtttgatgcgattcaactttgaaaatttgatgaaaagcctcttggttatgcttctattgctcagttattatagattgtggtggaaactttacaattaagtaaacatgattgagttagactatttaggagcttgtaaagcaaaaggtcttggtgatggaccaacaattaagctgtatatttatgttgaaattgaggaagataatctggtcataatgctttctagaattagctactcttgccgtagaattattatctcttgacatggaattgtagccccattggcaaactctggttatgtttatactacgacaatctcattcatttgctttct

SEQ ID NO: 2203 - DNA, 1067 bp, Arabidopsis thaliana landsberg
  unsure (1)..(1067): unsure at all n locations
cttcctccagctgtgtgcaagaaggatcgcccatggattaatggattctctatttccttcttataaggcaagactacaaagtctgtaggaatcatgctctttccaatcatcacgggaacatcgataagaattccatctggaattcatgtagaacgatctgccaacacaagggtgataaaggtaggctcaagattggagtacttaagacgcatagcaactgaatgaggcatcagattcacactagaaccgagatcacataaggctcttgggaaggaattatggttaatggtgacacttagtacaaagattccaggatcatgtagctttcttggaaatcgttcctgaatgatatcgctgccctgttctaaaatcatcataacactgcattttttcgtcaaattcttagtgaccattatcttgacataccttcttattgtgggagagagatgaatagcttcaactagaggcatctcaacaatcagcttatcaatcatagccttgcatctgacatcatctaaggcttgtcttgactttttaggactcttggggaaagaaatacgccgatttgctgacttggtttcagccggaatttgcacattgtctgaacgagctgggtgtcgatcgacatgggatggggtgtcgatcgacactantgtttcgaagacttccaaatgatctaatggtgattcatcgagagctcctctaaactttcctcttgacacaagatcacaataggcnagggtgtatagcaaagtcttctcgttcaaatggtggtagcttgaatgctgattggttggtgtagaaaagatcacttttgttaaggtcgcctaatttagccagctggttctgcagagggtgtccatcgacaccctgatggagtcggtcgacactatcgtgaaatcctgccaaagaaatgcgattctcaatttaaaggtacctgaaacacaagaaaccaaaggacaaagaaacacgtgaataagtgatagaaacgaagtgtctagacttaaaacaacacctagtaaaatggtgaactaaaagagaacttcgacaacagcggcaaaattgat

SEQ ID NO: 2204 - DNA, 600 bp, Arabidopsis thaliana landsberg
ttctcgcctcgcaattgtctaacgcaatgaggatcggagaatagaaattttttaattggcaaaaccaaaactaactcagaagcggcggagcttcaccggaaaaagagagaattataaggaaatcaagatcagagagaagagagcacaccttgaaatttttcttcggaaacttcaaatgagaatttctcaaggaggtggctcgatatatatagaacgctattaaaacgctctgactttgaaggctaaaacacttatctttacctttctaaacacttgtacgatcgaatcatcatcttttcaataataatatcaagaacaccgtccgcgttaatcgaataattcttttgttctttgagagtcttgcaaagatctgttatttgaagaaaccctaaatacaatttcggttgtgtgagtttcgactctcacacatctcctcctcctaaacctcaagatttcatcaataagagcttaagatttcaaaaaactgttctacggttaagcaagctacgagtttctcgtcgagcgcttgttcgttttttgatgattgtgcagaaaagaagtattcccccatacctagtcccccctgctgatgctttgttt

SEQ ID NO: 2205 - DNA, 483 bp, Arabidopsis thaliana landsberg
tagggagccataccaataccagtttgaaaactattattgtatgcaaactctactaaccttagatatttttccgagttttctccccaatccaagacgcatgccctcaacatgtcctcgagggtttgaatcgttcgttcggactgtccgtacgtctgtgggtggtaggcagtacttaggttcactcgagttcctaaggccttgtgtctcggtctgacactatactaaccggaatcccatgtaaccgcaagatcttgtctataaacttctcggcaatgatttctgctccatccttatccgagatcgccatgaagtgcgcagacttagtcaatcggtctaccataacccataccgcattgtgtttggacttgatcccgttggcagtccaatgacgaagtccatcgttatgtggtccacttccattccggtataggtaggttttataacaacccacttggtacttgatgttcgctttgacagttgaca

SEQ ID NO: 2206 - DNA, 562 bp, Arabidopsis thaliana landsberg
  unsure (1)..(562): unsure at all n locations
tatgtgtgatcaataaccttggatccaacaagataagatttgattttctcgaaagcaaacaccacagctaagggctccgggtccgttttagcataattcctttgagcatcatcaagtgtcctacttgcctagtagatggcatgaagtttcttatcctttctctgtcctagaaccgcctcaactgcaaaatcactcgcatcacatattacctcaaaaggtcgatcccannnnnnnnnnnnnnnnnnnnnnnnnnnnnnnnnnnnnnnnnnnnnctgctgaaaggcatcatgacactcttgtgtaaactcgaatttgacttctttgcaatgtagagcggtcgacttctataccatgctcagaaattctgtgaccgagaactatcccatcctacaccatgaagtgacatttctcccaattcaaaaccagatgtttctcctcacatcttgttaatactttgtagagattttctaagcagtcctcatacgatgatccattaactgaaaaatcatccatgaagacctccatgatatcctcaatcatgtctgtgaagatagacatcata

SEQ ID NO: 2207 - DNA, 468 bp, Arabidopsis thaliana landsberg
ctgggtagatgggatcttatttctgtatgcatagcttgggacttacctttagcattttactatttcttaatcattttttgagagatcccctgttactgaagcctattctgtaagggaccatctttctctcttgaccttttgccttagccaaatgagttcattgatgatgcattgcttgattcacgttccagaactaatgaatgttaaagggattggtagatttgaaaacatgtgtaggtcgagcatatgagtcggattgagtgataataactgtcaacttggacattgatttcatctggtttatctggtgctttggttttgagtccccgctttcaaacctcacctacagcttgttcttgattgtttggttgagggcaagcatagcctaagtctgggggagatgataagtgcgtatgttgcatgttttgagcattcatttgtcatcactttaacaccatatcatcactg

SEQ ID NO: 2208 - DNA, 650 bp, Arabidopsis thaliana landsberg
tgcttgtttcgggttattataattgttcttcagttattaggaatgtccctcgaagcattcacaacattgtgcggtctactacaaacaaattacggtctacaacgaagttcaaaaagaaaagtgtggctatgtttttacgaatatgtgggcataacgaagttcataaagagatgttggtttgcattttggacgaaatcaggagaccatggaagagaaaatttgggaaatttcttacggcaattgaattactagcatgtgattatattagaactccaataactcaagatctacatcgaattcctgaaagacttcaagtagatcaaagatattggccatattttagtggatttgttggagctatggatgggactcatgtttgtgtaaaagtgaagcctgaattacaagaaatgtaattgaatcgacacgataatgcatctttgaatatgttattcacatatattttgaatgaagcaatgggatcatatcacgacacaactgttcttacaatgacacaataaagtgattctgatattcccttgcttccgctagaaaagtactacgtcgttgattcttgctatccaaacagacaaaatgttttggctctttacagctcatcaagatgtagaagtgttaggtatcatatgtcgcag

SEQ ID NO: 2209 - DNA, 1732 bp, Arabidopsis thaliana landsberg
aatgggacaaacaggacaagaccaatcttgaatcgagagtgttgctaaagtgacagcgattgttgcgtgaagcgttgagactatacgggtgctgaagtcgaacgagtagcttgagaagattcgtcttacaaggatgaaaatgagaccccatgagattactcctattgttgttatgcttattattcttatgtattcttcctccattgatctccttctcgtcttatatttttggttctgacttcagagagacacaactttgttatctaaggtctttttaatgctcaaaccataaaaaagaagatgatgtttatatgcttttggtctttggtttggtctttaggcgttattaatagaccgagattgtgagtttgccatgagtttgccatgtgaaaaaaaaaaaaaaaatctcaaacgtacacttttagttttagggttttgttagtgagaatctcggagacacgatctcttacttagggtttgattggaaccgcaaacacccttttccttaaactcccgcaaccgcaaccgcacccgctgcgtttaaaccagtcaggccctcagttgttagcgattgatacaaattataaaaactgttaaatatcgttttgaaccgtttgagatcgctagttaaaaacttttttctgcaagcgtttgcggttgcgagcagtagcgattagtgaaaaaaaaattctttttttcttaattaattaaaataattatagctttcactcaaaccctaatcactacaattaaaataatctaatcttttatatatcttatttttattagaaaactctaatcaatatattgtaaccatattctctcaattatggcatccacccaaactgatgaaaatcaaaataaagagctgagcgcgagggtcacctcttcctgtaatccatccattggctaaggtaatccatggggtattccatggcatcgttttttttttatcccgattcttttgagttttgattgaatacaccgtcagtttgtttcctctgtcagacgagatgatatattatatttttatttttttttatcaattttcgagatgatatattgtattttatttggttagaaaatcaatttttctaatattatcaatttatcataatatattatatttttatttcttttaataataatatattatatttattttggtattttttatttaataactatcatactcgctggtttaccagtcataaaactcccgcagacgcgcccatttatcaaacgctcaatcagtcgttcaaaacgcttgataacgcttgaaaccgcaaccgcccgtttccgcaaactcccgcaaccgcaaccgcacccgctgcgtttaaaacagtcaggccctaaatcgatattaatacaaaatggtatactacatgtgaaactctaaaattaacaatcaaaatacaagtgtataattttaaacactaaataatatatttttttaaacactaaatttttttgaataaaaagtactcagtaaaacatatgttttttttaaagagtttttagataattaaatcagagaatatggttgggcatatgagtaacccattcgagttcgggtagaacccgttcgggtttgggattaatgggtatatgatttactacccaatagaataattataaatattcggttctggttcgggtcggatccagttgggtttgggtcagtttggataaaaagttcagaccctataatacccaaaaaatagaacgggga

SEQ ID NO: 2210 - DNA, 558 bp, Arabidopsis thaliana landsberg
cctactacgcaagctacgcggcaatgtttgggatgcataacacgactcgatactcacctcatagagatcaaaccaagggttatccaatggattgatgatgtaatccaatggattgatgacggcacttattcgtccaaaactttttttttgtgtcaacattttttaaaaaatcttaaaacggatatctgatgtaatatatggatcgtaagaaactcatatataatattaataagtagtataagagcgtagaccatgtcctgggtcgtcgtccaaatgaccacaagaagatttcataacagaggaaaatatttctcattaaataagttttcctgcctcttttttgggtcggctgccgtttactattggcaattgcgatagttactctttttgcgtgtacgactttttttgttttttacatatttcccaataattggacgttttctattagtttgtttgatactctgttgtcttgctaaaactcattaaaaacattaaattactttcttgaatgaagctggaacaaattttacataaaaagaaaatgatgggcaagttgat

SEQ ID NO: 2211 - DNA, 534 bp, Arabidopsis thaliana landsberg
gaaaaagatatcttttgggttaagttgatcatttaaaaactgtatgacttcaggtttatttctgattgattcaaaagtccaaggcaaaatctctaaataaagaaaggttaagcgactaaactccaaaaacaaaaaaaatgagggcaactcgggttcatcgttccgaaatcagagggatatatcgtgccaattacataatcaattggaggttttgacgagatttcaagacctttcttcatcaacttcgatttgattatttttgggcaacttgtgatcggattttgttgtgagttaggttgatcgtgcttctccatattaattaaaatatggtattctgttaagactgatacattcgtataatatgttaggtgtgagtttaaataatcaattaaattatttgaaggttaatttccgagagtttgtttgtttgattcgataattaatttggatatgattatgataataagatatgttattctgttaagaccgatatcagcatggcactctgatttagctagctctattgggcaatct

SEQ ID NO: 2212 - DNA, 513 bp, Arabidopsis thaliana landsberg
gaaacaacaatttgatggatgctagaaccattttatatccaccaccagggttcactcaacaagggcagggatccttaacagctcaagatcctgaaattaatcaactcattcaacaaatcattcaaggacaagctactggagctatggcttttgacaagaagatagctgattttcacaataagatcgagtgttgttacaacgatctaactgccaagtttgaagctctgaattccaaaatcaagtatgtggagagtctacttcgaagcatcctcagtaacttccaggaaaagcagttcaaaatcctaaggactatgctactacaaatactatcaccatccaccaagaagatgagtcttcaccaagtcatcagactcccaatactgaggacagtttgattcaagaaggggggggggattcaattcaaattgctgcacgaccaccctgcaattcatcatgattattgagcccacacccttgctgaatactcaccactctgaaaaggattttaaaaga

SEQ ID NO: 2213 - DNA, 540 bp, Arabidopsis thaliana landsberg
  unsure (1)..(540): unsure at all n locations
ggcgtcacaatgccacccacgcatagtgctcctcttatcntctttttcccgttcgtcaacgcccacttcctgtatccacacagatggatcaacagaggcattcctggcggtgcgttgttgagatcgcctctcaagacattcttccacttcgtccggcggagaatccctgtaagcgcataatctatcatctccatgtccgtgttagacacggtgtctgtagactccctggagtaaaagacgttggcaaccgatctctgaaagtagcggatcacaggactccggatttggttgctcttagactgcgccgagtttagcggtagattgttccctatagtggcccacaaatccttagctcctctctgtcaaatctgggtttggttccctttccactagggaaaaccaacagttattccaacttcttgatcgaaagctgatcccgttgtcatccactgagaacgtcaagaagcctaacnnnnnnnnnnnnnnnnnnaagtctgtgagtgcctcatacatctccacttgcagcgnggaaagaaactc

SEQ ID NO: 2214 - DNA, 583 bp, Arabidopsis thaliana landsberg
  unsure (1)..(583): unsure at all n locations
attaccatatctacaaatatgtcgatgttcctaacgaatttcaatatcaatatacatattacttgctaatttacagattatctctgatggtaaatgtcacatatttggcctcatagtctgtttccccttcacgatagccaatagcatctaacaataacaacaaagcaaacagatacttataaatcttagtactaaggaaatacaattgcaagaaagcataaactatatacaattaccagttacataatcctcagattcagattcgacttcattagcannnnnnnnnnnnnnnnnnnnnnnnnnnnnnnnnnnnnnnacaagccacatttttgtgtgccacagaaactcgttttcataattaaatgatgagtacttaggtattaaagttgctctcttcaattggaagtcagcaatgcaatatcactttccttcaaataggctaggcttgtaattgttcaaataatccccccaaggtactctagcgtcaattctggttccctgaataaaaagacaaacatataaaattctttgaactataataaaaacccaaaaccaaaataggaaaccaaaaagatggttacgc

SEQ ID NO: 2215 - DNA, 601 bp, Arabidopsis thaliana landsberg
taagctcaagtcccaaaagttgtatgtattctccagacccatctgctacaaacttaacatgcttgttctcagggtatgtcttttctcatgcctttgtcacagatggggcattccctgcaaccaatcaatgcaaacgattgcgtcaatacaactaaacgttttgatcagatttcagaattatacacaaactcatcatagagatcaaaaacatatcaattcatagttaccacttaagcaaatgatctcatcaacaccatttgatttgagctcctctgctttctcaatgaaaccattcacatgctttgaaactttgtacctgcatgtaggagggaaagcaccggggacaccaaagagtatgactttcttaccggcgacgagagagtgaacggagacagtctgaagttgatcatcgtcatcgaagaaagagatactcccgtcaggtacaaaatctccgacagcaattggagccatgaggctgagaagcaaagagatttgaagagttttggactttgagcgaaaatgaaatagccaataaggcttgagagtatttctatgaatatatattatgtaaaaagataaatctctatttagataaaatcat

SEQ ID NO: 2216 - DNA, 1127 bp, Arabidopsis thaliana landsberg
aaccactataagggtgaaacgaaggaaacaccaaagttgatacatgaggatctaaaggcgagtagtccaccaatcatacacatagtcaatagttgttttctggagaacaaatggactctcactgccaatatagaggatgcttccagagaagtcatgttttctgaatcaagaattggcaagtttgagagatgttctgctgaaagtctcacttatgaagtgttccatatccagaggccaccagagctgttagtagcagagagatggttctgttcctttcaccacctttaggacaaggtgattcttcatcgggggagtattgataggttatggattcccattacctttataaagaagaagaagaagctggtgtgagactaactgtcgaagaatgagacaagggagaaagactcttattgtaagagagggtcttagctactatctttattttagaactatgtcgttttaggtctcttcttctccaccttaaaggtgcaatacttctctccctccatttttgtctgttcttttcatatcagataagctccagggcttatcattgttgcttttcattgagaatgtcgaccttctcgactagtgaaaatgtttatgttaactcaagaaagcgtcaatcttctgcttcagatgcgtgactgactggatgcgatgctctgcaacatccgtgagaataaagtgattctgaaacaagaaagggaagccgctgagcttcaacaaacccagaagaaacctgcaaactctgttgggaatttcgtcgagcaactggcgggccaaaaacaggaactttcgttggtgcatccttcaacagaaaattcgaaaaaggattcgcacgacgaagatttgggactaatcaagcagactcaacatcgttttgagcttgtggatgcacggattcagaacatagagagtaagattattcatcgatgcaagctttcgtatactcttttggcaaggagaaatttgggagttagaaaattcatgtcaaacgaagctaccacaaggttcgaaaaagaaaaatgaagagtgaccatcgttctcactcgttacatttagcttttcgtgttcactcgccaagagatagaatgtatctcggtgatgacagctccaattcg

SEQ ID NO: 2217 - DNA, 677 bp, Arabidopsis thaliana landsberg
ctcagccccttgtagtaaccaatgaagctgccacatcaaacaacaatgatgaatatgaggcaaatagtaaccaacctgtaagtagctgtcagtttttaattttacatgttttgcattttggatttgaattctgcgtttattaaaccgtatgtgtactgtgtttttttcagtcttaggtagtagaggagaagccaggttctgttgatgggttgcctattcaaagagtggttaagaaggctgttaattcagtgaagaacaaggaagctgctacaaaggtccttactaagaagaaagttgcaaaatctgataagaagaagacaattgtcaacgtatagaaggtagaaaaaccaaaatctgatgaccaatttgataggctgaaggattggctcgaaccagatttgtaagtgtctatttttcttcacatagaaatgttttatgctatcattactcatgataatgactcccagaagcgattggccaacataaaaatatggatagctgaaagactatgttagtatagcaattttaaaagttttgcttttaattgaattaaatcattttactgttggcttgcctgaaaggtttatgttaactattacataattggttggttttgattaataatggcgccacatgggaacctgcaatggtcattggttcccccgaaaaattaaatc

SEQ ID NO: 2218 - DNA, 506 bp, Arabidopsis thaliana landsberg
tctagaactctcacgaaagatatataaatcataaagtttttgttgtgtttcaaaataaatgacaaagttattgttgacttgccatttcactcatgtcgttaaataggttaacaaaaatcttttacggcgttaatgtctcgcttatttgctctgttaaaacaaaactatcctcactacttctacttccttctttcgttttgtcttattttgattcgatttgggctgaagaacattgttcgagtcctcgccacatgggattcgaatcgattcagcttttagaggatttgagataatagaatcaactggattttaactcgcggtcataccgtgggactattttgttcttttaagaataaaatgccgattaaaaatatatatgatatcacattgtgtgtttactgaatgtacaactcttatatgtgtatattatttagaatacaaccgctatggttgattttgactggttaaattatcgaaacaatattgtccagtgtattaagctaaaa

SEQ ID NO: 2219 - DNA, 424 bp, Arabidopsis thaliana landsberg
  unsure (1)..(424): unsure at all n locations
tcgttattgggaattagaccgggctagctttgcttgctgatttctatcacaggagtgaattgatctgttgttgaacctgttgtctaaggatagcttgattgcgcttgttaaccattcgaataggctaggataccactctattcgattaccccatccttaggaatttctcgtctatctgatttctctattttatcgttatcgcttaatcgttctcattgcctgtttcttagtttttgcaattactcgaccaacttactcgaccacacctagtgtctggcaacagactgtgcagtcgagtacagatatctcgtttcctgtctgttactcaaccagtatactcgaccacacccagtgtctggcctagctggttcatatcctgtctgttactcgacctgttactcgaccacatnctacttntggcatc

SEQ ID NO: 2220 - DNA, 582 bp, Arabidopsis thaliana landsberg
  unsure (1)..(582): unsure at all n locations
agagactaaagagagtgtgtaccatgcgtatcagattcaaactaataatgttagcaacccctgaagaagataagactatatgcttattgtagcctttattctctgttgaatcctagcaatgaacattataggcagagcaaaacgactaatatgaaatggagaacactagacaagaccaaccgatgatacttagtctaaagtcaataccttgtccctatcaagcccaccaaaactcttagcagacaacattcgaacaaccttaatttgttgttgggctttgtttaattagattgtttgttaaatataaaagagagtgaagaatgttcagcgttaaaggaaaaaaagtctcgccgctcactaaccctaaaaaaagtaactctctcactcactcttcttcatcataccgaaaaaaatccaatggcttctttggaaaatccagcaatcgattcttcaagcgaatttgagagttcttctgaagagatctcttcttctaaaganagcaaacccaaagaagctcccgtcattgttccgtcaccaaaaaccctaaactctccttccgccggcgtggcagtttctgatgac

SEQ ID NO: 2221 - DNA, 7346 bp, Arabidopsis thaliana landsberg
tggcattggagaagaactttggtaggaaagccttcttgcaatcatctaaggtggtgattgagtcatggggcagattcttctcccagatgtgtgctttgtcgcccaaggagaatggaaacaaacagaggttgaattcgtcttcactgacaccattgatctttgttaggttgcagagcctttcgaattcatcaaggtggtcgagtggatcctccattggcagaccatagaatttgttcccctgaatcatcgagatgagaccactcttaatctcgaagttgttgttctggatagtaggaggtgcaattcctttcctctgatggtgatcacgtggtgcatctccaacaccaacgttggcagggccattttcttgattctattcgtcagccatttcgagtggttgctgaggtacaaggttgactgtgtttctcctttctgtgagttcgcgagctatgcggttgatgttgtcgttgaaaaggaggttttgattgcctgttgatcgagtttgcatacagcagaggtgtacctggataaagaaaacaacaagaaaaacacacagttagtaatcgaaaagaaaatggaataaagaacttgatctaagcaagtctgaaatcttgaatgtaataaacaaacacccaattgacaagggcgccaaattgataataggtttttagtcaattatactaaaaccccaatcatgtcgttgtagtattttaggttgtcaatccaaatgggtgtgatgctaacaatcaagatgtgatcagaagtcaccaagtcaagccaagcaataacaggttttggtgtgttctagcagtcctaagtgaacatgcagaaaacataaaatcaagcagaaacagcaacacattgagcaacacagctcgatgcagagcactgggtgaggtcgagtgtctggtcgagtaacagacagtaaatgaaacaaagacactcgactgcacagcctgttgccagacaactgggtggtcgagtattaggtcgacgaacaaggaaaaattacaaaaactaagcaacagatgacaagatgcagtaaacaacagtagagtaaacaataaaatcaatcaggtaaagaattctcgaggatggggtaattgagtagtttcgttttctcagtttacaggtgattgacatgctcaataaattatccctagacaacaagttcttaaccaaatctaagtgccaccgcaagagaaaccctcaagttaacctagtcccagactcaatcaccattgacgagagctaacctaacaggcattacgaatcaacaagttaaagccaaaacgctccctgcaaccaataccttggtacatggtcacgaatctctagaattagtggttcagacatttcatccaacaccttttgggcgcggaaatgtctgggctcaaattccagttgatcagaaagcaataggcattaagaacaactaatccagaaaggatctatcaatcaatactcaatcacctagcatactgagaatcctacactactctaacccatcctcagaaacctattcactactcagacatcataacagaaagcataaacgttgaacaaattgaagacatgataacaacagtgtaacatcaggaagataacagaatgaacaacagtaaacgaaatcaagaacaaaagctgaatactgaatactgaatagataaagagaaatccgaattacaaaaagtctagaacataaagtctgcggaataaaactagataaaaacttcttttctgcgaaaatgtgaagtacatgctacttatagccaaatattctgaaaccctaatactcaaaacgacgaagtattgggacggattaagaactgtactcgacccatgtggtcgagtgggaggtcgagtgaatagctggagtcttcttttcttccttgtgctcgagtgtctggttgagtgcggaatgaagaaggctctgaagcttgtcatcgagtatgcagtcaagtggtgtgatggtgatactcgacttccaggtagagtgatgaggtcgagtagaggtcaggcaatggggataagtcactcgacctgggggtcgagtgatgtgatcgagtggaggtcaggggatggagatgaagacactcgacttgggggtcgagtgatgtgatagagtggtggtgtcttctactcgacctggggtcgagtggtttgtaatgatcaggtccgcttcttccagttagcttgtcgacagctctaaatcacctgaaaacaacacaaatatgcaacatgcatgcaaaactatcctaaacatgcaaagtgatgacaaatgatgtgaaatggtataaaacagtgatgatatgatgctaaaatgatgtcaaatggatgctcaaaacatgcaaaatacacacttatcatacaccatcaaggctttgacaaacaagaagaagcttggttagtgttttggagtcgaatatgacttgatatcatgtgtatgattcagtataagaacctaaactgcaacgggatcttaaaagcctaagtattgttcccttattaaaagatacaagaccaaagactcatacggacttcgactacaccatcaaagctttgaaaagcaagaagaagcttggttagtgttttggagtcgaatatgacttgatgtcatgtgtacgattgagtatagaaacctaaaccgcaaaaggatcttaaagagcctaagtattgtttcttttttagaagatacaaagcctaagactcatacggagttcgcttacaccattaaagctttgagaagcaagaagaagcttggttagtgttttggagtcaaatatgcctagatggcatgtgtatgattaagtattagaactcgaaccacaaccagatcttgaaagcccaagaagtgtttccttgttggaagatacaaagccaaattctcatacggacttcggctacaccatcaaagctttgacaagcaagaagaagcttggttagtgttttggagtcaaatacgacttgatatcaggtgtatggttcataccgacttcgacatcaccatcaaagccataggaagcatgaagaggcttggttaagtttttagagtcaaatatgactagatggctgataagtaggtttttaggcctacttatttactgaatgtgaggttcagttcaattccccttaaacactaacatgtcgatgccgctatagggggtgtccattgagtccactgttagtgctagcaatcaagatgtgtataggagcaactaagtcaagccagattataatgatggtgggtttctagtaacaatcctaggtcaggattcaaacaacgaaaatgagaactttaaaagccctactcgatcattgggtcgagtagaaccaacaggtgacgaatttaagtaactaaaatgcaatcaacaggggatacaaataacaggtaaataaaagtgcaatcaacagaggatacaaataaatctaatagaagttcaaaggatgggttcatcgataagggcaactctagggttcatcaggtggctaacaggtgaaaggtagatacccttgacgatagattcaaaaaccgggtcaatccattgtcgtgacagagacctccataactctaccacttcctaatctcaactgtcgttgatgaaacatagcagagaagggtttaacaaacaatctaccaaagccaataagcagacaagccaatgtcttggtcgagtctacaaatctctggaattcgtaggtcagacatccatttgaacgtcttttggacgctagacgtctattatcgaatctccacattagccagcgaaaaccgcatagtggccaagcgaatccagaagggtataaacctaaacactaaccccctaactaaccttgagattaccctaatctaattcatccacaagaaccctaatcactactcatgcaacattctcaagaacacaaacccagaaattattgaaatcataccaaaatgtagatctaaacaagctaaacaactttacttaaaaaatcaaatgcaaaaacgaaatagattaagagtaattaaagttttaagattcataaacacaaagaaaaactgaaagataaagcatagatcctttggacaaatcccaaagtgatctatttatactaaaatgttggaaaccctagattcactaaaagacaagatacttgaggcggtttgggcgaatactcgatcttggggattgagtaaagagggtgctgcaaaaagtctgcgcctttgtgtctatgctccgagtgatcaattggtcgagtagatgcttcatcctctcctatctgtatgctcagatgtctggttgagtggggaatgaggaggatccgaagacgctttgatagctcaacaagtcttgtagagatggtcacccttggtcgagtatatggatcgagtagtggatcgaataagaggggcgagtagatcaatttgctgcttcatctaaggttaccttgatcgattaagagggtcgagtaaactttagcctcatttgtagcatcctggatcgagtaaagaggtcgagtagaatgatgcctcttctgtagctgcctggatcgagtgaatggatcgagtagagtccttttaagctccttttgcacctgaaaacacaccaaaacatgcaatgcgaatgcaagatgatcctagatgcctaagtatgcaaaacaagctaaaatggtgcaaaatgatatgatacaatgagcaaatgcaaagctaaatgatgataaacataaacctaaaatgagtaaaatacagtgttatcacttactccctcaaataagagatcgtcgttagcatttacgggtcgaattccactaagctctcgatgttcacacaatagacttatgatgttgttgaataagctaaatgaagtaattgaatattaaagacaaataagcatgtaaatgagttgtagattcaagtgattaaagcgtcaggtctaaggaattgtctcgggagataaataaattgtagatctagctaatatcaggattgttatcgcaccgttctcaaactcaaactatcattctagagtaaccgctggcgttccgcgaaacactctatacttacaactaagataaccggagaagccgagaaatcctatgctaaagcatgcattgttaataagcttgattagttcacctagtatctaaaccagagcccttctatgagcatgattaatcctacctgttctttcttaaatgcttaggctcatctatgatggttcaaataacaaatacatatggcgggcatacctattatttaatatccagttctaggtgatcaatctaaaactagcaataagaataatcaagatgaagaactctaagaataatcctaaggaattttcgatctactaatccatctaaatccctattaagactccctaaacccaacaaggtgattactcagacatgataaaagaaacacaaatcataatctgaatagtttgcattgatgaattagaatagaaggaaaaggagttcagaatcctctctacagtgattggattcttccttcaaaatgtatctcaatcactaaaacaaaacttaggtctaacaattaccaaataattaggtatattcgtgtctaaaaacgtgcagggactactttgcaaagatggagaacttcagggcttctcaaagacttcatagaagacagaaattcccttagccgaatagggtgtcgatcgacatatgcgtagtgtcgatcgacaccatcgcgtgaaaaaacgtctttgataatcttcattgctgaaaagcttccaaaattccgtattgtgctccatagttcccagatgtgtaaatatacctgaaatgactcaaaacatacgaaaaagactagagagactttaaaaacactgctgaaactatgttagaaatcagtaaaaaccaggacatatcaactcccccagacttagcttttgcttgccctcaagcaaaacaaaaggttgaatctgtgaaagaggtttgaaaaacatagaaactcccaatttctctagtttattaccttgatcatacaaaccaaatccatgtattaaacagttctaatcaaatcctgaccaccatgtaattctccgctagcccacacaacatcctagattccataccaaagcactcaactatatccactaggctatcatcgctgggtctcatcaatcacgtaaatgcttaagaaccttttagactcattcctgtactataccatgataaatcgaccattctttatatatatttttttatttggtgttctttctctcccccagacttattctttttagagagtaaacaaaggggaactcgcatactggatcgacaccctcggcatttttccaacctttgtaattgattgttccaaataatgtataataatggggtcataggaaacattcctacccctatacactatttgaaagtcttatcaatctctcataatttattattgaattaattttttttttctttatttggggagaggaacactttctttttaacacattagtcgatttattaggtatgaacaaggagccaagtcctatgagcactaaccgatttgatgaggtaaaaggaagagcagtgagattagctccagcctttgtggattatgatgggaatggatgtccttaagtttgttgatttgctttctggattttccattagtcggattgatttgaatgtgcagtacttaagcaatccaggcaataaactcgagagatagatcataatttcagacaaaagttttgactcaataaaacgactatataagttaaaatgacacaactgactcataagaaaaaagcagatgaagttagtcacagacacccccagacttagataacactgtccccatagttattaagttagaggaatcgaaagagaagtaagcaaaagtagaaagttagagaacgtgagttgccacctgagagtggtgtcgatcgataccatgttggtgtcgattgacactctggtcgtttcgcttagctttgtgaattctgcgcattgttgtagagccttagttagtgttttcacatggattctccagttagactgttaaatcagtaaaacacacatcaatagttccaacaaagcataagaaaataagtacaacaagtttcaaaacaaataaccaatagtctgaaataaagcaaaaacaaagtcagaaaacaaagcaagataaggaggatggctagtcctcatgttctgagccggaggtggatgcggaagagcgacgactacgactagtgggagcaacacaaccgcagcgagaaagtgtagctatggcgttcccgacgctcttgaaactgtcgacgacgtactgctgaaagacctgttgctccaatgggatgggtggaggagaaggcaactgatatgga

SEQ ID NO: 2222 - DNA, 715 bp, Arabidopsis thaliana landsberg
  unsure (1)..(715): unsure at all n locations
ggctgatcaacaactgcgaagaatcaaatcttgttcgaggtattatttttgaatagtctcagcctatgaaactgcaacatgctagttcttcacgttttcccttcttttttcaatcttgtttgagtttttaagtcttattcaattgcatcattgaatataagttgcatcattgaaccttttgagctattaagatcgattgtttgatgatgtgtttggtgagctataagttgcatctgtttttgtttgatttttcaggctactccaaagaataaaaagggacggtattatggtgttggttctattccaattatcccatctacttctgttgatcgacatgctaagaatgattctgttgatcgggagacctatgaagcggagaagaaacagtatgacgaacttctaaaacggatccatgattatttctttgaccttatcgctgaagatggtccagctctagcaacaacacttagagctcanagacctacaacacanagagcacaagagcaaacagaggaaccacaagaccaacacaaaccgagtagcacagctcaccatctctcaatatatatgaccaatatttgctttttttgtgatcaacctactatttatgcattttctagacacaacattttagttatcaaatcaattacttgatcagttttctcattacttatgtaatcaacaaacaattggacaagtaatgatctgacttttg

SEQ ID NO: 2223 - DNA, 4510 bp, Arabidopsis thaliana landsberg
acttccgggccgataactctggatgacacgagataagatcttcaggacacggctcgaacaatcgaattgggcgatctgcaataaagtaagaacataattaaaaattggaacaatcagcttgggcacgaataaatgaaccataatatctaaagccacgaagaaaaagtagtcggtctaggcatcatgtttgctcgaaaaatcccctattgattgcacttttatctacctattatttgtatcctctatttgcatcccctgatgattgcattttagttctgccggttggttctactcgacccaatgatcgagtagggctcttaagttctcatttttacttgtttgaatcctgacctagggttgttactagaaatccaccatcattataatatggcttgacttagttgtttctgtgcacatcttaattgctagcaataacagtggactggattgacaccccctatagctgcatcgacatgtgtgtgtattaggggaattgaactgaatcacacacccttcagcatataagtaggcctaaaaaacctgcttatcaatttggcgtcgttgccaattcattgttgcattgttacattcaagatatcagaaacttttaagatcaagttcttttacatttatcaagttactaacttatattttcgtctgcttgtttttgtggtataggtattaatcattgtgcatgcaaacctgatccaaaggttctgcacacgtattaccattcagagacagaattgacaaaatagcttgtgagttacaaaaaaccaaagcaaagacaacctgtgatcagccaagaccagctgctatggatcaacagaacagaccagttgatgttcaagacccatctaatgttgatcaaccaagaaacattagtgttggtgatgccccaaggaatcatcaccaaagacaagggatagtgccaccaccagttcaaaacaacaactttgagatcaagagtggtctcatctcaatgatccaaggaaacaagtttcatggcttacctatggaagatcccctggaccatcttgacagctttgattttctctatggcctaaccaagatcaatggtgtcactgaagatatgtttaagctcagactttttcccttctctttgggagacaaggcacaccactgggagaagactctgaccccagactccatcacctcatgggtcgattgtaagaaagcttttattgccaagttcttctctaatgctcgcacagctatattgaggaacgagatctcaggcttcacacagaaaaacaatgaaactttctgtgaagcttgagagagctttaaaagctacaccactcaatgcccccatcacggttttaagaaagcatcattattgagcacactctacagaggagctttaccaaagatcagaatgctactcgacactgcctcaaacgaaaacttcctgaataaggaagtagcagaaggatgggagttggtcgaaaatctggcacaatctgatgggtgctacaatgaagactatgatcgctcagtgagaggaactagaggcactgagaataaatagagcaaagatatcaaggctctgaatgaaaagctagacaagctgttgctggctcaacagaagaagatacactacatcactgatgaagagcacttccaaatgcaagaaggggggaatgatcaaaataaagagctgtgctacatctagaaccaaggagggttcaacaagggctacaacaactacaagcccaacccaaacctctcctacagaagcactaatgtagctaacccccaagatcaagtgtatccaccacaacagaatcaatctaagccttttgttcagtacaaccaaggttatatccctaaaaaagagtttaatggaggctaccaacagcagaatcggccatcagggtttattcaataaccacaacaagccccagcagctcaagatccttaaattaagcaactcattcaacaaatcattcaaggaaaagctactggagctatggtttttgacaagaaaatagctgaattacacaacaagatcgattgttcttacaacggtctaaacgtcaagttcgaagctctgaattcaaaaatcaagtatgtggagagtcaatttgcatcaacctctgctccgaagcatcctcaacaacttctagggaaagcagttcagaatcgtaaggactatgctactgctaatgctattaccatccaccaagaagatgagtctccaccaaatcatcagactcccaatacttaggacaatatgattcaagaaggggagggattcaactcaaattgatgcacctgccacccagcaattcatctggactatagagcacacacctttgctgaatactcaccattatggaaaaaaattcaaaattgaaaaactcaagaaagatgagaatcaagagatgattagcagtgccaccacccaagaaacttccaagaagaaagtcatccaagaaaagcttgatgatcccggttcattcactccgccatgctctctaggaccattgacattcaataggtgcctttattatttgggagcatctgttagccttatgcctctctttacagctaaaaggctacggatcatggaatacaagttctgcaacttagctttactcttagctaatggttctgttgcacatcctcatggtctaatagaaaatctgcctgacaagattggaaatgttgagatacctacagattttgtggtattggacgtagatgaagaaggcaaggatcccctgatcctaggcagaccattcttagcttcagctggataagtcatagatgtcaggaatgaaaaaattaatctgaagcttgaaaaaggcatcaagatgaagtttgacatcagagaagctttagggaaatcaacaacaggaggtcaaagttttgggattcaggacatggatgttgatgaagaaacagaagttgaaactccaccaagagttaactatagttctcaactcagcaagctgaagagaacttttgaccataggaagagagcaatacaaaggttaactcagactgaagatcctacaaaagatgactggtatgagatgagaaaaaattttaaatggcaaagcagagtcatagagggattatcttcaagggtgatgaagctgaaagatcaactatggatgtttgaaaaaagagttaaaaagttttcagatggtattgatccagagaagatggaaactgcactagctatcaaggaggacaaaaatctcacaacataatggtttgcaccagaagatcaaaaaggagttcacttagaggaaagaaggccatggaacaagttgttgagtgaggaggaaactcctattccaacttattctccaggagcgcctaaacagcccaccaactcctctacggaagaagaacacttgacacttgattctgttactgaagaacttctggaactaaggatagaatacaaagctcaagaggataccattggggagctaacttacaaaatggaaggactgaaccatgcaatcttgtaacttcaagaaatggttaaaggctaccccagttttgaatttgaggattggtcaaaggaacctggttcagaagaagaagattactctgatgatcagaaagaagcttattttgaagaaaaatcaaatgagtactcgtcctaccatatctcaagagaggatgcagagtatgattctagcattgaaaattcaaccactgaagatgaagacttttctgttcctctcttcaacctcttttctaactaagctctgaaagagtcaagcttagtgacttaaaacaagctcgcttgggaggaaatcccatgtctatccatgtatataactatctattttccttgttatttttgatgtttttgtttaagtgtttcaggtttatttcattgatcattatgaagtcaacggtcgagtaaattcaaaccaagtcaagaaagatctcaaccgttgatcgagtagaatgaggaggattgttttgagccgttgatttgaatgatcaaatgagagaagcatcatcaccgtttgatcgagtgatttcttgcgattcattttggtccgtttgatcgagtgcttaaagatgaagcatttctcaccgtctgatcaagtgaagaaaccaaagacactctcttcgtagacaccgatgccttgtgaccattgaaacgctgttgtccctttgtcttcttgtccccccccccaataatcactttggtccccccattgcaattcccgaactcaacaatctcatctctccatctcccataccaaagcattctcaaatccttacaattctctcgttatctccttcacttccctttcttatcaaaaacttttcacaaattcatttctttcctccatcattcaatatcctaatctactgaattttggttttgagtttctcccacctttgttcttgatgatgaatagacgctcgcttttgtcaaggattcaaaacaaagctctctccccatcgaggaggtacccaacaccttcttcgcatgcaacagctagaggac

SEQ ID NO: 2224 - DNA, 1297 bp, Arabidopsis thaliana landsberg
aattaaaagtttacataaacataaatccaaaattattaaacaaaaaaataaaaactgttctctataaaactcgtttggttttatcatcgaaatcatcagacaaaggcataaaataattttcagttttctaagtctctaaccatttaagcattgacattgtgaaactttacaaacaatttttcaacaagacaagtgagcttatcctcacaatatcttgctgtcatgcatagtaatgagggtttcacctgattttagattaagacattttctgttttaatgtggtgaaatcagtgaactctggcattataagtctttggtcgagcagttatgataatgaacttgtgtatgataatgtacttgggtcttatcttggattttagattaagattttactgatgtgaccatacaataaacaccttggcaatcatctttggtcgagcagttatgataatgtacttgggtcttagctctatgtatgcttacttatctcatgcctaatatcgagacattgatatcattagtgatttgaaacaaaattgatttttattaaattttacatgtgaatgattattcgagagatgagatagatttacgtgtaagaatcactgactgaaatcactttatatgctatttttttggtaagggtataagttgacatttcaagaagacacataggtgtccactaaaattcaataagaatacaaaaaaaaaaagattgcagaactactttaattatcaattatcgtagatgcaaagtcttctatgcgataaaacaaaacacaaatgcagaattacgttttcctagaattacaccaagttctacgtatatatgctatattataatgaaaaaaatccatctaacacgcaaataagacattatggattccaatctcataagatagaatcactggatatcttcaccttgtacatctttaaatgttccaccatcttttctttgtcaagttttgcaggatgagttgatgaactgatacaatggcattttttcccttagagctttcctgcttgcacaattggcgacatatcattgcattcttttctgagctattgcggttggtgtacctaacatccatacatttaatgaaacatatcaatccttactaagatatatgctatgtagaaatccaacaaatgtttacttaaaccttaagagactagtgagagattatcaagagagaaaggaggaagagagattattggttgtggtatcattttttatgacttgagtataaaaaatatcaaaaataagtctccataacctttgcaatatatagtgttt

SEQ ID NO: 2225 - DNA, 807 bp, Arabidopsis thaliana landsberg
aaacccttgtaaaccatttaaaacacttttaaaaactcttgtaaaccctttaataatttttgatccattttaaaactcttgccaactctttacaaaatgtcttaaaaagatttacaagagtttttaaagggacttcttgtaaattctttaagaatcttttaaaaatccttgtagatcttttaaaacccttttaaaccctttacaaatatcttgtacatcttttaaaaccctttaaaaaacccttgtaaatcttttaaaacacttttaaaccctttaaaaatcccttgtaaatcttttaaaaccctttaaaaatctcttgtaaatcttttaaaaatctcttgtaaatattttaaaatcatttaaaatcccttgtaattattttttcgaaattgtttggcgggaaaatatctgacgggaaaattttgcgggaaatttattttggaatattttaggcgaaaaatattaatagggggaaaatggtcattaaaaatttaaagagggtataaatgaaaagaatcaattacggggaagccattatctcggatggtgtttgttgcccatgaccttttccgaacaattagtcgatttgccattttttcatcatctgattttacacatttaccctcgttgctttaactctgtctatcattattgcgctgcccactctcacctgcctgagaagcccgagtaacccgaaacgtcttcatcgttctatttctcctacagctgccctgtttactgactaagctttgccttgattagcttcgtcattttttcttcaaattgaccaaacaattgtcgttttct

SEQ ID NO: 2226 - DNA, 6551 bp, Arabidopsis thaliana landsberg
acgcaaccccatcttcactcgatttctcctccatcactcgaccttgttttctcctccataacccaataaactcgagcccattcctccccttattcatcaccaccaacaaacccatcctcatcaaagccacaaagaactcgacctcttcaccacttgaccgagctccccgttcgcataaacactcgaccaccgcttctctctcatctatccaggcacaaaatcactcgacctcgcctcccacttcaccatctccacatcagctcttgttcttcgtttactcgaccactacacagccttctctagctcacgaatccactcgacttcacgcaagagcgcctccgcttctccaccaccgattcaatcactcgaatcaccgctcctctaacaacactcgacctccgccatcaattcgccttcaacacttctcgctcaaaatcactcggccacagctctcatcacctctccactaccacaaccactcgaccccttcacaccaccgtcttctcttcttccgcgagctccactttacttgatccccaatcaccatcttcttcatcgtttcatcactcgattgcatctaccaaccgtctacaatcactcgacttcttctcacatcatctcatcaccttctccgtccaagcctcactactcgaccaaggtgccatcgttctcacatctctcaagtccattcatcactcgattcaccgccaaagcgacgccactcgaccacaagcccgccttcatttcacagttcactcgaccgctcctctatttccacggtcaaaccgcagctgctctcctgctctccaagctcaccactcgaccaaacaaaatcactcgatcaaccgaaaaaaaaattcaaaaccgacggtttactcaattacttcactcgaccggttcacttgattggtttgtgtttttggtttgctgttactaacgtattaacgtttatctttgagtttcgtttgttttcaggtttcatcatgagtaactacagtggagaatcctctatggaccctgattacaatgtggatgaagctgagtcctggtccgctagaccgagagagcaacatgtttaccagagcttcagggatgaattcgaacgctctgcagcccgacgtaatcagagaagagctaaaatcgctagaggaaagagggcgatgtcaagtagatatgagctgattgatgaggatatcgaaactgagtatgtgccagagtcatggcgcaaggagacgaagttgctgaacaaacctgacgaggttacagtggaggagtatatcaggttctttgagatgaatgacttctggggaacgaggtatccgtgctatgagactttagcccagctggggttactggaggacgtacagcatctgttcgagaagtgtcatctggagatactcatgtcttacccttaccatgcctataaggaggagacaatcgagtttctttccacgctgcaagtggagatgtatgagggactcacagactttgagctggataccatgggattaggcttcttgacgttctcagtggatgaacagcggtatcagctttcgatcaagaagttagaagaactgtttggtttccctagtggaatgggaaccaaacccagatttgacagagaggagcttaaggatttgtgggccactatagggaacaatctaccgctaaactcagcgcggtctaagagcaaccaaatccgaagtcctgtgatccgctactttcagcgatcagtcgccaacgtcttttactccagggagtctacaggcaccgtgtctaacacggacatggagatgatagattatgcgcttacagggattctccgccggacgaaggggaagaatgtcttgagaggtgatctcaacaacgcaccaccagtaatgcctctgttgatgcatctgtgtggatacaggaagtgggcgttgacaaacgggaagaagaaggtgagaggagcactatgcgtgggtggcgttgtgacgccaattctggaagcttgtggagtcccgctcaaggaaccaggtttagcaccgaggatgatggacttggatcatttgcgcagatgtgagttcttggagtttgacatggctggcgactttcaccgctacaggttcgagcattcatcgattagaatcgccaacattcttctcccctgcattgacgctactaggattcttgagggcaggaacattgacttcaagcctgcgcttgaagatctttatttcgagggcagtccgccaaccgaggagtttagtcacaccgaaggagctacaacagaagatgttgatgagacggacgatatagatgaggcggagtttgacacgagcatgtatcatttcagtgagcatatacctcctgcgagggaaagcaagagtttgagcgaagctcacaggaacaacagcaagctgcagaagtggtgcaagaaaccggacaagttactcgccaagtgcttaagggctatcaagtttctgaaggacaagctcagctgctccttttccactacagctattccgcagggacatctccctcaggacatgccttcgaggagatatgacgcgcccgagccaagtcggcgcaggcctgagcctagagatcaggagattccgcatgtccctgcgaggaattcatcattcgagcctcgtgaatctgggaggaagaggaggaccacactcactcgatctagcagtaggagcggacgacttctccagtctcgtagtttacgcgacggcggtgctggccgcagcagaaggagagaggtcgagtttcctcagagcggtgctggccgccacagagctgatgaggtcgagtacccacctgctggagctgatacagaacaaggcggttcgtctatgacctgggagcaatcgcaggtagccattgacgagcaactacgttcattcttcgactgaggtaagcgcctcacttcaccattgtattatactatctgttgtgatttgtttcttcattttttgtttctgtgattggatttgtcttgagtactctcttccaagtttattcacacagtggactgtgtgatttaagtttgggggagggctcaggaagtgtgtgttgcattgtgtataattttgagtctgcattcatctaaggcatagaaaaaaccaaaaaaatttgaaaaattttggaaaatgatttcataaaaaaaaagagtgttcatgtagttgcattacatttaggatcgagtctagagtgtttcatttatgattgttgcatatgcataggggataatgatgagatagccttgtaagcattttggttcaccggataaacttagtgccctcgttgctagttgtctgttgcgtagtcaatgaatttgaaataaaactgaaccatgcctagattgctctactcgaccacactgtcatgatctgataccattccctatcaatttgaacctgaatctgatctttaattatcatgtctgcatcaaatttgaactcatggataccctaaaatacttggattttcttattcattttgatcacttttgttaattcaagtagctgactctccttattagagcagttaacccaaacccaaacccaaacctagactttctttcaagccctatatcacttgtgagtgtttgtgaggtcttattccgattaagcttggtagaaagtgttaggttcgtaacgacagagatagtgtctcatgtagttctagtttgcatttttcggactagataggactaggtgggcgcttatactttgggttgggatgtgtttaaaagaaaaaaggggttgattcattgataagaaaaggtaaaagactctaggtgaagtaagctaaagaagcagaaaaagtctagtaaaggttttgggatttgtaaagaaaagaaagagttcttgttagctattgaagatgtgcaaaagcccttggttttagaatgttaaaaaacaggaaccttagttgttaaagaaatccaaatccgctagatgtatcaaagtgttgagaaagcttctccttgagttaagagaaaagaaaagaatgattagaaaagaggcttaaaagattcatgaatgcaaaaggtagagttaagctcttgtattgggattggagatgggattaccattagagcttcatttgatatactctgggtagatgggatcttatctctgtatgcatagcttgggacttacctctagcattctactaaagcttaatcattttttgagagatcccctgttactgaagcctattctgtaaggcaccatctttgtctcttgaccttttaccttagccaaatgagttctttgatgatgcattgcttgattcacgttccagaactaatgaatgttaaagggatttgtagatttgaaaacttgtgtaggtcgagcatatgagtcggattgattgatgatgaggcatggctaacatttttaagtagaattcgatcttgccgcttagaactttcaacttggacattgatttcatctggtttatctggtgctttggctctgagtccccgctttcaaacctcacctccagcttgttcttgattgtttgcttgagagcaagcaaagactaagtttgggggagttaataagtgtgtattttgcatgttttgagcatccatttgtcatcattttagcatcatatcatcactgttttttaccatttcacatcatttgtcatcatttgcatgtttaggatagttttgcatgcatgatttcacaaacctagactttctttcaagccctatatcactcgtgagtgtttgtgaggtcttattccgattaaggttggtagaaagtgttaggttcgtaacgacagagatagtgtctcatgtagttctagtttgcattttttcggactagataagactaggtgggcgcttatactttgggttgggatgtgtttaaaaaaaaaaaagggttgattcagtgatgagaaaaggtaaaagactctaggtgaagtaagctaaagaagcagaaaaagtctagtaaaggttttaggatttgtaaagaaaagaaagagttcttgttagctattgaagatgggcaaaagccctcggttttacaatgttaaaaataggaaccttagttgttaaagaaatccaaatccgctagatgtatcaaagtgttgaggaagcttctactagagttaagagaaaagaaaagaccgattagaaaaagggcttaaaagattcatgaatgcaaagggtagagtccgagacttcgtcggtgaagtgaagtggtcgagtgagaggcggtgatttgtggtgaagtagaaaaaattggagtgtcggtggcgtagcggtcgagtgattcacggtgaaccagaatcggtggttgagtgaaagttggaactcgattgcggcggctgaggtattctttccaatggtggtcgagtggttttagtgaggtcgagtgcagcttaggtttcagcggattgcttcttgcggtcgagtggtggaaaattgaagagaggttggtcgagtgaaatttcaaaaggagtggtggagattgagtttgagattctctctccatcttatctttagcatgtggtccacactctgttgactgcaaaaactgcagaaaatctactatcaacttgacaaaatcctacaagtctctgtagctcctattggtcgagtataatcatgatttaaatttttttgggtttaaaacatcacatatactcgactgatgtactcgaatacaggggctttttattttttagaaaactttcaaaattttgcactccaccaggcaatacactcgatctctaggtcttctgtcgagtaaaagttttgaatttttactctatctccacgttgttcctttgttcttgagaaccacaaacacaactaagacaaatcaaaaataacaagaaaagaaaaatttatttacagagatagtcatgggacttcctcccaagtgagcttgtttaaagtcattggcttgactcctttactcctttaatcatcaagaagctcctagagatgaaccgatgtcacctcttgaaggatttgatctgctaagtatttcttgagcctttgaccatttactgtgaaatctccactcttaccagctagagtgactgctccataaggacgaacctcagtgatacagaaggggccagaccatctggatttaagctttcctggagagagttttaaacgagagttgaatagcagcacctgatcaccaacctgaaaatccttggtgatgatctttttgtcatggaaaagcttagttctctccttgtagattttagtgctctcataagcttctaaacgaatctcgtcaaggtcactgagttggatcaatcgcttctcctcagcagtttttatttcaaagttcagaagttttactgcccacattgctttgtactcgagctcaacgagtaggtgacatgcttttccatagagaaggttgaaaggagttgtaccaatgggtgtcttgaaagctatcgtgtaagcccaaagtgcgtcattgagctttgtagaccagtcttttccagaattgtttttatctcccaattggagatctcaacctgcctgctcgtctgtggatgatagggagtggcga

SEQ ID NO: 2227 - DNA, 537 bp, Arabidopsis thaliana landsberg
tagattctcgaccagctctcatccttctgctacttccttggccaggaagtttccattagaggcggtgtcgagtagcattctgatctttggtaaagctcctctgtttaatgaagctttcttgaaaccgtgatgggggcactgagtagtgtagcttttagagaagaacttggcaagaaaagctttcttacaatcgtcccatgagttgacggagtctgggggcagagtcttctcccagtggtgtgccttgtctaccaaagagaagggaaatagtctaagcttaaacatatcttcagtgacaccattgatcttgataaggccacagagcctatcaaagctgtcaagatggtccagggggtcttccataggtaagccatgaaacttgtttccttggatcattgagatgagaccactcttcatcacaaagttgttgttctgaactggtgggggcactatcccttgtctttggtgatgattccttggggcattaccaacacaaatgttttttggttgatcaatatttggtgggtcttgaacata

SEQ ID NO: 2228 - DNA, 498 bp, Arabidopsis thaliana landsberg
gaaaatcatcacgttctagtgagattcaaggggttatcaatgaaaagatcgtacctttagccggagacatggctcgaattgattcttcacactagaaatctgtctcagaaaacgaaaatcagttaaggatcggacaaaagaaatgtagggagatatcgagagacagattgcagaatcgagatacgaacctggagaggtaaagcagctgagactcaaactactttgttgggcctcgaatgggcctttaaccacactcatcaaacccagtaagatttggatcgaatataataatcctccataagtgacaagaatttcatttttttgtttgcacttttcacaaaaaaagaaagaaagataataatggtaaataggactcctcctcgtctgcacaagacaacatgcatttgaatatgttgatcagagaataaactactaatggtttttttttgccatttgtgtggtctctattatggcttctgcttgggactaaatctaacc

SEQ ID NO: 2229 - DNA, 753 bp, Arabidopsis thaliana landsberg
  unsure (1)..(753): unsure at all n locations
tattacacctatgcatgcataatttaaaattctcaagtaatgtttgaccatcttagactacaaaagtagataatgaaaggttatccatcctcgttgaaaactcaaatcacataaacaaaataataagaaaatattggtcaacatcggcgacttcgaaatctacaagtgttcaatatgatatagtctctcttaaatgtcattacggaaacctaaaaaaagtatttcattttattcatttctctcaatacaaaactcagaacccatgagttttcaagatccaaatataataagctcacccgatatcaattcagatcatgtgaataaacaaaaacaatcatgctcaccaccataattttagtcttattcatcgtcatttttatggtctaccgcctctattctctttgatataatccatattcaaactcatgacacaagttgctaaggatagttgcaagagatcttctttatatctatcacaaattggattttttttgcggcattcataatataataaatatttttcttcagaattatacttttttctatatttgaaccaaatcttggctatggattatcaacatctaanatatntgttatttaaggagtcactgtctccatataagaactgagcataaaaatatcttcataagaaaaatgattgtttgccatattantaatctcgccatgaggaacnnccaaccgaatagtaaccatcaatccctattatatagtgatcatcaagtcttcaaagaa

SEQ ID NO: 2230 - DNA, 2099 bp, Arabidopsis thaliana landsberg
cgtatcagcttttggatgcgtttcggtgctcttcagttttttgtggcagcgtgaaagaactttgtgttcctctctccattattggcccaggttaatctgctttttggttccaaaactgctcttcttggtaatactctttgtttatctcttttctcaactcttttaggagttggggattaaaaggcagttgtcttgtggccgcatcaatccggaattgaagctcttggattcttaaagcttagctgggtttggtttgtctctttcactttgaaatctcctttctacagccactaagcttatccatcattggtgtatctttactgctcacattgtgcctccaaaacccagccattagatccacaaatctatttctttgaacccatcgtttatcatacttaaacctagcccaaggtttccattccatatccattaaactatttattaatagactatgatctgatcaaacattttggggatatgtcacatgagctttggaaataattctatccattattggtaagcgaatgtcgtatcaggcctgcactgaaccaactcatcgtttcgataaccaaaccaagaaaattggtatcccaaatgtttaacctcccataagccacatgcatgtaacaactgcctaaacttcatacatgtggaatctttttttcttgctccaatttttctctgtcagatcaatcaactcattaaactctcttgacatcatccaaggttgattcctgttcagacccattctatagagtttctccgacagctcccctctttcactttggactggctcaccatatacacatgtcaagtaaaaatccttgtcctgtcaccccaccttgagcatcaatcattcttttgtttgactcaagaatcctgatattaacactctccttccacattaaaggtagaccttcacttttgccaattggatcaactatatgcaaatcaaaataacccaggtgacctaccacattctctaaataacttctcttatttttagtctcacaagggaatataaactccgagaaatattgacctcgaaattcccttaggtatcgaactgtaggggtattcgtcacccccttacagtaccaacttaatatcctcattgagagtttgaagggttggaattaaccatcgacccttctttcaaattaatttcactatcattcccaggtgctgcaccataggaacttggacgatttgctgccatcatggaggcataatgattcgaaaatgaagctgccacaagggcataatgacgagagtgaatttgagtactagatgaagagtcctgagagtctaggcgctcatacactataggagactgctttgttttctcattggagccctttttctaggttcttcataccctcaccaggattcccagtctctcaaagactgatggtgagtgatgcatagtttctcatgatcccactcttgctctcttactggatatctttctactggtgttagaccttcaccgtttgctctgatttgtttgactatcctctagactctgataatccatagcttttgcaggggttttgtgcactcttctaattggtctccaaacctactgaatctgactatcaggagagccattccaattgtgtctatctttaacatatttagaagaagaaaccatgcctttcttttgaattggctggtttttttatggtccctcattatccatctcacccttgcctttttctttcggttttgccggttccttccttctcaaaaaccttgctttttttcaggtggttgatcaacaacttcgtaggaacaagccgatttatcatgagtaagccttttacagaggaagcacacttttaacaatgtttcattacacgagttcaatctaagccacttcccttaacttaaagcttgctctcttaacatattgtagtggctcattagcgttaatccaaactctcactctcacatattctagagcaggagagtttttggcatgtaattccacaacatcaattttccctaaaagacctatgatgctattcactgtttgcttcttcaaccagtcaatggtgattcccttaattcgaacccaaaataaaaaaaaaaaaaaa

SEQ ID NO: 2231 - DNA, 462 bp, Arabidopsis thaliana landsberg
ccgagactagggataaattactgttgggttgtagctccagcttatttcctctggagtttggttcagtctaggcttaggtggcactcacttattttcctgaattgggctgagcttctttcatggattcgtcgttcattccgtcgtctacgcaacttggaagcagagaaataacatgctacataactcgcaccacatggatcctgcttcagtcttcaagatcatcgatagggaaatcatcaactccatcaacgcaagaagacacaaaaagaagttccgtaatcctatgagtttttggctcatatattgcttttttctgaagattgtttacttccttgtttttatcataatttttgccaaggaaataattatttaggagttctcgttgtaattcctaactcttttattttatatgatatttaccgacttagcaaaaaaaaatataaaaatcataatgatgagagt

SEQ ID NO: 2232 - DNA, 567 bp, Arabidopsis thaliana landsberg
tgaacagtcgtgacttgcaacaattttccccttaaatcgttattttttgtatcggtgcgattttaccgttttggcgggaaaaaacaattccataatttttccgccaaaatcgtgattttattgtattggtaagaaaaacacaattttaccgttttgtcgtaaaaaggcaagtctccaatttttacaatttttgcagaaaaatgtaatttctcaatttttcttaaaaatgatgatttatgatttatcaataataacaataataaaatgggctgaccacgggcttcccatatggacatggtctttattgggcatgaacattttttagaccattgtccattatggaccgtccaacttggcccataaaaaaaaactgtctgtacggacacgcccaatggtccctggacggaccatttgacagctctagacttgctaatgaagtttttgagtttgctatcttttagatataaagaacatattttgattttgtaaccatccacttaaacgcgtattaactagattgagtttgttatcttttagttaaagaagattatcgatcgaacatttacg

SEQ ID NO: 2233 - DNA, 1267 bp, Arabidopsis thaliana landsberg
aacacttgtcattaatcgaaaattcatccaaatccaattaagatatataaataatattttttcttatggcaggtgcatggtagcaattattaatttctaaaaccatgccagaaggtaaagataaatgaaatgttcccacagccaatgcagcaactcttgctccatttcccactcgtaggtccacttgtcctttctctaaagatctattgttgctgcattaaaacccaacaaggtgactactcatacatgattaagagaacaccaatcataatccgaataaattgaattgaattattatatgagataacgttaaaggagttcaaaatcttctctccaaaagtagaaaatctctcacacacaaagcttaagtctaaacaatgactttaaatatatatataggttactaaaaacgtgtagggtctattttgcaaattagaaaaacttctggaacttctgctattcttaatgacttgatgaaacgtgaggaaatcctttggtcgataagggtgtcgatcaataccagtggggtgtcgatcaataccagtggggtgtcaatcgacaccatcccgtgaataacgtccttgcccatcttctttgctaaaaagcttccgaaatttcctatgtggctctatagctctcaaaagtagatatgcacctgtaaagacttgtaaacatacgaaaagactaaaaactattctaatatcatgttagaaattagtaaaaaaccaagatatatctgctccttcagacttttcttttgcttcccctcaagaaaaacacaaaaccgaacctgtggaagaagtttaaaaacgcagaaactcccgatctctctaacgtattaccttgatcatttaaacaaaatgtacttagcagttctaatcaagtcctaactaccatgtaattttccacaggcttacacaatatcctaaatttcataacaaattccacaactgtatccaacaggttttcatcattgagtctcatcaatcaagttaatattcaagaatcttatagactcattcctgtactataccatgataaatctactatttaacattcctttagtattctttctctctcaagacttattcttttcagagattagacaaagaagtactcacatcaccgaatatatatcctccgcatattttcaacatttgcaattgatcattctttaaagtgtaaaataatgagatcattggaaatatttctatccctatacactacaggaaatcctctcaatttctctcttttactatattttttt

SEQ ID NO: 2234 - DNA, 3145 bp, Arabidopsis thaliana landsberg
agaagatggtgttgatgcgttgaagaacttcttgcttgctggttgagaggggagatatgcagttcttttaagaaaacattatcttccgttcgaattgacaaaaaccatcatttcatgtggtggtccatgtctcattcaaaatactacactttcttcaagaagtgtcttgaagcgaataatccttatgcaaagtttgtagagtaaagggctggcttatgaatcgaccatagggtactttcaaatgagatgccgttggaaggtgtgcaatggtaaacgcaatggtggtttgctcgacttgaatgaaatgaaagtgtgcgtggtgcagccaccttatcagctggacagaggtgggtaggccaaggtgctgtagatgtaagaaggttgggcacaagttgagcacttgtaccgagtaagggtttgaggatgaaattagaatgttggggaattgttcttgaatgttgtttttgggtaattgttctagaaagtttattttggattgcttctaatgtaagtcgggtgagaactttaagcttctttgatggtatcttattctcatttaggtatcagtgtgctatcctgtttatgttattaacttttggaatccatgggagtttatccatatgacattggatttgtaatgcaccatttataaatatttttagaattatgttaaaaaatttggctaagaaatttgctgaacgtttgaaattagcatattatcctaaattaaaggtttaacagtatggtaattagttaccacgtttgaaccgatttgattcccttagggaattagctaaaaggtttgaaccgatcagatgttctttaactatttatttgattagatgttcttcaaatattaatttgactaaattggatacgtctatgtggataacgataattacagtcaagtaataatatgttaagaaacaataaatattaatttaaaccaaaatatgtatatgtagatacgtctgcttggatacgtctatttgtatacgtctttagctaaaaggtttgaaccgattaaattaccttacgtaattttgaaaaggtttagaccgattaaatgttctttaaatatttatttgactaaattgaatacgtctatttgtataacgataattataggcaagtaataaaatgttaaggaacaataaataaaaatttaaaactaaatatgtatatatggatacgtctatgaggatacgtcaatttggatatagataataaactaaatttgtatatgtggatacgtcaattagtattagtccacgaactttttagatttctaaatattttcgatatcaccacaatgcataatatacaatataaatcagaatttataaatcatatagaaagaatatgcgataaggatattgaaaccaccgcctaaccacatggagttaaaccgaattgttgaaatttttttaaaataagatcatgatgaattttgcaggaaaagataattagatatatatataggaccttcatagcctatagcgttagagacgtgtgtaagttgttattgagaatcgttccatgcagctgcttacaccatctaatgacatatcaatcaatcaactgttgaaacggctaatttaaaattatttcccacaaaacacattaaccaatgtaagctcaattgttatttgacatatgctgtttaacctttacaattaaaaatttgtatattttgtagttttataccaattgatatcaattttaaatagatgacattcgacggaacctaccctatctatataatataggtaaccatgtggttgtgattatgtaattatattgcagaatagtcttagaaacttaggtaaacttagttaaaatagagtaaagctgagttttaggaggatcattagttcgtacaacaaagaacattacaacaaagagttcagcaagggatttaaacaagggtcctttaaaacaacaacaaaacataaatccgataaaaagtcttcactaggaggaaaagaagacatagtgaacctttagtattcatacatcgggcgaccaactgcaaaattaatagatacaatatagagaagtcattaataagagttcatataacccagaattatctcattatagaaacacctagaattagaaactggactttccaattcgcagttatctagaaaatcaattttttacaataagtcttgacacccatgatttcattaaaattttcactataattctttccctatcttcaagcaaactcctgtttgagacctaacagaagagacatctcgcaagctcaacaactcaacacataaatatagcatttcagtttaaaattttcccttaaattcatattcaaggcttgcagatatcgctgggagtttggtggaaaccgaccaaaccgacccgcaaaccgagattttcggttatcggcataaaccgaactgattcttctaatctgatcggcaaaattaatttgggaaatcggatttcggttcgggtcggttcgataatcggaaccgatcggttttacctaaaccaaatatctacagccatttataaagctaatgagtcagttgccctaattttgtctcattttcttcttttggatcgacgcctcctcttgcaaaagtgaaatagagaatcatcttcttctctaacttaatccataattttgctaactttcttttctttcatcaattcatcatcttctacatgttcttttagtctttaaaatctcaattgttgttagctcttctttcttcttatacgtttctttgtctgattctttgttgtttgtttggtaaacttttccttatgacaaaaatcacggctagggtcactggtaactctctagatctgattgatcttcaatttacatcatagatttgtatgttattatcattacatatatgatagatcttgtcggtcttaacttttttgcggttggggagatcgtccatcgccgtccattgccgccgtcgtcaccgtccattgccaccgtcgtcactgtcatcgtccgtcgctgcctcatcaccatcaaccctaattgtgaatgggctgagggcgttgggctatgtaaatttgctaattgagtttgtaaaattattattatttttggtgatataaaaagtttgtgcttaaaacaaagccctttatcctttttatt

SEQ ID NO: 2235 - DNA, 2292 bp, Arabidopsis thaliana landsberg
attgtccaaggattccccaaaccttggcaatcccaacttaagatccctattgattccttggtggttcacttggaaccaccgtatctttagggtcgtttggtatattttgcaactgcttttcctttttccaaagatttccgttttaacccatcattaagaggtcccccagaagatcccacttctactcctttcacagatgcctttttctctttggatttacgcacccaagatcttggttttttacacggaactaggctcaccatatttaatccggaggagctggcatcacaacatccagaagagaaaacaaaagggagagtagatgaagtaatacttgatgaatctgctgataagagattcatctgaactggtaatgatggctgaagaatgtttgctttaattgcatctgacattaattttggaaagcctatagccagagtagtggttgattcaacagggggttccactagcttacttgggcaagaaacagtaccaggaatagaagtctcttctatcacaacagaggaagccggaggaggtatgaatagacatcttgatttgtcatgtgttaacctttgacaatggaaacatcgtttacgaatcctctcatagtcaactcctatctttaccagtaaaccattcggcgtctgaacctctttgaaattttttaaaggtttcgaaacatccaatagaacacgaaccctaacaaaatcccgactctgagcctgagcatcctcaaaaggaaattcgataatcttcccaaccctggaagcaattgtcgcaattgtagcttcagtgtaatgattgacaggaatgtgtcggagacgaatccaaactggaagaaagttcaaataatcagctggaggatcctcaatccatttctccatgaccacacaccaatcatcttgtgtccaaacaccagtttttaacacttcattaagatctgcctcatgattgaagataaactggaaacgatccttagataaagcaatcccacgaacacgatcatatagtctccaaatcctatgcatctctaagatccatttactcatacgttgattctcaggatttaagaagcgttctgtaatactgcgagaattccgctctgtagcatagatattgtgggcgtacccggagctatagcaggtggcgactcaacatactgttcccccctatcagaattatccatagactcatcatagcgtgtgtcatcttcttgagtcccgtgatcctccactattgcctcaagttgatgttgagttccttgttcctcttctaataagacgatgagtgcaccatcatccactctcatttcatcctcctctggagttcaactccgtatagttcttaccaacagaacttttaccaactgtagacaattgctcgggcaattgctcgggctcgggcggtttagagatctcctccacaaccaaaacacttctccggttattttttgaggatgttacataaacaaagacatcctcatcatcacaaacgttcatctcttcctctactccgaaaaaccgtggattgtacctcatatgcaattttaccttatttgcatctaatccaagcttcgtcattatcctatcttttaacattgagagagtaatcttcgcccctaatgtcttcatcatcacattatacatgcgaccttggaatttaaaatatatgatcacgttctctttcattgtaacctgccaaaacaatacacatactcaatcaatattactagtattaccgattctactacattttcagtaatactagtactaattccgaaatattacatgtgtgagtaatactattacatatatgaaatactacgtgtctaagtaatactggtgctattaaaacatactatctatataaattacggtacaactatagattgcttacccattaacagaccaaatcaagcctaaatctatacttaaacttctaatgaaggtgctaaaacacaataacccaaatctaattggattgaatctcaaaatcctcaaaatcctaattcaaagcttttgaagctctctccaactcgatgcacatacctggacttagtagattgatgcagcttgcaggaggagaaaaaaggcgaccaatgcggctcgccggagctcgccgaaggaagaagcccgaagaagtcgaagctcgagctcgagcttttttttttctttttccgttttttttttttcaaaatttttagaaatattaattattcattcaaaagaaattacaaggggaaaattcgtctttaacacaatttcattaaattcaaagggggaatatgaa

SEQ ID NO: 2236 - DNA, 2876 bp, Arabidopsis thaliana landsberg
  unsure (1)..(2876): unsure at all n locations
tcactaactgcaaaaactcaaccatattaatcaaatccagttctgtaaactggagaataacgatanacgacttgggaataactctaccaaaatttcgttactttttaccacgatttaatataacgaaactgaattctcccaaaccataacgattctgctccttctctttctctatctttttctcctttataaaatgaaaagtggctaactaaatccctaatttcgatgtttccttcttttataggcacactctagggtttccaattaacccaaccaatttaaccggatgatttaaaaacaaactctaaccgattttccggttcacgggcgttacacctagcaaaggacaatctactaaaccatatgaatccctaatgagaaactctattcctaacaaacagactactcagacatattggatgaaacaaacaacatgattaagtgtgaaagcataaacacagtaaatagagaaggggaaagaagggatctcttcattgtattaaaaattggaatgaatctctcaagaacaatggatgaatagcttatgtctctcacaatagagtttgcaaagaacttgataaaagacttgataaaagaaacttaagtctaaaaacaatatgtatagaccctaaaaacgtccagtgacgaataatgcatatagggaagtcttctggggcaaacttgagattctgtaaactcgaaagcgtctagggtttttgctggaccgaaactggtgtcgatcaacaccatgagtgtgtcgatcgacactcctcgctgattcctggaccaaaatcgtccttagcttcattttccttagcttttgctccaaaatgtctccttatctccattgttgtctcactgcatagaatacctgaaaagacactaaaaagactcgagaaataacataaaaactcaaaatcctatacctaaaacatagataaaatcggtgaaaatcgggttatatcaactcccccagacttagcttttgcttgccctcaagcaaaacagaaaagccgaacccgtggaagaggttttgaaaacaaaggaactccaacattctctagcctattgccatgatcattcacaccaaacgcccatatgcctaacaagtctaatcaaatcctaaccaacatgtacttctctgcaagcttacataacattctagattccatacctaagttccacaactatatccacgtacataacattctagaaaacaaaaatatgactgaattaacattaaaaaaacttaataagaataaaaaataaaagcatagttaataagcgcttcccgcagacttaaacatcagtatctccagtggcattcaaatccaaagagagcaaaaataataaatataaaagaaaaaaaaagagaaagaatgatcataccagtgggttggctcccacttggatagaggggtcgaggacttgtgctgcaatctcgcttttcaaggcggtgtgtaaacagatcgagtctatacaacatcaggtgtcgatcgatactctctccttgtcctgcaagatcaacagaagaaacaagctcccaagcccctcgatgctcgtttaccggtgaaccacaaatcaaagattctaaagaggtaatcgaaggaacagtaggagaagagatagtggagtacctatcatagggaattgaaataggtgtgggctgtgaaggaggtgcagaagcatatgtctgtgaatcacgatggtgtcgatcaacaaggtgtgtggtgtcaatcaacactgattctctacagcactcatctgtgggctgagttgtaagggtctctgttgttgactctagaggtgaagtctatcagctttaggagatgtgttaatatgaattccctaagaccgatactctttaggttgagtaggagataggctttgcatccaaagcaatcgagagattactatgatgaaaggatgtggggcaaatggtcacacaaaggttgcggaaaagcctttgatttaccgatcttgaactcgtcgttggatattacgcaccaaagagaagaacaagagattgatctaacgtaaaaaggtttttgattaaaagatagttgagtctacaaagaggaaattcaagagtttaaatagagaagaagagaaggggaagagttagtcttggaacaagctccaagattactcggaaaaggagaaatcataaatgaaattttgaacacaaaatagacccatggccttccaaattcgtggtcctcttagtgggcttgggccggattgataagggaggatttggaagtgttacttaggcctcgttaaaaatctactaaggaaaacccaatgggacaaaaccttagcaggggaaaagagcacccaaagcaacacttagcccattaccaatcgtcttggaaagatattgcaaccatcatggttgttgtccaagtgtttgggtagtccgaaatagctttgttgagaagtttggtcttcgagcgagtcatttgtcttcttggtttggccaaagcttcctccactacatgctgctcctcggctccaagttgttcctcggctataagctgctccgctggttcaagtttcgggtggtgctcgggaatagtcatatcatgctccccctnnnnnnnnnnnnnnnnnnnnnnnnnnnnnncacctacatcagaaggaaacgtttaggcacaacgaacaagaaaaagcataaatggacattagcaaagtagtattttagagtggagcatccttttgcaattgtggtcgtcttccttaagtacttccaattccaaactccaaagagatgcgtccttgcttcacttgctttcatttcggaccaagcttgatccatgtcttctttcgatccataatcaaaatgcatagggaaaccataactcttcctaatgttt

SEQ ID NO: 2237 - DNA, 2390 bp, Arabidopsis thaliana landsberg
  unsure (1)..(2390): unsure at all n locations
ctgctctagcctcaacttccgacccgagcctgagaagagtcatcccagtggaattcattgaaaagccaagtattgagctcggcgaagaagaacacgtcctcccgatacaaaccagcgcggataaagatgacccgaacgaatgcaattcaggatggatggaacccatcgtaagctatatatctgaagggaacttgccctcggacaaatggaaagctcgtaaactaaaagctcaggctgcgcgtatcgtcttagtagatgaaaaactttacaagtggcgattatccggaccattaatgacatgcgttgaaggagaagcggtttgtaagatcatgaaggaaattcacggcggctcgtgcggaaatcattccggggggagagctttagccattaaaataaaacgccacggattcttctggccaacaatgatcaaagactgcgaaaactttttaaaacgatgcgaaaaatgtcaaaggcacgcgccaacaatccatcaaccggccgagctcttgttgtcaatcgcctcgccgtatccattcatgcgatagtgcatggatacaattggacttatgcatccctcaaagcagaaaaaattagttctcgtcttgaccgactatttctctaaatggatagaagccgaatcttacgccagcataaaggacgctcaagtcaaaaactacgtgtggaaaaatatgctatatcgccacgggataccttatgagatcgttacggataacggctcgcagtttatatcaacccgcttccaaggcttctgtgataagtgggaagttcgacttagcaagtcaataccacgatatccccaaggaaacggccaagccgaagccgtaaacaaaaccatcctcgacggattgaagaaacggctcgatgctaaaaagggctcgtggtccgacgaactcgaaggtgtactttggtcgcatcggacaactcctcgccgagacacaggataaacccctttcgctttagtctacgggatggaatgcataattccggccgagatgatagtgccaagcctacgacggagtctatcccccgagaacacccctgataacactcaaaggctccttgacgaactcgatctgattgatgaacgaagggattcggccctggttcgtatacaaaattatcagaatgaaacggctcgtcattacaattcaaatgttcggcaacgaagattccacgaaggagatcgggtcctccggaaagtttttcaaaacactgccgaaccgaacgctgggaagctcgtgacgaactgggaagggccatacctgatctctaaggtcgtccgacccggagtatatgagctcgccgacttaaacggcaaagtcgttccaagatcatggaacgcaatgcacctacggaaatactacaactaaatccaaggtgactaaacttgccctacgaggtggcttgttccccgaaaagggtacgtaggcagctcgtctttagaagagttcagctaccccccccccattcaaaaagggggggaagtgggtccgtatatccatactcccatttattattttgtaaagttttaacttcggcataaataataaattcgattcacaactattgaactcttcggctaaatacaatgagcgacggctcggagtatcttttacgcctgctcggctatagcacgctatataaatacgagataaattctttcagattacttatgagaagaaatttctatcttcagaaacccggtcatactcaaacagcggtaccccagctcgtttctaaatgctggtcaaagggtgaatcagatcgggtcgcaaccgagaagtttcacccaaaatactcaaactgaatcacatcaggcaataaaacggttcaggtttttcagaatcgaactaagtgtttcagaatttaaaaatggataaagccatccaggcacaagtacaataatcgaacaaattaacaaaacaaaaaaataataannnnnnnnnnnnnnnnnnnnnnnnnnnnnnnnnnnnnnnnnnncagacgggcgaatatcttcggcaggcagaagcgacctagactgatcggtgacccccgcctcgtcggcaagagtctcaaccgacctgtggccgcccggacttaaagaagtggggtcgagagtaggagccttgagttcctctttcagctcggcgataaaattggtgaaatcgacctcggcattggcgaagtgtttcagccattcctcaacttggtccttctcggtcgccaacactccaccttcctcaagtgtcttgatcagttgcgcattagccagcgcctgggataagtacataaactgaccgttgatcccgtcaaggagcgacaccttctgctcggcggccttaaggtctcgcgcctagccgtttgagaagcccgagccacttcgctat

SEQ ID NO: 2238 - DNA, 1171 bp, Arabidopsis thaliana landsberg
  unsure (1)..(1171): unsure at all n locations
tgctgcctgtgattgctccgaggccattgacgagtcgccctgttctatatcagctccagcgtagtgggtactcgacctcatcagctatgtggcggccaacaccgctcgtaggatacctgacctctctccttctgctgcggccagcactgtggtcgcgtaaacttcgagattatagaagtcttcttatcctggtgctagatcgagtgagcgtggtcctcctctttctcccagattcatgaggctcgaatgatgaatgcctcgcaggcacatgcggaacctcttgctcactaggctatggctcgtcatatctcctcgagggcatgtcctgagggagctggccctgcggaatagctgtagtggcagaggagcagcttagcttgtccttaagaaacttgatagccttgaagaacttggcgagttacttatcctgtttcttgcaccacttctataacttgctgttgttcttgtgagcttcactaaaactcttgctctccctcgctggaggtacatgctcactgaaatgatacattctcgtgtcaaactctacttcatctgtttcatccgtctcatcaacctcttctgttgtagctccttccgtgtgagtgatctccttagttggcaaactgccctcgaaataaagatcttcaagcgcaggcttgaagtcaatgttccttccctcgagaatcctagtagcgtcaatgcagaggcgaagtcgccaaccatgtcatgctccaagaactcacattgacgcaaatgatccaaatccatcattctcggttctaaccttggttccttcagcggtactccacaagctaccagaattggcgtcacaacgccacctacgcatagtgctcctctcaccttcttcttgccgtttgtcaacgtccacatcctgtatccacacaagtggattaacataagcattactggtgacgcgtcattgagatcgtctctcaggaccttctttccctttgtacggcggagaatgcttgtaagtgcggaatctatcatctccatgtctgtnnnnnnnnnnnnnnnnnnnnnnnnnnnngagtaaagaacattggcaaacgagcgctgaaagtagcgaatcacaggaattcagatttggttggtcttggacgcacagagtttagcggtacattgttgccaaagtacccacaaatcttaa

SEQ ID NO: 2239 - DNA, 372 bp, Arabidopsis thaliana landsberg
  unsure (1)..(372): unsure at all n locations
tcgtgaacacgttctgatcataaccacaaagaacattcggcattttccatagtttttattcaccgattcttggagagcagagtaaatcttgtagtgtggggagacaagaagaatgcttcgaagttgacgttctacattaacatgtactgatcataaccacacagctatcgcttcatcaaaccatatccttgttgtagctatgcgaaatgctgacataagtttgaggccttcactacgatctgggacatactattgtctccatggttgaacaacaacagcgagaactggctctggttcaactgttggttcataaaatccattgatactaaactctgatcatccagtcctgactccannnnnnnnnnnnnnnnn

SEQ ID NO: 2240 - DNA, 547 bp, Arabidopsis thaliana landsberg
taaaggaaggatttaacttggtgaaccgtttatccttctctgtgtaagggaagtatacagattgatccgcacgaggagcagcaatgttaaactttggatcaaagacatcaatgccagagacaactctacataaaccaggcattgtgaaggcagtgtgactctcgtactgtcctggcctgtccttgctgcaacataaacagagcacagattttggttttatgagtttgaaatttcagtgtatatgttgatgcaaaaaaacgaacaagacgaaccttcctgcgatttcttgatatgtgctggtaatgatgaagtcagtaacattcattgcgattaaatcagctgtgaactgacatgagaaatggtatttcggatctaattccttccactttgcatctgaatcttcatactttgtcttctccaacgcatgagcgatcgttccctgagtgacaccaagtttggtggccattagagatgcaaccaagtttccatctgtgtagtttccaatgatgaggtctggcttgcaatcaaggcgttgaagaatcttgct

SEQ ID NO: 2241 - DNA, 634 bp, Arabidopsis thaliana landsberg
actcgtggagctatgtgctgagcgcgtgcagtgcaccatcaagaggatggttcccccgcccctgttggtactcagcacccttaccgctcgccaccccgtggtcatcatgcttatggcactcctgactgcagaaccaagatagacttggagccttaggtcgctagtgtcgaagtttgtaataaatgtttagtttaagttagatgtcttaatcttaatcaatcgtatttagtcaaggtagtttgattatcatgtgtctctatgtttgtcatggtgaacttgtgatggatttgtatttttgtaatgattgtcaccaaaatgtgggtgtcccctgcaatttctgcaactatctcgctgtgaacccgaggatgtcaacactgatgccaagaggcagtacaagttcttgagaggtttggttgacccttgcactactagttgatgaaccataccttccctaccttccagcatctgattgatagggctatattgactgagaggaacaccgggaggtgaagatcggaaaccaagattggtggacgtagccgggccagagtcgtccccgtctcagaatccacccagtagttaacagagtcccgcaaggtacagcctagacagcgtccgacacagcaatcagagt

SEQ ID NO: 2242 - DNA, 881 bp, Arabidopsis thaliana landsberg
aaacgaccacactggccacatacataacatccgacaatgatgtttttttgtcttgtccttccactctttaggttaacttgaagctttctccgattacttgattgacctggtatcaatctcgaactacttccaccatttcttagtagcaatgccgcttcctcttcagctattgcttcttctatattaactgctctttcgactaactacggtaaacttgagaagacaactacttcgaatatctggtcttaaaccacgtataaatctttgaattatggcagcttcattgtcgtaagaaacatatttccgcacatttctttcggcttgctttaactccaaaaacttggcttccaacttatctttaacttcttgtggaaaatacttcttctcaaactctcttcggaagtcttcccatgttggctctttgtcttcaaactgcttctccaaattggtccaccaattggctgcatctttcttcaagtagtgtatggcaatgtcctttttgtactcttctggacacctcgttacggaaaagttcttctctaagttctttaaccatgaatcagctgcgaacgcactccttcttcctttgaaataatttgttcctagctccttgattacaatcatagtctttagaaactctggttcccttgatgcacaaggttgtgcaattacttctccttttacttgactcatatgcattgaacactcatacgactgttggcttgtaaggtcatcacattccataaaggaaaatatcgcctttcgcgaagaattcgtctgatgattctaatgactgaattcttcaaaactttactcatatgggctcttggtcttgtcattactagggcctcacttacgatcttacatccatccactcaacg

SEQ ID NO: 2243 - DNA, 1363 bp, Arabidopsis thaliana landsberg
  unsure (1)..(1363): unsure at all n locations
aaagcacttctctcgagaccgagtttaacgagtgcttaaattacttcacggtatttgttctccgtccagctcggaatcctctgaccaccgaaccgagttttttgtggacatgcagacctccaaacccactattcgagaggtttacgagaaaaagaggattgccgccgagagggaacgtgcggccgatgagaaacacgtcgaagaagagcgcggcgatgctgaaggtatagatgtcaatcccgagccttccgcggctcgggaagttattccttagactgctgcgcccgctgaaccgggacttgctgagactgacgtcgtcggtctggttactttctgagccgcttttgaatatggtttcaggctatgggttcaatgaatcagatggtccaatcttacgattagctgagagcaatctgaggatggattttgaggtcgttcgctataagcgaatgcttgccgaggcgaggcggctaagagacagcgaggtggcttgggctgcgcagaaggccaggcgagaggcttcaaaggtctttctcgctaagtttaaggtggcctaggggaaggcagctcttctcgaggatgccagcgatcagttcatgcacttgtctcaagctcgggcatcggccaatgtgttttctcctcgggggattcttgttaactcgaactcgttgaaattcctcgctagattttgtacatgagtcagataggcttccattctttcgtcccgagctgtnnnnnnnnnnnnnnnnnnatttgcgacgagttgggagtcgcaaaaagctcggattttctctatctttagcccctgagcaagattaagtccggctacgagcgcttcgtattcgaccacattgttggtagcctcgaagtttaatctaaatgattgctcgaggacttctcccgttggcgaagtgaggcggatgctacacccgaaccttgctttgatgacgagccgtctacgtgcaataggcaagttgtatcgacgataaaatcagctaggacctgggattttgcacatgttttgttccgatactcgatgtcatattcgctgagctcgattgcccatttagctaggcgtcctgattggcttggactgtgtaagatagcgcggaggccactggatcccattaccatgatggaatgggattgattgtatggttgcagtttccgagccgacnnnnnnnnnnnnnnnnnnnnnnnnnnnnnttgtgggtagcgagattccgcccggtgaatgtctgtgagacttaaaaaatcggtttatgttcacctctgtcttctcggactaacactccgctaacagcagtatccgatacaagtatagtgggtctccgattacgggcttttgagaggatgatggtgt

SEQ ID NO: 2244 - DNA, 544 bp, Arabidopsis thaliana landsberg
tgccacagtcaggacatggacaatggtgaaaggtttactgtgattttgacatattgaattctggcctatttaggctgggcggaaaaatcttcgtcataaagcagcagagacataaagagatttcattcaaaatcattactttacaaatgagggggcttgagatatagggtaatgtcgaatcacctaatgtaatttttaagatgtatcttgcaactattgaagcattggttagcgtagaaacgtgacaagtataagatatcagatcaagagataattgtaaccgaaatgctacaaaccaaagagcatttacattaaaattcttctcatgtctgctatgtactttcatattcttagccggtgtctctgaagatgacttgaatgcatggtatgagcgtatggtttaaaacatgtctttgttccctgagattattgcaaaacaaaaaattgtttaggagatgattatttaaatgtgaaagcaagcttctctcaggtgaatcaaatgacattaccgcaaaccttgtgcactaatacccatggtcctatg

SEQ ID NO: 2245 - DNA, 2010 bp, Arabidopsis thaliana landsberg
ggctcctgggctacctcctgagcaactccttgctccggaacgaggatgtactccccgtcagcgagattacagtctatcggatgcaatgaataacatatatgcatattaatggcatggtaatttgtaaaggctatgcatagtagaacagtactaaatttagtggtactctagggtttcctttggttctccttaagggttttatacattcattttagggtcttgaataaaacttaaaatttcagtcatcctttagaggttgggtttggctcttggaagatttaaggttgcactccactattctctccacattccttatttttactttcaattaagtttcttagtgagtgcttttacattgccatggcaagttaacatcttccaaaaatgttataaaaattacagtgggtaaatattgacctctgtgggttatcctaaaaattttgaggttgaaattatttcagatgctcattgtgtaaaattaacaaaagtaagggtaaaagagcactttacactatagctatgatttaattgaggtttctgtaccaaattttatttttgtccagatcataggtgatattaggcccttgtgttaaaaatcacagaaaaaggcctactggataattagttatgattttctaaagtttaatgctaaaaaggcacttactattatcttgctatttgaaaaatgtcaaacaacaaatttcatatttttcctatgttcttaataacaaagcatttattatcccaaggtttagggtgttttcaccttggggttatttttctagggtttttctaagttttccttgttttcttaaaataaaaggtatcccaactattttgtactaaacaagggtataagaaatttttctagtgaactatactgagtaggtagactaacaaaaatgtgggtgctccctggtgccttatttaaaccttcattaatatttcctttaacttaaggctaaaaagggtttaaatggtaacaccaacctaactgggtggacagaaggggttaataattttaaacaggttaggaaagtaataaggaactcctccaaattttcttaacctcagttaaatagtgcaactatttgtcctcctattatttagcttttggccaaaacaatatttaaatcagaaccctaaagttttcagtagcacttaggggtttcatatttttcttaggtagtttatattatttaagacctggcaaaattggtttgacttgatttgggtgaataaaacagaagatatgaattattcaagttttgtttgaatttaaatcagatttattaaaaggtttcctggaaaaaccactttgcaccgaagtcctcgggttctttccaaactaactctctcagttatacccttgcgctactattcctctgagtcactgacaatgcgtaaaaccccctagcctttccttcttctcccccgcggtccctccctaggtttaaacagtactcgcgcaaaagaaaagggcggcgcggcttaccggcggcgagagaggtccggcgaggggcggggttggctccgggaggtcctggtggtcacaacggtgtacggctcgacggcgggggtggccggaatcggtcggaccacgtgcgcaggcaggtgaactcgtcggcggcgggtgctccggcctaaccacgacgatctagttcaattaaatggcacgacgatctggttcaaacttctccagggtgttctagaggtattttggcgccactttgtcaattgggccatttggttttaagtttgggatcaaggtgaacatgtttgatctttggaaagggggtggttttggacttaggagaattctgatttttcctttgtgctcaccccttgggtgaatcttttggggtttttctgaatactttttggggtcactttcttactatcatttgtagggtattaagtgtactacatcttttataattggcccaagtcatgatcatgtggttatcatacccttttattcatgcttatttctagtgctccagggatcct

SEQ ID NO: 2246 - DNA, 609 bp, Arabidopsis thaliana landsberg
aaaatagaatactacatactcatcattcgctttcccaaccaaataggtccatcagccccataggtatggttgactacgacctcatcctcgccccgtcctgctgatggcgctgcccatatctcactcaaagccctataagcctgcggccagtattacatccatggaagagttacctacatctaagcgttagacataattacattcactctaaatgagctggtagattagatttttacctccatgtactagtccacactcaagtacacatctgaatattatcgaaagttgttgaaagaatgctctcgacgcttcatgtacgcattcacaacctatagacaagcattggaaaatgcatccttgcacaccttcttcccattgttatctaatactcggtctgtatgctcctgagcctcaggttacacacgatagcatttctgtccaacatcaaaaataaagttagtatcaaacaaactgtgggggacagatatccccgggttcacggaagggtaaaagccacacgaggggccaagagccaataaatcgtaaggtcattcttcatgggcctggggagggcaatcagtaagcagattgatgtaaggcggattggtg

SEQ ID NO: 2247 - DNA, 4774 bp, Arabidopsis thaliana landsberg
  unsure (1)..(4774): unsure at all n locations
gagaaatcatcaaagtcgttttggagcttcaagagaagctcaagcttgaactgcgatataaaaagagtctgatctgttcgtttcctcgtttaacgagaagcaattccacaggatcagtggcgatttcgaagagggaaatgcttagggacattaacaagcatagctcgcagagacatggagtcccacgtccaggggtgaatccatcatctcatatgcgtcctccttcctctttctgctgcagctcgtatcagttcaggccacaaaaacacgccggaaagaatggtggcggaagaggaggaagtttttggattgctccggtgatcggtggtccatctccgtttgggttaggatccatcttacgacttacgaaagagaaaaaaaagaagtaataacagtttttgttttccttcccaaagtaggaccagtttaataccagactcttttaaccaactctttgtttcattttgtaacgcatgagattatgcaactaatgcgaaattttgttagtctttcaaatggtaattacgtaatttgaattttcaaaacgaaaattcataaatatatatatttacatcccaagtttggttacatgacaataataccaagaaaccataatcctcaaatatgagtattaccaaaaaaaagtggaaattacaaaattggtgggtgaagccgtgggagatatctctctcattttttaagatggtactgagaaagaaactcttgatatgaagatgatcgatcttgccattgagagtgaaacgtcttgtccgtaagcatagctttcatatcgaatttatcgaaattcacttcccgattttcgaagaacatctcgaccggagacaactcatcgaacagttcaagccctctttttcctacagcattatcatcaccttctttacaaccacgtattctggagacaaacgtagtgacttcttgctgtagtctgtctgattcagctgtttttgtgatcggacgataagcaatgaacgtctttttctcctcctgtgaatcactgttgagccacatttcatcggctcggtcttcgtcaagtgaaatggttgtctcgtgtcgacctgagtttgcgatctggcgggtggctttggagatttgattgcatcggttatagaactctgcttcaggcgagaactcttgttctgaattgagacatccgttatggaactcatggagtgtgatgagaactggaagtggaacaacaggaccaacgacctcaacaccgggttgctccttctttgaccatttgctactccggcttgaaggattccttaacaagaaaggcggtaactgtgggaattctggaacaactaagaactcgagagactgtttcttcttgtctaccagaacatctgcaaactcagagtagttagagaatgcaagcatcaaaatctctttaggtaagcttgaccaggtttctctcaatgcaatgtcgaaaacacttgtgggtgaattgatattctcaaagactgcggttatgctagaggcagatctgcctttaccaaatccgcaaatcttcaacttcttacataactcttcatggcagattaagctaaaagattcactcttcttgaaatctgatgattctgtcctcatctttgaatctaaaaacccagcgagcatcccttttctgtgagcagagagatactcgagttcgagatagttaaaacgtctcgggaatttgtattcctcgtcatcagggaggtacagtaaattcacctcatcggatttgcaagccgaacctttgtgagctactacttctaaatgttttaaacgagaagcacggaacttgactgcttcaagcttccctgaggatgttaacctgatcaaagtaaaccccgaagattgatctgacgacccaagtggaaggtacttgttcaaaacgccaaaaccgagaacaagaacactctttttctgccaatcaatccactcgggaagagactccttaatcatcacttctctaaatagacaatctccgcatagacactttccgacaggtaagagtagattgtgtggaagctcccatacatacaaggaagaaggatccttcccaacagaaggagaaggtccaaaacagaacatttgagattgtgcattccaaaacgaccctattatgaggcaagaagtattcgattcaaaagtcctaactccaagttcagacaagctatagacatccataaagcaaggcttctcaacatcatgctgccatttcaacaaaggcacacctgatctcgcatcacagagaaatacatagctctgggaagcaagaacaaaccgaaaaccgtcactacccgcctttgcaaacccaacaaacacttctgctccggccgtattcagactctcaacttccaataaacatctcacactgcaatcctcagtgcttttgacaataacaaatagtgcatcagaccgagcaacgatataaaccccaactctccaaccaaattcacatcctaaccaactcttattcactgatttcccttgactctcccaagaaactttcagtttgcaacctctaactctacaatgtctctgactcaaatcaaacacaaagacctcaccgttatctaacaagagtagacactctccagtaacatgagggctccaagaagcgctcacaatcacaaacctcttaaactgcttacatccgaggtttctcaaaaccggcttaccttgagactcatcatacttgacacagtaccaatgaatcgaatacaacgaataaaccaaaacgtatcccaactcgcccgaagaagaagaacacttatacgctccaaagtcactaacaggttgcaccaaaatcttcaaaattcgagaaaacaatctctctgttgccacaaaaacgtcaccttcgtccgaacccgtgacttgtaaaccaccggaatctccataagaaagcagcaagaacccaatttgatcaaggttagtccctgtggggaaaaacaccaagactgaatttttactggggaaaggtagaaactggaggcgattgtaggagagaaccctaacggtatcatcgtgcggattggaaattttaaaagaggaattgattgcggaagaatccgacggagggacgccggagacggagagaaaacgcgcgggagttaagtgaggggtaatagagagaattggaggagagagtgagggagaagagaagagcagctgcgagtctgatgggttcgagaagaaaggaccaatggattcttcgggagaggaggtgatgcagagtttgcgtccccattcatcggtaatcatctccatagggttcttcgacggagatcggcggcgagtaatcatgatcggttaatatgtcggcgcaatttttttaatatatggaccgttttggttctcgttaaccgaaccgagatgtaatttggacggatttatattgttgtacctgaataaaccaataacaaaatttctcgtacagaaccaaaccaataggtaccgtcgttaatggcagaacttgatttataaaaataagaatcattgttatggatacgacgattttgtcattgttatggataaagctctaactttatttgcttattctggaaactttcatattattttgaatcttctttgtcacgcaattaagatcctctccttgctaccttaattcgaatcttccttgtcgcacaattaagatcacatcctaccaacaaataatgtgatcgtatcaaatgcggaataaggttctgagaaagttttaagcactcagctcttaagcgatcaatccaacaagattaatacactcttctagaaaatcctcagcagccatggattgatttcaaacaaagataagctttacactttttcagcagccattatgttgcaaataaaaaacatggtttcacaagcaactgttgacaactgtaaataaacattaagcaacttagtctatgaataacagtagacgcgagacaatcatacatccactaagcctaatcaactcctaaatacaactttctagtagagggtaaacgtagacgtcctttgatttctccagagtcaatacttaatacggattgggattgctttgatgtatatgacagtaggaaaagcattgaagctcagaaacatgtcaaaatacatatcaaggtgataaaatgtcagcattaaagctcagaaacatgccaacaaaaaacaaatgtacatgtagagctcctattcagtgacatcttttccttttgcctccagctagtttgattacttggaacataattcagaatagctggccaataccaaccgctatcacaggtacgattatcaagtcttgtttactcttcccaacaacatataacatgtcagtattattgaannnnnnnnnnnnnnnnnnnnnnnnnnaaatttggacgactttcttctcctcgtcgagcaagaaacttaagctctttgtccaatttcaatgctaagacattggtccaagaaacagctttggtggtgtcatgaaacttatttgacacccaaatctcagtcttggaaccctttctacaccgcttttataacacagaaagcttctcttctccaacaacggagagaaccttggcatcataattatcacattgatagggaagaggcaaataaaggtgggatttctcagttgaaaaatcaaaatagagcaaggattcagttcgtgttataaagacacgctgctgtgactagcatttccaagttccaaccctagagagagatcatgatcatagttgtagcgtgtattgtcaagatctatatgttgggatccacctgtttgacccat

SEQ ID NO: 2248 - DNA, 1171 bp, Arabidopsis thaliana landsberg
  unsure (1)..(1171): unsure at all n locations
acactacttacgcttttcagatcaggttgcggggtgagttcttattctcaatcatacacatggcatcaagtcatattcgactccaaaacactaaccaagcttcttcttgcttctcaaagctttgatggtgtagtcgaagtccgtatgagtctttgtctttgtatcttctatcaagggaacaatacttaggcttttaaggtcccattgcggtttaggttcttatactcaatcatacacatcacatcaagtcatgttttgccaggaaacagagctctgtacttatcttctaactctttcttctgtcgccaggaaatggaagtgggggcttgtagggaggaggaatgaagaccttttctttgtttttgacaacaactggtttcagagtagatggtgatattgctgggaatgtcggtcgagtacagtggtcgagtgnnnnnnnnnnnnnnnnnnnnnnnnnnnnntcgagtgatttgtcgagtggctgctcgagtgactggtcgagtgattgctcgagttgtttgtcagcttgatctttattgagactgaaatcctccccatcttggtatgtactgtccttagtgactgacttgggtctctctctaatggataactctcttccattcctgatggtgatagcatgaacattagcatactccttgggattctgaattgacttccctggatgtcctgtaactttgggaacagaggtagatgctgattgtccttccaagtatctgacttttgtgttcaatgcctccactgtggcattcaggtcattgtaactgcagttcagcttatggtgcaattcagataacttcttagcaatttccatggagctagatacttgtccctgtagcagctgttgaagcatttgtttcatgtcagcgttaggagcagcaggaccttggttttgctgaggtacaaacccaagttatggttgtggctggtagttcccctgaaattgctgcttgggaacaaaacctttgttgtagggaacaaaaggtttgttctgaccttgttgttgctgtggaggacacacttggtcttgtggattagcaacgttggtgttgcggtaggagaggttcgggttgttggttttgaagttgttgtatccaatgtagccaccctgggttttgttgatgtagctgacttcttctccaggttcccttcc

SEQ ID NO: 2249 - DNA, 2116 bp, Arabidopsis thaliana landsberg
gcttctgcagcaaagtctccatgaactcttttggtttgatagattcagaaaatgatggtttgagaaaaaggagacccttttggatgtgatggattgagagcattatatgatccgttggtgaaaaatggtaaggttctttccatttttgagggatggttttgggtttgacgaagcattttgagataatccttacttcagatgaagaagaatccatttttttccaagaagaaaacaaatgcgtataatatgactcttttgtgtctttcaatgtttctttggtcttcttttatcttcttactttcgtttattctctcttttatagaacaatccaaataaaatattcatatgatttatagatagctatcatcattaatgatgtcatcacatgaacatgtatgttcctgcataatttgatctgctggtcatcatcaatgatgtcatattgaatagcattaatcttagtttgatttatatcaatatcaaataacagatgcatgatttcaactaagttcactaaacactgtttccacacagagggttagaagaagaagcaagcaaaatcttgagcccaagcctatctcatatgtgataagcacaaggacgtcacgtgattcttggttaaagtaaaccgtgtcgttttggatatggtttctagtgctagaacatgttaggaaacaaaggggacaaaaggttcagagaggagttgaattgaggctgtgtttgtgagcagatgaagtcttgtattgttgttgtataagctcaagaaagagctttactaactctcgatcttgctaattaacttctctgcgattactctgttttatggttctgttttcaagtttcatttttaagttgttataaaataaagtgttgtatcaagagagtgagtgagaataaatccccaaagatttcaacattatcgtctctaaacctcacatactagtttgtattaatattttcataaacatgaatcattatcagttgaataacacattgtcacataatattgattgagttttaacagcaacacaaaatactccaatctaacaaatccagtttagatagagatatgatgggagcacatatgaataagaatattagatcaagaagaagaagaagaagagacaagagacataaactcttgatctaattccaaagcttccatacactctggaggtagacatacttccaaatctatgcttgctcctccttctctccctggataagctgataccttcccgtcatacttaccaccataaccgcttctaaccgccactgctttccccatcccaaactcgcttccgtacttgttaaaccttggagaacttcccatgtgaactatgttcaaattggaaagtcgatatgcttgcaacggtaaaggagacttcaacatttgatctatttcgtaagagatcttttcgccagtgtgttcggtaacagcttgatgcagtttcaaagcaatccatccaaactcattctccagtagattaccgattttagtagtcgttttcacaagagagatgtaaactccaaattgattcgtcggcaatggtggattcattcttgatctgtttccagcagcaaacctgcaagtagtttcttgatcatttggtagttttcttgctcttgtaatgcttctccatatcaatgcggtcagagcctgaaaagaagagatcattgttgttccgcattcttgattcgcctttgatttcagcgatctcactgtttctgatgagaaatggaacatcctctccttcaagaccggacgttctgattgactaatgaattcatcagagtgagtgaaaggaaggttgtacataggaccggacactttaggaaaccaacgtgaaaggactggaggattcttgagaagcaagttatcggtttcttgtgcattgaaaatctccgacaaagagttgaaaaaatgccacaaggaacctccatctcccacagcgtgattcaatgaaaatccaatgaacactccatctaccaattctgttacctgaaaagattcatctctttagggtattgcatgcatagttgcgtgataaaaaaacaactgagactacatagatacacaatacttcgatgtatctctaaatcaaatggcaagaag

SEQ ID NO: 2250 - DNA, 490 bp, Arabidopsis thaliana landsberg
ttcaatgggggaggggtgaattaagtaacttacccagaatggcttgctaacactatgatggttaaaaatgcaaatggaaaatggaggatgtgcattgatttcacatatctcaacaaggcatgtccgaaggatgaatttcctttgccaaggatagattccctcatagatgcagtgaccacttcagaactcatgagtctactagattgatattcaagatatcaccagatatggatgaagaaaaaagatgagcccaaaacaagcttcattacccccagtggtacctactcaggggctcaaaaatgctggaggaagcttcaacagaatgacatcaaaagtgctaagtactcaaattggcagaaatatttctaacctatgttgatgacatcatagttagaagtacgaagaaagaagaccacataacatattttgcagatacatttgcttattttggagaagtaggccttaagttgaacctacaaaatgcatcttc

SEQ ID NO: 2251 - DNA, 536 bp, Arabidopsis thaliana landsberg
  unsure (1)..(536): unsure at all n locations
nnnnnnnnnnnnnnnnnnnnnnnnnnnnnnnnnnccacgcgtccgcccatgcgtccgtgcaaaatggccaaagacccagttcgcgttttcgtcactggtgctgcagggcaaattgggtatgctcttgtccctatgattgctaggggagtgatgttgggtcctgaccagcccgtgatcctccacatgcttgacattcctccggcagcagagtcattgaatggggttaaaatggaattggtggatgctgcattccctcttcttaaaggtgttgttgccacaactgatgtggttgaggcatgcactggggtcaatattgccgtgatggttggtggattcccaagaaaagaaggtttggagaggaaggatgtgatgactaagaacgtcttcatttacaagtcccaggcctttgcccttgaaaagcatgctgctgccaactgcaaggttcttgttgttgctaacccaacaacaacaatgcattgatcttgaaagaatttgttccattattcccgagagaacattttttgttgactagattg

SEQ ID NO: 2252 - DNA, 12688 bp, Arabidopsis thaliana landsberg
  unsure (1)..(12688): unsure at all n locations
tttttagtaagagcgtcttaatgttttgttgtttaatagtgggagaaagatgggaacagtccttcgtttgggtatgattcaagataacaacttcagcacaagacgctgatgggagcacgggccaggatttgatctcaaagacgtctttgatggcttgtgtctaaagttgagcccaagacgcactaacagagaaatagaaaatatcaatcattattcgataatagactaattcgatgacagaaaaggagattattctttaatttagaaattaattagctttttactttatagaatatagagtaggtaattaatgatcctcactaccatattctaccaatgagcttgcagcagctgccgagaaataagtaggaaactgagacctgatatggaattggtaatgatgactgatgaaaaagaagctgataaaaaaatctaggacatatggcttgtttctttctctttttgatatatgttgtcgtttattgaaagctgagtagtcacctctcttgtagagaatcttcaaagctttagcatctcgatatagtagtagatatttttcatataggggagaagatgttcttacgatattataatcaaatgcttctaaaaggaaaatgtattattcatcaacaaaagacatggatccatgataatgttactatttttttttttgctaagaatgtaaatatttcattaaaaatgaaaagttattaggagttatataaggtagatcctaaagtttagtcccatggcaaaaaaaggataaaaaaacatggaagcaaaaacaatcagtccatcgacatcgacaaaatcagtgatttcagaatcaaagaagggataaaacgattttgaagtatccaaagtgatgacacctcaaagtagtagctttatgctgtcaaacggcaaagatcgagacataagaaccaaacgattggaagcctttcactggtagcccaagaacttgagccgtcaacggcacagaacaaggagcaaacaaacaccaactccttcagcgtcctgtgagaggtactctttgaaataacgatgagctttctcaaggcggaaccacacgaaccaaagcaaacgagaaacgcaagctcactctactaagctctttccccgaggtcggctagcatagagcaaaatctatcaaaacacaacaacgcttaacatccacaaggtcttactagctcctccaaacatgatgataacttcttcacaaaccaaggcacaagccaactcaagcacaaatccataaaaagaggcagcaaacaatagaacgcaactaaatcaaggcgaatcaacaacaaagcggcttgacaaaaaaggagaagtataaaatcgatgagcaaaccgagagtaggttcgaaggagtacgaataaggagaagactcctttgtagctaaatcgtaacaaaaaccacacgcttgatcaaagagatcaaagagaccaatcagtttaacgagatccataagcaaatccgatacaaaccgagcaaatctccgagttgagagaagttggagaacaaactccgagaaactcttagacttgacgcaatcgcaaggagacctcagcaaccctccacagatccgctttcgtcgtcacgcaagcaggaacacaaagggaaggtgcaacactactcgcctccattaccgtcaagcaccggcgaccaccactcaaaagcataaaatactagacactgaaatcagattggagaagaaaaacggtagccgcaacaccaacgcacgagacaatcttctccaccgacacaattgaggtagatctgaaaatagatccaccaaacatggacgactcctcatgagaagaaagttgcggtagctccggcgggaacctttgttgtcccatacaaaggttaaacagcctagaaaacaaccacaacagcctcgagaagaagccgccctgctccaatctcttccaccacacgcaccgagcagaaagtcgatttgaagccaagaccactgaagaggtagaaacagagaataagtagcaagagccctctcatggcgccagacgaaaccggacaccagagaggcaaaacgaaaaacgacggagaagagagcttcggtgaggattgggagaaaagaatcgcgcgcgtgtacctcacgcacaaaggtttttcaacggatacatttaaggtagaataattgtgtgtgaatgagaactaaatgtattttgtgagtataaattatgggtcaaggaccatgtaaagacacacgcatttttgtgcaaacttactatacacattttcttacaaaaactcatagttttctctataatcgttgatctattttttaatacatttgtcctcaagaataatcattctcactaaataaataaatacttgagtgtgtgaatccgacatccacaaatatgacttcatgtcatgtgtatgattgagtataagaactaaaaccacaaccggatcataaaaccccaagaagtgtttccttgttagaagatacaaagcggacacacatgtggactttggttacaccatcaaagcttagtgaagcaagaagaagcttggttagtgtttttgtgtcaaatatgactagatgtcatgtgtatgattgagtataagaagtagaaccacaatatgatcttaaaagcctaagtagtgtttccttgttagaaaatacaaagccaaaaactcatatggacattggtgatacaaaggtttttcggtgtgtgtcaattccctaaatgcatcttatgtcattgcagcatttaaggtgtcaatccaaatgggtgtaattgctatcaatcaggatatgatcagagaatactaagtcaagccaagtgtgaataagtttggtgtgtttctactaaacctaagcaacaggttaacatgcaaatcaaataacaagaacagaaagtaaaccaagcactaggtaaagcactcggtcgagcaatcgagtaagcaggtcgagtacaatactaaaaacaccaattttgcacgaaacgaacagagtactaaaaacacgagttttgcacaaataaacgacacagagctcttaagaatggggtaattggtcttagtggactcctcaatccattagctaactaacaaactcaatcaagctatccctagacaatagattcaaaaccaaatcaagccacttccgtgtgagtgattctcataactttagaacttcctaatctcaacttccgttgatgaaacataataaagcaggctttaaacaccaatctattaaagtcaataagcagtctaatcatccaattccttgggctagaatctacaaatctctgaaattagttggttcagacatttcatcaaacatcttttggatggagaaagtctgaaatcaattttcaattgatcagaaagaaaatagcattaagaactcctaaaacagaagggaatcatgcatataaacacttagctagctaaagaagagaggaatccacctaaacctaacccattctcaagaactctgaagaacactactcaagaacactcaagaacatcatagaacaaaacccagaaaattcataaaactcagaaatcattataaacttagcaaaagatagatctcaatgagataaacaagtttgcagaagaaatcaaatccaaattctcaacagaacaaccagaaaatgcaaaagaaaatcaaagaaccctaaaaaccagcggacaaaacgaagatcctcttgggcaaaaacataagaggtctatttataggcaatcctaggttgccctaattgggaataagacaaaaaagataagtcggcgcaggagcgctcggccctaggtcgagtagaaaagccgagtggcttggtcttggtcacacagctcggctctaggccgagtggcttggtcgagtagcttctcttcatccttaagtgcacaactcggcctccagccgagtgccttggtcgagtaggctccttgttcttcacgtgtgctccactcggcctccagccgagtacataggccgagtatacttcaaatccttccttaggtcccccgaactcgagtctgtccatcccttgtgctagaaacctccaagttgagtccaaaagtacctaattcatctgcaaaacactccaaatgcaagtatgctatgcaatgcaatgcaaaatgtgcaaaagaaggaaaagagactaagaatgcataaaaaggggcatgaaactaagctaaatgcatgaaaaacaagggcttaaaaaggttaaaatctagtgttatcattaagaatcaaatgaatgaaataaagaaaaaggagaaatacttaccagtgggttgcctcccactaagcgcttgtttatagtcaatagcttgactctgcagttgcttaatcaacaagtaggtcctgaagatccaaaggcttttctactggaatcttggttcagcccagtagtgtttgactctctttccattcatggcaaatggttttccattgttgtttttgagaatgactgttccatatggcctaaccgagtggactgtgtagggacctgaccaacgagaagacaattttccaggaaatattgtcaacctagaatcataaagaagtacctagtcattaggctcaaaggtccgagtgaggatctttttgtcggggtaagcttttgtatgttccttgtagagcttcgagttatcataggcatgaattcgtatctcatcaagctcattcaactgaataagtctcctttctcctgcagatttgatgtcaaaattcatcatcttgactgtccaagctgctttgtgctctaattccacttgaagatgacaagttttaccatatagaagatgaaaaggtgtggttccaagcggtgttttgaaagctttcctataagcccacaatgtatcatctaacttgtaagaccactcctttttcgccttactcactgttttctcaagaatctctttgatttgcctgttggaaacttcaacttggccgctcgtttgtggatggtagggaatagcaacccgatgctgaactccatattgtaaaagcaattttgcaagaatcttgttaatgaaatgcttacctccgttactagtgactatgcgtggcactccaaaacgagggaaaatgatagacttgaagagtttcatgacaaacgctgaatcgttctcgactactgtgatggcccaattctaagttggtgaccaatttcttgttgattcagaagggtgtcgatcgacaggttcagtggtgtcgatcgacaccatcgcgcaacttcaaatgtctacttcctctgaaatgtgagtgtcgatcgacatagtaagagtgtcgatcaacactgaagctatcacgtttgcagtcatcttcttcagttgtatcaatcatgtataagttctcttcaggcaagaaatcgtttatagggacatcatcatcgatcctaatgcgtgataaatgatctgctacaccattctcaactcctttcttatctctaacctcaatgtcaaattcctgaagaagcaaaatccatctcaaaagtcttggcttagcatctttcttttgcatcaaatacttcaaggcaacaagatctttgtgaaaaataaccttggatccaacaagataagatctgaacttctcaaaagcaaacaccacagctaacaactccttctctatagttgcataattcctttaagcatcatcaagtgtcctacttgcatagtagatggcatgaagtttcttatccttcctgtgtcctagaatagccccaactgcaaaatcacttgcatcacaaattacctcaaaaggaagatcccagtttggtggttgaacaattggtgcgctgatcaaggcttgttttactgctgaaaggcatcatgacactcttgtgtaaactcgaatttgacttcttttcagagtaaaacggtcagttgtcttgcgattttgctgaagtctttgatgaatctcctatagaaaccagtgataataggttttttagtcaattatcctaaaacaccaatcatatcgttgtagtattttaggttgtcaacccaaatgggggtgatgctaacaatcaagatgtgatcagaagtcactaagtcaagccaagcaataacaggttttggtgtgttctagcagttctaagtgaacatgcagaaaacagaaaatcaagcagaaacagtaaaacactcgaccaacacagctctttgcagagcactgggtgaggtcgagtaacagacagaaaatgaaacagggatactcgactgcacagtctgttgccagacaactgggtggtcgagtatcaggtcgagtaacagtaaagatttgcagaaactaaacaacagatgacaggatgcagtaaacagtagtagagtaaacaataaaatcaatcagataaagaattcttaaggatgggataattgagtagtttcgtttcctcagtttacaggtgattgacatgctcaataaattaaccctagacaacaagttcattaaccaaatctaagtgccaccgcaacagagactctcaagctaacctagtcccagactcaatcaccattgacgagagctaacctaacaggcattacgaatcaacaagttaaagccaaaacgctccctacaaccaataccttggtacagggtcacgaatctctggaataagtggttcagacatttcatcaaacaccttttgggcgcggaaatgtctaggctcaatttccagttgatcagaaagcaataggcattaagaacaactaatccagaagggatctatcaatcaatactcaatcacctagcatactgagaattctacactactctaacccatcctcagaaacctattcactactcagacatcataacagaaagcataaacgttgaacaggttgaagacatgataacaacaatgtaacagcaggatgataacagaatgaacaacagtaaacgaaatcaagaacagaaactgaatactgaatactgaatagataaagagaaatccggattacaaaaagtctagaacacaaggtctgcggaaataaaactagataaaaaacttcttgtcctgcgaaaatgtgaagtacatgctacttatagccaaatatcctgaaaccctaatactcaaatcgacgaactattgggacgggttaagaactgtactcgacccaggtggtcgagtgagaggtcgagtgaatagctggagtcttcttttcttccttgtgctcgagtgtctggttgagtgcggaatgaagaaggctctgaagcttgtcatcgagtatgcagtcgagtggtgtgatggcgatactcgacctctaggtagagtgaagaggtccagtggttgtctggtgatggaggtgaagacactcgacctcatggtcgagtgaagcgatcgagtgatggagacgagggcgctcgacctcggggtcgagtggtgaagtgaagtagtgatgtcctctactcgacctggtggttgagtggtctcttgagatcttgaagctcctactcgacctctgggtcgagtggtttgtcatgatcaggtccgcttcttccagatagctagtcaacagctccaaatcacctanaatcaacgcaaatatgcgacatgcatgcaaatctatcctacacatgtaaagtgatgataaatgatgagaaatggtgtaaaacattgatgatatgatgctaaagtgatgacaaatggatgctcaaaacatgcaaaatacacacttatcaaataccttggtacagggccacgaatctctggaattagtggttcaaacatttcatcgaacaccttttgggcgcggaaatgtctaggctcaaattcatgttgatcagaaagcaataggcattaagagcaactaatccagaagggatctaccaatcaaactcaaccacctagcatactgagaattctatactactctaacccatcctcagaaacctattcactactcagacatcattgcagaaaacataaacgttgaacataatgaaaacatgataacaacagtgtaatagcaagatgataacaggatgaacaacagtaaacgaaaatcaagaacaaatactgaatactaaatacttaatagataaagagaaatccggattataaaaggtctagaacacaaggtctatggaataaaactagataaaaacttttctacgaaaatgtgaagtacatgctacttatagccaaatatgcgaaaatgtgaagtacatgaaacccttatactaaaaacgacgaagtattgggacgggttaagaactgtactcgacccatgtggtcgagtgggaggtcgagtgaatagctggagtcttcttttcttccttgtgctcgagtgtctggttgagtctggaatgaagaagactctgaagcttgcaatcgagtatgtagtcgagtggtggtgatggtgatactcgacttcaaggtagagtgatgaggtcgagtagtggtgtggtcgagtagtggtctggcaatgggatgaagttactcgacctgggggtcgagtgatgtgatcgagtgatggtcagaagatggagatgaagacactcgacctcggggtcgagtggtgtgatctagtgtctctcttggcggtactcgaccagggggtcgagtggtgacgtgaggtgctgaggtattctactcgaccaaggggtcgagtggtctgttgaagtcgtgaagcatctactcgaccatggggtcgagtggtttgacatgatcaggtccgcttcttccatttagctcgtcaacagctccaaatcacctgaaatcaacacaaatatgcaacatgcatgcaaaactatcctaaacatgcaaagtgatgacaaatgatgagaaatggtataaaacagtgatgatatgatgctaaagtgatgacaaatggatgctcaaaatatgcaaaatacacacttatcacacttcctgagccctcccccaaacttaaatcacacagtatattgtgtgaataaacttggaagagagtactcaggacaaatccaatcatggaaacaaaataaagaacaaattacaagagatgatataatacaatggtgaagtgtggcgcttacctcagtcgaagaatgaacgaagttggtcatcaatggctgcttgtgattgctctcaggccatagacaagccgccctgttttttatcagcttcagtaggtgggtactcgacctcatcagctctttggcggccagcaccgctctgaggatactcgacctctcttcttctgctgcgaccagcaccgcggtcgagtgaccttctcgagtgaatgaggcgtgatctgctgctagatcgagtgagtgtagccttccttcttctcttgtgctcccgggattcgaacgacgaatgcctagccgggacatgtgatactctctgctcgctaagctcaggcctgtgctcaagctcatcaaatctcctcgatggcatctccagaggaggctgtccctgtggaatagcagtggtgggggaggaacaactcagcttatctgtcagaagcttgatagtcttgaaacacttggcgagcagcttgtcctgcttcttgcaccacttctgcagtttactgttatttttatgagcttcaatcaagctcttgctctgcctcgctggaggtacatgttcaccaaagtgatacatgctagtgtcgaactccactgctctgtcttcgtccatcccatcatcagcggcttcttctataagatcatcctcatccaatggcgaagtgttctcatagtagaggcttccaatctaaggccgaaaatcaatgttagctccctctattatccgagtaacctcagggctagggagaaggatgctagctctcttgtctgtagagtactcaaacctgaaccggtgcaagtcgccaaccattgcgaactccaggaattcgaagtgacgtagatgctcgatatccattgcccgtggctagagtccatcagatgtgattgggactccacaagcgatcagaatcggtgtcacaacactacctatgcacagagcgcctcgtgctctcttgtggttattgctgacaacccagctcttgtatccacactgatggatcagaagaagtacagagtgaggtgtgtcattgatttcaccttggagagacatgttgttcttagtttggcgaagagtgcctttgagtgccatagcgatcatctccatatcagaattagtaacagtccctgtgatctctcgggagtagagtacattggctatagaactttggaagtacctgatgacagggctacgtatctgattgctctttgaccttgaagaattcaacggtacagagctaccaatggtgatccacaagtcatacaactcttcatctttcacacttgggcttagatcccgctccattggggaagccaaacaatccttccaatcgcttgattgataacctatactcatgcccatacacagaaaatcgcaagaatcccaatccttcacaatccaactcatcagaggtcataccttggtagagctctacttgcagcgtggagaggaattgtattgtctcatcttcatacgcgacatacggataagccatcagagtgtccagatgacaactttggaacaggtgctgaacatcttccaacaatccgagttgtgcaagtgaggtcgagcaaggatacctcgtgctacataactcattcagcttgaaaagcctaacatattcctcagcaggcaatacgtccggcttgtgcagaagtttggtagctctgcgagtctgttcaggcatgtactcgtcttccagatcttcgtctataagctcatacctctatgtcatcgctctctttcctcgggctatctcagctttccttctgaagctttcatattctctctgttctctctctggccttgaagatgacgactctgtctcatccatgttgtagtcaggatcaacagaagaactgccactgtaattgctcatgattctcctgtagagatttagaactcaaagctcaaatgtcaataggttagtatcaaagatagcaatgaaaccaaaattattgtcaataggcaatgaaatagattgaattggtcgagtacaattctgtactcgagtaacctgagctgttcctgagcttagacgaactggatcgagtatcttctcaaaggtcgagttggaatgctacagcaggtcgagtaaatcgtggaggtagagtgagtcgtgaaacctagaggtcgagtaacttctctgaagttggaaggctctgctgaattcacgaacaagaagccgagtagattattgcaggggtcgagtgctttcaggaggtcgagtgatttcttgaagtcggctaggacagcgtcggtcgagtgcctctacgagaccgggaagcgaggtcgatcggtttcttttgaaagagacggctgttgatgcggatgaattggtcgagtatacggaagtaatcgagtgaagtggtttggtcggttgacggagtcgatgggctagtgacggcggcgagggagggggtcgagtgaagttctcagtggtgaaatgaaaagtggaaggtcgagtggatttggagtggtcgagtagcgcttcaaaatgagtggtctaggttgaattttagattctctctccagcttatcctcagcgcgtggtccacacactgttgattgagaaaattttgcagaaaacctactgtaaactgtaggaaatttctgcaagtctctgtagcttctgttggtcgagtaaaatgatgatttaaaaattttttgggttttaaacatcacacatactcgaccaatgtactcgagtgcaaagtctccaggtgcaacagaagattttcaaaattttgtactccaacgggctgtacactcgatctccaggtcttctgtagagtaaaagttttgaatttttactctatctccacgttgttctcttgtctctgagaaccacaaacacaactaaaacaaatcaaaaatatcaagaaaataaaaattatttacagagatagtcgtgggacttcctcccaagtgagcttgtttaaagtcattagcttgactcctcacacttatcaagaagaaaatgaactgtagagagggtcagcataatcctctctgataccatcatcatattcagcgtcctccctggagaggtctgcagcagaatactcaatccccctttcttcaaaataggcttccttctcttctggaggataatctgtatcttgagaccatcttgaagtgaattattttctccggatagtgttaatcccgcctttaggttgagcttccttctgcatctgattctgcttactcctaagttcctcaatggtgtgggccagcttctctatagtttcattatgcttatcagacttctttctaagttctttcactctttcagtctcatatccttctcctgagatcgctctatcatttccagaggttcttccatcttcggttgacccttgtggagttttgttgatgccaaactgcaacttgatatgctttccaaggttgagacttattttcccttccctgacatctatcactgctcccgctgacgctaaaaagggtctcccagtattaagggatccttatgctctacttccatatccagcaccacgaagtctgtacgcacttctacgccattaatcatgactggtaggtctttcagcatgccgaacggttttctagaagacctatccgcaaggatcaaagtcaggtcacaaggtttatattgaatgactctaacttcttgcacagagagtggcacaagctacagaggactgag

SEQ ID NO: 2253 - DNA, 2478 bp, Arabidopsis thaliana landsberg
aatgccaaacctgacaacagatcagaatcttctcccactccaacggaggttttttcaaatattataattctgtccatctctgcaaaaattatgttttttagatatcagtttcaataattttttcatacagataattacttatcctttttgacatatcctatcaggatcaaatcactgattctcgagacattggtgcacatgatctggatgataaccaggtatgctctaaacaagataaacacaacatctttaatactataaactaatgtttctactttcaaacctaatgatggttttcttctttgcactaatattacattataatgtacaggaagaaggttatgttgatgtttcagattcatctccagcgcgagaaagagagaaaccaactctgtctgaagctgaagtttttcttgtagcagagttgttatcaaaatcaaaaacaggctcatatgaacttttaccttcaatgagtaaatcagagtttgcactgtttcgcaataccctctccgctgcaccgaatacgtatggttatactttcattttatttatcatcaatacagttataatcttgttataagcttaagcttttttttttccttgcagtgaacatctcacttcgtgtggattcttaatttcaaactcattccttctatcacttgccaagcctacaaactgggtttcaactctggtataaaatcaacaatttttttacaaatattacctttataatctttagtgagaaagtctaattcttattgtttgtttacctagcatatggaggtgttggtgtccttgctttctcaaaagcttgcgaccacacttacaaaccagcgtgccgcttttgttcaaccatggttcgtaaaccatctacaaggaaaattaaaaagcttcaaagctgccaaaatgaagtcacgcgtcaagtggtccgaacccatgaaacagttcatcctagggcccaacactaaatggttcacagacattgataccatttacttgcctatgatatgggattcaaaacactgggtaggacttgcaataaatctgagagtctggtccgttgaaattctcgatccaaatacagatctttacgaggaagatgaggttcgacgtttcattgaacatgttgttacaatcttgccatacctcatccaaaggtattgtaagcctgaatgttcttagaatcatggtcttcagcctttttattggaagcgattagatggcttatataagaatatgcaatctagtgactgtggcccggtggcaatgaagttccttgagattcaggcaagtgataatcccccagagaacatggcgaaaataacagataaacacgttgacttttttaggcgtaaatattccatggacatttatgaggagtttgtctgccccctctatgcatctgactttagtaacaagtgatcactttctctgctttttgtaatattaaccatcttaactttccttttgaatattatcactctgtaagctattttctgaacgtgtgtgttctttttttactttgttgaatagtaaacataatctaattgttgttgtatgaattatgtctatccttttttttcattactcccaaaaggaacaatctctattttatatgttatacatggatttaatgtgatatgcagtgtattattgtgttccatccatatttttatatccataaaatatacgatatgtggactattattctatactaattatataataaaggtttgttacttacttagtagaatggtccaaatcttaaatggtaatgtagcataattagaaactaaaaccagaaaaaagaaaggagctaatacatgaaaaacaaaggttcttaatggttcaaaaaaaacgacaacattaaaatcgaacttcacatatttggacaagttttgtgtgctgcacttttgcatcggcagcaccttgcattcattgctcgcactcggggttgagcccaataagctctatcgatttgtacacatcctccgtcttcaccataaggctccacccataaaggtgccctgtagcattcttcaacgaaattctcatatgctattcctttgtacaatacagcattcaaagcatggggattatttgcttcaaaacatttattgaagaaatgataattaatcgagtgtggcattgaccaccacatgaaataccgagatctgtcaagtcggacacaacgtagggtttcctctgaatacacagcctccttaaataccggacctgctttaatcaaatttttcaatgcatccactccatcttcagccaggtagctaacaattttagcaagctatggagggggcatgtgaaattcttcaatggtggtttcctggccaaaaaataaaaacttaataagacaatataaataaaagtataaagtaggagagtttatgatttttgtaatgtatgaggagcgtttctgtcttctcataattgatatgctcgcaagaaatcaaataaggaata

SEQ ID NO: 2254 - DNA, 273 bp, Arabidopsis thaliana landsberg
ttaccactaagcgtttaagcattaaccacagaggtacactatttgccattaggaacaaagccttcatggtttcatatcactaggcagaactctagcagtgatggacctaccttgcgcacataatgcatgtcttagattatcgtccgttaacgaattcggttcacacccgtataaccacactcatctgatgactcgggaagcgaaagcacgtaacctttaaccaatcacggtcaaagcgaactacgtatggttcaataccactatccaccattt

SEQ ID NO: 2255 - DNA, 622 bp, Arabidopsis thaliana landsberg
  unsure (1)..(622): unsure at all n locations
gtctaatacatctatgacaaatggggattcgcagccccagccattatatggtatatgccgatgaannnnnnnnnnnnnnnnnnnnnnnnnncgctgtccccgcttggcagatcggcgcccctcgacacggtcagacagtccgagcttttgcctagacagttcgacccttatgcagaccgtctggctttccctgccggacagtccgggaccgcaccagggctagttgggatgtacccggacagaccggatacacatacgcagaacctactgtcgcacactacgcataagaagatgaggtgaggaagaagatgacaatctcgtaatttagtacgcgtgaataacagactagtttaaaacattgataacttttgcatttaagccccgattcgatccattcaaattgtgttagattcgtattaaattcatcttaatttagaaatttttaccccactgttgacattttatttaatttatttaaacgtttgtttaccaatggctactatagcgacatttcaattttaaatctaatttcgaaattcgatttgcgtatttataattagtcaccaatatgattaacgttaactgaaatgttacttattaataattatttagtgtaacatgt

SEQ ID NO: 2256 - DNA, 1056 bp, Arabidopsis thaliana landsberg
gagagcatctcgagctctgtttcgaactctttagcaccttggttcgatgtaatttccagccgtttaaccgcaacaagtgtggctccaccgtctatttgtcctttgtagacagaaccaaacccgcctactccgatgattagcttgtcctcgaaatcatttgtggcggatttgatttcgaaaatggagaatcgacgacagagatccgcgggcagagatttcgctggttttgtattcgtagaatctgtcccgtgcggaagaggacaccatgacgagtttgtagatggcttgctcttcttcttcttcttcatgataacaagaacaccaacaacaaacattgctagcacaactaaagaaccaaccactgcaagtgtgatcggcaaaatatgtgacttattttttcgaatccgcggcgttgcacggtttggtattaagtctggtgatactagaggatctggattaggtcctgcaagattaccatcgggatcattcatcttgagaatctccacaccattcagaatagcatcataatatttcggattaatgctcaccaaaggatgcaaatcaagccttagatcatgtctccgaccacttcccgaacccgcaatcacagtataatccagatacatcggaatccaagaaccaccactcatccgaaacacgtccgtctcaagcgtagccgtttgattttcaataaagatagagaagacacgttgaccctctttggtaacttgtggaagagtctcacagaaatgtagcctcacaaggtagttatacccagcatcaactgtgaggaacatacccgttagattgaacatcaagttgctggagttccccattaagcgactagtagcatacacatcatacggcgcaacatacgccggagttttctccgtgtagttgatctttacacccggaacattcacaatggatccagagtttccaaaagaatcatcaggaagccaccgccggaacattcctgaatcgtcgacctcgttgactatttgtccgccgacgtttaaccggtgaacggactcgaaagccgtcgagttgtctatg

SEQ ID NO: 2257 - DNA, 1798 bp, Arabidopsis thaliana landsberg
ctatgactactataatgataatgataattaattgcagatgatgaagagctttatgttttccaaagtccgttacattatccaactttgcgtttgttttgaacatttcgcttttcctgaaagaataaatgtttcagaaagccacactttagcatattctggaaaaacatctttggcatggttttgtattgtaccatacatctatctatttttaataaagacattgaatttgggagcgtacctacttgaactcaggtactacccaaaatagtcttgccttttttaaaacatagatctcaaggtttatgttagtaaaggttgtttttctctttattagcaatgaataaatcagactttgggtacagaaaacaagaagaatgtgttggaaatattttacatcgcaagtcactcgtcatcagcaacatttgcatatccgctaattcaatagccaaaaggcagaagcgtttttggcctaacttcggccaaagatgtaaccagcataaggaacaaaaggcagatgatggagcactgacaactagaaaactttttaggttccatgtccagaacagcagaagcacggggttcttacttctctctgttttgcttctttgaaaaattcgctttcctgaaaagatgtaaatataacagtcttgtcttttgaaacacacatatctctctacgtgtatgttaccaaaggttatttttctctctttaaatcaatgaataaattcggtaaagaaaaatgtatttcacaagagaattatcaacaacaaaaaagtgtcggaactaaatttttaaatagcaacctcatcagcaacaattgcatcactgctaccgtggcgtttcctacactcacagtaaaaaacagtgattacaacataactcagcaccaccactgccccatacatacaaaaccagcttccacccgtcctactcaccggccacaaccaccaaactcaatcacgaccctgaggtcaagtgagctagtcattgtcacatttaggatgtgaaagctaatttctctggtgcttattttagctgaattggtttgtgcaggtttgcttcagatatttgcaccaatgacctaataataataaataataatataatacaccatcagtcgattccactcttttttcgttcttgccgtcttacaacgaccttgtgattcctaggaacataaaggacattgagtaactacgaggcagtgaagacttatgggaagtagccaagctgcaatcgtgaaacctctttgcctgaggtaaaatctcatcttacatcccttataaactctccattcacttgattgctgaatttgtgtgacataatacaaatgctctgttcttctttgccaccagcatatggattcaaatatcacataaaatggttttcattgttagtccagaacatgatataactttaaaatgtaaattactgataaagtgatttgatagatgatcgtgagagatgaattgaatgcacatagatttttgtgttgttgtttcaagaattgtacgttgaaggggctgaagttgagaaaatggtgtgaactcaacacaaacgcagagagtttctagacgcaatcccgcggccgctccttgacttcgtggatagatgtttgaccgttaacccgaggcaacgaaccagcgcagaggatgttctcagacacgagttcttccatccagtacatgaaacccttagaaaccaaatgctccttaaacatacagcataatgtgcaatacgcaagcgctacatgtggttgtctgacgcgagtaagccaatctttaaactaataaggcaa

SEQ ID NO: 2258 - DNA, 1021 bp, Arabidopsis thaliana landsberg
catcttcccatagtaagtcccacaagtaccctcttctatcatagagtttttagacaaagttgttgctttccaaaagaaacttgagttctttgtttcaagtattattgtggaaaattggagttgaaattttagcatgtactagataaaagttactttgaagaattaagaatgattagcattgccttatttgatcatgtatagtattgtgggaaaacatctctcattgtgttacttagtcttggagtcagctttatctaccatgttatcacaatcattacttcctttttttgtttgaagtgggaagattgttaatatagagatggtggatggaggattgatttgctcaagtggcgttctagttgaagaaatgggtgatacaaatgaagattgctacattgtaaatgtcgcaatctatgtcggctactagtctatcgttcttgtatggtcgaccatggtttagcactatcatcctcatcgatagaagagaaaaactagaacacctcagtcacttatagttgtatattttgattttaaaaccatttttggtttgtagtcgtgcatctatatcacaatttcaattttaaacatttgtctgattcccactcataagtcatgttcgtttcctcatctgactgatgcatgtagctgtagatgcaaactgatgttcgtctaagtacagttttgaagataagttggatagagatgtgtatgacaaactcatccaaaaaagcctattttataagatgcattcaaatgagtttagatgatgcatctaaatgcatgagcctcagtcaaaaaatctaaattactgaaatacccctattaaattagagaattacatcataaatcaaataatgttaatactttacttttatagttttctcattttatattttaaaatctctaaaaattgtaaaatcataaatatcaactatcaacaaaaccgacaattacgattttggtgggcaaattacataattacattttcttgcaaaaatataaaaacacgatttttgcatat

SEQ ID NO: 2259 - DNA, 1405 bp, Arabidopsis thaliana landsberg
tgagcaataggcagtggcaaagggagcatcccgatcatctaccataacgtcaatagggttctgtccaactgcttctgcagcagagtacccataaaccttttccgccatagcattcctggaaccatgcaaaagtatccatgaaatcactctcttgaggaccagctaagacgtgaacagtataggaaggccaaagaactcactcaccaaaagataattcgcatattgagatcgaaggcatgaacagattgtgccatggactgcaaaatattgagatactgtttatgagtgaacttccagggcgatggtctcagattcatggaacactggatacggctctccttccgaagctccgtggagaccttgagccgagacatctcctgcattagatgctcctgacttttctctagctctatcatcttcttcagcagctccttgttaggtgtaatcgggccttgaagaagcttaaccatggtcgatttgtctctcaaaaggaagaatcaaaatagggatttggactgttcctaaccaaaagatacaaactttctctccagaaaatggaatttgaagaaattcttaacgataatggaaacgcaaacgcttcaactttcaatgtatagagccatagaggaaaagaaaaagaatggagaatgttggcgccggttctatttatttggttaggcttgtgcacaaaagatctagttatacgtaagaaaagatactgcagagagtgtgagcaactaattcatttgttgaatatttgaaaatcaattcttctttcttcttatcaatgtaacatcatccttttggttttggtcaaacaaaactattataaataaaaagtgacaagaaatgaaaagaaataaagctgcatcgccgtttcaaatccaatattgcaaacgttatccaagtctgtcggccgaaataccggcaactaaccatactctgatatgttcctcactcataaatgctaacatgcttaagtgtcataatttttgttttgtttttggattttactgattctagtgttattggttctttagaaaatattcaaaaacttagcgtcgaagataagagcttcataatgttccagaggtaaacaacaacataaatattttaagataagttgttggtcgtgggatatggtgacttatttgtttaactcgaactattcataaagtttaaatttgataaaacgtcaggattatattgaactttttaaaagaatttaatcaaaacattataattcttctaaaattgaactttcttttattttttcaagcattaagagatcacaacagatagagtgtcagaacaaatatataatcaaacatagcctaactgaatgggagagaatgataacaggaataaggaacgaccagaagaagtgaattatgatatgattact

SEQ ID NO: 2260 - DNA, 514 bp, Arabidopsis thaliana landsberg
  unsure (1)..(514): unsure at all n locations
cacgcttccgcccacgcttccggttaatcctatactanctgctaaaattgtgtgactttggcaggggcgggtttcttttaaaatgcgaaccaaacatttcccacatctgttctaggtactacagagctccagagctcatatttggtgctactgaatacacaacagccattgatgtttggtctgctggctgtgtgctcgctgagctgcttctaggacagcctctgttccctgtagaaagcggcgttgatcagcttgttgaaatcatcaaggttctgggcacacccacacgtgaagaaattaagtgcatgaatccaaattatacctagtttaaattgccgcaaatcaaagctcacccatggcataagatattccataaaaggatgcctgctgaagcggtacatctcgtgttcaggcttctgcagtactcaccaaaacttcggtcgactgctttgtgagcattggtccatccctcctttgatgaacttcgggatccaaacacccgcttaccgaatgg

SEQ ID NO: 2261 - DNA, 623 bp, Arabidopsis thaliana landsberg
tgctatgctaagtcctctggggtcagatctgactagcttattgcagttaaaggagaaggggttgaaaaaggtgcagaagatgagaagaagactgcttcagcgactgggggaaatgagggtggtcagaagaaacgttgcatgatggctgtaatgagggccatccataagaccccacccctcggtcgcgacagaaaaaaatgatgcccccgccgatgccgaagctgatgaaatggccactgaagctgaaaatagtggatgccctcttggaaccacaatgttggagattgataggattatagctgatgtggttcccgagaggaaaatagatgaagtgactgctggtagggctacaccttcaaggtgaaagaattagaaggagcttcttcggagagcaaagatttggacctacgacacttgggtggccaagaactctccgaagaagatatctctggactgaaaagttcgctattgctagtggctactagcctagatccgttctctttggtggtgttgatgaagaaattctagggtacatccctgattgtgccggagcaaagattgtcaacccctataaaagagcatcggattcccgaagctcgaacgagacctgagcaactatagaa

SEQ ID NO: 2262 - DNA, 762 bp, Arabidopsis thaliana landsberg
gaggcaggggtttttttaatcagcaaccaaggatggtgccaaatctcatccttgttcgggagattcgagatgagattcctgttggcgttcgggtaccctgaaaagtacctggttttcttcgacgaactcctaacattgagaaattcgttcaattcgggaaccccaatgacgaaaccagccaccaccactgtaacacccctatcccgtcctaggcccaggacagaacgagagcgtcacgttgacgcccgtagtcagccaacctaggctcccagaacgaatcacgttcgcccaagtcattcgaccgtgagtgtcgttcctcactaacgcggcctaaggctttgcaacccgtacagcgatacgtgagttgtgatagtccggacaagactaattataccatgggcgacacggggttttataaaataagagctttattactattaataaaaatatcgagtcttacatactatacgcaaaacaatatcttgcaaaggcaaagcaaatctacaccggttggcctaacgtcctttaccccctaagggataagcgctaatcgctcagtgaattcggattcccctaaacatgtaataattccccacccaaacccaaaataacaagcaacaagcaaccaagcaatgcaacaattaaagttgtatatactccacggagtatacacaaataatgcgcaacgaaagtaaatatgcatgcaactaacaacttaaccactaaacctagggccccgcgtattgatcttccctttcctta

SEQ ID NO: 2263 - DNA, 344 bp, Arabidopsis thaliana landsberg
  unsure (1)..(344): unsure at all n locations
cagtgaatcatagtccttaagggggatacaaaacgtgttagtctagaaattgtttgttttattcaaagaagttaggcattggagggcaaggagaagggtacagctgggacatctatgggactgagatcatcttccgcgctctcattctatatatcattgggtccacgggactccgtgtcttgtgtgggtccattggctgctacctgtagcattctggcgaagctgaatcctttctttgaaagacctatggtactcgaccatatcactagagggaccatctttcgtcnnnnnnnnnnnnnnnnnnnnnnnnnnnnnnnnnnnnnnnnnnnnnnnnnnnnnnnnnn

SEQ ID NO: 2264 - DNA, 498 bp, Arabidopsis thaliana landsberg
  unsure (1)..(498): unsure at all n locations
taattgccaatgagtgaagaacgttatatcttatagatattacttaagattattctaacttctaatatgtgacaatatctttaatatggtctttctaaatgatggcttttctatccattagtcttgatatgtttgggcatagattagtggaccgatgtggattgggttgactatatgcagatcggactctgataccatattagattatgggctttcaactcaaaatcaatcgggaatgagtaaagagacttatatcttatatataactgcttaagttcctactaaactttcaacgtgggacgatatctctaatatcgatcaattcaataatttcaaccatgccgaaagctaagacgattatgagaaaaaaaattgttttcttatacgccgagctggaaaaatgantcacgacagtctatcatttctatgccaaattatagtgaaaaataaagtcaagatgtaattaaagacatagtgtttatatttttggaaaaagat

SEQ ID NO: 2265 - DNA, 1886 bp, Arabidopsis thaliana landsberg
atatggggcttgtattattcacctttgtaggaatgtccaagctaagtacaagaacaaagcttttacgcagttagtaaagaatgcagaatatgcgtttaccggtacaaagtttaaagagctttatggtcagattgaatccacgaaccaaaattgcggtaagtatctacatgatatagggatggctaattggacaaggcattatttcaggggacaacgtttcaatctgataactagcaatatagcggagacgttaaacaaggcattaaacaaaggtcgatcgtcacatattgtggagttgataagatttatcacgtctatgttaactagatggtttaatgcgcgtcggaagaagtctctcgaacataaaggtcccgttcctccggaagttgacaagcaaataacaaaaaccatgttaacaactaatgggagcaaggttgggaggattaccaattggagctacgagataaatggcatgttaggtggaagaaatgttgttgatcttcagaagaagcaatgtatttgcaagaggtatgataaactcaagatcccttgcagtcatgctttggtggctgcgaatagttttaaaatttcctacaaggctttagttgatgactatttcaagccccacgcatgggtttcgagttaccgggaagcagtattccctgaagctattggaagagatgaagaaataccagaagagcttgaacaccgatcgatgttgccaccatatacaaggagaccatcagggaggccaaaggtagccagaattccatcaacaggagaatacaaggtaagaaagtttttttgcataatgtggtttgtacatggtaaatgtagaaacctaagactagaaggatgagcagaaccggtgctcgaggtgcaaaggcacgggtcataacaggacaagttgtacaaatccaatttgaaccagttgttacggtggacgactctgagattgctatttaggatattaattgtttttcttttgtaatgtaatgcgtaggtgtaaaacatataaatatttattgagtattggatgctaattaggtttttcatttatactgcttatgttacaccagggactcgcaggaatgtcgcagaataggtacaagtagatgaaaatctaatatttatgtttactatccaaatatagtttaccataagatcatatccaatcgtttgacttatttagatctatttgtaaaattaattcgattttcatgcttcaatattgaaagataccctattagttacataaataaatatatgttgaaaaaatagttatagtgagcaaattattttcagatcagcttagatttaaaaaatggaagtagaacctatcagccatgtaaacaaacatcttttcccattatattcctttttaaaacttatgcaattgccaaatttctgctaaaaaacatcgtaatgtaaaagtgcatgtaaggttagaactttgttggttttgaataaacaaatgtggccatttagtgaattggatattatagaatagagaatatcgactaatacatgtgatttcattttatatagcttagtttttaataatagaaaaaccttaaaaaaacttggtaatgaaatggatgtctctgaatatttacatgtagataggaaatgaatatttatatttttatccatatacccccgaccaatcagatataaccgattgttagtatttttggaattagtatagacggaacatttcgctatgcatgctccaaaatcgaaagagtccctatcagtcatgataaacgagaaagatgttcactagttgataagttaaatacaacttcataataagattacattaataaactagataaacgaggaaaacaaaagagataattatattctgcaagtgggtaactgat

SEQ ID NO: 2266 - DNA, 2636 bp, Arabidopsis thaliana landsberg
agtagctttccagactaagatactaccagaacttgttccagctttaagcattcggtttgcaatagtcattgcattcacctgaccaaccacccctgctgcttgaagatgcaaatcttgactgctttgaatgttaaaagcctttatagcgtttggcaagccaaggaaaacccaagggccttcactgattagagaccctgcttctgcctcaaggttgatggaatgtacacactgaccagaattgcagtcccaaactcgcaatgtaccatcaatactgactgaaaagagtttatctgaaccctcagggagagcgatcccctttagttccttattgtgcccttcaagagaagctaccatggccaatccagggaaacaagaccaagagtgtaagaactggcactgctcacccctcttgcactttccatctttccaatacttacatacccattttctgagactagaagatctcattggcccacaagcagcattcttcctcgccaaacctaaaactggtggtttcggtgacacatcattggtccttggcatattattgccctcgggtgatttgtactcttttgacgtccaaaccagactccttgaaaacttatttggacggtcgtaagggacataaggtcttcttctcgtaactatatctgttgcgaaatcttgctgtctcgcaacaactccgtgtgagtagtatctccttggcgctttgtaatccatactgagagagagatcaaacgtatgtagaggaatctagatcttcgattagggttaacgatttctccaactcgttcggagagagccaacaaaaaaaggaaattttgagacggagtaaagaacatgtaaagagtagaatgatctggggctgcagaggaatggtgtatatatagatgagcgtggcggttacgctataataattttctattgggcttaactttaggctcatcattcgtgggtccaattaatgttcaattctatcattaggttaggtcattaattataccctaaaatctctgtactagtagaaaaaaaggtctttattctgtactagataagggtgtacccgaaattttcaaatattcgaacgggtctaaacttcaaaatttgaaaaactcgaacccaaacccgaataggtatccaaacatatctcaaatataagtatatattagttatatttatacttatatatagaaaatattaggattttttggatattttagttctttttgtgtatttttagatatattcaagcaaaactactcgtgttgttttgggaatttttgaaattttcaagtaatttaatagatttgcacacaaaatttgatatttcaatatataaataaacccgaacccgaacccaaacccaaaccgaatccgacccgaaatcttaaattatcctaacgggtcctaaacttctaaacccgaaaacccgaacccgaaatacccgatccgaatacccaaacgcttagggctaataattaataaaaaaaaaagaaatccacaaaaatatttagaaaccaaacattgttgaaaatatattttgtatatatgtcgtaatctcgtaagttaattttacatcatgcaaattaatattaaatgagttaaaattaataaatgaaaataattgaaaagttaaatcctataagctaagctatttttctcaaaatgttttatttttcacttatgattacatgagttaaagacaaatttgttaattttccttttgttgaataaatgttaattgtttataaatatataaacatataaattagtatatgtaaatttgtttactttttaagattttctattctttttagagaataaaaaagttaaatttggaatgacacatgtaaacatctaatcgtttgacttgacacgtggcacaatcgtatgaattagcaactttgaaaaccatactttatataataagatatagtatctttaaaatattaaaatctagtttttacaatagaaaaaagaatatgctattttttcaaatgaaaacttatatagaggacatttccaaatttactcttaataagttttctaatattttttagtttatagatatgtttttctttttttttcctttttcctcaaagttgatagacatttttcttcttagattgttttcataattaatccgtaatctagttagatagtatgtacatagttatttggagttaatcccttttattttattttctttttcttttttatgaacaacatatggggttaatacaaaatacctaaataatattaaaattgaaacatgaaatcaataatcattaaaattaacaatataaatggaagaatcatatataacttcaggttatcaaccaatggaatcaacatcggtcgcgctactgacgttgtcattatctcaatctcgctatgacaaggtttttaaagaggctaaccgcatagataggaaactcaatctcttcgcgtttagtaactacgaaagttttgtagctgctttgtctgatatgtttgatacaacagttagatgtaaatatcttaaaagattgttttagattgatgaaaattaacaaatatcgtttctatttttccttttattttccaaaataattatctaaacttaaatggcatcaaaatactagagatgaatttag

SEQ ID NO: 2267 - DNA, 1242 bp, Arabidopsis thaliana landsberg
gagcagatggagcagcacgccgggcttcgctgcgtgttctcgccacagctcgagtgttagccggagctcttgtcggacgccgggagtcgccgcgagttcttaccatcgctagagtcttagggtttggataggagaattttcgatttccccttcaatttcttccttcgattttgatttatgcaaatcaagcaactcaaaaccaaaaattagtgctaacaggttttgtggtccggttaaaatcagataaaacacatcaaaccgaaattgacacctcttaacagtaaaccaagatcgatgaaaaaaatcaaatttaattacctctgaagctcaacttatttttctgaggccatcttgaatcgcatagaacaagtccccattagtatcagcaaagtgataaccatctctccctcatactgaggtccagaactgccataaaggtgattgtacaatactaagctcattgtaacttgattcaaaaaattcagaacataatctgctgacacaacacaaaagagaatgttgattctccaagagtagtctccaagactgtgcagcaaaattcaggctattgataaattacaagtctgatcttttgtattcagaacttattgttgcttcttactgctcctttctgcagagagacgagatatcagtgagagaacttgtttttgcaccccctttttttttatttatttatttatttctcttgtcttgttgcagagtgtagtgatgctctttcttatttgttctctcaatatttttgtttgacatcccttctctccaaagtgtaggtgaacaagatttttcctttgttcccatcgggttagtgacaagatttctcctttgtcccccgtgtcttagataagctcatgcttcatcttatgaaatgaaatgcttcttttctgtccctttctgcatttcatcccttccttaatgctctacacactatgtctgtcacacactttactgactttgcatctccgaaccatgaagggtagctctttctcttggtgaactttttacagcagaagatttgaaaaccggttatgacactttgtaaaatagatatgaaaacttgcttctcactgtacaactaaccctgtttcagcacaaacactcatcaagaagatagttagacttcaccaatacccagggactttcgcaagttcacaaacatgttcaagtccaaaggattaatgaaaatatcagcaagttgaatttcagtaggcatatgttctacgg

SEQ ID NO: 2268 - DNA, 433 bp, Arabidopsis thaliana landsberg
aacccacaccctaaaccaaacccttaacactaaacgtccaagccatagactttatctctaaaacctaaatcctactttagcttacggaatccggaggcgggtctagtttttatactcaatgatacacataggatctagacatattcgactacaaatacgctaaccaagctcgttaaagtattatagtatatcgcctcctaaagactaaacctaaacgctacaccctaaataccaaaccctaaagtataaaccctaatgataaacatgaaagactgaaccctaactgtaaaccctaaactgttgaccctaaacggttaaaactaaaccctaaaagcaaaacattaaccttaaacgcttcaccctgaatcctactttaagctccaagttatttttgacgctctagtcctaatagtgaatgataaacaaaacatgt

SEQ ID NO: 2269 - DNA, 539 bp, Arabidopsis thaliana landsberg
tgctaaaacacacattttaccttataatagttttaacatgaattgttgataaaacgtacgattccatgaatgtatgtattacaggagaaaattccggtggacgaagtgttccaacagctgaaatgttcccgggaaggtttgtcttcagaggaaggaagaaacagactacaaatatttggggcaaacaaactagaagagaaagttgagaacaagtttctaaagttcttagggtttatgtggaaccctctttcatgggtgatggaagctgccgcaatcatggccattgtgttggcaaatggcggtgggaggccaccggattggcaagactttgttggaatcacatgtttgctcatcattaactcgaccatcagtttcatcgaggagaacaatgccggtaatgcagctgcagctctcatggccaatcttgcaccaaagacaaaggtattaagggatgggagatggggagagcaagaagctgcgattctagttccaggtgacttaatcagcatcaagttaggtgacatttgtcccgccgatgc

SEQ ID NO: 2270 - DNA, 6752 bp, Arabidopsis thaliana landsberg
  unsure (1)..(6752): unsure at all n locations
taatatccaatagacaaaagcaagatatctttagtaaaaccttaaagagtctatttatgggcaatactaggttgccctaattagggaaaagaaaaaacaacttaaggcggcatagcaccactcgagtcttgggctagtagaaaagtcgagcaggtcactttggcacatcactcggcttctggccgagtagcttctcttcttcctcatgtactgcactcgacctccaaccgagtgccttggtctagtatactccttgcccttcttgtgtcttccactcgacctccagaagagtatatatgtcgagcatggcaccatgtcctcctttgatccgcagacttgagctcgtccatcccttgtgttagagacactcccaatcaagtccaaaagtacatgattcacctgtaaaacacttcaaatgcaactatactatgtaatgcaatgcaaaatgtgaaaggaaggaaaatggactaagaatgcatgaaaagagacatgaaactaagttaaatgcatgaaaaacaagggcttaaaatggttaaaatctagtgttgtctgtctcgagtcttcttggactctcttccttagttctcttctatgtgttcctcacagatggcagcacgtaggagtaatgagttgtacttcttatccaatctctcaatcgcctcgttaaaggtcgtctccttaggttccaacttagactttatcccacgcaacaggtcgagggacttatcgaactcgacatggattgtctcgattagaagtttatagctatcttctagactctcgatcttgaccatggtcgtcttagcctcgtcctcatagttcttcatctgagtcgccgaacttaaattgttacgaaagagaactttgaaatcagacatatgattcttttcggcttcgctttggtagtcgactagctcacgaaggagaaagatttcctcatggagtttctcttcgttcttgttagctctctcttcaagttttcggagtctttctttcaagaccgcattcttgtcaaggagctctctaacggtcgagtcgtgatcctactcttcctcggctatccggatggccaattctccgatggtttgggcacttccttggttatactctagatcctttcctctgctcttttctagagtttgtaccgtctttgtcaaggcgacaacttctttcgtgagcttgacctccattcttctaaagctcaaggaaagctcatcgatcttacttgagagaatgccatcaaccttatccatcttgaagtggagagtccttgtgtctagcgcttcttagtccaagtattggctttcaagtctgactcttttgtctccatggtacgtgagagtgatcttgtagagacgaaatcaggtggcgaaagggttgaacggatcagttcaagctgaacgggtcctggcctccttggcttttattgcccgtgctctttcctcttcccaagggcggggaagcattatgcggggcaacatcatcgtttcctctaataatagtttcttttaagggttcatgttgtccgaaaccatggtcttcgagagcgtttttcatcgggaatcatgatagtcatgcagtagtaggctgtccttgaatcttgcgtaattggcttcttctctcgaagaatcggtgagcccatcatcacttcttgaacaatcatcagtccgatccttaaggccattggactgttcatgcccttcttgagttatgtagctctcaccattagagtaggtatcggccatctagtattcttctaatgagatggcttcttcttcttctaagtcctcttcttactcgatttggtcttgaggagaaacaaaaggggtcgaaatccctaagggtcttatagggtcgggatttcctttttcggaaaaggaaactaggttttttccgttttccactaggaattcgatttccttttttgtttcctcctcataacgggcttggtccttaagagacttatcttcttcttggcaagattgaatgcttctccattccgaaatctcatttgagtaagtgagcttcttctctagctcctcaatcttccaatctagatggctctcaacaatatcgacggtgaaccccacattgacgattctagtgttttgttcttggatatcatcttggtggttaaggagagtgttgttaatctcaacaagcgcctcctccatgatctcgagtcgaatagtgaggtcatcaaacttctctccaaattcggctcttatatatctccatcatccttgagttgatcctcatcaagacgaagtctcggatgagaccaatcagtctatcttccgcctcggcggtctggtagggctcattagtttggtaagcatagttgttcggataaacatctacactcatcacctcttgcaagtatccttggtcatatctgagatcttcatgtcgggcaactccataaggatgagaagagtgaggtcctcccacgcgttgatctccaagagatggtacgcagtggtggaatgggcaaatcgagcggttatcttgcagccggttctgaacgaaggcggcagagtgatccatagagtagtgattggtccggtaagctcctccattagacggtcaagattgccaagactcgccatgcatttgggatgcatcgggcgtgtagtggtcaattgagaaatgtgatccgcggtttgacccatgattcacattcgggtaatagctactggataatttctcaaatacatccttgagcttcctgaaactaagaaaaacaaaaacaaaaattaaaagcaaagtgtcctagagttcactctatttctcggacttgtggaactaacaatctctccccggcaaaggcctcaaaaagcttgatgcgtattttagttcgcttcaaactattacccgaaagaccacatgactactacaagtgcacagaatatcagagtagtattttaggatcgaatccacaaggagagaagtagttcacagaaatccttaagaatagagtgaagctaggaccaaaataaagagagggggttgttgtatgctatgagtaactaaactaaaaaactactaactaaactaaacgataagcaataagagagaagcgttaggtcatcgagggtttctctggatgtcatggtttaataaataaggtatagatctcaatctaggtgataacatggttaggtttgtttacttccaaatttttggacaaacgaaactctttcaagaccagctaaccctaacggttagtaggtgaaagccggttattatcactaatatcttgcgtactcagttgtcctatcggttagtaggtgctaacatggtttctaaatacaagatcaaagcattaagttcaaattcgattctaccccataagtccctatcactcggcgcgtgtgcagcggttatagttctttattcagttgagttccctcaagcattcaaacgagattttgccaaagantaaaatacctaaggtcaagtactaggtgatgttccagacatacaagcattaagattcaactcaactagaaaanatagtgtaaacgatcaaacaagaccatagaaaccgccaaactagactttcgatatactagtccccatgaattccccttcgaaaccccctcaaacccaactagagatctactcgctcatggcaaaggagctaatcaaaagttgggttgagtaaaccataactaaaagatgaaaaaacttaaaaagggtttagagattacttctttgaatgtagaatacaagaggtaaagctccagcttaaagagtcttacaggaaaacgagaaaaagagagagagagatggtgttcttcaagctttaagaggtgcggcggctaggaggcagctcttggcgacggctagggttcactggtgatgaaggcacacctagggttagggctaagtataagtatttatacttgaggcctaagaattaggtttaggggtaagaacgtcattctgtaaataagtaagtgatccggccgagtagtgggcttcagggaaggagcctaatgacggtggcacaatgagggaaggacttgggtgtgacctaatggtcggtggtaagcttcttgaaggtgcccgggttcaagtctccttggccggatgtgttttggatttattatttccaaacggccggttcttgacatgtcttcactcttcgggtcatatcttccaaacggcttcatggattgcttcgattcgacttcgacgttaatcttgactcttctaccttttccatgcataccaaaatatctcattgccgtaatgggtgatatggttcaaattacctagaactattctctcaaataagagatcaattgcagtattttaggatcgaattcacggagttcttttgttcaaacagtgagttaaatatcgagattaagctagcaaggtagtagtaaaaataaaagagaacaaagtaaaaagacagcaaattgatttggtttaataaatagctaggaaaagggtattctcaggaaactattggttagtagatctaatgaatgctaggttgtgatcgaaccattcttaaactcaaactctaattatggaataaccgatgggcgtgccgcaaaactccctatatctatagctaataataaccggagaagccaagaaactatcaacctaaatatgcattcttaacgagttcaattattcatcttagtaaataggccgattcttattacacacctataaaccagactcatcaaataatagatccaactacagagacctatggcgggcatatctattttctggattcaagatctagttaattactctagatttagcattaagaccaatcaaagatgaagaattctatagataacctagcaaagggggcaatctactaaaccatatgaatccttaatgagaaaccctattcctaacaagcagattactcagacatactggatgaagcaaacaacatgattgagttaaaaagcataaacacagtaaatagagaatgggaaagaagggatctcttcactgtatatagatctgaatgaaactctgaagaacaagggatgaatagcttatgtctctcacaatagggttttgcaaagaacttgataaaagacttaataaacgaaacttaggtctaaaaacaatatatatagaccctaaaaacgtccagggactaataatgcaaatcggcaagtcttctccagcaaacttgagcatctagaaacttgaaagcatctagggtttttgctgggccgaaactggtgtcaatcgacaccaaaagtgtgtcggtcgacactcctcgctgattcttgagtccaaaatcgtccttagcttccttttccttagatcttgctccaaaatgactccttatctccattgttgtcccagtgcatagaatacctgaaaagacactaaaaagactcgagaaataacagaaagactcaaaatcctatacctaaaacatagataaaatcggtgaaaatcgagttatatcaagttcgaactaatcaaagttcctcgtgcagaaatttcagttgctgatgccttagctgctttggcttctacatccgaagtaactgtcacaaggataatccctgttgaaacgatagctcagcccaattttcgacttgaggaaataaactttgttactactcgggcaatgcgtaagcaactcgaggcgcaagcaaacaatctcgagctgcagcaactcgacgacgaggaaaaaattccagaagctgccccgcctgcggctgacgaagatttagctggtctcaacaatcccgaggttcctgacaatcagatacctcacgactggggggcagattggagagaaccaatccggaactatatcttcaacggagtacttcccaccgataaatgggaggctcggaagttgaaggccacttgtgctcgtttctgcttagcagatgacattctgtatagaagaatcatttcggcttcggatgctatttgtatcttaaaagaacagacccggacagttataaaagaaatccatgatggaacttgtggaaatcactctagaggtcgttctttggcctttaaattaaaaaaatacggctatttctggcccacaatggtagcggattgcgaagcatatgcacatcgatgtgagcagtgtcagaagcatgcaccgtacatcctacagcccgcagaacttttcacttcggtatcagccccttacccgttcatgaaatggtctatggacatcgttggaccactccacgtttccactcgaggagtcagattcctactcgttctaactgactacttctcgaagtgggttgaagctgcagcctactcctatataactcaagtacaagtccgccacttcatttggaaagaaatcatctgtaggcacggtttgccgtacgaaatagttaccgacaatgggcctcagttcatctccgagcagttcaaagctttttgcgcggaatggcaaatctgcctcaatcgatcaacacctcgctatccgcaagggaatggtgaggtcgaggcaatgaataaaacaatcatttcaaacctcaagaaaaagctaagtgaatataagggagcttggttctgggagttgccaaacgtattatgggcaatccgcacaactccaagaagagctaccagtgatactcctttcgctctcgttcacggagtggaagcagttatcccggctgaaatcaaagtcccaagcacgaggaggatccaaaatcccaagaatgaagctgcgatcagcgaaatgatggtcgacgtgactcatactatccatgagcgcc

SEQ ID NO: 2271 - DNA, 4344 bp, Arabidopsis thaliana landsberg
  unsure (1)..(4344): unsure at all n locations
ttaacgtctccactatattgctagtcatcagattgaaacgttgtcccctgaaataatgccttgtccaattagccatccctatatcattaagatacttaccgcaattttggttcgtggattcaatttgaccataaagctctttaaactttgtaccggtaaacgcatatcctgcattttttactaactgcgtcaaagctttgttcttgtacttagcttggatattcctacaaaggtgaataatacaagccccatgatttgcttgcagaaaaaactcttttaacagcaacacggattgacgagtgtctatctgataatatagtcagagttttgctgtctgcaatgatccgctccaagttcgtaaagaaccaagtccaagaatcgttattctcgctgtccacaacaacaaatccaagtggatatacatggaagttagcatcctgaccactcactgttagtaactgataagtgtgtattttgcttgttttgagcatccatttgtcatcattttagcatcatatcatcactgttttataccatttcacatcatttgtcatcactttgcatgtttaggatagttttgcatgcatgttgcatatttgtgttgttttcaggggatttggagttgtccacgagctaactggaagaagcggacctgatcatgacaaaccactcgacccaaaggtcgagtaggagcttcaagatctcaagagaccactcgacccccaggtcgagtagaagacaccgccactctaccacaacacttgacccccaggtcgagtgtcttcatctccatctcatgaccaccactcgatcacatcactcgacccccaggtcgagtgacttcatccctttgccagacaactactcgacctcatcactctaccaggaagttgagtatcaccatcacaccacttgactgcatactctaccaggaagtcgagtatcaccatcacaccactcgactgcatactcgatgacaagctgcagagccttcttcattccgcactcaactagacactcgagcacaaggaagaaaagaagactccagctactcgctcgacctcccagtctaccacatgggtcgagtacagttcttaatccgtctcaatacttcgtcgttttgagtattagggtttcagaatatttggctataagtagcatgtagttcatattttcggacaagaagttttttatctagttttattccgcagaccttttgttctatactttttgtaatccggatttctctttatctattcagtcttcagtattcagcttttgttcttgatttcgtttactgttgttcattctgttatcatcctgctattacactgttgttatcatgttttcaacttgttcaacgtctatgctttctgttatgatgtctgagtagtgaataggtttctgaggatgggttagagtagtgtaggattctcagtatgctaggtgattgagtattgattgatacatctcttctggattagttattcttaatgcctattgctttctgatcaactggaatttgatacatagacatttccgcgcccaaaaggtgttcgatgaaatgtctgaaccactaattccagggattcgtgaccctgtgccaatgtataggtagcagggagtgttttggctttaacttgttgattcgtaatgcctgttaggttagctctcgtcaattgtgattgagtctgggactaggttaacttgagggtctctgttgcggtggcacctagatttggttaatgaatttattgtctaggaataatttattgagcatgtcaatcacctgtaaactgaggaaacgaagctactcaattaccccatcctcgggaattctttatctgattgaattctttgttacactactgttgtttactgcatcttgttatgtatcgcttaatttctgcaattctttcttgttactcgacctcatactcgaccacccagttgtctggcaacagactgtgcagtcgagtatctgtgttgtaattcctgtctgtaactcgacctgtcactcgacctcacccagtgctctgcaaagagctatgttggtcgagtattttattgtttctgcttgaatttctgttttctgcatgttcacttaggattgctagaacacaccaaaacctgttattgcttggcttgacttagtgacttctgatcacatcttgattgttagcatcacatccatttggattgacaacctaaaatactacaacaacgtgattggtgttttaggataattgactaaaaacctattatcagtaatcttgaatgtgataaatgcaggtgattgaaatctataataggagctgccattgtgtgttgattgggtatcaagtacttcttctaagtgatccaaatcctgcttccgattggctcaaatacttggtaataatttcttctctttttcgcagtttctaagtgacccttttatacatttcgtactttacataattcgtctgctttctctttacctcacagacacaaagagttcctgcaaaaagagctcaaagagtttctctttacataatccggtgatgtactgtctttctttcctgcgtcagttccaactctttggtaagatttttctcttgatttttagtttgtttctgaaacaaattaggttatgtgtctgagttggtttctaggaaaaatctatttgctttatatgttaagtcatcatcatatattcttttgccaacacttatgtctgcactggatttattgatattgaagctccataagcatgaattgatgatattcctggctttgtttattggaaatcgagttggttatgttaactttaggagagcttggatgcattagcactgtgactatctctgtagtatagtctctgtttgaatctggaagttgagtaggtgaaattatttagttcagctatagaaacaaaaatgaattgttgacattgatagttgagactgttactacggcacaaagcactgattagagcctctcaatagaaactagtttgattcttggggttggtccacgctggatcctgactcacactgcatctgtattgctatacttgtactcttttcgagctagtattgaagctgttcgtaggttgagtaatgagtagatgataatttagagaacttgagatgtatgatctcattggcttcaaaattggaactgtctccttgaacttgtatgttgctagtttcagtttgtatttgcaatacttaagattcaagcttttcttaggttaattctattctaattcggtgaagtttgaaatttgtggtgttgtctttctcattggtactacagaaaccgctagttcaatggaaggtaaaggactcatatgcggcctccccgctaagaacgttataccaatgctcagacaacagacacaacaacaggcaaataacaatcaacaaaatgaggtggatgatgaactgaaggagataacaagagctagagtttaggcggtcttgtgctcacctaggctacttaatacatatcgaactagaggaagaagacattgatccactctacaagcaatgtttgagaaacaagaaaaatgatgcacacaacaacactgctaagaaacgcccaagagtaaaaaaaggagagtcatcaagccgcaagaatctatgagttcatgttttattagttaatgtgtctttagttcatgtaatattttgactttgttaagtttaccttatggaatatgatattttaagattcactgtctttcataaattaaagctaattatattttgtgcaatttaatatttcaaataaccaattatatttgattcattgcaaaatagattcaatataggttagttccaaataccattgcaatatacacagcatttctcattttcatgataaatattacatagtacaatataaaagccaagaaatcatatgttatagcacaagaaaaaaaatcaaaaccattattaaaccgcaattgataaattctcttgtaaatgatagtatcacaatgtatagtagccactaaagactacactgtagcaaaataatagcgctacatatcactttcctatagcaaagtcttatgttacaatagtgttaaatttcgagaactataatgtcaccaaacaatatccaacagcacatataatgtgttatcattacaaaatatacaactcaaaaagtttgccataaaaacaaacattatagcaataataaagcgctagttaaaattattaaatagcggaacactggtgcaatataccatagcgagtaaatactgtgggataggggggggggggtctactatagctncgcatgtaatatcgtttataaatacgctacgaaagtccgttagtagcattttcc

SEQ ID NO: 2272 - DNA, 2039 bp, Arabidopsis thaliana landsberg
catagccagtaatgaacaatacggcaccacttcttgaaaatctcgcatgctcgaagtaaccataattgaagaatcataatctgaatgttcttccgagtgaaacgtctcaatggcatctcctaatttgagtgatcaggtctaccaactatgaaagaaaattcttttgaagttattttgaatttgttagcgcgtattgaaatcatgatgcaatattaacacctatttttgcatattattcattaaactttaactatttattcatctaactaaatatatttatcatttattcactatttaatttatcaaattgaaagtatgccaaaaaatataactgataatatataaaatattaaccaaacttttttaagtttttaaatttgttaaataagttttaatttgttcttgctagattactctgtaaacttttatttggtataaaatcttagcattaaatcaaaagaaaagaaacaaacggaatgatacgttacacttaaatagaaacgagtcaaaaaaaaaaaaaaaaaaaaaaaacgagtctaagaatgttcgtgacgatatcagtgatgtggtggcaaaagtatgtgtggctggacttgcttgagtcttcaggattattgagacctaatcagacgtggcatgaatcgaaccgtatactacgacgaccagattttcaattagagacagaagcccaaatgtccgaaactacgtacacttcacttattattcactaatttgacctaatcttatcctcacaaatgagaacctcgttgctgatgatgaaagaaaacgaagagcgaagaaacaagaaaatggcaacctccactacgttgcagtcgttgctgatgaaagaagatgaagagcaaagaaacaagagaaggacaacctccactatgtttctgaagaaagacgatgaagagcgaatcaactgggtggatcttccgccggagttgacgacttcgatcctgctccgacttagcgtgactgatatactggataacgctcggaaactgtgcagagcgtggcgacgtatctgtaaagacccttccatgtggcggaaaatcaacttgcgagactgcctcatgtacgagttcgatttcgagagcatgtgccgtcacattgttgatctcagccaaggtggcttgctagagattaacattgaacacttcgtgagcgattctctcctcagttacattgctgataggttctctctctacccctatcccacatgcacacaaatatttatcgttctaacgaagtttataaagttgtacgtctacataagtgggattgattttatatctaaaacggttatgctaatttctaggtctaattctagtcaggattgaagaacaaaatatctcagttggtttagtggtaaaggatatgtttgttccttagtgccttttccttatgaggattaggagaattattttggttaattcgtatttgacatcaacgtatattgagtatggacgtactgtatataggttccacccgtctctcttcttatactcgcaagcattagcacacaggttttgagttcatcgctactagtacagtttcataatgatattatatatgtatcttgaattgttcttctatctcttgatttttgtttgttaactatacttgcagatcaagtaatttgagacgccttggacttgctaagtgcgatcaaataacgggcatgggactgttcacagaagccatgaaacttccattgcttgaagacctcgagctttcatactgcttaatcaaaggaaagaatttggaagctataggcttcgcttgcctgcatttgaagacattgaagctaaactgtcaaggtttcaagttccccggctttacgtatgatcattgttgggatcggatttcacccaggatagcgagccgaccacacctccgcctcgggaaccatcgatgaattatcccgaacggaccacaaaacacctcggaggtctcgtcaagaatccataccgaggcgatgtcgagaacacgagatgagcagtgatccccgacccgacctcgaaacgcctcgg

SEQ ID NO: 2273 - DNA, 1249 bp, Arabidopsis thaliana landsberg
  unsure (1)..(1249): unsure at all n locations
gggatcatagcttatacatgtaattcactgttctgatttgtaaacattaatcaatggggaatatttggtaatagcagtgagtggaaattaaaaaaatgaaggagaaaagacatatcagaggaaagagtccatgcagagaatacttatgtcgtttcaaaacatttcaagcaaacttagggacaagataaatattcggtcaaatatctaagaacgaggcccaaaatttcgactcgattcaactttcaaattcccacatgttctttgattgtatgattcgaatatatgattattggtcccattatgaaaattctcattgaaaaagaaggaagaattagagactctttgcaataatatataaataggcatgcagtgttagtgttgtttgtatcatgacagagcaagaagaagaaagtcaaatgtccacatgagttccctttaacgcttcattgttgaatactcaaagccacattggtttgtatataacactgaagtgtttggggggactcttggtgtcattctggcgttgaagtggccaccattgctgcggttttctattatcttttaaatcattagtaagctctttttagttaattccaaatgttttcatgaattttgtatttatcatggattcatggtgtggacctgtggtatacattattcattgaaaccacaagtaggattaccgaaccgttaggtgattcaggttgatttgagttacaccttcaaatttatttgtttacacccaaacctaaaattattttggtttggtttggttaaaaatctaaatatacattttgtagccattttgtgaaataaatcttgtagttgggatttatttataatgactgtcactcgcatttattatttagttttacaaaattttaaaatgatattaaccaaacaatattttgcctaatttgtttctaaaaatctctacacaatcttccatatatcttcaaaaaaaaatcccatgaattattggatttaaaacaataataatttattttcttggattttgtaacactaatgatttagctaagaagataatatagacgggtttatatggaacgacgggttttgatcgatatatataaagaaaagaatatcacggatgaaatcctaaaatgaacaatcaaaatacaattatacaaccaaaaatacaaaaaaaaaaacatacaatattaacaaaataaatataacttaaaatttaannaaattaactattaaaaatcgacctacagtatactac

SEQ ID NO: 2274 - DNA, 516 bp, Arabidopsis thaliana landsberg
tagaccactgacacaagtcctctgtggtcttagtagatagtttagtaaatatgctagacaccgtgcagctctgggggcaaaatttcatggagcaaattgggcttcagttcaagaactacctgcacctgctttaccttgcatgagacggattccaacaatgatgaggaatgataaagttcgtagggctgtcatgaggctctgctatctacgcagggagcgttatgcacaacatttaaggactgaactagagcctgatgatcatttgagagatgaaggaaaatgggatgactttaatgaaaagagtctaagcccagccttaaataatgttcttgagctcaagaagatgggtaaactgatgccctctcaacggacgagacctgaaatgcacacagaggacattcaaactgtgtctatcgatcaagttaaagatacatcgcgatttgctaggatcttaagcatgtatatgaaaaggacaatgggtgtatacaagtgcatgaatctgtggttgtgtctacc

SEQ ID NO: 2275 - DNA, 1098 bp, Arabidopsis thaliana landsberg
tgagattacttccgttaaacagattggttacctccggtctactatcaaatggggaaccaattttatcctccgggcacatacttaccccaacatgctgtatacacaggtaaaccagcttttcccctcggtttgatgtatattacttgtatagaaaaatattccaaaatatttcatttcatgttaaatatccaaaatagtatatatctcgtgtctaatgtactatatatctctataatactcaacaaattcactatcaaaattcgaataattatttttggttttgttttataatggatataaaaaaggtgggagacggaaattcagatcatagttgttgggaaagaccagaagatatggacacacctagaactcttttacagcatatcttcctcgtcccccggttccgaagtcgccggtgaagccgcagctgctcttgccgcggcctcacttgttttcaaaccggtggattctattttttcatccacgttattaaaccatgctaaatctgtgagtataaattcctgttaagtccataaaattccattacatcatcaattcaatcataagttaacgtatatatatttgtggcagttatttgaatttgctgataagtacagaggttcttaccaagcatcttgccccttctactgctcacactcaggctaccaggtaatcaaactgatacacatagatacattttcatatttacgtaaatgagttacttaacaagacactttatgtattaaaatatcttggggtaaaaataggatgaacttttgtgggctgcggcttggttatacaaagcaacaaggggaaaagagttacttaaattatgttataagcaataaagattggagccaagccgtaaatgaatttagctgggacaacaaattcgcaggcgctcaagctttactagcatcagttagtatatatagctaaaccgattttgctaaattctataacataaagttgatctaaattctataacattaagttgatctaaattaagatttattgttattttcttattttaaggagttttacaacgggacacatgacttggacaatttaagaccgatgttgaataattcgtctgtg

SEQ ID NO: 2276 - DNA, 4561 bp, Arabidopsis thaliana landsberg
gtttcgttcgactctgtcgtcgaagtctgccatagaaacgtgttacaaaatctgatgatacctgaaacacaagaaaaagaaaagtttagacttagatcgacacctagtctaatgatgaagcaaagagaactttggcaacgacgccaaatttgatatagctccaattgtcttaagcttactccctcatataagagatcgtcgttagcacttaagggttgaattccactgagctcttgatgttcacacaatagacttatgatgattttaattaagctagacaaagtgtattaatgtaaaagacaataaaataagtaaatgagttctagattcaagcgatttaagcatcgggtctaaggaattgtcttggaagatagataaattgtagatctagctaatagtaggattgttatctcaccgttctgaaactcaaactatgattttagagtaaccggtggtgttccgcgaaactctctatacttagagctaagataaccagagaagccgagaaatcctatactaaagcatgcattattatcaagcttgattagttcacctagtatctaaaacagagtccttctatgagccaacctgttatttcttaaatgcctaggctcatctatcatagttcgaacaacaagtacctatggtgggcatacctattatctaatatcaagttctaggtgatcaatctaaaactagcaataagaataatcaagatcaagatgaagaactctaagaataatcctaaggggttttcgatctactaatcctttctaaatccctattgagactccttaaacccaacaaggtgattactcagacatgataatagaaacacaaatcataatctgaatagtttgcattgatgaattagaatataagtaaaaggagttcagaattctctctgcagtgattggattcttctctcaaaatgtatctcaatctctaaaaaacacttaggtctaacaatgaccaaataataaggtatattcgtgtctaaaaacatgcagggactactttgcaaataaggaaaacttcagggcttctcaatgacttggcaaaagacagaaattctctcgatcgaaataagggtgtcgatcgacataggtgtggtgatcgagataggtgtggtgtcgatcgacaccatcgcgtgaaaaaacgtcttagataatcttcattgctgaaaagcttccaaaattccttattatgctccatacctcccagatgcgtaagtgtacctaaaatgactcaaaacatacgaaaaagactagaaagactctaaaaaccattctgaaattatgttataaaaagaatatgttcctctccccttataaaaagaaaataaataatgagagattgagaagactttcagatagtgtataggggtagaaatgtttcctatgaccccattattatacattatttggaatggccatttacaaaggttgaaaaaataccgagggtgtcgatccaatatgcgagttcccatttctttactctctaaaaaaaaataagtctgggggagagaaagaacaccaaagaaaaataaaaaaatatatatatataaagaatggtcgatttatcatggtatagtacatgaatgagtctagaaagatcttgaatgttagcttgtttgatgagaccaagcgatgaaagcctcgtggatatagttgtggaacttaggtatggaatctaaaaagttgtgtaagcttgtagagaagtagatgttggttaggatttgattagacttgttaggcatgtggatttagtttggatgatcatggcaaaaggctacagagtatgggagttcctttgttttcaaacctcttccacgggttcgacttataagttttgcttgagggcaagcaaaagctaagtctgggagagttgatatatccctagttttactgtttttaactatgttttaggtataggctttagagtctatttgttatttctagagtcttttctagtctttttcaggtctttacatgtttgagattcatttggagataatagagctttctggaggaaaacagagaatttatgctactgaagaaatcgggagacaaaaatgcatgtaggtgtcgaacgataccacccctggtgtcgagcgacaccaatacctgacggcaattacgagacgcaacttattgatattttgaagatttctaaattcggccaagaactttctcctatgtttaatgaaggcccatcacgtgttttagacatataattaggtttttagggtcattgtttagacgtaagctttgggaggctattccctggatctcttttgtactttggagagcaaaaacctgtgaaaactcccttttggatctttctcactcttttctcttgttattttcatcattgatttcttattcagaatatgatttgtgtttctttgatcatgtcttagtaatccacttgttaggtttagggtttctcattagagatttagatgatttagtagattgccccttgctaggttatctataggattcttcatcttaattgttcttattgctagttctagagtagctaattagaacttgatattagataataggtatgtccaccataggtatttgctatttgatctatcatagatgagcctaggcatttaagaaagaacacgtaggctcatataagggttctggtttagatacttatgtaaactaatcaaatttgataataatgcatgtttagaattagggattcacgggcacatcactgggaatctttagcactaggcatagtgagtagcacgacacatcaccggttactttatattagtgatttgagttctagaacggttcggtaacaatcctaatcatagctagatctgttagtcatatgtttcctgagaatatcctaagcctaacgcttttattatcttattttacttccatctaatctattgttattgcttacttttgtttctttttattttctttactattttacttagcttaattcgatagccattagtctactgtgtgatccgagaactttgtgaatttcatccctaagtgctgcaattgacctcttaatttgagagagtggtcttaggattaatttgaccaatatcaaatttggcgccgttgccgaagttctctttgattcaccattagactaggtgtcgatttaagtctagactcttcttttctttcattactaattcagtttttctcttctttttctttttcttgtgtttcaggagcttcaggaatttaattgcaacaccaagatgttgctagtaatacctaatgctgcaggagtgttaagggacagagctggtcaggcatacaatgaggatggttagaaaatcgatgagaagggaaacctgctgcctgattttgccaagggtgacgataccgagctgcagctgttgcagatggacctgatattcatcttgatgactacaacatgcctggtatgttctatgctagtcattccagctattctactcaccaagcccgcccttcacccacttctacgagtaggatggaatgcatgttagaacagattctcaagagccaagtgatgacgaatcaaaggattgatggtctgtataatgatgtacaagatttgaatgctcggttcaatagagaggatgttaatgtagttcagtcaaagagtggaattcagcatcagacctcagagataccactcatgggcgcttgccacactgatttgcagaaccactcgacaccaagtctcagtgtcgatcgacacgaccttgatgttgatcgacactcttctggaccagacaatgcttcagcgtttgaaggagcaaaatcaagcgggctcgatagcaaagtgtcaacaacagatgataatgtcgatgaacaatggactgatgttgagttagctgaggttcatggtacaagcaagaaccacaagacgcagctgacgaatcagctaatgagaatcgaactccagcgatggtgtcgatcgacaccaccacttgtgtcgatcgacacaccacacaggttgagccagagttccttattagagctggttttcgtgttgagttcactactgatactccagtcactacggtcacgtcacccactgcacctctactccttgatccacctcctaaacggctaacgtactcatttcctcctaaacctctagatatcatcaataagagtttaaaatttccaaagactattttacgtttaagcaagccacgagtttctcgttgagcgcttgttctttctgttgatgattatgcaggaaaaaggagtattccacccatacttgagttccaccctgctgatgctcctctcttcctagatagacctcatacactaattgcttctacacaagtatggatgatgagaggtctttctccgcgatatttactgccaccttctgatccacctgatccccaaactccaccaaagtcaagctattgactcaaaacaagcgcttagtgggaggcaacccactgatttgatttttctttttccctttctttcttttctttcatttttgatttattttttccgctttctctggatttgaatgccattagggacagatgtcg

SEQ ID NO: 2277 - DNA, 101 bp, Arabidopsis thaliana landsberg
caaaagggcgcatatgtgcgaaatggagaaatccggaaagccgagttatcgcctgtatgagcgacggagagaggagggacaacaaacgacgagacctggga

SEQ ID NO: 2278 - DNA, 614 bp, Arabidopsis thaliana landsberg
  unsure (1)..(614): unsure at all n locations
tgataattctctatataggaaccatactgggaacattctttttcccagaatctctctccttgctttgcattgggttcaaaatcaaaacccttcattctttgtttatctgtctttctatcgtttcttactctctctctctccatcgtgttccttcattttctccttctcacaagcaccctaacaactcctaatcgatttatctaattcgacgactgaaccagattttttttattataatcaacacgcattgcaagaaaactttatgaaatctcatcattattattgataattttgttaatcttacaaattagactaaaaatttcatcacatagtttataaaattgttgcttgggttttttattctctcttagggtctagttttttctaattaaaaataattaaaatcttgtcaagatataaatacaaaaaaaagaaacaaccattgttgaacaataactaagaaaaaaagctaaataaattctttgtttgaattatatctgggcgaattgggtagagtcgttttgacccatttaagagattngtgataaataatttttttatttgatttaataatttgtactattctattttgtgaaatttacttagatacaaac

SEQ ID NO: 2279 - DNA, 606 bp, Arabidopsis thaliana landsberg
  unsure (1)..(606): unsure at all n locations
aaccgctttccttcatggagaactaaaagaaacggtctatgtgtatcaacctgaaggtttcgaaagaaatggaagttaagacaaagtgtacaaactcaacaaagccttatatggcttacgacaagcaccaagagcttggaacaataagctgaatcatatccttgtggaactgcagtttttaaaatgctctnnnnnnnnnnnnnnnnnnnnnnnnnnnnnnnnnnnnnnnnnnnnnnnnnttgctatatatgttgacgatttgtttgttacagggacaaatctagacnnnnnnnnnnnnnnnnnnnnnnagatgtcttctaaatttgaaatgagtaaccttggaaagctaacatactaccttggaatagaagtcattcaacacaaagatggtatagctttaaatcaaaatcggtatgctctcaagatcttagaagaagctggtatgatagattgtaatcgtgttcatacaccaatggagatgggcttgaaatccttaaaagcagaggaagaagaggaagttgatgccactgcgtatagaaagaatgtgggttgttaaggtatctcctttacactagaccagacttatcatattgtgtgggagttcta

SEQ ID NO: 2280 - DNA, 631 bp, Arabidopsis thaliana landsberg
gccctctttattgatccttgagaaactggttacaaagataaatcaatgaccaaacgtaagaagagactgataacagtattagagcaaacgagagagtaatttctgtacaactcttctttctccccaatgcccccaaattatctagaccaatcagcttcttaaaccttcagctctcaactaaccgatgaggtctattactgagctggcaaagctacacttccctgcatcacccctaggctagttacattagtcctgcactgcactggacttaacaagaacgccttctcgcttctccatgaggacctgcattggtttttcgcctatatctgtgataatatcaaaacctgattgtgagtcattggcgttatggctttgcttgtttgtataattttgagcagctaaggagaatgtggcaaagacactgaaagatatgaaattgattaaccctttatggctctgcttgcttgtatgaatgtgagcagataaggagaacgggccaaagacagtgaaagatgttaaactgataagcgcgggtagaatattggagaacaacacaacggctggagattgcaggagtcctgtccgcaacttctcaggtgctgtcaccacaatgcatggtataattcaacat

SEQ ID NO: 2281 - DNA, 4461 bp, Arabidopsis thaliana landsberg
gacagcttctgagcataatccattcgggtggctatatgtgtggctgtacaacgtgcaatgtctcgaaagtgagttgttttgcgattgttattttattatttatggttttcttgtttcttattctgtgtattttaacgatgtgatattttgtttatgtataaaggttctaagtgcgtatgagtttgagcagcatgctggtgcaaaaactagacatcctaataatcacatatttttggagaatggaagggcggtttataacatagttcaagaactgaagactgctcctcgtgttgttctcgaggaagtgataaggaatgtagctggttctgctctgaatgaggagggcttacgagcttggaaaggtgatggccaggtgtttagcttgttggtgcatctatgcgctttccgtagttttgattagtactgctgaacctgatatgttgttatttcctgcagcaagtttccaacagagtaatatcatgtctgaccggaaccatacaacggaacattccacatattgttttacatttctattgaccttgacctttatgttttaatttgtcaagaagtctactgcatttctattctctcctatctcattcctctttatttacttgctttcacatggtaaggaattgtgaatatatggtctcagcctctcatgttagacatttcttctatgattctcatttcttctattgtgaataattttttttccagagaactcttttaaaagagacttaccattggactatgaaaaatctttcaaaaaaatcagaagctctcatcttacaaattcaaaagatttatacttaaaaaatggtgagatcccattaggaggctctcaccattggaaatggtcttatgagttccgtgaagctctctcgttattcttacagaattagggcatgatttcgtatatatattttaaaaaaacaaacgattgggccttgaatttttaattagaaagttaaacaaaatctaaaaacccacatgtggtctcttgttttttttggtgtgatggtcgaatatttctaaaaacccacaagatttattaactagtcttacaaattacgattacatattttttttacgttttatctcattgacagggtataatttataccgtataaatattattttcttgtagatcagtcttttcaaaaaatgtagtgggattactgaatgcattcctctataattaattacgacaattatcatagttggtttagaaaaaaatagtaaaattgcacgtttgcatgcctatataattcgagtgtacatgaaacttgatgtagagtaccatacccatgtcgcaatattattatttattgaaaaaattacaaagtcgcgatgcaacaacctttgtactatatgatgagaatataatataaaaatgggcaacaagaacaaaagaaaatagagaaaaaaaggaaaggataatcttccacctaaacaagtccaaagaagattgcaagttgcaacatccacttgcttcgtccggcgtaagctctttgataaggtctctcaccgtcctccgactttctctctccatacatacaccacatttacatacgccatttacacatatatgacaaacccatcaacatctgtgcatgcacgtgtgctcatgcatgtatgtagtttttacttagccatgatgaccatgtctatcttaaaatttaccacaatcaatcaatcatgcgcgttacagtcgtgtgatattcaaaattgtacatgttatttctcataactatcactttagtaacattaagatcagaatgtgcatataataagtaaattttaacaataacagcaacatattttattataactaatgatttatttaaaaaattataaaactaattctgaaattttagttttttctatgaagaatttattaacagtattcatatgtagataaaccttgtagattctataatataaaatttatcaagttggaaatgagggatctatagaatacaattaattttgttgatatatattcaagataatgaaggaggcgtctgagcaaagaaatcatgggggcataagatggcacaatgtatgatacatggtcacacacatgtacatgatacaaatgcgtctatatacacaactgtttctatatacatacaaacacaaagccttcacatccccagctatctctatccatctatcttcaaatatatatttttaatcacacacaatgttcagatcttattgttattattataaaataaaagatgatcatactttttaaatttctcaaacaaaaccaacttgacatccgacagcgaacaagatcaaaaagctagctctcttcttttctcatcaaacttatttctctctcgatcgcaatatatacgattccataaattctcccaaaaacaaattcagagatagaggagagatcatgaggtcaccggtgcaactccaacacggctcagacgccactaacggtttccacacgctgcagcctcacgatcagaccgatggtccgataaggagagtgtgtctcacgcgcggtatgcatgtccctgaacacgttgcgatgcaccacacacacgacgttggtccggaccagtgttgctcctcggtggtgcagatgatccacgcgccgcctgagtccgtgtgggctcttgtgcggcgtttcgataatccgaaggtttacaagaacttcatcagacagtgccgtatcgtccaaggcgatggactacacgtcggcgatctccgggaggtcatggtggtctctggactcccggcggtctcgagcaccgagaggctcgagatcttggacgaggagcgtcacgtgataagctttagtgtcgttggtggggaccacaggctcaagaactaccgatcggtgacgacactacacgcgtcggacgacgaaggtaccgtggtggtggagtcttacatcgttgatgtgccgccgggaaacacggaggaggaaactctaagcttcgttgatactatcgtccggtgcaaccttcagtctctggctcgaagtaccaaccggcaataatctcatctttcttatataaattgcaattatgtatctaattttttttgttgttctatttcttttagatgttcgatcttctttacaaggaagaaaatttcgagtaccttttctttctttttaaatagatatatcggcttagaaagaattgtaatttaatggggatttctttgggagatttatgttggaaatttcgaagtactgttgggggattcacaaaactttggatttggagggtgttagtactggtacataaaacattttaaggtgaatctgttaaatgaattaatccatttgttgttttgtacatggtatcattatttgtgacattgttttatttcttgtactcttttaaatgttactcttaaccgtttttttttttgtggtttgtaaatgaatatttgatgcatcggtattgttaatgatagacttattaatttatttcttcatagtatgtaacattactataagtttgttttttgttggttgatccttgtgtccaaatgttctaaatagaaaatataatacaaagccgatattctgatctaagaatcaattagaatgaagccaataactgttccacatgtatataatattaccagagagttaagagttcagaaataaaaaaactccaattcgtttgactttaagatttatcgtcatcatggatcatattaagggaacatcaaattacctttaagtattgagtatatatattcgaattatctgtctattacacataatattctcgggacgtaacaatttattagaaggtactatatgtagatggaactgcgtgttaactaagagggaaattataaaccaggttatggaatttaaacctgattagcatgtgcatttacataaaacatatatattagacctaaagcaaaagtagacgtgcttaaactattaccaactagtctttcattggctactagtctggtcaagtggagattatcattttttattcccgtttgttttgttaataaattataaccaaccaacctagtgggttatatttaattcaaatataagtttttggtctactgtttttttttttttttttttgttctggggggtttattataattcgttcgattcaaaatttgtatttaagaaagtctaaaaggacatgcaattaaaatttagctggaaacgcgttgcaacttgctagttttttctgcccctagtgggatatgatacaacgaacccctatgccggtcttaaagagttaatatttctttttatccaatttccttttaataataatacaaacaaggacaataacaaattttcaaaatcttgtcaaaagagtatgatatatcagcaagcacactactatattattgattaaatgtggattagggttattaaaatgatcttactatataatatgggatgtgaagaaaaacaaatgtataaccaatatcaaa

SEQ ID NO: 2282 - DNA, 891 bp, Arabidopsis thaliana landsberg
agcaaaaatttattataacaacgagcatgattggtgggggctctgtctcctacggaaatcggtaaagtgtttttaccttgcttattggccatgcaacaggtaagcagataaagactaggacacggacaaacggagccactgttgcaccaatcgctaaaccataacgtgaacaaatcgactgaggtataatctgcagttgcagtaaagccaaccatcaatgttagtatcctgatttgcatgcattcacatctgatatacaggaaagtgactcaaaatgctcatagtcgtttcccttattgaatattacaggaaatgctaatcttacctcaccaaagagaagaatcaatgtaactgaaatcaaaatggcaccccatgccgtcacaaggccatcaagaaaaataggaagcgtctgaaaagataaatcatcactatcatcaaacaccattcctgaaacctataaataatcacagaggctaagattcagttttgtaattacctccatagcagctgcattgcatataagtaaagtgacaagcaacaagtgctgattctttaccactggcaatatctttgctgcagcaaacaaaaacaactctgatcatcattaacagagagacagagcctaaaaagacatgaattagatcaaagcaggctgctcacaacaactgaatcatcgatgacataacagctattatgtcattaaacttggaggctctggcttagatagcaaaaaatgataaaagggtaatctagtcttgattagtaaagttgtgataagaccaaaatcttcaccagtataaactaacacgcagcaattgaatattacagaatccaaactcgacatgagatgaacaaatgcattagaaagattaatcaaaacggccaatagat

SEQ ID NO: 2283 - DNA, 188 bp, Arabidopsis thaliana landsberg
  unsure (1)..(188): unsure at all n locations
tgcaaaaacagaaaccaaaaactcacaagctcagttatccatcagaaatataaacttattaaccaacggaaaacgnagagagggacggaataaaagcgaagcccaccactcacacacaccagcgnnccccagagcngaaaacccaacaaggagagagagaggcccggccaagacaaaccaaaaaccag

SEQ ID NO: 2284 - DNA, 614 bp, Arabidopsis thaliana landsberg
  unsure (1)..(614): unsure at all n locations
ctcttcttatcatcatcttgtttatgtacagtccgagttgctcaagtgggttgcttcctctgaggttgaaacttccaagtgcgtctaaaggtctctcggggctggtttcttcggctgagcttggtaannnnnnnnnnnnnnnnnnnnnnngcatctctaggtcctcgagaaaccgtgagttctcattaatctctacagttttctccatctgcaaggaaatcaaagtcatacaaaaaatataagaatctccatcatttgaagccaagaaacaaacaacacataactttcatgggtggaacatttaaaatcatcagagaacgtgctccatattttaacatgtttatctttaatgactgtttttagggtttgtgatcctgttatgtaagtcatgtgtttgctatttaccttcaataaagcttggcgagcggcttctctttcgagttctctcttccgcttagcctcagcagcagcttctgcagcggcttctgcttcagcttggcgacgagcatcttcagcagcctctgcttcagcttgtagacgcgctttctctggcaacataagtagagggttgtcaataaaagacatataagtaaaaaaaattgtctgtagatgat

SEQ ID NO: 2285 - DNA, 529 bp, Arabidopsis thaliana landsberg
cttatttttgaaagttaatacttttctccttttgatttgtaatcacagatggaactcaaattccccttgggaaacaagtgaattgcctgcggatttaagctggaagaaaatagctaaaccagtgatgaatcactatatggaagcgactgatggatcattcatagaggagaaagagagtgctatggtgtggcaccaccaagaagctgaccattcatttggttcttggcaagctaaggagcttcttgatcatctagagagtgttctcaccaatgagcctgttgttgtcaagagaggccagcacatagtagaagttaaacctcaggtgtatatacaaactactatgagatttacttgctcgaatttgccattattatcatcattgtaatgtgaatttgattttcagggagtaagcaaaggaaaggtggtggagcatttgatagcaacgatgaggaacaccaaagggaagagaccggactttttgttgtgcataggtgatgaccggtctgatgaagacatgtttgatagcata

SEQ ID NO: 2286 - DNA, 570 bp, Arabidopsis thaliana landsberg
gcaacagcccacatataaaagagacaatctatgtctttctcgacaaaccctaatctgcctctctcgacaaaccctaattgattttctcgattctctctttcatttcttttaatataaactcttaatcgacaaaccctaattattattcttgattctctctttcatttctcttgattctcttcatttctctcaatcgacaaaccctaatttgtctttggattgatggctcctctagtggaaaatctaagagaggaagaggaaagggttcgaggatgccccaaatcgacccactacttcctcattatcgaatggaagacccaatagtcttcctagacagtacgctgacgtcggtaaccctatgatagtcccagttctagagtctgcgcaaaattctgttggcaaccaacatgtcctagtctcagagactatccacttccgacgatgcttttccagtcttgcaaaggttctcctcgaggctctggatctactctgtctcgagcctctggatcaactctagttacaggctctacatgatctatttaacctcacgactctacatgatctattcaa

SEQ ID NO: 2287 - DNA, 652 bp, Arabidopsis thaliana landsberg
agtgacttttaagtctaggagagaaagttactgactattttcttttcttcttttagagtcattatttctttttatattcgttttttgagtcataattttttgttggaaattatgatctttttctctagattattgaatggttgagtaatgctacaaattcattcaaatctgactaatgaaaaatctagacggctaactgatagaccaaaggatgaccatgtttccaacataatccataaaggtctggactaatttatgcgctcttccttttacctcatcaatatagttagtatttaaagaatttgactcgtcattcatacatgataaaagagccaatgtgaaaagtgatggtactcatctcccttattcaatatataaaaaaaaaagattgagatgatttcctgttgagtaaagggatttatcccatattttactctctttatgaaataatcacacaaaagattggaataatgttgaagatatttttcctatgatacaagcacaactttaccaaaaaaaaaatgttttgaaaaagattaagtcatcatggttcggtttttgtttttgcgtgagggtaaacacaaatagcaattgaataagatggtttttacctatcatataagaattgctttagagtttttttgtattttag

SEQ ID NO: 2288 - DNA, 619 bp, Arabidopsis thaliana landsberg
gcttatttgtttaaatctaaaaggagacttggaaacaaaattgtagaacagtctttggcatagattgagcttttcttaaatgggacattaagggtcatcttctagcgtgggcagttgtagagatagaaaatgatgataactgggactggtttttgagaaaactcgctggaagtttggggcttattgaaatgactcatctagctatcatttcagacaaacaatcagtatcattatagaatcttatagttatattttgttgtgaaataaatgtctcatacatatgtttttatgttttggttgcagggtcttatcaaagcaatccacactatactgccacaagctgagcatcgtcaatgttgttaacacataatagataattggaagagagacaaccatgatctatagcttcaacgccttttttggaagatagcccggagctacaccatagaagagttcaataatcatatggctgagctcaaggcgttcaatccacatgcttatgattctctacaacttactagtctgttgacttggcctaaaaccttctttagaatcagagcattgtgcaatgattacctcaacaatctgagtgagtctttaatacgctattagacaagca

SEQ ID NO: 2289 - DNA, 575 bp, Arabidopsis thaliana landsberg
ttatactagatcccaattgggtttactgttaagtataatcgagttgtgtgattataaaatgcaccatattggtttgtcttgctcacgatggagctcagataaactgcaccatactgttaagtataatcgagttacatttgctctgtttcacgtctcggaaggactaggggccgattgatagcgactgttagttttggctttacaggctttgactttaaaaatccgagctatagagaatttggttgtaaagacttcggctgtagaaactttggctattaaaatctaattggtaaaacaatgttgtagaagctgtacgtgcttgttattaataataataataaataaaatatatttagaaataaatttatgtaacaataaattttattaatgatttaaaaaatatgtattattcatttattttttagaaaccaaacattgcatcatgaagttggatttactaaaaatgaaattgctaatttaaaatatttatgttaaagaaatgacacatgtttagaaatacaataagagataaatattcttaaaagatacatttattgtttatgcagagacttaat

SEQ ID NO: 2290 - DNA, 556 bp, Arabidopsis thaliana landsberg
atctacgcaaggattagacacatgctatatccaggttgtttggtggtggatctgatatctcttatgtttgtgttttgtttattttaggtttgatagagactggaagaagattgaagcttttattggttcaaagacagtgattcaggtacagtaaaaagtagatatatcttctgagttactctgtttttcgcctactctagttgtttgattctgtcatctttctcttgggccctcagtgttactttggattgaggttgttttctctcatttgatatctccacaaagtgttctgttaaaacatctttattgtctgtaactgttttgaactactactactaggagaaagaatgtcacatgcgtttgtcgcttatcaccacttaatgaagtgttatatgtagttatttttgcattagacaagtgagctcgttgagctcttttatggcttcttatacggactcctttaatactgcagatacgaagtcatgctcagaatatttttttaaggtacaaaagagtgggaccggtgaacatcttcctcttctcgacctaaaggaaa

SEQ ID NO: 2291 - DNA, 597 bp, Arabidopsis thaliana landsberg
  unsure (1)..(597): unsure at all n locations
gaggctgcttctatactatcactcataacattcttggtattatatgctacttacaatttatttttattttttcaagaattacttttgttttttgttagacatgatacctaatctctatgattgtaagcttgtaactaccaatcttgaggggccgtcgcaagctccagtaacagccttatatggataatacttgtcgataccaagaccaccattgctacttatatatgaactcatccgcggtctcgattttgcctcctccacaaccataattttgtttattagaatgaatcaatcaagtcttgctcagtcaaagtgttaaattctccttgtcaccatcgtgtcgtgaactcccaacagctccctacaaagacacgaaccaaacatgaatgatgttatagatctccaccaccgatccttaaatacaaaacataaatgaggtgatataacctccaccatacgatatatcaagaagaagaaatgtaagtatttaatgtttaaccatataaggaaacaatgccaaaaaagacctaagnttcaattttttagtagtatgatactatctcattgaagaattgaataccaaatttgtttcaaaca

SEQ ID NO: 2292 - DNA, 571 bp, Arabidopsis thaliana landsberg
ctggagtttataaaggggtttgctaatccgctgatgcgatcgttgtagtcatatttgacattagacgaattaatctccaatataatcacttaaaatgcctttgttgcaatttggttagtcgagtgttcgcatccttcaaatccacttggcaaaaatgatgctttcagtttggttaataatattcgctatttgtcatcgattcattactcgatttattagcagatctatgtagagaggtagtagggcacgtgccctatatagactttataattgttttgtaatgtctgatgttaataatgtgtttctagctaatttggtttaagttgccccatgttatatcaatgaacgtgagttcaattaccctactgtgcctattttgtgattattttttaactaactaaatatggtttatggtttatattttgtgctctacacagttttatgttctggatccgccaattatactcatctctaacagtgtcggtcctgtcatttttggagcccaatacaaaattgtttttaggccttttcaactgctaagttttctaattgtggcgttttaaaaaaaaac

SEQ ID NO: 2293 - DNA, 452 bp, Arabidopsis thaliana landsberg
ttgcccatttaagctcggaggtcaacctatgtccaaatataaattctggcgatgtagtcgggcttgctttttgtttcccctgacccatctttttcgcggggggaaacatttgactgctgcgcgagatgatatgattgctagttccaaatgctgtttcagggggacacgcatttctattgctatcactttcatctatacaatagtgcatcggggggataccaggctctcgcttgctgttcctatggcacgcatgatgacctaatgaaagggctttcgtccatcttgctgggtctttgcggggcgaggtaacacaatggatctgtgctacggaaacggtttagatatgtagactccagaactgaggaaatactgattgatcttcaccgcaagactaattgttttatcctcatcataccgactgcgcatttttttttcttttatactcactgtaa

SEQ ID NO: 2294 - DNA, 687 bp, Arabidopsis thaliana landsberg
  unsure (1)..(687): unsure at all n locations
taaatctggataaaattgtcattttatatatttgaaattgcagtttttattaaaaatcggaaaaggtgtatttttcaaacaaaaactcataaatatggtagttttcaaaatcaccctttataatattacagtcattaatactagatgattatcgactttaagcgtcttctttaataaatctcctaagatgattctttgggttgttttctatatttgaattgttattttgtaattgttttggaaatattgttttaagaaaacattttttggtataatctcaaattcttatgaatgataaacaatagttagctattaaactagagtttataacttttgaaatagtataaatgttatagtcaatgatttattacatttgctagagaactgaaccaaaacattttcgattacttttagtacaaattttaaaaaccaaaatgaatgatctgttgggtttacccgaagattcagagctaaaaattagcatgaaccctattcaaaaatacatgaatggccacaaaatatttaagtttgccattttataagtatcatgtatccaaaaaactttatcattaattttcgacaatctatataaccaaccaaaattaaatgtttttaacattaattgtaaaatanaaatatccatataatttccacattaataatataaatatttaaaaaaaattagtt

SEQ ID NO: 2295 - DNA, 7198 bp, Arabidopsis thaliana landsberg
  unsure (1)..(7198): unsure at all n locations
taatcctactttatgttctgttatgactgagttatgttctggtttttatcaaatatttatgttacgactaagttatgttctgttttttgtcaagtatgttatgtgacggctgagttatgttatatgacggctgagttatgttatatgacggctgagttatgttctatttttgtcaaatatgttatgtgatggttgagttatgatctgttatggttgagttaaacatactaatgggttttattatctcttgtgttgtagctgcgtgtgcgtaaaatggttctaaaggctgagttaagtgagctgttccattcttggtcagaccaattagaagacccagcactcgatcacttgattgaagacatacacgagtttaagcttgttaaaggttattgggatgtgaagacgagtaagaagaagaagaaactcgtaaaagataaagatgcggatgtgtctgaatctcccgcaaagaagcagaaagtctctcaaagtgagggtgttcattctcgtgagaaagatgcccaaaagaagaagaagaataagaagaaggaagtagccgtcgaatctgatgaggacgaggatgagcaggatgttcggggagaacaacagtcgctcgtggatgtggtgtccaacttgatctctcccttaagctcaaggtttgacaccattgataatagcatcaaaggaatgtcctcccgtctggatgtgattggagttcaagtagaatcgaggattgatgcaaagtttgaaaaaggtttgcatctattgagaacgaggtcaaacagattaaagagcatctgaagggcatagcttagtcagaattaaacactactagttatattagagctatgtttttacccaaaacacagctaggctaccctaagccccaaacccaacagacaccagaaggtccaaacaaacctacaaataaccaatctgctactagtcctcctccagtaagctaatcgctgagttattacttttatttagttacgactgacttatcttcatattatacgaccgagttataacctttatttagttatggctgagttatcttcatattatacgactgagttataacttttagttagttatggctgagtgatcttcatattatacggctaagttataacttttagttagttatgtttgagttatatttataaataggtatgagttttcgatatctaacgcctgagttttcgttacgtttatgcagtcaaaacaagctgtagcggtagagaatgatgcagatattgctgaggttggggtaagtaggaatcttaatggagaaattgctaaggcctccatcgattctgatattgatttcattgagacgtctcctggttcccgccgtttacgctctacgacggtggcgtaggagaatttccaaagcaaaaacatcaccaaagaagaaaggcaatgttaaggagaaaatattaaatgagctaatcgtgaaagagccagccaaaagaggaagaaatgctggtacaaagccacctacaaaggtgcctccaaaggtgcttctaaaggtgacaataaaaaagccaaaatcacttgaggaaaaagccaaggaaaaagctgactgtggtacttcttctggccccaaaaataagcctgaggaagccaaggaaaaagttgacggtgatacttcttctgtccccaagaataagcctaaggaagccaaggaaaaagctgatggtgagaggcgagctgatgactgatctataccttctgaagtccgtatgccacgatacgaccaattttcattccggcagagggacaagaaacaggtcccgcaaaatcatatcagaggggactgcggcgtttacgcgttaaagattcttgaatgtttattgcttagtgtttgttttgatggcattactgatgcaaatatacaagctctacgggttaagatggcagcaaagaccttcgatgaagcacatgaaaggatgcctgcacggtatctaaagacgtgattggctttttcgaacatatgtttatggcttttgggatttttagcatgtgattgtactaaatattgacgctttaggattgataaccagaattatgtctgtatgaatctattatgttaataaaaagttaaatcgaattaatggctgacttatcatcgctcaattcattttacggctgagttatgctaacgtaagggctgacttgtcatcgctcaaatcatgttatggctgagttatgataccgtgatggctgagttattgtagtttaattcgatgtttagctaagttattctaacgtggtgggtgacttatcatcacacaaatcgtgtgatggcggagttattctaacgtggtggttgacttgtcaaacccaaacttccatcccatcaaagaaaccaaacgtcactgtaggactatacatacaccggtttacgacaattgaatagtcaagaacccaaacgtcgttagaggaccaaacgtcgttagaggaccaaacgtttgattcatagggatacaaaataaaagaaataaaataaagaaccataactcaacaaaagatgtttacatctgatatttcatacggacaactgaaaaaaagttttccggttgtaacaggatcacgagaagtggcaacgacaaccttagcattgcaatcacactcgatcggaacgcccttatcgcgcctcctgttttcgtcgtacctcgttcgcatccttatttccatacgatcgagctcctacattaacacaaacacgatatactccacgttagatgggtaacgatttgtactattcagatgtggagataaatacctcatcgacactagagtcgccgtggaaaatagacccttgagccatcatcttgactgcaattagtatggtactaaagcactgattctatatagtcgtgtctgctacaaaaagcactaatcaaacgacggcgtcttgtattggctgaataaatttagaagtggctgagttataaaagcattgcggctgggttttccctgagttgtggctgagttatgtcgggatacaatatgttattacttagcgtgttgctttaggttgggtttatcgagattctttattatatcattatcgagattacaaacagcgtttttatggggaaccgccagtaataattgggtccacatgcacaggaacacaagccagcagttaatattcaaaataattcgaacgtgttcgaaattattcgaataactaaaccctcaaattttctgttttgcggtagaatattataacgttacggctgagttatgccaggaaatttcgtggtttgaccgagttatgagaaaccatatgttattatgacatttcaaaccagccatcaaattgttggttatattagtagcgtgaagatgtgtaatttgaaaacagaaaataacttttattttcagtaagtgtcgattgacaaactatgttggcaaaacttctaagaatgatgttgttggatagagtatgatgttggataaagtaggatgttggataaagtttataggatatgagctagtttcacgattccactatttgaaatgtggttatgatatgtaaattacttgattctaccaactgttggctcaagaaaagcactttcagggtttggccgagttataacagttatatggctgagttattcctgagttgtggctgagttatgtcagaagatttcgatgttcgaactacttatgagaaaaccaaatgttattatgagatttgtatacaagcattattgttggttctattgatgtcccttactcaggtagaatagaatattgctgagttttgctttttgctgagtttatcgagaaacaattattatgttattgtcgagattaaaaaagtgtttttatggggaaccgccaataatgattggtttcatattcacacgaacacgtcaaaagataataattcaaacgagtttgaattgattcgaataactaaaccctcaaatataaatattctgtttggcggtagaataccaatacgttacaactgagttattgcagaagatttcgtgatatggccgatttatgagaaaccaagtgttattatcagatttcaaactagccatcaaattgtaagctgacaattttgtgtcaaaatttaaaatctattatatccaaacagaaaataaagacacaatgcactaagtgtcgattgataaactatgttgaccaaacttttacgactgatgttgttgcgacttcccttttgttggatagagtatgatgttggataaagtatgatgttgataaagtacatagattatgagctagtttcatgattccactagttggaatgtgattatgatatgttaattacttgattgtaccaactgatggtttaagaaaagcactttcatggtttggctgagttataacattcacatggcttagttatgcctgagttgtggctgagttgtgtcaaactacagaatgttattaaataggcccatttgtatactagcattattgttggttctattgatgtcccttgctcggatagaatagaattagcttgttgttttaggttaagtttatcgagattctttactatatcattatcgagattacaaacagagtttttatggagaaccgccaataatgattgggtccatatgcacacgaacaaaatccaacagttaatattcaaaataattcaaacgagttcgaaatgattcgaataactaaacactcaaatattcaaattttctgtttggcggtggaataccaatacgttacggctgagttatgacagaagatttcatggtttgatcgatttatgagnncccnnttgtttttttgnntttccnncctngcctccnnnttgtgggctcttttgngtccngttcttgggtgtcggtncngaaaataaagacaatatgcactaagggtcgattgacatactatgttgaccaaacttctacaaatgatgttgttgggtatgatgttggataaagtatgatgttggataatgtatatagaatatgagctagtttcatgattccactatttggaaagtgattataatatgttaattagttgattgtaccaactgatggcttaaggaaagtacttttagggtttggccgagttataacagtcacatggcttagttattcctgcgtcacgactgagttatgtcagaagatttcttgttcgaccgagttatgagaaagccaaatgttattaataggcccatttgtattttagcattattgttggttctattgatgcctcttattcagatagaatagaattagcgtgttgtttaggatgagtttacggagatcacattattatatcattattgaaattacaaaaagtgattttatggggaaccgccaataatgaatgggtccatattcacatgaacacgccaacggttaatattcaaaataattcaaacgagttcgaattgattcgtataactaaaccctcaaatattcaaattttcagtttggcggtggaataccaatacgtcacggctgagttatgcctgaagatttcgtggtttgaccgagatatgagaaaccaaatgttattatgagatttcaaactagccaccaaattgttggctcaattagtgtcaacatctataatatcaaaacagaaaataaagtgggttttcactaagtgtcgattgacaaactatgttgaccaaacttctaggaatgatgttgttgggcatgatgttggataaagtatgatgttggataaagtatatagaatataagctagtttcatgattccactagtttgaaattgattatgatatgtcaattacttgatgtaccaactgatggcttaaggaaagcacttttagggtttggccgagttataacagttatgtggcttagttatgcttacgtcacgactgagttatgtcaaaatacagagaaaaagtgtctctgttattgaccagatacaacgtcggttgtgaaagagtctttgttattgaccggatacgacatcgttgtgacataaaccaaatgaacacgtgcccacttataaatccccaaaatcaaaccctaagttagaaaattccaatttctgatttcagatctggacctgcattccttcttacttttcttctccgaattccccagctataactaaaaattgagtagcaattccgagaactcgattgcgagtacgcaatccttgagccgttgggaacgtgggttatcatcaaagtgtcattgcggactagacgtggtcatctatacattgaagtcatcaaagaaccctagatgaccatacttctgttgtcctacgcgtaaagatgtaagtataattgattttggattttattggtttcgttgttaattggtttgtgattgaaaatgcaggaccatttgtttaaatgggtcgaagatggtacatacgaagtggttgtagacagttggcctaaattgtccaccaggacaatgagataaacgcagccaagtgagatttgcagtcgagctagaagcgttacaggtgatggtgaaagaactgaaggaagaagtagtgaggagcgaaagggaaaaccagaaatgaaaattgatggtcaaattttgatgtcttggctttattatcattgtcattgtacttggtatcctaatgttcccaaaaaccaacgaacagaggcttcttcttggctactagtttgtttgatatttggatggtgtgtttgcttttggattccatgtttggatgatgtgttttgcttctagggttaattcgttttttgtttgtttaagtagtagcttgtaatgaaatggtactttgtgttcggccaagtaaatcgaatgttatggctgagttaatataattttattgctgagttaagctaatattaaagctgagttaatccaacgctatgattgaattatattggtaatgttgtatctgagttaatccaacgctatgactgagttattataatattgtgtctgagttaatctattgatatgactgagttattataatgttgtgtctaagttaatcaattgatatggctgagttatgtttgagatacgcctgtatcatgataacatttaataagtgactggaagcgataacaactgattactgagaaggcgaccgtagataataggagatataaaaccattacaaaaaaaaggagtaaaaaacattacgactgagttcataggaatgagatacagggaagacaggtaagagatacaaaagcatt

SEQ ID NO: 2296 - DNA, 532 bp, Arabidopsis thaliana landsberg
  unsure (1)..(532): unsure at all n locations
atcactttcctcacttcatcaaacttctcctccttgtaaaaaccatcaatcattaaaccaaagctagcttctgttggctttatccatttcctctccatctctgcaacaatggagtatgatgaactcgttgaacctgattcacacaagactctaatcattctattgtaagtttcgagatcaggttcaatgccatacatcttcggcatttcgaggtagacacgattcgcttctttgtaatccttagccattaaacaagcgaaaagaagagcatttagagacttcaccgtccttgggatctcgtattgctcgaggttgcgaaatgtttgtatagatcgatcaagcatattcgctctgccgtataggataatggcacggactgcgaaactctcggattttggatcgggttggttttggatgaaaccgtcgagaagctgcgatacagcgacgaagtgtttctctctcgctagtgtcaccaccgcaacngagaagatgatacggtcgacgtgataatcaggtgagagtgaagtggatc

SEQ ID NO: 2297 - DNA, 583 bp, Arabidopsis thaliana landsberg
ataaggccaactaaaaacaataagcccatcaggcccattaaaaactcagtaatactaatgggcttttaataaggcccataattcaatacagtaaaacaacacaacaaagctaaagagaaagaaaaaaacgtaaaaatcgaagaagaccggagaaaatggcgaaaccgttgggaacaaccggtgaatttttccggcgaagggatgagtggaggaagcatccgatgctatcgaatcaaatgagacacgcactttcaggtctcggaatcggtgttggtgccttctgcgtttacctcgtcggtgaacagatctatagcaaactcatggctccttcttctcaatcatcgcatcagaaacaacccgctccatctcactgagagaatcattaggttaaagaaaaatcacatcttctcgaatatgttttgcttctagcaggtatatatcctaaatcgatttgacttctcttgtgaagaatggataaacaaaaacttggcaaagctcttgaatgttacgtctgaggagatagagctagtattttgcatatggttagaatcaagttttgggattagtcaaagtacatgttttt

SEQ ID NO: 2298 - DNA, 585 bp, Arabidopsis thaliana landsberg
  unsure (1)..(585): unsure at all n locations
agaccaaaataactagataggtcataggacatataattttgaaatgtgaaccccacttccaattatttgattaaaagtcgtgccacaaacacgtgatataccagacacaaccatctctctacctatgttttaatttaattcttatgctacattagtaagtccccttgcaaccaaacaaacatagaacataaatccaaaaacaaacaaaaaaactccactatcccctaatacctccacaccaaatctttgacagttaaaagattaagcaacaatcaatgcgcatcaaaaaccatgcaatattgaccagaagaataattaaaagatggttaccttggagattaagacattaatcccagcatgcttattgtcccaaccaaactcattaatggtatctccagccttaagaatgacctcgttcttcacaatgaattctctgtacgctcgtttcctcgaggctttgtgtagccatgccgctccccacagtaactcatcctgcaacaccaccatcagatcatgtcagtcanaatcaacatttaccatccaacggctgatactaaaaataggtaaataagagtaactataata

SEQ ID NO: 2299 - DNA, 2786 bp, Arabidopsis thaliana landsberg
ctgttgtattcattaagatttttaaaaaatttggtattagtaggttaagatctgtgaaatgtaatccaaaatcttcacaaatctagagttaatggattaatactttcataaagtcattaatttttttgtgttattcaattaaaacaaaagaatctactattgtaaatgaattaaattgttttgtaaggtttatgactttctaccatttgtttcacaaaataaagtcatgaaaatatcattaaaatagagagattgtttggaaactttataagattgtaaaaaaccaatgttcaaaaaattgttaggcgttcgataggggcctaacgcctagatcaattaatcgggggctaggcaaagcctaggcgttagcacatcattttacaaatttactaaagattttcataattctataacaaaacattggttaaaatatatgaaatgttgaaaatattacctatttgaatttataatatatgtatattcacacttaatttctatgaaaactaaattaacttattctgaaaatttgagaataattaattgctaacttacaagtttagtaatcaagtacttttactttattttttcacttattcaaaatgatcatatttacatatactaaactggccgatttgaccggttaatactgattttgaacgcttaaaccgaaaaccctatttgattcaccgatttcactaaaatcgggccgcctaagccgattttttgaaccttgtgaaaaactaatcaataatataattgaaaactctctacaaatagtttatagtttagaatctttcatttatttattttatatgatattattaaagtcttcaaaatttctttttagttaggaaccaataacacctcctagttgtttcttccttttttaagattcaaacactttatgcatgtattatgtgttttgagatacagtaaaacctctataaattaataaagatggaagtatgatattttattaattatagtgattaataatttatctataattaatatattaatttaaatttaaattattattttatagagatatttgttttaatttttcaaatcttagaaactatgagatgttataaattttatagtaatataattgaaaatttaatatttaaaaagctcatttgacaataaatcacaaaaactataattgaaaatgatgcatactaagaaattagaaacttacaaaacattatggctaatttttttacaaagttataaacgattctataatttgacaattgaaaaccccaacataattcaatcagacttagagacaaaacaattgtttgaaagaataaaagttagagacaaactctaacaagattcaatacttaaaagacattaaaaccatatttttatataaagctttccaagagattattatataattattttatcgaagtttgttaattttaacatcggcccaactcggaatttatagaggttttactgaacttttgttacaagcaatagattacaacatgtaggaagactactagagtgatagaaaccaaaaagagtcatcgcctaaaatggatattgacgacagaaggtggcatgaaaagtgtttgttgaatagagatggcaagtggtaaatgaggatggaacaagaatgaacatatcttcttgcttcgaccatctgcagttccacactctggtcctgttcaccattagacaatcctaacgttaaatcatgttccgtgcggtttgggttttcgtcatcttaatatctaaacaactaaaacaaccaacctggttttatcttgaatttcagggtttgcggttgccttcgagatatgaacttgattgggttgtctgaggattgcctatgcctatctgctgcggatattaactgtaaccatatccgaaattaacttaactcaatcctgaagttgaagagaataagggtttatagaatggttaccttttcatcgaaccggaagagagactggtcgaaatatggggagggactttgtgactgacaactgaaaggcaaagagagtaacatcttcttcacaaactgtatagaaaaattgattagattcaactctctcataaaaaccaacatatcgaaatacagagatgtacttacctgagaaaaactgtttgatttgttcttcgtgtattttagttgttcaagggcatagacgctgttagaatgcgatgttacaaagttcatgaacggtgtactacttgatactgtaaagtgatcactgaactgctcaaataattggtaaagatcttctgctgagttctgcatatagtaatgtactaagtcaagttataagtagatgcaaattccacaaaataactggccaaaatgacatccattttacctgatagaatgctacaatgtcagtagtctccatattatacaccgcgaagaaagctggatgatgatcagcacttcttgttacctgagtaacccatcaacaatcataagtctaatcaatcaaattgtaatttctgaaaatgacagtatcagttcaatgtaaccatgaatttgtattatagagagcttaccccaccgtctacacttccaaatttgattagcaggtgttgtcgatccaaaaactgaacctggacatcaagaatacacaaaagattagtttttttcgccatcaaatccaaacacttgacacagattccaaaagcagaaacacataattgattaccttccatataatcaagtcgacataatcctggaaatggaaataaaaaatcttaataagactttgaactctctgtcaaatcaaatagtgcctttg

SEQ ID NO: 2300 - DNA, 409 bp, Arabidopsis thaliana landsberg
gaccaacggggacaaaactcgtgccttgagctttcatgagccgaaccaggcattaaactccgcgagcggcccaacaccaaatgaacttaaagacgatcctaatttagtgacctatagagaaaagaacatagattgacggaaatgctctaacactcacgacccaaaaaatttatgttacgtaaacacaactatggatggaaaccgaacaccatcacgattggtaagagattatagtagcaaagaactcataattaacagctgtctccatgcgatactgcacggacaaaatgggattatcagaaacataatatgaacttaaagaatcgaaataacctgaagggtgagcaaaatgtacaagcgcataccagagtcatatcgagagtccataaaccacttacacaggaaaaaa

SEQ ID NO: 2301 - DNA, 541 bp, Arabidopsis thaliana landsberg
gaagtaatgttgctgaacttcggaagaatcatttcagggataggtttcggcttgacgagctatgtggttatttacttattattattatttaatatcatctttgtaagtttgttttctgatctgtaatttttgcttatttaccaagcaggtacctgtctacatagcagaaattacgccaaaacatgttcgtggtacatttacgttttcaaaccaggtaatactatagttttcttaaatatttataagaatgagtgctgacaaaaaaaaattagcacaaactagtctaagacaaaccaaccaaaatccatattaaaacttttctaaatttgtcgtgagtatattgatccttttttcattcttgtgtgattgttgattattagcttcttcaaaacgctggactcgccatgatttatttttgtgggaactttatcaattggaggacgttggctttattaggtaagactataaattccatattcatcgtgaaaaaaatgttttgagacgtaagaatatgttaaatatatagtaggaaaaaactgga

SEQ ID NO: 2302 - DNA, 605 bp, Arabidopsis thaliana landsberg
ataaaacatctaaactgtaatccaattttcatccaaaatctatctatttcaagcaaattaaaggaaaaaggtttcaattcatcaaatctaataagaaataaaaccttaattaaacacaacaccatcactagaaaatagggaacaaacgaatgaaatcttacaaagagatgacatggaggaacgaaggattcataggatttacagtggattttggattatttatcatggaaagtacaaaaaattagatctttccatcaataaacgagtgaagaggcaagaagaagacgaaaggttatttgtggaataagagaagagagaagaataagaaaaataagaagaaacaagatcaagagttttgttgttgtgggattgtgtcgattccattctctgagaaagagaatacgaagaagatgaaagaaaaaaaattgaattgagaaataaggatttttcaagtggtgagggataaaagatccaaaattggtattggatcataatccaacatagtgcttgtgtcgtatattaagcgaagaacccttattttatttatcctttactatttttctcagattaaaataaacagattaatatttgttttttataacggg

SEQ ID NO: 2303 - DNA, 559 bp, Arabidopsis thaliana landsberg
  unsure (1)..(559): unsure at all n locations
tactttaaaaaaaaatcacgggacgggtaaagaaattatataacgggttttanttttgaattgttttatatggnggatatattggaatcaatatttataaaattttaaaatattattaatatgctgttttaataggagttaaaacttcagttttttaacaattgtctcatggattcgtggtatagcgttatttaataacaattataaactgtaaaatataaatattttataaattaaaatttgcaaattttaatatatattatttttaaaaaataaatcgtcccgcagtataccgcgggttaaaatctagtcatatattttaaaacagaaggagtatttaattcatgcaaacattaatgattaggtcacacattttttttttcgaatatagttggcggagaaaaataccttaaaaatctggaaggctacaccaaaattcaatatttacgtgttgcgagaaaatttgcaaatagtttttgatatatatttctaacgggtacgaaaaccatatgcaacanatagttcctttgtacacatttattatgtaatatttttacac

SEQ ID NO: 2304 - DNA, 571 bp, Arabidopsis thaliana landsberg
gcggccgccgccgctggcctgccgcaatcgctcgccaccggctccgtcgtcgcgtccgacgcgttctttcccttccccgacgggcttatagccgccgcggaagcaggagccacggcaatcatccagcccggcggctcgacaaagactccgacgtcatcgcgccgccgacgagcgcgggcttgcgatggtgttcaccggcatgcgccatttcagacactaggatttttacaaatgaataaagacgaagccttcagctggatatcgcacaacccgatccgcctttacgccgtggcgttcgccgccggtttcctcgtcgatctgctggcgccgctcaatattttcagctacacgctgcaattcgcgatcggcatgccggttctcgttatcggtatcgcgctgatggtgtggacgagcgaagcggtgaaacgcaagccggtggtgcctgagccgccgcccgcgaattcaacgatgccggcgaagcgaagcttgtgatcgagggcccttataaatatctgcgccaccccgtttatctgtcgctgactttatgctatctcggcgtcgcggtgatgct

SEQ ID NO: 2305 - DNA, 838 bp, Arabidopsis thaliana landsberg
gtggtggtggagacttgtagtcaacctttggagaaggagagtagtatggtgggggtggggaactgtagacgtatgggggtggtggggacttgtagtcaacctttggagatggactgtagtatggtggtggtggagagccgtagacgtatggtggtggtggagacttgtagttaacctttggtgaaggagagtagtatggtgggggtggggagctgtagacgtatgggggtggtggagacttgtagtcaacctttggagatggactgtagtatggtgggggtggggagctgtagacgtatggtggtggtggagacttgtagtcaacctttggagttggactgtagtatggtggtgatggggagctgtagacgtatggtggtggtggagacttgtagtcaacctttggagaaggagagtagtatggtgggggtggggaactgtagacgtatgggggtggtggagacttgtagtcaccctttggagatggactgtagtatggtggtggtggtgagctgtagacgtatggtggtggaggagactgatagtcaaccttcggagaaggagaatagtatggtggaggtggggaactgtagacgtaaggtggtggtggagacttataatcaacctttggtgaaggagaatagtatggtggaggtggggagctgtagacgtatggtggtggtggagacttatagtttacttttggagaaggagaatagtatgatggaggtggtggagaaatataaacatatggttttggatgtggcgcgtacttagggcttttgtgttcatggctgggagaattgtaatgtggggtttgtggggatgagtaaggaga

SEQ ID NO: 2306 - DNA, 3901 bp, Arabidopsis thaliana landsberg
  unsure (1)..(3901): unsure at all n locations
ccttgggaggatctcatcatgtggtatcaaagcacactctgaaagttgagtcttcaatctcaccattttgtgtcttttcatctttaaatctgtttccgtctgtcaccttcatttaagttttataattaattggcgtgtgctaaaattgcgaaatcaactgtcataggtttggaaaagagtctactatttttgtaaatatttctgaaatatttggaaacgatttggtagtttttagcatcccaacaagtgaaactatcgtaattagggttctaggacatctgaagggtcttttcgtgtttgtttcaaaagaactagttactggtgttattttgttgtctctattgtagaaagaatggctgaaactgaagaggaagagactaaccacaatcggaacaacaaacttttggtggaagcctttgagaaaatgatggacaccaaactgaatgcttttcgccaaagagtttcatgagaaactagaattagggcagactcgtcctcgagtacaaagaagagttgatgagcagcttgagcaaagagatgaagctacagatcagtactatgggcataggagctctttatctcgcaatagtcaaaggagacaccatagacgtgctaatgaaggtagagatcttttgcaagacaatgttggaggtcttaagcttaaaattccaccattccatggaaaaaatgatccagatgcttatttggaatgggaaaagaagattgaattggttttcaattttcaactctacaccgcgatcaatagggtaagagttgttgctaccgaattttatgactatgctttgagttggtgggatcaactagttacttcacggaggcgtaagcaagaacttccattggaatcttggtccggaatgaaagctattatgaggaagaggttcgtccctagtcactaccaccgtgagctgcatctcaagttgaggaatattacacaagggaaccgttatgtcgaagagtactacaaagaaatgtaaactttgatgttgcgggctgatatttcccaggatagagaagcaactatgtcaaggtttcttggaggtttgaacagagatattcaaaacagattggagactcaatactatgttgaaatagaagagatgttgcacaaggcgattttgtttgagcagcaagttaagacaaagagttcttcacgatctagttatggttcagggaaccattgctgagcgtacttaccaaagagaggagagaaccagcagctataagccgactgtcagttcaagggctgaaagtacatcatatgctgcagttaaagatcacataggaaaggctgaaatttgtacatttagagttcgtgatgttaggtgttacaaatgtcaagggaaaggacattatgctaatgaatgtcaaaataagagagtcatgattctcttggataatggagaaatagagcccgaggaggagattccaaattcaccttcttcattgaaagagaatgaggagctgccggctcagggtgagttgttggtagctaggagaactttgagcgtccaaaccaagaccaatgagcaagaacagaggaaaaacttgtttcacacgcgttgccatgtgcacgggaaagtttgcagcctcatcatagatggagggagttgtactaatgtggcaagtgaaactatggtcaagaaacttggattgaaagtgcaaaaacatgcgaaaccatacgatctttagtggcttaatgacagtggaaaaatgagagttaaaaatcaagtggttgtgcccattgtcatcgggaagtatgaagatgagatcttatgtgatgtgttaccgatggaagctggacatattcttcttggaaggccgtggcaatctgatagaaaggtaatacatgatggcttcactaatcgtcattcgtttgagtttaaaggtggaaagactattcttgtccctatgactccgcatgaggtttatcaagatcaaatacatctaaaacaaaagaaagaacaagtcgtcaagcagcccaacttctttgcaaaatctggtgaggttaagagtgcttattcttctaagcaaccaatgttattgtttgtttttaaagaagctcttacgagcttaactaaccttacatcggtgctgccgagtgaaatgacttctcttttgctggattatgaggacatgttctcactggataaacctataggactaccatccatacatgatgtatctcaaagtcacgtttggagaccaggagattatctagaacgttcaaatcttacaccacatgagattttagtcattttacttcacatgtttcctgaagagcctaaaattgatctttcgtcacttgattcatttcatacttatcactggcgaccaggagagttttagatacctttagagagaatgagttggtcacaagcaatgccttatccaaaaagaacccccggatccaacaccacttccattagtcataatgataccaagcaccgaacacactgtgaacctttctcaggtaagtaactctttaactcgatttgtttctcatgtttcaagaactggtactatgagtttatcatatttaggaaacattgagaaagagttggatttatttaaagaatatttggaatcaaactcttgtcttaggataaaagtaaaacatgaacatttcaagaatggtgcattgattaaagttgagccatgtttacttgtttataatgatttcatgactatgataacgcacttgctttttgccaaaggtgttgacaacattgtaggtataaaagaggagacaccagacttttagaatttctcatgtccaatctctttaagaggactggaattggagttgttttgaagccaaagatcgattatccatccaaccgaacaagaagaaaaagcgacaatgcttatgaacttgagttgcaaggtaagtataatgtgagttccaatttcaatgattcttacttggtagttntcattgtaggtgaattggatttgaggtcaaatccttttcaagtgggagaggatgatgtgataatggaaagcacaaaagacatggaatttgatcaagagcttctagccgaggaagagcttgaagcagaggggcagcttgaacctgaggagcattttgaaccagaaaacgagtttctagttgagaaagagtataggaaagatgttatcttaacctcgttggttttgatacatgatcatcaaatgggcatgtgtctcatttatactcttttttccttgtcaagttttgtcccaatggtttttcttgacaaggtttttaatgaggcaaatgattcacattcaaatcacctatttgatgatccaaaccatggtataacattcacaagttggcccaatggaatatatatgaagtccagcctattttatgaccatcacaagcccaagaagagcccaaaccaagtgggtaatttgctggtcaagaggagtgacgaaaatagcatttcaagagtcattttggagcaaagaagtggaacggttatttttaaactttcaaactagtctttatttctttctattttccaaggtagtcttgtgagtgtgttccaagacttccttcttctttataaactccttgtatctcttatgagaactcatcatctttttatcaaaaactctctcttaaaaatagatcatggatccgttttcgtatgtcaaattttgatctttctcgacttatcaaaaggcttttccacatccttttgtggcgtcattcaatccatcatctcgtcttggagtcgtgtgtcgtctccatttcgagaatatccactccagatcttttaagtgccgaaattgggattgattcctcaccaggatcatatcaatagcaaacaaaattgttctacatctttttttttgggtcaaatgttctactacatttaaatacctttgttat

SEQ ID NO: 2307 - DNA, 386 bp, Arabidopsis thaliana landsberg
  unsure (1)..(386): unsure at all n locations
ctggaaaaaatttaggaaggtggcaacatggtagcggaaaaaatgcaatctaaaccgggtttttcattcttttgcacgaggaatagcaaggcgaataaagggtatactcactaccgaannnnnnnnnnnnnnnnnnnnnnagacagacattgacgagctgctcctacgctttaaagaaggttgacagactatgcttcagtaggcaannnnnnnnnnnnnnnnnnnngcgaaaacagtactagcatatacgtttgttggaaagcacatggtccttccaaaattctataaggatgcgtcaaaaaatagattgaaaatcgctgaggcaaggactttttggtgtgcctattgggaccttccttttcacataatcagattactaattatta

SEQ ID NO: 2308 - DNA, 2283 bp, Arabidopsis thaliana landsberg
caactgccattgccccctcccctacctcaagggacttctgctcgggccatcgcagctcgacgcaagacgctgtccaagtcgatcgtggaggcttgcgaaacaaagaaaacattcctccaatccgcagtcgacaagaaagaatacagcagaaccttgctggttgacgatggcagcgccgaaggggcaagatctgccggtgcctacagacccactcctcaccgcgaaggccacagcggccggttatctcacagagaacgatcaccgcgccgtgattcacctcggccttcctcccgaactggactaagcagcgaaccgcttgctgacctaattcggaaaaagagagacagatcaacccgcgacagctcctcccccaaaagagataagacgagagccaaactgaccgctatactcggcggtcgccgccaccccgatctattggtcctcctcctccagtcgccgtatctccttcatccggatcaggaggtgaaaaggccgaacggagtgctaaccctcggtgggatgaaattgaggtccgagatgctggaaactaaagctgttttggttcctcagaccaagtcgctcacgggttagaaatttctttctactttatatcatgacattttttaccatttcgacttattgacttagcgttccttgactggtcaaaccttctctaacagcgatggaaacgtagggaaacatctttcgatgtttcaaaacacgaaaagacaccatgcagccaggcttcgatagatggcgtcctgcaattcgcgagcgattcctactccatgctcaccactcatctcgggttagttccctttacccacaatagatattttaatctttgctccttcacttagacgttaaacccttctcgttattacctggttcaagcgaacagcgaactcaacgacatgattgagtactatgaaaggttgctgctagacagggaaaaggaggttatgacgtggaaagataagtcttcgtcccttggggcaatcgtttttatccaaaccaaaaatgttagaactgagctggaatcaaatacaaaggggtggccaactatcgggatgctgagttagcgaggtcgacatcaaaagccaggaaggaggtaaaaggtcgcgggatggaattgatccaaggggcaatcgtctttatccaaaccgaaaaggttagaactgaactggaatcaaacatcgaggagtacgagagcaatctcctccttttagatcaaacccatgaagatgacttctccgaggaacgagagagggacgagttgaagaccgtcctggaagagaagcgaaattgtttagctgcccttccttcctcgtcgttcaaccctcaacaattcgaggagttcttcaccgaatcgcctcctttgagcgaatctggattacaatgggccggtaaattctgactctttttttaaaaccaatccacagtgaattactcttatattaatccgagataattgccttaggtgttagcgatcccgtggaacccgaagtgcctatcgcgccggcatcaattctggaggtggtaatcactccacatgaagttcctccatccgtgaactcagagacagtggtcatcgacgacgatgatggttcagaatccgtggttcctagcgagcagcctgctactggcgagccggacgagactgagacaactgccgcagaccctgatgcccgaaaacctgtagtggctatgtccacttagtggggattgtcccttaaactcaaaagttgtttactgtttcccgaattattttacctgcctaagtaggcttaaacaaatactttgcctgaggaggcatttaaacctttctcttaagaatatgatcccaagagggtttttctttgtgctaaatttaagtatggatttgcaaagtccatcttttttaaatagagttttttgtttaaccatgtggtcaagttatgggattcgtaggttgatcagacctatccctaaaaatgcggactcgaatccgcgaactccccaactcgggtttagtcagttcgatttattttccaggctctaagcctttactatttatcctgcatttaatggctcacttatcttaaatgcgacagttgccattttgcccttggaaatctggaaaagtgtcacgcttctaaggcaataattgccttttcctcgatttccaaaaatggataaactcattcggacacgccacaattattaactttgtggtttcgagtaaaaccctaaatcactataaacgcataaattttctcaactctctcaaaaatatggaaaacg

SEQ ID NO: 2309 - DNA, 552 bp, Arabidopsis thaliana landsberg
  unsure (1)..(552): unsure at all n locations
attttcgcacctccaaaattttttagttgactcctaaaaaactcaaacctcatttatttcacagagagcgccacaatcagaaaaaatggcgcttttgctcttccctttttcttccccttctcaccttctcttcttccactcatccgatctctcaatcctctcaaatctcaaactctctcttcccatcactctctcgctctctcttcaatctcatctcaatcatgacagagcaagagatctgcgtgagggttacaagagcggcggcgaaacgaaaagcttcgacggcgatgggtattgacggagatcgggtcaacaagaagagagttgttctcggtgagcttctaaacgtctccaatgtcaatctcttggctaatctcaatcagaagaaagaaacccagaagccaaaaaggaatcttaaacctcctccggcgaaacagattaagtcagctcccgtggctattattgacctagaatcaaaatctgacattgattctcgatctgatgatcctcaaatgtgtggaccttatgtngctgatatctatgagtatcttc

SEQ ID NO: 2310 - DNA, 163 bp, Arabidopsis thaliana landsberg
agccaggggggaaccagggctcaagaactcttcctaacttgcggcgacacaccaccagcatcgaggaaaacacaatgcgactgggcaccaaagaaccaagcgggggaagccaaccactctgtaatacgcgacgcgctcacgttaacgtacagtgacgagccac

SEQ ID NO: 2311 - DNA, 3954 bp, Arabidopsis thaliana landsberg
cccttgcaaatactcgagcacttgtcttatgtcaattttcgcggcatttcaatgtgctctcttgagcctttacaagagcagagacgttaatgattggatcatagatgatagattcgttatcaccgtcatcatatacgctgtaagttacaaacatcatatctttataaattaactttttaaaaattataagattagtatgtaagaacttaagatattaatgtgggtttttttatgtggtttttttttatcatatattatagggagtggtaggacaagcaatgacgacggttgcaacaacatgggggattaaaaaattaggagctgtgttcgcatcggcgtttttcccacttactctcatttcggctactctatttgatttcctcattttacacactcctttataccttggaaggtatcttcttcgataatctctatcaaattaattttgtctaggcataacactaattacaacattaaaacttttggtctacagtgtgattggatcactagtgaccataacgggtctctacatgttcttgtgggggaagaacaaagaaacggaatcatcaactgcattgtcttcaggaatggataacgaagctcaatatactactcctaataaggataacgactctaagtcgcccgtttaatttaattatattgttgttaatgtatgtttcaaataactgttatgtcctagttaatgtttaaggagaggtaatgagagataaaattttataattccaaacatcaacgtagagatttgtgaaatatttaaatccggtttgtttggttattttggaataatttcggttatttcaattagattcgggtagttcagttcttcggttagtaacaaaaactggtctattgttttttggttaacctagaaccgaaccgaactaaccaaagttctcggtaaccttttgtagtggcttcctgaccgatgaggccgtcaacttcaaaaaatattgcaactaagctctgctccaaaattagagtatctataactatgttaaacgcttctgctttaagcaaaacacagttgtaagctggaatctaaaaaaatgagtgtaatgatgtttgctgaattccataaataaatactacatgcttcggttaagacttaagagtaattaatgttccttaatttctacaaatgttatataagcaagttgaccaaagttctcgatgataatttgttgaaattttgtataggcattgcatgatattatatgaaaagatgaagatttttatacagacgcaagttccccgagcagtccaagcttgtcgggtttaattcaactatgttaatacgcaaatttatatagaataggcgtaaaagtgaggcccatacaatgtcttattacaagcccagatccagcatagccaatacgtagcagtacaccatcacagctggcaccgtacccacttgtttagtcgtccaagtttgtaccaataatcgtttacacgtaagcaattgtggaccaccacactcacttttacctacgtgagcttcacattgaagcttctggctcgtagagaagcaacttgagatataccaaaaagtgcagtagacagccactacaatatcaccacgtgtcgatctgcgatgacttctgttttttccatttatacccttggtgctgttccagcctcaaataaacttttcaattaaaatttttccaaaaattaggggaaaaattgttgtggctgagattgcttctggcttctcttcttcttcttccagtcttcttcagcctaaaacagtcttccttcttcttcttcttcttcttcttcttcagttatcttcttccttcttctctctgttttttaaatttatttttagagatttttttttgttttgcttccgatttgattatttccgggaacgatgacttctccggggagttcccggtgagatgataagtcagattgcatacttgtctcctccatggctactctcaagggtataacagtttacattatgagcagtttctaggattcctataacatactaagatctctgtttggctgctgagaaacttatagaagcgattaactaaatcttattagctctaaaagttagcataaatgatacgaatctggtgattgattactgatatgaagatttgtgaaggttttggctgaggtggattcgtttgggtgaggcttttgtgaataataataaagggaattcttttgagttctgctggagaagcagcgactgtttcacggtggactttgaaaagatttctcttttgaatttcgctcatcactcttatcttagtgtttgtggataaatatttctcataaagtactttctcctttgcagtttctctagaatctaaagaggttatcacaacggctttgcaatttgaaaactttcatgtttggggagatcaaagatggtttcttttttatactttacttgttagagaggatttgaagcagcgaatagctgcaccggtcctgttatggatactaatacatctggagaagaattattagctaaggtactactactaatgaaataagattggtgtttttttgtttgagagatttggactgttgttgtgtgaagatttgattttcttttgggttttcaaatgtttaggcaagaaagccatatacaataacaaagcagcgagagcgatggactgaggatgagcatgagaggtttctagaagccttgaggctttatggaagagcttggcatcgaattgaaggtcgaaagtttatcttttgaatgtttagtttgaactctttgagattttatattcctttgtttaggagtgtctttatctcctcttgattgggagattccttcttttcttttcattttgtgtgcagaacatattgggacaaagactgctgttcagatcagaagtcatgcacaaaagttcttcacaaaggtaagttgatgatcctttcagatctttttaaaacactttcgttatcttgtgtaaaggtaccattttttcatatcgatctatgactatgtttagaagttgcctgtcactgtctggaaaagatgatagaaggttcttcttattcttccttttctctaattgcttcaactagaaattaggcgtctaagtagagtgtgttttgctaagtagagttggttggttccgaggattgcatctcgatcgttttttatctttttcatttactctgttcaactaaacttaacattagattggtctgtccaaacttactgttagaaaaaactctacagagagctttcttctctgagaccataagataggtccaaattaacataactagcgttgcatttggatgacacaattgtcccatattcactaaagtcgatgaaataatgggattgcatgaattcttttagccatccatatggaaaccaaacctccttgccctataggacaggacatgaagtaactctatcatctctaccccgaaaaattcgggtcagtataagacttttttcaaccttggtgatgtggtcaatttcatgaatctcaggatttcacatctgagctgcatttttccatctccagtttggaaaagctcacagtttttggttcacatttcagttggagaaagaggctgaagttaaaggcatccctgtttgccaagctttggacatagaaattccgcctcctcgtcctaaacgaaaacccaatactccttatcctcgaaagcctgggaacaacggtacatcttcctctcaagtatcatcagcaaaagatgcaaaacttgtttcatcggcctcttcttcacagttgaatcaggcgttcttggatttggaaaaaatgccgttctctgaggtttattcctgatctttctcttcttcattttatcattttgggggtcttgtgatagacttcttatgttttattttctgtatagaaacatcaactgggaaagaaaattcagatgagaattgctcgggtgttttactgggaacaagtt

SEQ ID NO: 2312 - DNA, 372 bp, Arabidopsis thaliana landsberg
atcagcgacacataatgtatgaatttcgattttgggaatctaggtgttttcgatcaagatactttttaacgatatgccttaactgacttaatcaacactaattcgtgattaaatcgaaagtcaacataaaattgaggattgaaatcactaaatcaaaacttatgctttaaaccaataaaaactaatgatttagatgacatttttgattttttccttttttttaaccatttttcaaaatctttaaattaaaaaacttctctatcaatctccagttttaccgaattgaaaaaaatacaatctataaatttcttcttaaaccaattacccatttcaagggtcagagttcctaaacatgttggatccattttgttg

SEQ ID NO: 2313 - DNA, 537 bp, Arabidopsis thaliana landsberg
  unsure (1)..(537): unsure at all n locations
aagggcatgtagatcacaacctatttatacaagtatttggccagaacaaaccataagcatgcgggacgntacttacctgcattgacgacatatgcttttgccatgtgtcctccattgacttcattcttgtttcgttctctaaccatctttcctcaaatcgttgcaactcctcctgcaatgcagtgttttcatcttccttctgcattatagctgcttcgactttcagaacccggctctggagatcagcaagaacacaaggttggacctcaaactgctctgaaagaagttcctaaacaagagagataataagtttcagcagcggataactcagagacgcatacatcaggcaaaaatactaccttgtcttcggaaaccctctttgttgactttcttctcgtttttttcttctcattgcgagggttgttcttctgttgcgtactattttaagagtttacgagccagccatttgcgtaccactacagataagaagaagagcttgaaattcttattccagatagaataacaattcatgatgcc

SEQ ID NO: 2314 - DNA, 2743 bp, Arabidopsis thaliana landsberg
aaaaaaaataatctcttcacgtttttagaactcaagaagactaatttaggtgtgattttgttgctctcgtctaacgtaatttgaagtaagttctagagacctaaatcttatggttaagtttgaggtatttgtatataggctgtttatatttgacatggaatttgagatatgagctgaaatagtggcataatttaacatataattagtttgattcacatatatctccttgattattctttgaatttacagaatttaggtgatgttcttgatgctcacatttcttttccctttgataaatatttcaattgccttggatgttgtagactttccacttagtaaacatgacaagaacaacagtaccaacaacaagaaagggaagcaaaagagaaccagcaaaaccaaagaaaacgattatggctagcagatccaaagtaaaagcaaaggcgaaagcacaacctgaattacctccacaacaagaactgccaaagaaagaatggggcacaaagatggttaaaggcgtcaactatagagctgcgtgtcaaggagctttagtcgtatccactctctattccgatgatttcactcttgacgcgttgggaatttgcgatgatgtggcctggctcttggggattacgaaagttcattttgttgaagtacggagcttatgagaagcttactaaggagtttcttggaacagtcagaattgcttttgaggatgtcaagtcaccgaaaaccgcgatattatattttcgcattggtgacacagagtactctatcacgattcgagatctttgcaagcctttggtttcagtaataaggacaagattcggttcacacactgcaaaagtacttgctctaaatggacaaaatttgcatatgatacctacgaaggtggttctaaagcggcacaaatcaagcatcatgctttgcgttatgcccttcgaatgttagccaacactatgttttttggcgtagatactatcacaatcaaagaaggtgagttctatatcatgatggcaccattcatcaacgacccgtagaaggtaaaccttggagcacttctcacttgtgagttggtagaatataagcattatgcttacaaaaaaagggacacgtgagctgtttttggcattggtggagctgatctgtaatattggaggcttgtgggattgatctgaaagattgatcttgctttccttgggcgtaagcactacttgggaggatgggttgataaccctttacaacttgcttaccgcttcacagcatcttatgaaaatgagcaaatatctttgttatccagccagcatcttccatcgattaagtcgaacagtacaccatttccgccttcagaaagttccttctatgtagctactagcactagaccgctaagcaaatattacacaaagaagcgaaagtcaatgcaaattgacaccaagtagctctccagtgagaacccttctatctatccaccatttcaccaacctgtaaatgctccactgcgcaccgagacggacaagtggttctactcttctatcagtagggtggagaacaaccaagcacgccttgagaggaaactagcatgtcagggtttgatcatcactaaactgacgcgcgccgtgaagaagtacgctcctccacatattttctagcattcaaccaaggaaaaaatccgcgccaacaccattctgacggggatttaagcgatacgagtctcaaccttgcttctagtctcaagttgcatgaccttgacacaaatgatatcactagtgaaccactagctccagctacgccagcaactcctaatgacgacgagtcggcttcctctgatgacgagttttagctaaagaatcactatcatgatcatctctaatatattaaaaattatggatcgcataaacgtgatataacacatataattattggttgttttaaaaaacagagaattatggatgatttatcttacatatttttggaaacaaatgttaagagggaagcgagaacaaagaacaaatctatctctttttttttgtcaaacaagatcttcattcattcaatcctcaaaagagggaggttcatacacaaagacataagataatacaatgaaattaaagataggggcttcatgagtttttcaaagagatgtgtacttttaaaaaaagcttacaaggattgaaagattcgaccatgaagtcgggcttggcgaaatccttgcaaacaatgcatccgagcttttgatcatgtgctccacggaggaggatgttgggttggtgaggttgaaaaggaaacggtaaccaactctaaaagacatggtcataatgccgtacttttccaaacaaacagaaggttgcaaattatccaagcaaaagattaatacatgactgaccttgataattggtgtatgggtagatagagagttgtagaggcttcggtaacacctactccgtagaaatagggtcataatgccggtactcttaactctaaaaagcaaatgactatggttgggtaaactagtctcggaaagggtccaaaggaaaccaagcaaatgactatggttgggtaaattagcgtggcgtccataaccagccatatcagagacaaagggtgctaaagggagggaacctgacaggatattagcgatgcttcacgcgggcagcaacaatataggacccatcccacgagaaactacttccaaactacttgaaatcagacaaggacaatcacgcaaacggaccacacgataaga

SEQ ID NO: 2315 - DNA, 568 bp, Arabidopsis thaliana landsberg
gaattactactttagaaaaaaatcacgggacgggtaaagaaattatagaacgggttttattttggaattgagttatatggtggatgtatttgaatcaatatttataaaattttaaaatattattaatatgctgttttaataggaattacaacttcaatttttaacaattgtttcatagattcgaggtatacccttacttaataacaattataaactgtaaaatataaatatttataaaaataaatttgcaaattttaatatatattacttttaaaaaataaatcgatccgcgttatactgcgggttaaaatctagtaactgctttattactgtagtcaacacctaatccaaattcattacgttctatactataaattaaacaagcaagactaaaatctttctgtatgataaaatcatatgagctttaaattcttttaatgggccataagcccataaataaattcgtgtttctttttttcctcaactgttcttcagattccaattcctcttctctgtggctccttcttctacaattttcagatttgatagctctcaaaatcgttaaact

SEQ ID NO: 2316 - DNA, 411 bp, Arabidopsis thaliana landsberg
gatgagatgaggacgatgggcagtgatgccttgctgctcagtaacaggaaacaacatgttgaggacccttgatcccaggactcacatagggcgacagatcctgtgcgggaggatagcgcaagcactagcagagatacatgcatctggaagaacctgagtggtctaaggacgagggatcgtgcatgtaagcttcggaccgagcactcgctgtgcgttcttttattggaactgaggcagaatgaattcactgatgacctatggcagaagtgaggctcactatggactaatcccattgaaaagaagtctttcgacatacctattaagtgagggacaagaagacatagaggtatccttcggaagagaacggacgatcttctccaggatgggggacaacttagcagaatgaatatc

SEQ ID NO: 2317 - DNA, 400 bp, Arabidopsis thaliana landsberg
cctacacgtgcctagatgacatatgagttcaacctggattttggaccttaataccctacacagatatggggcatcctggataaactgaatgaaggacatgttctcgtgaaacgaaacattttgtatcagcttgatataaatttcgagaatatgaggatggagccttcacaaacaattgtgactatctgcgctgagttgaatagaattgctgacctagctccacctgtgggataaacgtgcctggagaagaagttagggaataaagtttggtaatgcctaccagatgagtatgctacacacaaagcctttatgagggtatcaggtaacacagatacacttaagtatgaaggactagttggaattcttaagtgtgaagaaatggaagctgctgaagatcaac

SEQ ID NO: 2318 - DNA, 2036 bp, Arabidopsis thaliana landsberg
agctaccgattgtgtttctggatttgtattggtgattgttttgataatcagtcggatcatttttctaattgagtatcgtatttggaattggagtttgggatatcaacaatatatcatatgcacttgagggattgctgcggtgtgtcttctcatgttcctccgggatttctagtatatatcttcgaggaagatggtggtgtcgagcataaacctctccacatcaatatatattctttctttgcttttctgtgatgtctctagtcctacaatgatatgttgtattgtatctgtgcgttagcaaatgctttgttttcgtaacttatgtttccttgcaagtacttaaacgacgaagcgtggaagattcgtgtcctatgaatggtctgaattaaaactgtttttgcgatatctggttaatctttaatctttatacaaaaaaaagtctgaattgtgacaaataagcattggatcacaaagattgtacatttgatatatatatataaaaacataaaataaacacaattattaagcatagatcacagatttagactaaccattgaacgtagtgagatttatattaaaaaaatagcattgaacttattaagacacaactatgaaagtaattaatgtgatctttgccacaacattattatttagattacagtttaatacgttgcatactcatcacaagaagatcgagacatttaagagaacataggcatgatgtatcagtctcatccttgctcttcagaacaaaagcatctttgcatcgcaacgaacatatagtacaaaacggtcgagatgtatggttattggaaaccacttggaactcacgactagataaaagaaaactgtgccctggcctcatgtaaggtgatttaccgagtacgcagtcgatatgaagagtcgaacaacatttgtcacatgagtaaaaccacttccttggatcggttggtttttcgcatatctcacaccaataattaccgtagcgatatccactgtatcgtagatagagaggatgtttgtcgttcttgttgaagacctcttttggtaaagtagcacatttgaagcacaaaaagaaatcaagtttaacacaactcagtgagccgtacaccatttggtcacacgccgagcactcccgaggaaaaagtgagaggatgaataaggaatgcaaatgactatcatggttaaactcgtctgagattgaagcacaacgaacatccaacattacatttccgctctcgtacctaaacccgttgcttggtctttgacaagcaacacatgtgaaaaagcttttggaaagctcaagatcttctccaggtttgggattcgggtatagagtaaagtgattcttgtgtaactcatgcctttttgtccgaggaagattagcgcatgtttcatgaagaatgaaatcacaatgcgtgcatatatagcatgcatcgtagtagaatggaagaacgcatgcgtagcatctttggttttcgtcgcgaataagaacatcttgataaataaatcttaatatatgttcatgactaaagtgttttataactttgtcatcaatcacctcaaatggcgctatatcctcggttttgttatctccctcttcttcgggtattccatcaagttctttcccatcccatacatcatcccttattgcgcacttggaatggactgcataatgacaaaccgagcaagaatacgctccatattggttattgataattttatggcaaactccgcatatccactcctccggtctaagaatatcgacatgataaatacggtgatcatgacgattaatacttataacacgaggtaaatcaatgcaatctctatgaatgatgaagcaacattgaagacatgtgcaaggatatgaggaattatctacagagccgcaagcatcacaagtgaaagagacagaatcgatgggcataagggaaagcgggtgcttgtgggatgttgtcttgtagataagtaatggcctcttcagacaagccatacacacctcgaacatacaacgtgaacaattgtagaacata

SEQ ID NO: 2319 - DNA, 579 bp, Arabidopsis thaliana landsberg
agtgatatccccagtgggtttaattcgatgcctttgatccctccgagaccattggagaggtctttttttggtggggagtgtgctgattggtcaaagtctaatccttttgtgaagaaggaatcgagctgcgaaagggaaggtgtcggagagagagaagctatggatgatctcttctcagcatatatgaatcttgaaaacattgatgtgttgaactcctctgaagctgatgatagcaagaacggtaatgagaatagggatgatatggagagcagcagagcaagcgggaccaagactaacggtagtgatacggaaggagagagcagcagtgtcaatgagagtgccaataataatatgaattcttctggtgaaaagagagagagcgtgaagagaagagcggctggaggagatattgctcctaccaccagacattacaggagtgtttcagtggacagctgtttcatggagaagttgtcttttggtgatgaatctctaaagcccgctccttctcctggatctatgtcaaggaaagtgtcccctaccaattctgatgatgggaactcgggtgctgcttttagcatc

SEQ ID NO: 2320 - DNA, 457 bp, Arabidopsis thaliana landsberg
  unsure (1)..(457): unsure at all n locations
gagaaatttttaaaaaatgtaaattaactaatagtataattattttttttctgtcaccaagaaataatntattagcagagttcatcaaattaattagtgactcattcccaattcgaatatgttggttgttcgaccaaaaaggtaaatttacaaagcctttaacacaatctcaaaaacagagtctactacatttgaaattgtcacaattacaattcttcggcgaatccaacgtttcctgcacaattcttcagtatattgacggnnnnnnnnnnnnnnnnnnnnnnnnnnnnnnnnaatttgtaacctaactacttattgtctacccaattcnnnaaagctacgtttccgcacagttgtaaaatcacaattcctttctgtatacaacgatcctaacgacttcaacagagacacgttactattgcaatccttttttcggcgccgggaactgaattagaat

SEQ ID NO: 2321 - DNA, 526 bp, Arabidopsis thaliana landsberg
ctctcgagaccttgactggagctttgttccaacgtcctcctcttatctctgctgttaagcgtcagctccgtatccgtaccatccacgaatccaagttgatcgagtttgacaatgatcgtcatttggctgtcttctgggttgcctgcgaggctggaacatacatgcgtacaatgtgcgtgcatatgggtttgttgctcggtgttggaggacacatgcaggaacttcgtcgtgtgcgctctggacatatgggagaggaagatgatattgtcacaatgcacgatgttctggatgctcagtggatgtatgacaacaccaaggatgaatcatacctgcgcaaggttgttcgccctcttgagactctcttgaccacttacaagcgtatcgttgtcaaggacagtgctgtcaacgccatctgctaccgagccaaggtgatgatcccaggtctacttcgctacgagtctggcattgaggtcaacgaggaagttgttctcatgaccaccaagggagaggctatcgcacttggaat

SEQ ID NO: 2322 - DNA, 1631 bp, Arabidopsis thaliana landsberg
aaaactgactgattcttattttggttatgaaaaaaaatattgtaataaaattttttatggatagatacatttttcaatattaagaaaaaatgatattttcccaacaaaaaaaaactggtcaacaagagtaggattcaagctaattttgttttcctcaaaataatatccattttgtagaaagtaaaaggacaacataaataaaggaaatgaaagttgtaagggcataaatgttatttacaaagtcaaagagactgaaaaactttgaataaagctcgataaacacggactctaattcattcaatattccttaccttcttctttcctttatatttaaaaaccttcttcttctctctctgtacatcgtcacaacaaaaaaaaaacagaaggagaagaaacaaaaacaataatctcagcaaaaacaaatctctactcatcgaaatcgaaatcgaaatcaaaatatagaaacgatgtcttgctccgtcgccgtatgtaattctccggtgttttcaccgtcgtcttctctattctgcaacaaatcttcgattctctcgtcaccgcaagaatctctttctctaacgctttctcatcgcaaacctcagacctcttctccttcctctccatccaccactgtttcttctcctaaatctccatttcgtctccgtttccagaaacctccgtccggattcgctcctggtccattatcttttggatctgaatctgtttctgcatcctctcctccgggaggtgttttaaagaggaaacgacctacaaggcttgatataccgattggtgttgctggatttgtagctccgatttcttcatcggccgctgtggctgcgacgccgagagaggagtgtagagaggttgagagagaaggtgatggttattctgtttattgtaagagaggaagaagagaagctatggaggatcgtttctctgctatcaccaatcttcatggagatcgtaaacaggtaattttaaatttcaaattcatttttcagttttggtttagaattgaattgaattggtgattttgattcgattgattagcaattacagctcaaattagggtttatcatgtgagatctacattgattgggttaataagctatctaaaattagggttctttggggaaaattgaaattctgaatagaattagaagttttacagaatcatatgaaacaattgtgtgcttattgatgaatcgtgtattctaaacgttgttttgctttgtgataatttctcaggcgattttcggagtctatgatggtcatggaggagttaaagcggctgagtttgcagctaagaacttagataagaacattgtagaagaagtagttggtaagagagacgagtctgagatagctgaagcggtgaaacatggttacttggcaacagacgcgtcgtttcttaaggaggaagacgttaagggtggttcatgctgtgtcacggctctggttaacgaagggaaccttgttgtgtctaacgccggtgactgtcgtgctgttatgagtgtaggaggtgtagctaaggctttatcttctgatcaccgcccgtctagagacgatgaacggaaaagaattgaaaccacgggaggatatgttgatacggggatcctctagagtcgact

SEQ ID NO: 2323 - DNA, 411 bp, Arabidopsis thaliana landsberg
  unsure (1)..(411): unsure at all n locations
aaaaaaccacactatgggaaatctccgtttttcttatactttttctctatcgcttctcataagtacagcactgggtgaatcgatggagaaccttctctnnnnnnnnnnnnnnnnnnnnnnnnnnnnnnnnnnnnnnnnnnnnnnnnnnnnnnnnnnnnnnnnnnnnnnnnnnnnnnnnnnnnnnnnnnnnnnnnnnnnnnnnnnnnnnnnnnnnnnnnnnnnnnnnnnnnnnnnnnnnnnnnnnnnnnnnnnnnnnnnnnnnnnnnnnnnnnnnnnnnnnnnnnnnnnnnnnnnnnnnnnnnnnnnnnnnnnnnnnnnnnnnnnnnnnnnnnnnnnnnnnnnnnnnnnnnnnnnnnnnnnnnnnnnnnnnnnnnnnnnnnnnnnnnnnnnnnnnnnnnnnnnnnnnnnnnn

SEQ ID NO: 2324 - DNA, 1153 bp, Arabidopsis thaliana landsberg
acagatgctgcacgtcagtagcccagcggggctaaagtctcgtagcaaggatacctcgttccccataaatcgttcagctcaaagagtcgtatattctcttcgaatggaacctcatcgggtttgttcaacagctttgtctccttgcgctatgactctggctcatactcagtctcgatgtcctcatcaatcaactcatacctactcgactttgctctctttcctctagcgatttcagctcttctctgactacgtcgagctgctgagcgttctatttcttcacggaagctcttgtaagcatgttcttctctctctggtctagtggaccaagattcagcttcatccacaatatactctcgatccatagaagactcactactgtagttacgcatgttgatttcctgtaaacagatggaactcaaagagaaacgttaatacgttagttccaacgaaaccaaaaacactaaagcacacggtcgagtgagtaagtcgagtaataaccggtcgagagattttgttggttttggaaatcgaattcgtcttgcttatttgtgaaccgatcgagtgtatggttgagtaataaccggcgtcgttgatttaaagaagacttggtcagcgatcgagtgagcttgaaaaccgatgatggcgaagagaacttcactgtggtcgagtgaactccaggattggtgagaagaagacttcgcctggtaaggaggccgagtagcttctttctccttttctcttgtgaagcgatcgagtatatactcctcttcttctccgtggttgaatttggggaaccggtcgagtgattgaaacaaaacgattgaagatgatgaagcgatgagagtgaggtcgagtgatgaggaggttgttgttgagcgacaaagtaagagggttggatcgagtggtgtacttcgcgatcgagtggattgagagcagcttcgttctcctttctccgttgagtatgtcgagtgataaggcgatggagagatggcgtggtttggtcaagggtcggtgaggaagatggtaatcagagatcgagtgaagttgttgaagttggagagtgatgacttcagagcataagagaagacgatgtttttttcgatgagagatggcaccagcttggtccagtggattggagccgtccagtggtggc

SEQ ID NO: 2325 - DNA, 3375 bp, Arabidopsis thaliana landsberg
cagcgaagagacaagaagacattgtgggacccgccgctgatgcccatttcctccatgcaactgaccagaagacgaagaaggtatcctcttcttctcttcaccactcgacctcaacgctccttatccacaccactcgacctcaccttatcacttcactcgatcccatcgcccctctctccacaaatactcgacctcgccacttctcttcctcaaacactccaccatctctcaaacactcgaccaaacacgaactcgctcacactccgtctccactcgacttcccctcaatcactcgactttagcgccatcatcttccgtccaaagcaccactcgactgcttctctctcgcctcttcaccaccgtctcacgctgccactcgacctcttcaccaattgaccaagcagccgtttctcctctccaaggaaaacactcgaccgccgcttctctcatctctccagtcagcttttgttcttcatttactcgaccactacacaaccttcccttcctcacaactccactagacttcaccgaatccactcaatcaaactccactcttcacgcgaccagcacctccgcttctccccctccgattcaatcactcgaatcaccgctcctctaacaacacttctcgctcacagtcactcgacttcttctcacatcatctcatcaccaatccacgactctactctcatcattcactactcgaccttgccgtccgactcactcgaccgcagctcctgcataaccttgtcgttttcacaactctatctccatcacttcactcggtcctccttaaccactcgaccaattacctacaaaacgaaaaaagaaaaatttcaaaaccgggttactccaccagtttactcaacctgtttttggtttgtggtttgtgttcctggttttgttggaactaacgtattaacgtttatttttgagttaaatttgttttcaggtttcgtaatgagtaactacagtggagaatcctctatggaccctgactacaatgtggatgaagctgagtcctggtccgctagaccgagagagcaacatgtttaccagagtttcagggatgaatttgaacgctctacagcccgacataatcagagaagagctgaaatcgccagaggaaagagggcgatgtcaagtaggtatgagccgattgatgaggatatcgagattgagtatgagccagagtcatggcgcagggagacgaagctgctgaacaaactcgacgaggttacagtggaggagtatatcagattcttcgagatgaatgacttctgggggacaaggtatccgtgttatgagactttagcccagctgggattactggaggacgtgcagcatttgttcgagaagtgtcatctggagacactcatgtcttacccttaccctgcctatatggaggagacaatcgagtttctttccaccctgcaagtggagatgtatgaagcactcacagagtttaagctggataccatgggattagggttcttgacgttctcagtggatgaacaactttatcagctgtcgatcaagaagttggaagaactgtttggtttcccaagtggaaatggaaccaaacccaagtttgaaaggaaagagcttaaggatttgtgggctactattgggaacaatgtaccactaaactctgcgcggtccaagagcaaccaaatcaagagtcctgtgattcgctactttcagcgttcaattaccaatgttttgtactccagagagtctacaggcaccgtgtctaacacggacatggagatgatagattccgcacttacaggaattctccgccgtacaaagggaaagaatgtcctgagaggcaatctcaatgacgcgccaccagtaatgcctctgttgatccacctgtgtggatacaggaagtgggcgttgacaaacggcaagaagaaggtgagaggagcactatgcgtgggtggcgttgtgacgccaattctggaagcttgttgagtactgctcaaggaaccagagttagcaccgagaatgatggacttggatcatttgcgccgatgtgagttcttggagtatgacatggttgacgacttccaccgctacaggttcgaggattcatcgattagaatcgccaatattcttctcccctgcattgacactaataggattctcgagggaaggaacattgacttcaagcctgcgcttgaagatctttctttcgagggcagtccgccaaccgaagagatcagtcacacagaaggagctataacggaagatgttgatgtgacagttgaaatagatgaggcggagtttgacacgagcctgtatcatttcagtgagcatatacctccagcgagggaaatcaagagtttgagcgacgtcacaagaacaacagtaagctgcagaagtggtgcaagaaactggataagttacacgccaagtgcctcagggctatcaagtttcttaaggacaagcttagctgctcctcttccactacagctatcccgcaggacagctccctcaggacatgccttcgaggagatatgacgcgcccgagccaagtcggcgcaggcctgagcctagagagcaggagatcccgcatgtccctgcgaggcattcatcattcgagcctcgtgaatctgggaggaagaggaggaccacactcactcgatctagcagtaggagcggacgacttctgcagtctcgtagtttacgcgaccgcggtgctggccgcaacagaaggagagaggtcgagtttcctcagagcggtgctggccgccacagagctgatgaggtcgagtacccatctgctggagctgatacagaacaaggaggttcgtctatggcctgggagcaatcgcaggcagccattgacgagcaactacgttcattcttcgactgaggtaagcgcctcacttcaccattgtattataccgtctgttgtgatttgtttcttcctttcttgtttctgtgattggatttgtcctgagtactctcttccaagtttattcacacagtggactgtgtgatttaagtttgggggagggctcaggaagtgtgtgttgcattgtgtataattttgagtctgcattcatctaaggcatagaaaaaccgaaaaaaaaattttgaaaaatttcagaaaatgaatctacaaaaaaaaaaagaatgttcatgtagttgcatcacatttaggatcgagtctagagtgtttcatttaggattgttgcatatgcataggggataatgatgagatagccttgtaagcattttgattcaccggataaactcagtgccctcgttgctagttgtctgttgcatagtcaatgaatttgaaaaaaaaaaaaactgaaccatgcctagattgctctactcggggatcctctagctcaggcatgc

SEQ ID NO: 2326 - DNA, 559 bp, Arabidopsis thaliana landsberg
gcgtttaattatctagtgtaacttagaacctaaaccttcacaggttaaaatgttcccaccacttttggtttagtaattatatatcctagattatctacctgctttaagtactgaaaagggcaatcttatgtgttatgtaaacaaaatcctaaacttaaataactctaaatcgaaatctaaatttcatccggtccggtcagaccagaaagcatgagcagctaaaaccctatcaagaaggtcttgaggcacaggttcgcctctcctttgccttgctgatatctttgccgagtgaaccaacgttttccatttatcctgtttttggttatacacatataattttatttttttattctcagtaaaaattctgatttcatacatggcatttactactaaaaggtaccttgaggtcaacgtacgtacgatgatttacatggttaaatgcatgagactttacgtcgcgccacctaaatagaaacaatgtatatataagacacaactcagtattttaacaaaccagattattacaacaagaagtatatgagagatctcaagagcttga

SEQ ID NO: 2327 - DNA, 606 bp, Arabidopsis thaliana landsberg
ggaaagcagaaacagatatttaaatatatgaggacgcaaaaagaggaaaagtaacaaacgctaggcatgtggaacatgtgtttttagtaagcaggctcctaacaataggaatgtgaaatgtacatacaggaatatgcagaggagcgagaccataggcagtggttaaatttagatggtcaccaggcattttgaggaggctaagggctgaattcacattaagcaacgaacctttccgggtaggaaaacacagatatatgctagatccagaaagtgaggttttacgaggagtttgcaggatgatcattaggggtagaggagagactgggaatttcatatttgtagacggtaagaagtaccactaaaaccttgttagccacaaatgctgtgggcagaccaaaagtgtacaaagaaaaagactcggataaatgtgactagaggggcaagtaaaaggatttgtatagcccgtaacggaggttacgcaattcatcgttgatagaggacattttttatttggaaaggaggggaacaaatcaactaattttttgaagcaaaggctttgtgtacgcaaatctttacaattaattataagaacgccgagagtcctgt

SEQ ID NO: 2328 - DNA, 3234 bp, Arabidopsis thaliana landsberg
tactgtttgataattatgcaaaaaaattatactttgattcttatcttgagaatattttttgacttttcccaaaccgtgggaacaagattaatagaatcatacgacacagttagtatgtttcatggaacatgataccactaattaaataattaacttatacacacactgaaagaatatactgggtgagatcatcacttccacttacttaagatgtcattataagtctatatggaatctatagaacattactatttgttcatgcacatgtaaatttaatacagtaattaacgattttgggtttttaatataaatttcaggttagaaagcgtgaactttaagaaggtacgaagcatagccaaagttgtaggaacggtgatcacagtctccggagcacttctcatgactctctacaagggtccaatagttgactttatccgattcggcggtggaggaggaggaggtagtgatggtgcaggaggatcccacggtggtgcaggagcggcagcgatggacaaacactggattccgggaacacttatgctgttgggaagaacttttggttgggccggtttcttcatcctacaagtgagtaccaatcaatttacaatttccggttctcatataactaaccttttgtaagaaaaaacctaaccggttttgtcttcttatgtaaaacgcagtcgtttacactgaagcagtacccagctgagctgtcattaacgacgttaatatgtttaatgggaacgttagaaggaaccgctgtttcattggtaacggtacgtgacttgagtgcttggaaaatcggcttcgactctaatctcttcgccgctgcttactccgtaagtacaattaactaaatttaattttatatgattaatgatgataattcaaagtattaattaattaatgaacaaaactaatggtgattagggggtgatttgttcgggagtggcgtattacgtgcaaggagtagtaatgagagaaagaggaccagtttttgttgcgacatttaatccactttgtgtcgttataactgctgctcttggtgttgttgtcttgtctgaaagcattcatctcggaaggtatttattcttgttatctaaaattagtataaaatttttggacccttttttttttttgtcaaacaaactttgcattaacttaaagcctcaaaagaggtaggttcatacaagttggaaatgagataatacaaatacaagtaggataaaggttccatgagttttccaaagagatactcaaaatagagaatcttgtagtgtttgaaaagtcttttggagccatagtggattcgaccatggagatgagctccgcgaaatcctctaccaagcggtggtcatagacggctcgcgcaactaacaacgcatacgagcttgtggtgaaatgctccatgaaagaggtttcgagataagcaagactaaagaagcttcggtaaccaccactccttggaggtcactgtgtgcaatgcagctgctaaaattttatctgctattacttaattttataatcgcatattacttataattctcttttacttaattttatctgctaaaatttttggaccctattacttaattttatctgctaaaattttcagtgtgattggaacgctatttataatcgtgggcctatacactgttgtatggggtaaaggcaaagacaaaagaatgacggatgatgacgaagattgcaaaggacttccgattaaaagtccggttaaaccggtagataccggtaaaggcttagccgcagaactggagatgaaatcaaaggaaggtcaagaggcaaaggctactactactactcaagttgagatttgaggatgcttatgtactgttgacggaggaagacacaaatctgtctttctttctctgtatattaagtttatgttttttgctttccaaggttacagaaagattttggcacatcagatgtaatatgatgagatgattcaatcatcttgtagttttaactagaagtttttgtgagatatgcaacttcaaaaattatcaaagagatcaataacaatgttttggttctactcatcaagaatttcacataggagtttttaatgcgcggaaaataaacaattgttgttgaatcaagatgacaaagcaagggaaaaagaagcaatggagatgagaaatgtgataaagaagtagctaactgaggaggcagaggcggttgagatgctaccggctggaccattagcgggattacctggcaagataccaccaccaggaagcatagatgatcttggtgaagatgctatggatcctggaccatcaaaatctggtgaaggtgctggtgcatacattacatccctaggaacagtatctggtggagctagaagcggcgcaaattgttgaggtcctgcatttttaccattgcacttacatgagaccgaattctagcacatgatttcccttacaaagataacatggtttaaaaagaacttaccgggacatcgaggttgaagagacctggtcagcctataaaacgaaagagaaggaaatagtttcgaatcattagtaggggtatgttgataagaggagaagacaaagtgaatgtatttctacttacatggttaagatagtgccgttggctataccgttgtaatcacaagttgtaacattacagccagcgctagtctgctgcaccgtgatgttaccgagcatgaggttgctgtttctacactgcatacttgagcaagagacggctagggaagcaggctcacaatacaaactgcatcacatcacccacacacaacacaagtgagtcaaaatgcaatcagagatgaatttgattagtcatatcaaataataaagcttagatataattacttgcggctcccaagcgcacagctgcattgcacacagtgacctgcagctagagcatagctaccatttggaacaatcaatccgaaatccgaagcgtatctggggaactttgaagcacaagctgagagaaggtaaagatacagaaccaaacattaataatctgtaattgctcccttaccaaaagtaaactcagccaaaaaaataccacaaagagggaaacttttggtagctcaaactcattcaatgccaaaaacaataccttaatgagattcaaaacccagaaaacaatcaaccagcaatgaaagaaacaatcaaaagtccacaaagctacaccaaaaatcccaatttggcaaccaacaactaacaatagaaacta

SEQ ID NO: 2329 - DNA, 1434 bp, Arabidopsis thaliana landsberg
  unsure (1)..(1434): unsure at all n locations
tatagatcgagaaagagaggatatgtgaactgacccatgactccactagttacagcacgaacggcgcagttgttccaaacctcttgagctcggatctcctcgatggttggcatccggatcggttgaatctggtagagttctcatcagaagccgcggggggagaagaagcaccggttgttgtttcagcagcactcgaatcagccatttcaaaggttaagagagtaggatccgacaagggacaatgtcatcaaaagcttaaaagaaggggattgtacgaatcagatcaagcgtgttcgttcgcgcgcctgtgagataaaattaatcagggtttatcccgaggttctagggtttaagctacagctagctaccactttaggcccattagtctacattttgggcctgtacactcgagccttactaaggtccaatatatgtatccaattaggttttgaggatatcaagatgtgccacgtggcatattgcttttcgaaagaaaaaacgtctacctagttcctacatatgcatgccgcttcaaattccccctccatatatgctgctctaatctcttttcaaaacaaccaaagacagagatcagaaacatcaaaaatcaaagagcgaaaccagagccatggcttcatcgaacgctctttttcttttcccggaaactaaatcctctgttttaccagatccttctcgtttctttagcccagacctcctctcaaaccctctccctacaaattctttcttccaaaacnnnnnnnnnnnnnnnnnnnnnnnnnnnnnnnnnnntcatccttacctcatcaaatctgtggactcctctctctgtatctcatacccatctctgtttcacaactctgatttcttctacgaggtgtttaccgcagacatcatcatttccgggtcaaacggacccggaccgcgttcccggaaaactcatattatcttttcgttcagtgatcttgtcgttactcttgatttcccttcctctaatctcagatttttcctcgttagaggaagcccgtttataacttctctgtctccggtaactccatcactatctcaacgagccatggggtcagatctttgtccagtagctcatctactaagtggtcagacaagctcaccaacaaccagagatggctgatttacgcctcctcgcctattgatctgactaaacacggcgattcctcgattcattgccgtggtgggtttacgggtatagtacgnnnnnnnnnnnnnnnnnnnnnnnnnnnnnnnnnnnaatctacactcgaccgattcagttcttgttacccagtttccggtgacgctgactttacaaagccctttactttaaagtatatgtgggagaagagaggttctggagatctgctgatgctcgctcatcctcttcatctgaaacttttagcacgagacggtcgttcatgaaat

SEQ ID NO: 2330 - DNA, 476 bp, Arabidopsis thaliana landsberg
gagaaggttaataaggatgcatagataactctgaagatggaactcaaaaagggaaagtcgctcctacaaggccatcactacaccttaactccaaaaagaatcacaagtccgatcgagtttgatattcaaagacaaaacaaactcacaattgtaaactccattctttcccgagagaaacaatcaatagtactcatacaactgcaaatctaaaataaaaaaatattattcaacttccgtatcagttagttcgaataaaaaaattcatctaattcatcatctggtccaaactcttgttcttctatatcatcaagatcttatgattgaccctggttatatgttagtgactcgacttgcaaggaaccaacatgaacaattggatcatcactttcatgttgcattgcaataaaatctgaatctgaattgagtaatactttccctcttggttttatcacaagtactcactccattgatgatcc

SEQ ID NO: 2331 - DNA, 560 bp, Arabidopsis thaliana landsberg
  unsure (1)..(560): unsure at all n locations
tgaacctcttttaaataggtgataataatgtacacaaagcaactgttgcttggtctggaatattttcacaacaattggatcatgcatcatagacgatacttaggagtcaaattagataggtttgtctggttcttgcttaaatatagccaaatgtttacatacttaagaatcaaattagaaccaattcagccacaaaagtgaaatagagaataaaactatcaaaggtaggttgtctttaagacctgcaactacatttctcatcccaacctctcaattgattcatgtagggatataaataaatgctaaaaccaacatgaaatcctcatttaatttggagaaaagatatttaagtttttataatacgttaactctatgtacatacatttttaatgaaacttattctataaatgtaaaacaagaaaagtcgagtacttttatcgttttattggtatttttggagaaggtcccaaaatggagtaagaagtgaagagaatctccacggttctatatttttcgacaaatcaagaanatgacttaactatttgatatcttcttcacta

SEQ ID NO: 2332 - DNA, 6436 bp, Arabidopsis thaliana landsberg
agacacactgttgctgatatatatataaagtccaaagtatatactggaatcaaaactttaccagactgtttatttttttagttggcccatttgtgattgcttgaatgcttttaattcctctggatatcctcttgagaaggctcaggcatatgctgctttaagaaagtgagttttaccttttatctctcactgttggctcaataaacagcctatcttacattagtctttttggtgaaaattaaatgagtttggctattgaggtgtgatttttcaaacttgtgttattcaggccatttttagtgaatgaacttgatccgcaatatcttttttatgatcgccggaaggtgtatgaggtaagcattttagactgcaagatagctgtttctgtgcaaattcttcagagtgattcagcgttaacgaaaaataagaactacctaatttttccttttactaatcaaaataactacttatgtgcatctacagcatcttgagatgtatggcatcccagttcctaggtatgcttgtgtcaatagaaaggtaccaaatcaagaccttcattattttgtcgaggaagaagattttgttgaggtccatggtgaacgcttctggaagccatttgtggaaaagcctgtcaatggtgagcttgcctctggctatcctccttgttttatttatcttctgatttgcagtttttttttttaaaattattattggctaactattgacattctttatacgtgtttaggagatgaccatagtataatgatatactaccctagctcggcaggtggaggcatgaaagaattgtttcgcaaggtactgcatccttctgcagaacttctctgttctggatcgaactggttattctgatattgtcataattctgattagctccttttcttcctaatatatttcgcttgtccccatcttactacagattgggaaccgatcaagtgaatttcatcctgacgtcagaagggtaaggagagaaggctcttatatatacgaggagtttatggccaccggaggaactgatgtcaaggttctgattgtttcccttctacacatttttcgataaaaccattaccattcccatcttttggacaacataggcgtttgagaatattattgtacagttgttggtatcaagtgtcctcaacgtagtaggttgctatgttaatatcctatgtttttctactggcctatatattacagtatatacatgctgcatggctttccacctgctgatgtagcttttattgctgcttgtttctgtctggtgagcatgagttctcaactgacaatcttcctggtaaacacaggtctatacagtgggtcctgaatacgcacatgctgaagcaagaaagtcacctgttgttgatggtgttgttatgaggaatacagatgggaaggaagtaagtctttcaatcatttcccaacagttccatttagggaacctaacatacctagtttttaatgaaggaagggctatggtttcagtatctactgattataatgaaaagcatgagttgcttatgttttcatgaaggtttaaactgttaatgttttgattttgatcagtattttatttttggttaatatattgaacaggtgagatatccagtattgcttacacctgctgaaaagcaaatggctagagaagtttgcattgcatttaggcaagcggtatgttgtgaatccaatcctccggctctcattatgtcttgcagggccgtaatcccttataatggtacgttctgatttcgtgcaatgacgtagtaatttcttcaacatttttcacatttccaggtctgtgggtttgatcttctacgatctgagggctgttcatatgtttgtgatgtcaatggatggagttttgtgaagaactcatacaagtaagctagcatctgcatttttattttctttcttaaaatcatagttgtatttataggttaagtttctagaataaatgctgagatggtttttagactggcatgtttcgcctctttcttaactctctaaaagttgagtttcaattttaaagtattcacaaatctcttgcactgtaaggtattatgacgatgctgcgtgtgtgctaaggaaaatgtgtttggatgcaaaagctcctcatctctcatccactcttcctcccaccttgccatggaaggtcaatgaacctgtacaatctaatgaaggtctaactcgccagggaagtggcatcatcggcacttttgggcagtcagaagagctacgttgtgtcattgctgttgttcgacagtatgttgtagcatataatcacctgttcttcctatccttctctctgtttagtcaggatctgagaagtgttcaactttgttttacatgtcagtggcgatagaactcccaagcagaaagtgaaactaaaagttacagaggaaaaactattaaacctaatgttgaagtacaatggtggaaagccaagagctgaggtgagaggctcaagtctttatatcttcaagttcagcttgtcttgattaatttgcttatactgtgtcaatttctccccttttgcagaccaaacttaagagtgccgtccagttgcaagatctattagatgccacaagaatgttagttccccgtacaaggtaccaaaaacatgtcttaatagtaacatgtcttagtccaaatctttcgaaggggattttgtctatcccgttgaagttttcttagaaacaaaggagcatgcttcatttactactgatagaaatcgtgtttacagttgaaatctagtaagaaccttatggtcttccttttttatctttagaccaggtcgtgaaagtgatagtgatgcagaagaccttgaacatgctgagaagcttcggcaagttaaagcagtccttgaagaggttaggtgtcttgatatatttgttactttcccgcatgtcattgtagtgaatgtagtccttgggaagagtcacattataagagtcctcaatttatattcactgcctgccgctgttacagtcatatgttcttgtttttggatttacaatgatttgttgttaagatatatctgggacttttatacaggttctgtttggaattggctttttctccgtaatttctctctcatattagacctttgatatgcagggaggacatttctctggtatatacaggaaggttcaactgaagccgctgaagtgggttaaaataccaaaaagcgatggtgatggcgaagaagaaagaccagtagaggcccttatggttctgaaatatggcggtgttttaacacacgctggtagaaagcaggtatactaccattcagtatcagaaaataattgcaaaatttgagatttctgttactaaatggagggtatcttatggtagcttatccaacacaagcgcaggcagttggtgtattcttgtctaatttttttgatgtatgcttcatctgcaggcagaagaacttggtagatactttcgaaacaatatgtatccaggtaagggaacttgatctacttatatttgttactttccacaggagtttagtgtactcgtgacgatcagtatattttctaagtatctcacgatgaaatggcatgcaggtgaagggactggtttgcttcgtctccatagtacgtaccgtcatgaccttaaaatttacagctctgacgagggacgtgttcaggtacagatttacgcttttagtagtgaagatgagcatatgatattcaattgttgaacatatactgcaagctttactactcctcactgtttgcaccaaaatatgtgaaagagctcatcgcatagaaaaatgtaaactgatttgcactgttgacagatgtctgcagcggcttttgctaaaggcctgcttgacctagaaggacagctgacgccaatcctggtttgtccttttctctcatgagaactcttggtggttggtaaggtcatatggtcactaatttcttttcttttttttctctaggtttctttggttagcaaggactcttccatgttggatggtcttgataatgccagcattgaaatggaagcaggctaaggtttgtctctctgtttagtacatcatgattgtggctccagcaaatatgagacgaatgtaaggatgtttaggtgctatttaaaagcatcaaccaatagtcagtagtgacattcataacgttctaaattggatctatctctaatacgccgaaagttttctttctaaattgactaaatagaggcctttccaatgcacttactcatcgaatgtttgaactaatggtttttcatgcatggcttagatggttgaatttcatttgggaaaagaagggtgaattatattcccatatgtacagtaacaaccatgtgtaatattttacagctctgaattgctttcccaacttgcctgcaggctcaactgaatgagatcataaccgccggctcaaagatggtacatgatcacgtctcttctgaattaccttggatgactgatggggctggacttcctcctcacgctgatgagcacctacctgaattggtacgcccatgttttttcgacctttactttagtctattagcatcatggaacccggatagtgggctttctatctgttttatgaattgtatatatgctacaagccatcatcactaccgtttgcattttttagctgcatattttttccattgttaaatagtattctttgttaaaatggaatgtcaagtgttttaactacttggcgcaagaaaaaggtttactggagagcacaaaataacgttacttctctgtttacttcttaaataaataggtaaaattagctaaaaaggtgactgaacaagtaaggctacttgcacaagatgaacacgagaatctcgctgagcctagcgcttatgatgtagtccctccatatgatcaagccaaggcccttggcaagtcaaacattgacgttggtcggattgctgccggattaccttgtggtagtgaagggttccttttgatgtttgcccggtggagaaaactcgaaagggatctctacaacgaaagaagagagtaagtaaatggccatatgctctcttattctctgtttgagttttagaaatggcactgatcgttggaattgaatgcaggcggtttgacattacgcagattcctgatgtttacgattcatgcaagtaagctatgtgtttaagtctattatgttgatgatttagtgtgtatctagattgatccttgctttagtttctccattcttaatatatcgtgaatgtgttgtcaacaccaggtatgacctgttacataattctcatctcgatctaaaaggactagatgaactcttcaaagtagcgcaggtatgagctgaataaatagctgtagtatctcttccactatttgaaatttcgatggtatttccagttgtcttgctcagacagttttactttaccactactagccaatgcgtcctagatttccagatttaaactgttccattttttattgtacatctccgttttgcatttcgatcgtggactgtgttgattagggccagttatgtgttatgtggttgcagttgcttgcagatggtgtaatcccaaatgagtatgggatcaatccacagcaaaagctcaaaatcggttcaaaggtgtgtgttctcagcttggccttctaagttccacaatagcatctgacttttcctctcttggaatttccctgagggtccagggttttctcagatgatctcacagcttaccattttttttatttttttttgttttctaaataaagattgcacggcgcctgctgggtaaaatccttattgacttgaggaacactcgagaagaggccatgagtgttgctgaattgaagaacagtcaagatcaagtctcagtgtcattgtattcgtcaagaaaggaggatagatatagtcaaccaaaacttttcgttaaaagcgatgagttgagacggcctagcactggagagaataaagaagaagatgatgataaagaaaccaaatacagactagatccaaagtaaccgaaaactctcttttagattataagtggcatcatatatcttcatcatctttcttaatatcatctttttattgtgttccattttaggtatgcaaatgtcatgacgcctgaacgtcatgtgaggacacgtctttacttcacatctgtgagtaccttcttccatttctgatctctttcttacaaattatttatgtccagctacatgcaagcatccggctggcagaaatggaaaaaagtctttttgacattttagtgccactacaaggctcttcgaactcttagaattttagaatgtggtttatgactagatcaatgcaactagctttataggcagtagtgaagcctgtggaaatcatacctgacttttcttctatgaaacgattgacaggaatcacatattcactctctgatgaacgttctacggtat

SEQ ID NO: 2333 - DNA, 576 bp, Arabidopsis thaliana landsberg
gccgacgtggatctccttgaggctcgacgcggcggcagagtcatggaagtagcgtctcgaatttctgatccggatcctaatctcttcgaagacaacaagtaggttttggatccgcctgagagtttctctgaagctttgtttattggtagagaagtgtttcgacttgaatgtgagaatgtcgccggcgagttgaatcagtgagtccaatagggtgactatggagattgattcggatggttccacagtcggaaatgtcaagatccgacgaccagacccggttttcgtatggatcatgctgctatgactttgtagattaaagtttgttttctacgatatattggtgtttgtttcgagtaagacggcgacatggaaggtgggaaatatataaagagttgacaaaggtttcaactttaattagagcgcgtggtggtgtatcattggacaatgttacttggaaaccctgaccactgacagagtgccacgtgagatccgtcgaaaacgaggaaaagaggttgcttcgtagatcgtagtggagtgtgcgaagatccacgttgtcatgaaagtacgtgcatggag

SEQ ID NO: 2334 - DNA, 400 bp, Arabidopsis thaliana landsberg
  unsure (1)..(400): unsure at all n locations
acaagctaaagcattaattctttatcctatctaagagcaagtattacagaaagcaagnngaacaagcaagaagcgagctgaagaagaaacgccaaanctaaagaacagagaagcagcagaaacacccactataagcctatttgtccaggaacaacccaaacttaaaggaaaatgatttggaagcctctccgaagatgttcatcgaaaacgaagaagatctattggacattggattttatagttgaattttacttgaattatattggaacattcgataacctactcgagactaaaacgtaaggaatagctatctaagagaaagacaacaggtttttgcgtaccgaatgacatcacaatcaccaaagacacctactgaaaccccattaatatccagctcata

SEQ ID NO: 2335 - DNA, 3880 bp, Arabidopsis thaliana landsberg
  unsure (1)..(3880): unsure at all n locations
cgcgacttaacctcgactgggcacaggagtgtcacagatcctaaagcattagtctctcttccgattcttccatgtgaggataagtttttcgtgagacttccatgttttgacttcgtgtggagtggcaaccagagccgtcgtgtcactgacattgtctctgcaattatggctaacaatcctggacgaccaattccaaccaataaggttttttgtcatgattatgtctcttcatcatcttccatagtctctaatgtacgaaaatctgaatagttatgtttctggtgtggtttggtctctttcaggttcaatcatttacaaagcctgaggaagtagatgcatggtttatgtcacatccatcgcaagtaacaggggctttgcattttgtggaaaagaatgctacagtgatcagctatggaattcaaacaaactcttcatcggagaaaaaacgtggtcggcgtgaagatcctacgtttaagttccttgttcctcttcaaattgctgcagagcgtgaaatcgcaaggtctttaattggaggtactttatattcttgaatcttaatttgtgttaggaagatttttgtagcagtgtgtatgtatacatatgtgggtgcttcttataacatggaataataagtcaagtccttatacattttcagatccaaagtttagttgggattttggatttaaggaatttgcgcgtccagcgattggtggtgaagtgatcatttctgcattttatcttatgggaccagtgttctttcttgctttctccatgtttggttttgttctccaactcgggtctgtggttaccgagaaagagctaaaacttcgcgaggttttataataatctctgttcttgttttttggtagcctgaggttttgcgtattggatcattgttttgtttctttgttgctcaacaggcaatgacaacgatgggtgtttatgaatctgcatattggttgtcatggctcatatgggaaggaatccttacctttgtctcctcactcttcttggtcctctttggaatgatgttccagtttgagtttttcttgaagaacagttttgttcttgtcttcctacttttctttctttttcagtttaatatggtaaaaaacttcattttcaaattatgtactctgctttcttcaaagatattatttgtgtatcatttaagttattatatatttacttgtgttgctagattggcctagcattcgcgctatcatctatcattagcaaatcatcttcggcaacaactgttggtttccttgtgtttctggttggttttataacacaggtttggcctctcttgctaacatatatagtagctgaaattttggttcttatttaaatcttggactcttacgatttctacttcttattgcagattgtaacaactgctggattcccttattcaagcgcatattcgattggtagccgtgtcatttggtcactctttccaccgaataccttttctgcgggtctgcagctgcttcttgaagcgacatcatctcccggagactctggaatcagttggagtgaaagagcaatatgtgcagggggcgagagcacttgcgttattacaactgtatgccaacctttctgagatagattttggatctaatagttgtgtaggtatcattctctgacaaaactgtgtttttggcagaataaaatctacatatggctcgtgggaacgttctttttctggtttgtattggctctctactttgacaacatcatccccaatgcatccggtgtgagaaaatcgatcttctactttctaaaacctagttattggactggcaaagaaggcaacaaagtggaaggtatttttctctattgcactaaataaaactaattataagttaaaacatgtttttctacacttttgaagaagggagcatctgtagctgtattggttcagttccacctgtggatcacattaccccagatgacgaagatgtccttgaagaggaaactttagttaaacaacattcaatggagggtttagttgatcccaacgttgcagttcaaatacgtggtcttgcaaagacttatcctgggacgacgaagtttggatgctgcaaatgcaagaaaacttccccttttcatgctctgaaggtatttcttctaagaaaacaaaagtgaaaaactgatcttcttacgttggttaatttgcaatttcgcatggtagtgtctgttctttaccaaagatgttcaccaaatgataatcttaccattgatctatatctaggacttggatgaaattttactgattatttctccatgtggttttacgtgtttcatttattcagggcttgtggatgaatattgccaaagatcaattattctgtcttcttggacccaatggtgcagggaaaacaactactatcaattgtttgacaggcttatttccagttactggtggtgatggtaagataaagcttgcacttttttcttgtttctgtttcatagaagctagtgtcctaagccttttcaccatactaatatctctnnnnnnnnnnnnnnnnnnactaatttatggaaattctataagaagctctgttggtatgtccaacatccgtaaaatgattggagtttgtcctcaggtattgacaattttcttccttcattgtcctcatcacacaaaacaaccttctaatcattatgctagcttaaaatggcttatgactctatcactctttttttacagcttgatattctttgggatgctttgcctagtgaagagcacctccacctctttgctagcatcaaagggttgccaccatctatcgatcaaatcggtaggccgactgaaatgtctcaaagtgcaaagaggtctgatgattttattgaactttccaatccatgcaacttatcttacaagtttcgtttctgttatagactgctgagaagttactggcggatgtaaaactgacaggagcggcgaaagttagagcaggaagttacagtggtggaatgaaacgtcgactcagtgttgcggtagcacttatcggcgatcccaagctggtcttcctagatgaaccggcatgtcaacttgctacattcttctttaaatatgtgtctatatataaaaacaattaattttaagatggttgtttatacatggattctagactactggcatggaccctatcacgaggagacatgtgtgggacattatacaagagtcaatagaaggtcgtgccatcatactaacgacgcattctatggaagaagctgatattttaagtgatcgaatagggatcatggctaagggtaggctccgctgcattggaacctcgatcaggttgaaatcccgctttggcacaggtttcattgctaacattagctttgttgaaagcaacaaccacaatggcgaagctggttcggattcacgcgagccagtgaagaaattctttaaagatgtgagtctgttttagcacccggtcactgtttccattttacaatgtagttaacttaatccaacacccttccgaactttgatattttcttgcagcatctcaaagtcaaaccaatagaagaaaacaaggccttcatgacttttgttatacctcacgacaaagagaatcttttgacagtaagcatttacacaaccttatgatatatagatttcactacctaccttaaaactaagcataagtgacaatgaaacagagctttttcgctgagcttcaagacagagaagaagaatttggaatctcagatatccaacttggtcttgctactcttgaagaagtctttttgaacatagcaagaaaagctgaactcgaaagcgctgcggttgatggaacaatggtcactctcgacttaacatctggttcttcagtcgaggtatataacttacatgtcatcg

SEQ ID NO: 2336 - DNA, 321 bp, Arabidopsis thaliana landsberg
ttagggtttagggttttgggttttgggtttaggttttagggtttttggtttaggttttagggttttggatttttattttagggtgtaggatttatgtttagggttgcaggttataaacactttcctactgaataacgacttgcaacaataccatacatctcttttgcataatctcttgacaacaccaactgcaagctcaacccctgtagaaagattagtaaaataaacacagaccctttttgaggagccgttgacaacaggcatcttttaggatgtcctcaccctattttaggacccacttactatagacaatgaaaactc

SEQ ID NO: 2337 - DNA, 1332 bp, Arabidopsis thaliana landsberg
acttgttctcgcaaacaacaaaataagaccaacacaacaagactcttcaaacaacagaatagattgtggctgcaaagtaacatctataatatcaaagactttcagaccaacacaacacgtcacaaaaaaaaaaaaaaagtgacattttctcaatctaatcaatctcacaaagatcattacccaactaaaccctaagaacaaaatacttaacttagatcctaagaacaaaacacataacaagactcttcaaacaaaagaatagattctcagatgcatccttaacatctataatatcaaagactttcagactttcagaccaacacaacacgagacacaacaaagaaacaattacgacattttctcaatctaatcaatctcacaaagctcattactcaactaaaccgacattgaacacaacatgggatcataaacaagagaagaagaagatcataccatgtcgtattcggtcgaggaatgggagagaggacggtgacgaacttatccctctccggcaacataagcagatcatttagggattgaagtgtgtcctcctggagatccggcgacagaggtggatattcttcgaagttgttgccttgagaggatgggtgactgtgagcccgagactcttgaactggagaaggcggagggtcttgctgagaaggcggagggtcttgttgaggagtctaaggaacctacagagtagtcgcggcttgagtcgctggattgttctgcacttctaaggaggcagtcctttgcacttcaggttgtcgactgccagagtgctggaacaactgtaaaggcggcagatagttttgaacatgagctgccgttgactgtaaaggaggaatggcggcttctgatgcatgcttctgtagctgaggagaccgttctgctgccggcgtgaaatcgtaatgagacggaagagaacgaggtcgtcgaccagccgtggatgtggaggctctctgagcaaggttaggactggttcgctttttttttcttcgcccaaacatcgtgtgaaggagagatctagatgagacagaggttcaaatcgaagaaatcgaagaagaagaagagattgagaggaaaacgaagaggaatcttcgatttgctagggtttcgaagaggaaatcgaataggacattgaagagagattgaggaagaagactgcggatgtttcgaaaagagaaagagatttttgttagggttttcgcagaacaaggtgaatggtttgggcctaaagggtttgggcctaaaacgttcagtttgtttcaacaggagcgcttaattgtccaaattagtccaaattttatgctcgaaattttggccaat

SEQ ID NO: 2338 - DNA, 1274 bp, Arabidopsis thaliana landsberg
acggtttgattcaattttcccattctgttttttttttgcatttttcacttcttgattagttggttaagttttaaacttgttattacagaacacgaatgcggaaggtgctcctatagttcctgtctcagcgcaactgaaatacaacatcgatgttttgtgtgagtacattgtcaagaagattccactccctgtgagggattttgtgtcacctccaagaatgattgtgattcgttcttttgatgtcaataaacctggctctgattatgatggtatgaaaggtggagttgcaggtgggagtatccttcaggtaaaacatactcaataccccgaaaaactaggataaatcgcggttgaatcaatgtaacttatgtctctctttgctttgtttgcagggtgttttgaaggtggggcatataatagagataagacctggaatcactagaaaagatgagaatggagacactaaatgcactcccatttacacgcgtataacttcattgtacgcggaacagaacgagcttcagtttgctgtcccgggaggtttgattggaattgggacaagcatggatcctacgcttacgcgtggtgataggttagttggtcaagtccttggtgaaataggtactctccctgatgtctatgttgaacttgaagtgagtttccagcttctgacacgtctcattggagtgaagacaaaggaaacagagaggcaaatgagagtgtcaaagctagtcaagggagagatactgatgttgaatatcggatcgatgtctacgggagctatggttattggagtaaagaaagatatggtgaaagttaatctgacactccctgtgtgcaccagcattggagagaaagtggctataagtcgccgtgtggataggcattggcgtttgatcggtcgcggtcagattgaggctggaaccaccatttttatcccttctcctccttctttggcatgattatatttgatgcattcacatataccaaacttgtagtctcattatatcttcagagtattcctaatctgtcaccaaaggagataactaaacttctatgtgcttatgctttttgtgtgaagtctaactagagtttgatcaattgcatcatcttgatttgttattaaaagttttatagtctatggatgttacagcttaattaactaattatcctacatagttcatttgagagaaagatacactctccattgttgaaacttgaaacttgaaataatgaaaaaacagaaagaaagacttgaagtcatggtctcattc

SEQ ID NO: 2339 - DNA, 573 bp, Arabidopsis thaliana landsberg
actaaacaacaatacagtgaagattaatttgtaaagatatagaaacgtagagatctttaaaaaggataatcagctaacagtgggatctagcgtgctcaggtttgtgagtgtactcataatcaagatgcacaaaagcccgttcgatctcctctagtagctcgagcttctcttgcagcgattctccaatgtcgtgagccacttgcagaggcatgtcagctgggagaacaatatcaacctccacaaaataatgagagccaaatgtgtatgccctcactgtgtcaatgtgcctaatggctttatggtggttccaacacaggtaagttagtttctgcagatactctggtctagctgatttcccaacaagagagttaacgttctccaagaccgtcattgaccatgtccgtatcgtgtataatgcaagctgcatgaattaagaaacaattttcagcaacgaggaaaaaaagacttgattttgttttcataaacttggaaacttacaatgatagctccaactggatcaatccaataatcaatgtaattggccaagattactgcaatgagtccaatgatgtt

SEQ ID NO: 2340 - DNA, 4232 bp, Arabidopsis thaliana landsberg
  unsure (1)..(4232): unsure at all n locations
tgccgcctccaaaacacacacaaaaactatgagtactctctccataacaaagaaagaatcatctagagggtttaattaaagatagaatcattacatattccaaccagactttaagataacgaagatcatccttgtaacgttcagagtgccaaaatttacgaacacattgctcatatatcactaacagtcctgaacattctcctcctggtggaaaagcctcttgtacccattttatacaccttccaaagaaaccaattaagaagctcagtttacaaattggtcacagcataaagattggttcaagaaaaatttcaatttttcaacaacccaatcaagaatgataaaaggaactcactctatccatggagataaagggtcatctccttcatactcatcaatggcttcaatcaaattcctaattcacaaaaacaacacaaaattagacaagaatcgagcgattagactaaaacccaagagcaaagatgtgagattgaaatcagtacctgcgtttctcgatgagattctttctcaattggtggtcagagtgagatttgagagcgtggttgagaataccatacattgcgacctctcttcaatggccggacgttctccttgaaaagctcccactcgtatccagtctcctgcttcgaattaagaaactctgcctctggatctgaaacctgaaccttcgtttcggctgccatcgtcgtttcttcgagcaaattttgaatatcagagagaatatagccgttagtttactcaatgagagagcttcgcaactttttgctttgatgtacgcatactcggagcgtatagacgcttttgatgggcctaacttagatgggccatgatttgatttcttaaacccattaagtggccatctaaaccgaattgtgtatactcctactacaaataatcgataagagaagaaaaatgacaatgagcgaaagtaaaatagtaaaagaaatgacagaatacacttcattatttcaattgactgaacaaaataacacaataatccagagaaaattatttttactgttttgttttcttctaaattagatggttttggtcttttggagaataacaatcaaagcaaaagataaaagagaagatgtactctttttttaccttctttaaataaattacgagcataattcactttttgacttggaagctaaaaaaaagttcatccacaaccacaagatgctctctgtctgtcggttcaacaagggatgatcacatacattgcgttacacgctaaacctagtgtgctcaattatgaattcctaaacaaaacgtactcaagattagaagttgtatacaaagtctgtttttccattgtaacaacttccaccgacaataaaacagtaacagtttattgaagaaaatgaaatgaagaaaacataataaaagaattgatatttatggtatccttcagtttgggaatgtgacacacatgatctcctttattgacgtttaagtttggaaaaaaaaacaagtctttaaatgcatgcaatcgtattcgcaactaatatacattttgcttgttattactaaagtctaaaactaaaagccttttgccgtacgtttaagaattccataactggaagaacaaatcatgtttttaattcaaatgtttaaaacaaagtctacattcaaaggaatttagaacacactttttttttttactttttgctgggaattcacaaactctttaacgagtctattcacatttcacctttccgtgcccaaactcattcgatttctctaaccgaaactaaatcatcaccaaagaaggtacaccgttacgccaacttgcccaaaggaccatgtgtccccaccatgctgccaattgggagccagcaatacataaaacagacttgatccaactttttacaagttagatgcagtgtctttttcgtaaatcataacagatccaagcccattctcgtataacctccaccacatcactcctcatatcatatgtgagacagccacgagtcttctaatttctacacgccgtgtcggcaaagcctctcgtcacttctctctgacgcttgtcgtcacttttgaatttttttaatttttaaataattgataaccgaaacggtgcgttttactcaccgtcgtcgggaaaaaaaacatgaggaaggaagttttgccgccggtgttatcaaccaccacagtatgtttcgagaagaaaccaataattgctacattactagctctctctctcgtcatgattgtctggaaccttcctccttactaccacaacctcatctccaccgctcgtccctgctccgccgtcaccaccaccaccaccaccaccttactctcctcatcgaacttcacttcggcggagaatttcaccacctctctctcaacgacaactgcagcagcttctcagaagtacgattcaactccctcagatccgaacaaacgcgttttccaaccgttcggaaacgcggcggcgttattcgtactaatgggagcttaccgcggcggtccaacgacgttttccgttatcggactcgcgtcgaaaccgatccacgtttacggaaaaccatggtacaagtgtgagtggatatctaacaatggaacttcgattcgagctaaagcacagaagattctaccagattggggatacggacgagtctacaccgtcgtcgtcgtcaattgcactttcaattcaaaccctaactccgataacaccggaggtaaactcattctcaacgcttactacaacgaatctcccaaactctttgaacgattgactacgttagaagaatcagctggaatctacgacgaatcgaaatactcgccgccgtatcagtacgattacctctattgtggctcgtcactgtacggtaacgtgnnnnnnnnnnnnnnnnnnnnnnnnnnnnnnnaccacgcttggttctttggtgacaaatcgcattttgttttccacgatgctggtggtgtgtcgccggaagttaggaaggttcttgagccgtggattcgagctgggagggtcacggttcagaatattcgggatcagtcgcagtaaggntagtactataatcagtttcttattgttaatgattgcttgcatcggtatcgatacgctgcgaattggaccttcttcttcgatgtcgatgagtatatctatttgccgcatggtaatacactcgaatccgtgctcgatgagttctcggttaacacgcagtttacgattgagcagaatccaatgtctagtgttctttgcataaacgactcttctcaagattatccaaggtactaaacttcaacctctaaaacacttataatgcaattcagaatcgaaaagtttggtcataggactttggaataatgttggatggcttatgagcattgttctgtatttagcttagatgatactattaggatcgaatctagaaattagcttccattttgattcaattcttgtttttgtttgggatatttcaggcaatggggatttgagaaattgttatttaaggattcaaggacgaagatacgacgtgatagaaaatatgcaatccaagcgaagaacgcatttgctacaggagttcatatgtctgaaaacattgtaggcaaaacactacacaagacagagacaaagattcgttattaccattaccacaacaccataactgtgcatgaggagctttgtagagagatgttaccaaattcagccaagaagaaggtgacattgtacaataagcttccgtatgtgtatgatgacaacatgaagaagctagtgaagacgattaaagagtttgagcagaaaaaacttgggacggatgtgaagaatttctcatgaccataatatagctgtaatctctctgataagcattttgtctataaaggtatagttgtttctacatcacatgtatcatttttcattctgttttgtcctcttttactatttcattaatgactttgatcaatatttttgaaaattacttgtgttttcttttgttatgtattgaacttaatagaaattagagttactcaagaccttggacatacaaaacatcgttggtttttattattttgtcgtaagacaataattgatttagctaaagattcttaaaatcattgactcaatgattcattcgataatagcacataattccaagctaattagttcttagtcattgtgattcagttcttaggcaagacataggtagcttctgatgtttctaacttaaatgggtcatacaagg

SEQ ID NO: 2341 - DNA, 606 bp, Arabidopsis thaliana landsberg
  unsure (1)..(606): unsure at all n locations
gtttaatcttcggttgcgtttcttatcttttttttttctcctaattttcatttacagtgattttatttcagctcattcctgattttcaattttctgatttcagcaaaaagtccttatctatttttttcatttatttaagacaacttgtttttaaaaaataggaatagaaaaataaaccgaaccgatatatttaactgaaacataaaactaaactaaatcaaattaaaaattagaaaataattgaatagatactaaattctttaaccaaaagaatcgaagctgaatcggtgccgaaccaaaatattttggtaaccaaaaatattcaaaatataattatattttcaaactaaataattaaaattttttgaaaaattatataaaatagtaaaaatattaaaaattaaccaaaaatattcacaaatattcaaaacaaattaaccgaatggatactaatttttttaaaaaaaaaacagaatcgaattaaaaccgaaccgaactattaaattttaaaaccaaaaaaattgataaccgaatagatacgaacggaaanccgataaataaccgaaacacatgactaaaaagaggtattttcctccataattaaag

SEQ ID NO: 2342 - DNA, 2644 bp, Arabidopsis thaliana landsberg
agcaataggtacgaaaacataatctacaatttaagtaacaaaacttatcaaaactaaagtcaaagtttttacactccagtttcttcttcatttctctcaatcatacacaggtaacacacaacacagtcacagacaaggaatttcaaataaagattgaaactttgaatttcaaaaacaatgaatttgaagagaaagatcctcacttaccccatgcaaccaaataactggtagatccaagagggaatgatttcacggagatgcatctacaacaaccaaattagagatcttctaatcaaaaccctgattccaggtaagagaagtctcacaatcctgcaattttcaaaaaaacccaaatccattgaatcactgaatcgaaaaaacacactttttttttatttctgatgatgagaaaaaataacctcaaaaatggcatattcggggaaaattaggattagggttttgttccgccacctcccctgcagctaaatctgaagcctttatctttgtttcttcgtcttcgtcttcttcgttgttcgttttctttttttatttcttcttcttcgtttagttatgcgtgtgtggtggttctgcaactccccaaaaagaaggaatagaaatattccgggttttttttttcttttacaaagaaaattgtttgttacttttattttattgttttccaataaattgtactttaatgataaataaatataagttaggaccattttaggaatttaaaaaaaaattaataatctgaccttttttataatattttgttttcaaccaaaaataattaaaaatcagtaaagctaattttgaagaatttttacatatgtaacatgatgcagttcagtacgaacttttcgtaccaatttatccgttttaatatttgcagtacaaaaaattaaaaattaataaaaatttataaattctttcttatcgttatgaaactctttcaaatatacacaataaatatcgatcattctgtaaataataatattgaaaaaataaatatccaaatattaaatttcgttattgaaaatattttttaagattaaagcattgtgactttaattgattccaaaaatttcttctttttactatttctttaataatacagaaaagaaagatattcgctcatgtggcagccattgtgattaggcacacacactttagtttctgtcaacgcacatttttatttccttttgttactctcacgatttttaaagctaagtaatcctctcgagtgggagagaggacgtttattttgttttgatccctttttggttggttggtggattggatagtaaaacaaattgagagttatagatatctaaaattcgttagacgttaatcagattaagatttagcatctacccaactaattggatattttgtattctagtaaacttgtttctataacaattaatgtgggatacgagctttgctctccatgcccaattcggcccaaacacaaatagaacaagtcaagaaagctactaacaaggaagaacggcccatcagaatgacggcccatcagaatgactgctcggcccatcacagctcggcccatcacggcttggcccagcccgataaattcagaagggcaaaacggagaaatcgcaagagagactaagagaaccctagatcaggttcttgcctataaataagaggagacactactaagaagagggatccagaacctaagtcaccactcagagaatttaagagagaattgttgcctagctctttatctcttattttctagttttccgttatgtattttctggttttccgaccattaatatcgattttccgacctgtactttcggttctccgttctgtacttacgattttccgttctgttaattactgtctttccgttcgtcattaataaagaagttactccgttctccccaaaccccttagttatttattgttacaacctcggtacaaacaattggcgcccactgtggggctaggcagagttttcttctaatattaaggagtcagaaccagcgcgcctcgtgccgcaccaccagctcgaccaacgatgccaccaccagctcggccaacgacaccacctccagccgcagctcctgtcgcagttccagccgcaactcctatcgcagcttccgacgtaactcttgtcacagctcctgctgaacccggagaaacaactccacgaaaaaccaatctcgacgaagtcatccgatcttacctcgaccgactcgacttacaggacgcaagaactgccgaacgcatcaacgcgattgtcgctgcccaaaaggcctcgcagaatcagatctagcaactctagtcctctgcagctcgcgccggtcgacaacttagcgatgccgaaacagtaccgccccagcgaactccaatcaaagaaagaccggcgaaccgacgcaacaggcatgcttccatcatcgttgggtctatcgacgagcacacccgtgaaaatgcgccgaaccgtgacaaccagccaaacatcgacactcggacacgccgaatagaagatgacgatatcggtgcgcgcgatcgagagctctaaaaattacaaattactatgaaggatataactctgctctgcaccaggagtagaccttttcttcaactggatcaactaacatgattgcag

SEQ ID NO: 2343 - DNA, 2936 bp, Arabidopsis thaliana landsberg
  unsure (1)..(2936): unsure at all n locations
actgcatcccaattataataagagttatgtgggtgtgtttattaatgattcacatgctatcctcccctctagctctactattgtgcatggtagacgtaggcctagaaaaatcatgttgtgcatcatgtgcctaggaaaatgtgtaataaacccactactatttttcatgcttgcaacacttcgtttgtactttcatgtaagaatgaaaaagtagttgctaggaagatgggatccaaatgcaagggagacaagacttgcatttgggtccctaaggaaattgtgactaaccttgtaggacccaacaagagttgggtacctaaaacccaagcctaaatttgccttgtaggtttatgcatccgggggttcaagctggataattgatagcgggtgcacaaaccacatgataggggagaagaagatgttctcctcatatgagaaaaaccaagatccccaacgagctatcacattcggggatggaaatcaaggtttggtcaaaggattgggtaaaattgctatatcacctgaccatactatttccaatgtttttcttgtagattctttagattacaatttgctttccgtatcccaattatgtcaaatgggctacaactgtctatttactgatgtaggtgttactgtctttagaagaaatgatgattcaatagcatttaagggagtgttagagggtcagctatacttggtagattttgatagagctgaactcgacacttgcttagttgctaagactaacttgggttggctctggcaccgccgactagcccatgttggaatgaagaatctttataagcttctaaagggagaacacattttaggactaacaaatgttaattttgtgaaagacaggatttgtagcgcatgccaagccgggaagcaagttgggacttatcatccacacaagaacatcatgacgaccgacaggccactggagctcctacacatggacctattcggcccgatcgcttacataagcatcggcgggagtaagtattgtctagttattgtggatgattattctcgcttcacttgggtgttctttttgcaggaaaaatctcatacccaagagaccttaaagggattcttgagatgggctcaaaatgagttcggcttaaggatcaagaaaattagaagcgacaacggaacggagttcaagaactctcaaattgaaggctttcttgaggatgagggcatcaagcatgagttctcttctccctacannnnnnnnnnnnnnnnnnnnnnggaagaatagaactctactagatatggcaattaccatgcttgatgagtacaagacaccggaccggttttgggccgaggcggtcaacaccgcttgctacgccatcaactggttatatctacaccgaatcctcaagaacacatcttatgaattcctcactggtaaaaagcccaatgtttcatattttagagtctttggtagcaaatgctttattcttgttaaaagaggtagaaaatctaaatttgctcctaaggctgtagaaggctttttacttggttatgactcaaacacaagggcatatagagtctttaacaagtccactggactagttgaagtttcttgtgacattgtgtttgatgagactaacggctctcaagtagagcaagttgatcttgatgagctagatgatgaagaggctccatgcatcgcgctaaggaacatgtccattggggatgtgtgtcctaaggaatccgaagagcctccaaatgcacaagatcaaccgtcctcctccacgcaagcatccccaccgactcaaaatgaggatgaagctcaagttggtgaagtagaagatcaagcaaatgagtcacctcaagatgacggcaatgatcaagggggagatgcaaatgatcaagacaaggaggatgaagaaccaaggccgccacacccaagagtccaccaagcaattcaacgagatcaccccgtcgacaccatcctcggcgacattcataagggggtaactactagatctcgtgttgcacatttttgtgaacattactcttttgtttcctctattgagccacacaggatagaggaagcacttcaagattcggattgggtggtggcgatgcaagaggagctcaacaacttcactagaaatgaggtatggcatttagttccacgtcctaaccaaaatgttgtaggaaccaaatgggtcttccgcaacaagcaagacgagcatggtgtggtgacaaggaacaaagctcgacttgtggccaagggatactcccaagttgaaggtttggatttcggtgaaacctatgcacccgtagctaggcttgagtcaattcgcatattattgccctatgctacttaccatggctttaagctttatcaaatggacgtgaaaagtgccttcctcaatggaccaatcaaggaagaggtctatgttgagcaacctcccggctttgaagacagtgagtaccctaaccatgtctataagctctctaaggcgctttatgggctcaagcaagccccaagagcatggtatgaatgccttagagatttccttattgataatggcttcaaagtcggcaaggccgatcctactttattcactaaaactcttgacaatgatttgtttgtatgccaaatttatgttgatgatatcatatttgggtctactaacgaatctacatgtgaagaatttagtaggatcatgacacagaaattcgagatgtcgatgatgggggagttaaagtattttctaggatttcaagtcaagcaactccaagtgggcactttcattagccaaacaaagtacactcaagacattgtgactaagtttggaatgaaggatgccaagcccatcaagacacccatgggaactaatgggcatctcgacctcgacacgggaggtaaatccgtcgatcaaaagttataccggtcgatgattggttcattg

SEQ ID NO: 2344 - DNA, 598 bp, Arabidopsis thaliana landsberg
  unsure (1)..(598): unsure at all n locations
gaactaatgctcaaatcagtagctatggttatgccagtctatgctatgtcatgttttaagctgtctttgggaatcatttcggaaatagaatctcttcttatgaacttctggtgggaaaatacagcaaatcatagaggtattccatggattgcttggaagagattacaatatacaaagaaggaaggaggtcttggctttcgtgacttggctgaattcaatgatgatatgcttgcgaaccaattatggcgtataatccactatccaaattctctctttgctcgtgtgacggacgcaagatacgttggggacatatccattctagatgcaaaagaaaagaaataccaatcatacggatgggcatctttgcttgccgggagagatgtgataaaaaaaaaaggaagcaggtttttagttggagagggatcttctattcgtttaaaacaggacaatatagttgcaacacatcctccacgaccacttactcttcttacgcctgattcanatgaaactctagagtctttaatatctacaatggngtcatnnnnnnnnnnnnnnnnnnnnnnnnnnncagtttaataagccccgtngatcataatta

SEQ ID NO: 2345 - DNA, 497 bp, Arabidopsis thaliana landsberg
aatgcgtagcatatctctttatttgtctaaattaataaactaatgactagaagcattaatgcgctactatgttccgaactaactctgttcccatatagggatcaatacgataaatctgtggttcttcaaacaaggctccaatctgagaactcagctgctctgcagagtccaaatcctttccaaatggtttctcaacaacaatcctagtccatccaccaagatcagctggaaacaatatacatttccaatgaagttattaccaaatattctctatctgataatgttaacaaaatctaacagtaaactcacatttgttagtgcaccatgccttgatcatcttgcttacaggagggtatacagacggaggaagtgcaagataaaacaatctcctcgaagatccttcagcagtctttttagatatctcgtgctccgaaatcgccttgtctaatctcttaaaccctttctcagaatcataaggtccactcacatacttaatc

SEQ ID NO: 2346 - DNA, 544 bp, Arabidopsis thaliana landsberg
gatgcagcactgtttttgctttgatttatgaaaaaaagagtgaaagtgtttggctttattgtttcttcgaaattttgattttggtttatgtgttttcttcaggtatggctggtgctatttatatcaaaggcgttgcagttactaagtataagaggtgaggtttatgaagtaccattattacatttgctttgttaagtgtaagatttatagaacaaatattgatatgtattacattgtttatgcaggtctgctgtaaaggactcagaggagtggccatctaagtattcaaagttcttcgtcgaggtaaagcaatttgttatctttttattactgatcgtgaacccaaaaatgtgtttcaatcacaatgaggtatgctttttttttaaagcttgatgatggtctggagctttcatttactgataagaggagatttgccaaagttcgacttctagcaaatgtataaatgcataactctgaagttgcttttttattttattaagcttctctgtggatacttagtgatagttttatttatgtttgctat

SEQ ID NO: 2347 - DNA, 2318 bp, Arabidopsis thaliana landsberg
  unsure (1)..(2318): unsure at all n locations
tagttaattatgagttttcaatgcactaagtttaatattctgttagtttttttttttgtgaagactctatgttttacttattttaaaaaccttnnnnnnnnnnnnnnnnnnnnnnnnnnnnatacatgtattgccaattgtcttgaaagtcgaataataaatgaaccctcccacttcaccaaaaattaagagcaagtaaaaaatttgtcaccttgaatgttttttttactggatttttcccaaaaattatattaaaatacctaatatgcatcatgtataataatacatttgatacatgattttgaattatacaaattaattttttttcattatggtaatttgctttcaacagtttaagattattgttagacttttaaacaaaaatattttattagatattttcatgaatccattacacatctacatatacatttttgcaaccactttgtgaaataaatcctcaagttgagacttatttacagtggctgccactagcatttaataattgtttttgataattagaaagtaaatctttgaattaaatattggacatttaactatcttcccaaaatctctctacattaactacacgattagttactaaaataaaacttccaaaatatttaacctcatttaaaaattacaaaattatcatttttgatattgcttttttgcataactataacaattcgattataagcatcaaaccgttgagatatttgataccagttaattactacaaaattacaaaatatttagacaataattcataaacatatcataaataagatcaacattaatataaataaatggtttttttacgggacgggtttgttgggacgggtttggcaagacgttacttaataacaattgtaaactataaaataaaaatatattatagatagatacaatttgcaaaaaaaaattatactaacttttaaaaagataaattgtccccgcggtgtactacgggttaaaatctagtaaaagttcatatttctgattactctaattttctataagaaagacaaacttcacctaatattttgcctaaaaactaactaatttgattttgtttattgttttagagttttgacaaaggttagttggtcaatatatgcgtagagtggtcctgtcggtagcttcaatttttaattagtttctcttaatccaatctacttgatattattactgtaaagtgaaaattaactaataaagcaaaaaacaatataattttaattatcccaacactaaaatcggcaactaaataagattcgattcatcttcttccagcttcgaattccacgcaccaaaggcaaagacacaaagccacggcttttctctcttgtcgttttccacatacattcgtcttttcataggatcaatctaatatcacaatctatactttctctgtttacattctcgtttccgaggagaaaagtctcgatcttctggatctggggtttggtttggtttggggttgactcggttttgactcggtgcgagtcgtctcgtgagatggatgtctctcctttattagtatctctttgagagtctggctttctgggttcgatagattcttatagttttgcgtagaaatacaaacaaagatgtcgttgaagaatcatcacagaggattagagctctctgcttcgaagagttttgtctcaaagaaatggactttatttctctgtatcggtttcttctgcgcaggaattctcttctccgacaggtaaccaaacaatgttctttaattaactcacttattctttgcacgttgtattaagtataggtacgagattcaaatttttattgaagttttagattgtaaaataccttacaaaattgtccaagtatgaaaatcctcttctcccctaaacgctttacaaatatacttggttcgattggtctaactacttcggtaaggttcggtttggtttttccggttaagtttcccaccctacttatttataattttagacatattcgttggcatatttcgatgatatttgtaatttatgattttggggcctacatgcaacttttcaggcccacacgctaccaacttcggcccagggcctgtatctgagccaagatcagtctttgccaattttttttcccagtcgcttcagatcccatgagattcctccggtcaatgaaactctagtttctctgcaatctccggtgtgtgctcaggtactacctctaatctccgatcgccaattccattgtctcctcttcttcaattcatctttgaatattcttatgaattacagatgcgagatcgttgcatattcactcaccgacgttcttcaaat

SEQ ID NO: 2348 - DNA, 1573 bp, Arabidopsis thaliana landsberg
cctcttgagtctactcctccactcatcggccacaatcgggtccgtactgcccatgaagtgtctcgtgcccagccttgagacatgttcgagaagactcaaatagtctccccttttccgcccatgattcggttgcggattcacttccacaacttccgagtcatcgtccttttggttatcccctctttggaccaccggatccgctacaacggccttggtcaatgtggctagttgcgccatcattcccttcatcaaatcccactgttcttgggccgttggagtattgttccgattatccgtgttgtcccttgcaccactactttccagtgcttcctcatttatggacttcttcccggcctcaggtccggccgagtctgtcccatcgagcatcgtcccgactctggttttctcgttgatcatcgtttcctcctcaaccaaagtctcctcgacaatgcccttgttcttcttactctttcccgttttgctgctcttacccatctgcgaaacctccaaagttaatccacataacttctagtaaaatcgcaaaagagtaaagagtaactaccgcgagattctcaagccgacgagtggtgataccccttaacccaacacctagtcctagaaccaagcatgctctgataccaacttgaaaggccccgatccggactgcctaaagtccggacgagttctctcgacccaagccactaagtgactcggccctaaccgtttatgaggttctttcctagtctaatccgttccatatgattccgtgattcaatatatgagatgaatagagtaaacaaacaatcagatattttattgattaagcaaaggattcgatacaacctatgagtttgcatataagctattacaagtcatataatcgatcctagctacccgacttccatcaccactcatcttcccgcctttgagtctcgcgcctaagccaattccttcccacgatccccttctttccctgaaaagccaacaaggcacacaatatcggttcacttagcgcatacaatcaaaccatgcaatcttgctaagtttcggtgatgactcattcgaaaaaacaaattgggagaaaggaagtaagcgcatcagttcggcctagaagcgtgggatcgatcacgccctccgattccttgccgagccgcatgccctattcagcccatctgtttaaccaaccgaatcatgccgagtataaacatgcttatgcctgatcatgcaaaacatattataacctgctcaaacaagtctatatcgacctattaaccgattgcgctattagaactaacattccgatggttgaccatggaatcctcacctttcccttgccaatctctcctgccaacgagtttcctctgaaaaccggcgatctcttttaagtaattttgctctccaagacgccctagagagttttagtgagtttccccgtgtttttctgtgtcccaaatcgcatccaagacccttctatttatagggattcgggcggtaaccgttctcacccgaaaaggcaccttttggcctataaaggttccaaggcgactttagacaaagaggggtaaccgttcga

SEQ ID NO: 2349 - DNA, 120 bp, Arabidopsis thaliana landsberg
  unsure (1)..(120): unsure at all n locations
taagactagggaatcagggccaggttcaagaatacctaaccgggagcaagcgacgggcgaccgtgcgcgagaaagcctgccngagacccagaaaacnnncgggacaaccgaaaccgagag

SEQ ID NO: 2350 - DNA, 3668 bp, Arabidopsis thaliana landsberg
ctccatacacagttcgaatgggacataccaatacttgaatggagctgttgtctaagaaaattcgatgaatgtagatctcctcccaacttcttccccattctaagggacggattcgaatcaagtcttcaatggttcgaattgtccgctcagtttgtccgtcggtctcgggtgaaacgccgtactcatgggacatccgttcctagggccttctggagatcttgccaaaaaattaccgaaaacttcggatctcgatctgacacgagattggctggtataccgtggagcttgatcacttctttttatacctctccgctagatttggagcttgatcgatgctcctcactggtataaaatgagtcagcttggttaatcgatcaacaataacccaaactaaatcgttcctctgccccttccttgtaggtaatccattgatgaagtccatagagatcgattcccatttccacattggaactaataagctctaaagcagtccacctggaacctgaggatcaatctttattcgctgacaagaatcacactgacttacccatttagctaccgatttcttcattcctggccaatgataatatcggcgtatgtccttatacattttggtactgcccggatgaatactcagtgtagacgagtgcgccatacgaaggatctcttgtcgtaagtttcctcgatctggtaccataattcttccgttgaataacagggtaccatcgtccgccatgtgataaccgctagcattaggtccgtctagcattttcaactctgtaactatctcttgtaacttatcatccttcttcttcacaaacaacacctaggctccccatggtgatgaactcgggcgtatgaatccttcctcaagaagatctcctaaatgttgttttaactctgctaactcggcaggcgccattctctaaggggacttggctatcggaatagctccatcttcgagattaatggcaaaaggattgctccgggacggtggccagccttctaatgctttaaacacatccacgaattcacctatggttggaatgtcttccactttcatctcctcatcactgtctcctccaaccgcgttaagggttactagatatgcttccccttggcctagcatactctcgacacgaagggctgattcaaaaactgctctgacactcgggctcactccagtatagactaatttggtttggtctcctaactcgaacaccactctactcttagcacactctatccggggatggtatccggataaccaatccattcccaaaatcacttcaaacttcctcatgggcataatcaaaaggtttgcgggtaaggttgtcctatggattactacgggtactcctaataggattctacgggtttgaaggggtggttgatcactcgcggtatggataaggatattaacttccttttccttaaaaattgtggtgaactttgcgaccaccgcaggcgtaatgaagctattggttgctcccgagtcaaataacacacatgtgggtacaccaccaatacttacagtccctggcaacgcattcacacacactagccaaaacattctcacaattcacacacaaaatctaaaaactattttaaaaaaagagttagaacccatacaaacctgttacggaacctttaagaggtcctgtggtttctgtcgattctaaatctaacgcgtacacgttagcaaccgtggcctgacgtttcgtcgggggtcctctttctcctgatgctggcgggggtcgtgagttttgctgagtgtcaggtcccgtgggtttacttggacacacgtgagagtagtggtcttggcttccacaccaataacaatggccctttggattcacttggcctgtcttcttactcggacaaacattggaacgatggccttcttcaccgcaggaataacatgtgacatacgctgccgttggttgggtaaccactgggcaaactcgcgcgaaatggcccaactttccacatgtgtaacatccccttggatcaaaatcgtttcttcccctatcgttgttatagctagcctttgttcttcctcgatcatagtctctctcctgatttagtgtgaatttagaagcgttgtttttggtctccgtgttattagtcttcctccctcccgatcgatcgctttccttgttggttacactcttctccaactcaataccctcctctacattaattgcccgttcagttaactcgttgacactgccatatgtgactgcttgtagtcggccccatatctctggcctgagtcctctcaagaatctacgcaccatcaatgcttcatcgtcttgtccgttgtataagtacctccttagtcgcgtgaaagcttgctcgtatgatcggacactccttgcctcttgtgctaagttcatgaattgctgctccaatcgatcacgggcctctggtggaaagtacttcttttcgaattctcttctaaaagcttcccatgatatcatttggtcttggttcctggcagtgacgctctcccaccagatttgtgcatcctcgtccaagaagttaactacgatctgtctcttgaagttgtcaagacatcgagaaatctcaaaattactctcaaggtctcgtagccatttatctgtcacgaccgtgttttgttctccttaaacacgcgaattcctaagtctctcatcatcattacgagcttcaagaactttgcggatggtgattcctctcgctggctttcttgaatttgttgttgatgttgttgtgtttgaatcatatgacccaatagactctgaataatgcctaaggtctgtcgcgtttcaggggctccttgattctcggttccagggatagggtttccatgattttgcttaatcgatggggattgtacgaggttatgcgatcaagaccgcaagtaactctcatttgatgtttcgaagacatcgatcccggcggcgagtgtctgggcgtgaaatcaggggttcccattcagataatccatacggctccaagtgaatataatctccatttatctcaccactctcactcggtatctagttatccgactccggatactgcgcaaagtttccacgactagacatcacatctctcgactggttctcgtccgacacctgacttgacatctacatccaatccaacaacgatcttaggtatctaatatttcccccctatcctaatagtggtgaacgactcggattatcctaagtgccttttgcgactatttactcgataaaacgtttgaaaaaaaaacagatcccaaaagccctaaaaccatgctctgataccacccattctaacgcccccggtccgcgctaaaactcggccagtccggcacggcccggagacgccacaatggaaatgaattcccatagagtagccgaggttcagaaacacattccgaccctttacccactcaaggttacccatttccccatttgggatccacttaggcttgccaaccctcacttcacccaaatgttgtgtcgactcggacaaagtcttatcagtttgaaacccgtatactctaaaataaataccgatttcattattttagagttacgaaaatacaaggaaaaacccccacatccacatcatttttatggccaaggaatgaggaacaaaagtacacgatacgaaaatacatactttaagttttc

SEQ ID NO: 2351 - DNA, 514 bp, Arabidopsis thaliana landsberg
tcccgaacacaattaccctattaatctggtcatgaaaatggttcgattatcaccataaattatctgttaaaaaaaaaggttcaattctgtccgcatatttagaaaaagcattatcttctgatggattctatcaaaatacagtaaaaactctataaattaatactcgataaattaataaacatgataaattaataaattttgtcggtttcaagtcgggccaatgtaaaaattaaccaaaattgataagataataagataataattttttaaaaatccttatgtaaaattatagtcccaataatattataaattaataatcatagatcttaagtatatattctaagactcatttttatatgaaatttttgttcaagttacaattacaacttttttaaaaatacaactagtatgatctctgttttactcacataactatttgcatatttgatcggtcatagttgatcttgtcaaatcttttatttgagaaagcatctgctagatttgtgtcaagaga

SEQ ID NO: 2352 - DNA, 2173 bp, Arabidopsis thaliana landsberg
ccctaagtagctaaacatcatggaaacttataactttccttttttcttttatagcctctctctcacaaaattggataagggatactagcaaacccttatgaagcagagccctcttctataactagcacagccaatcgacagaatcaacaataaaaaatttagctaatcttgtgatttcaagtattcataagtcagaacttctcaagtctgagagaaattccacctttacacataaaaatccctaaggtaatgtctttatagatatactcagattctgcttacacataaggttatgttcataaaaagagtgtgcatacataaccacagatgcacaagcataactaataaagttctctctagtcctaaccaatattcccaagacctctatggtcatacacttataaaaaatcaatttgttaaaccaaataaacagaatcgaaaaccacatctcatcatacccggttcggttttcttaaccgaatcaaattatatataaaacggattaggcttctccggttttcgactgcgttttgtataaaacctcacaaaaaccttttcttctctccccaaatcctgcaacctctattatctagcctttggacctgactttcctacttctctctgactccaggtttgtcttcctctcaagttgaagctgcggctttattagtttagctattgacttatgttacttaaatccattcacgtgagcttcttacgccgatttcattggtttacctattgacgttgactggggtttttgtttgagttcattctctattgttgtctaccatacttttttatgttacttgattgcatatttataaaacgttttttttgtatagcattctagatgttgcttctcaaacaaagctcagctgctattcttgggaatacaaaaactccagtccttcacacttgtcgctccacctacagagttgtaccttttccattgaccagaacgcagtcgttccagagtttgactatggcaaatttgcacaagcttcccacttcttcgtctgcgaaattgaatacggcttcagcagtgccctgtgtattccaggtgcatctgtgtattccaggtgcatctgttcattggtatgacaagccaggttagatttttgttttcttacagttttcttgtggtatgttgctagtttttgtgaactattttgattactcacaaagcctgtacgattaacttcttattgttagaaatgagaaagcagagaaagatgggtcacatcactcttgttgggcagtctatgggcgttttggaacaaaggttacaatgcatattaagtgagcaaagccaccaactacacggtcagtttccatagcatcatttggtatctatattccattggcttttaatttctgaatgccttcaaacttatatcaccaaaatctgttgtatataaccgttttcatgattgttgaacacttgaacccttcatgaatcttcaaagtatctatctgactgaatttgtggtgcttgttgtttaccacattgcagagacacctcgtgttagtatcatcatgggttcagacacggatcttcctgttatgaaggacgctgccaaaattctggacctgtttggtgtgacacatgaggtaaatattaagatctgctcgaataattgaattttggcacgacttacatgaatgaattataatccactgaagacagacagaagaaaccttaagtttgtaatttggtaaaactaactgtgaagaagctcaaacatatactgtgcatcttgaatggtccgatatggtatcatttgcttacaggtaaagatagtttctgctcatcgcaccccagagatgatgtatacatatgcaacctcagctcatagtcgaggcgttcaagtcatcattgcaggtgctggtggtgctgctcacttaccaggtatgtctttaacatgcatgaactcatcttgtcacctcccacaagattgttactataaaataatggattttcttggaaattaggtatggttgcttcactcactcctttgcctgtgattggtgtccctgtccaagctacccctttggatggagttgattcacttctctccatcgttcaggtacactttcattgattttcttgcagcacttgaaaactatgtaggtctgcttttcttaaacctttccatgtatccgtttttgt

SEQ ID NO: 2353 - DNA, 3377 bp, Arabidopsis thaliana landsberg
aactctctttttcttttcttttttttttttttttgattttttttataaaaactaaattaatatgacgttgtgaaatctaaccggattttgaatcccgccatttaaccgtggtcattagcgatttcacaaatttaatatgtttttcacatcttcatgtatatttagcatttattttttattttattttcttaaaaaaatttcaactcttttttttttataataactaaattaatatgatgttgtgaaatctaaccggatttttgatcccgccatttaaccgtggttattagcgattccacaaatccaacatgtttttcacatcttcatgtatatttagcatttatttttttatttatttttcttacaaagttttcaagccttttttctataaaaactaaattaatatgacgttgtgaaatctaaccggattttggatcccgccatttaaccgtggtcattagcgattccacaaattcaaaatgtttttcacatcttcatatatatttagcatttattttttattttcttttcttaaaaggttttcacctctttcttttttgattattttttaaaaaaagttctacaagtactaaattaatacaacgttgtgaaatataaccggattttggatcccgccatttaaccgtggtcattagcgattccacaaatccaacatgtttttcacatcttcatgtatatacatcttttaaaacaaactgaacttagtcaaaaaaatttcttctaattagtgtcaaaaagtttaacatgattttatatatttcaccgtagtataaattaagatttagctaaatttaaatttttaaaatcaaatactcactcattacataattattcagatcaagtgataaaaatgcttagaaatgattccattggctcctgatcaaattaaacataatacaatacatttatttagtgttactgaaacacatttattttggagaaagtgcatcaactaaatttaatcaagcagtggaagtgaaattaaagttggcgcagttagtttgacggcccaataacgtggaactaaacccaaatttgttactcgccaaatcaaattcgatcaaattatcctccaactggaaccctcaccacagaggctcctgggttgactcctccgtcaacgaaacccaaacagatgacgtcatcactgacactcaccatcgagttagctccaaagattctccaaacgacgtctttgctatgaagcacgagctgaatctccggtacggcgtatcctaggcgcgtgacgccaacgttcttcgtgctgaaacacgcgccgaacggtttcaccgacgctactctcttgatgctcctcgccgctgcttgtctaataaactccgacgtaaaagctttgtagatcgatgactccaacaccgtgtaaggattgacggagctgattttggttcctcctattccagtacttgcgtttatcttcaaaagcgttggatcgattggaagtgttttctcgacgatcttaatcgccgtcacgccgataaaatactccggcgacttctcaccttttgaaaactcaaaaacagtggtccctggattgatgagaagcggtgtcttttgaagccttgagatctggattccggggaggaaaacgtaaggtccgttgccgaagaaggcgacgcctttaccggaagttagacagacggcgaatttacggtggaagctaaacgcggcggcgaattgcgacggtaaaccgatgttgtgacgtcccattcccgccataccaacggttcctttagcgagtcctttaagaagaaacgttgctccacaatcgaagatcaaatttgggattttaacgaccctgcccggattggatccgttagtggactggatagacacaacgtctaaagcaaattcgccggaagttgcggtaccggtaacggtgttatccggaatgccgccgcaagtgttgttactacagccaggtctcggaggggagaagcatgtgccgcagcttgtggagccggcacgtgagcagacggcggagttgcagcgaggagactggtaagtggaggagacgtagcctttgtcgcagtcgacccagagttctcgaccaccgaggtcgaagacgacggaagcggggacgagaggtgtgcgttggttgatgacggttgtgtactggagggtagattggtcttttgttactgggagaaggagagctttgggacggaaaggtgtttgagcagatgatgagagtgagaagatgaagagaagaagaacggagaagatgatcggagaaggcgccattgttagagatgacgatgttgagtttgaagaagaggattgagtgtatttatagacaaggttttgagatttgtttagtttttttgtcggctaattttgaataattggataatggtgtgtgacgttattttgactttcattttttatgtgaaaggaaacaaatcaaatctagttgtttcctctttaaaagatagcattttcttctttttttggcaccggtctttgtttactgtgttttagtttttcttttgttggcatctgtctttgtttaattactatgattactgtgcactaagtttttttgcattcgtctttgttaaatgaaataaatttagttttagttttagttcaatatttgtaggtatttgaaataaaatacatgtttatggaaatttagattttggattgattaagaataatagtgtgtaacactgtaacttagagcaactccaaccttggttcttagataattcttaactaattcttatctattaaactgattaaatataatacaaacaacaaatcttagctaagatttatatcttaattaagatgttttcttaatattaagaagaggacatgtgttgtgtattgagtgggtatccaagttattttttaagaacccaatagttcttaatcattggagtagaaataaattaagttttttctaattttttttaactttgtaaaaacaacattttaatataaaataaggttaaaaatgaaaattaaaaaccaattgattctaaaccatcggagttgctcttattaattgatcattaatactctacaaaaatatgaagagaggaggataaaagaaatgccatgtgggcgtgggagtgcctttcttgactattcttctgtctttctcgattgcttccattatcactatttcagaatttgtcagtctcgattgaataatactatattgcttcatggagaagacagcctttcttccacatggtctaatatttcccttaaatgaagaagatatcacttcaagaatgccaagatattttgaggttggtgaatcgtctagacgtcctagttcacacttgaaaaaaaggaaccaaatgcgcaagctacaagctgaagagaga

SEQ ID NO: 2354 - DNA, 484 bp, Arabidopsis thaliana landsberg
  unsure (1)..(484): unsure at all n locations
cgctacacttccgaatttctatgttgctgctggaattgttggatagagacagttccctcaatggtacagggaggaaggtgagtttcctttttttttgtgctttaagcgtttttttagctcaatgtctctcattcattctcatatgtcgtttctgcaggtattgagctgattttgggcacagagattgtcaaagcagatcttgctgcgaagacacttgtcagtgggactggacaagtcttcaagtaccaaactttgctagctgcaactggttcttctgtgagcacaatctatccttgtacttcttactttggaagtttccatttttagtctcttttttctttttgcatctcttctaaggaatttcttaaattgtgtaggtcataaggttgtcagattttggcgtcccaggtgcagatgctaagaatatattctacctgannnnnnnnnnnnnnnnnnnnnnnnnngcttatgcaatggaaacaaa

SEQ ID NO: 2355 - DNA, 4896 bp, Arabidopsis thaliana landsberg
  unsure (1)..(4896): unsure at all n locations
ccacgatctggtcgttattgaaattggcgtactcgagagggacgttctttgggtcggaggcatggaagtagtaaggatagatattgacgaagatcggtgtacttgtttgagacaacaatctcagcacggggacaagctgttgacgtgcttggggtgttaaaactcctnnnnnnnnnnnnnnnnnnnnnnnnnggctcgtcgtagtgaccgtggtgctgattgatatctggagatttcttgacttgacgaggtcggtgagagattgaatgacaggaagcacgtgagggccatgtttgtcgcccgggatggcttggtttccgacggtaatgaatgttatgttcacgtcggctatgtaaggatcaatgttaaccaggatttaactgcgtctttgttggctgcaagtgcctccaagtcttcgttcttgatgcctacggtgactccaatatctcggtttccacgcaaagcgtttaggacgtctttgtttggctcgaatatcctgattttcgcaacgttttgagatttgtagaacttgataacattggacggagatgggaggttgtctccgaggagtccgtaattcaatccgacgactgatgcagtacttaaagaatcaacgttgtggtagctgataatcaacgctgtgcatgagaaaagtaataggaacaagttcttagaatagtcctccatgatataacttgtctctgcaaaatcaatagcgccagaaaagttgttgtattagaatattagatatatacaatgagtgtatctacagacgtataacatttacatacaagaaactcaaacaccaccacatgatcatatatacttgcctgaagaaccgagactaaagaaccaaacttgttttctttttgttttgtttcgtgtaagcttgcaagcttgagtttatatatgtctgagatactgttccctgtttaatgagtgtgagatagaccttatacatgtctaagatctgtttcctataaaaaaaaaaatatgatatgtttcctaattattttattttattttgtttatctctgcaagtttgagtttattttattctattttgtttatctcttatgagattagaccttatacttgtcaaattatttacaaatttggttttgtcttattaacagttttaatttcacatacaacacacacaatatgaattgaacccaccggatgggtaataccacgacaactcgacaagacgacactttgctaatgaatgttgctaactcactttagcgaaaacaaattcaaatccattgctaattaatatgttctgttgctgaagagtttgttggttttcaaaaaaattgcggtatagcaattcgatatctggagtttaaacaggaaaatcctaatgaatgttgctaactcgctgtttatattctcatgttaattaagaccaaagatataaatgcaaaaacagtgttctgattggttgatctttgttttggttgcagccttgcatgtatatcatttgatacctcgataaaaaattaaaaataaatatttgcatgaaatatgaaactgtaaactaaatattttttaaaaagaaataatgtttttgaactaaaaacagtatgaagtatggggtcatgttacctcaataattaaggggtttaaacacaaacaaatatggctaaagactcatactattttataatgaagaaatatttttatatataaactgggtcagttgcatacttgcatccccaactttgaacgtatgtcttccactgcatacaactttgtatttgtaaacatttactgaatatgtcattggtttatttttttggttaactaatagtataaactattttgctcgattactaattgatttattaagtggttaaaaacctaatttctattaatataatctattatattcattaatgatttatttaaaattttatacacgttggactaatttatatcgaactatgaatttggttcaacattattgaaggaagaggaatttttttggaagaaaacaagtctaggaagttcgtaaaaattattgaaaatcaaaagatatctttatttttttccagcaacgtgcttcttctgcattttaaaatagcgttgtgagttgtgactgtttgctttgggtttagaaaattggaaaatagtcaacttgctctgtagtccttaaacgctcatcagattcaagatcagtagtaacaatggagaagccaaagttcaagactgtccaagaggtggttgcagcaggcgaaggaataccggagagatacctccaaccaccagccgtcgacgacaatggtcaacatcttaacgctgccgtgccggtgatggatattccggccatcgatctgagtcttctcctctctccttctgatgacggtcgagaagagttgagtaaacttcactcggcactctctacatggggagttgttcaggtttgactctcttagtgataagcagagagtcatgaagttctgtataagttcttgtgaaatgagagtatttgatttcttatcgatgcaggtgataaatcatggaattacaaaagcgttgctcgacaagatttacaagctaaccaaggagttctgtgcacttccgtccgaagagaaacaaaagtacgcgagagagattggtagtatccaaggatatggtaacgatatgattctgtgggatgatcaagttcttgattggatcgaccgtttgtatatcactacttaccctgaagatcagagacaacttaagttctggcctgatgtccctgtcggattcaggtaaagcttattatacctttcagtttcaatagcatctacttaggtgattttgacagtcagtttattcagggaaactttacatgaatacacaatgaagcaacatctagtgtttaatcaagtctttaaagcgatggctatatcgttggaattggaagagaattgctttctagacatgtgtggagaaaatgctacgatggatacaagattcaacatgtatcctccatgtccgaggccggacaaggttattggcgttagaccgcacgctgataagtcggctttcactcttctcttgcctgacaaaaatgtcgaagggcttcagttccttaaagatgggaagtggtataaagctccagttgtcgcttcagatacaattctgatcaatgttggagatcagatggaggtaactaatatgcatatcattttgaaatatttgattggtgtagatttgacataaataatctctgttcttgtgtgttttaagataatgagcaatgggatatacaagagcccggttcatagagtggtgactaatacagaaaaagaaaggatatctgtggcaacgttttgcattccaggtgcagacaaagagattcagcctgttgatgggcttgtgtctgaggcaagaccaagattgtataagccagtaaaaaactatgtggacctcttaaacaagtactatatacagggtcgaagaccaattgcagcttcattgatctgatcatatttttcaagtctcctttattggtttcacaaatgaatctgtttctttcgttacctgagatcctttataagaataataataatgttgctttgtttgttggaatgtgagaatgtaagactgcattgtgttatttgtgttacaattctgagacaatagagagggtctaaaatcgatgctcccacttatcagttgctgttaaatcatatgacgtttaacgttataaacatcaaataactataatgacatcaaagtatcggtgtgcatgtcgtaaagaaatataaaagtcgtattcttatacgacacatagaaacattgattggtacttgcacatacagtaatatgacacattgattgattcgttccgttttgcatttccgcctatggtcagggatggtttcttctgacccaaacagtaagaaacacaattggcattacttttctagtttaaccttcttgaaaatactatcagcacttgtagtttctttagttattaaacgtttcgctactctttatcgaaaacacctatagatgagctgaaacaatactaaaaatttgaagaacgtattttttttaaagaactaaaggatacacatattgagcaaaggagacaacatcttatcttttccaagctttctcaattttttttgaaggaagaaaataagaaacctccttaaaacatatcccacaattgatattttgagatttctggaaggcacaatgagtacctgtggaagaatttacttgagctggaaaaaaagactgtataccgagagaatgaggaaaaaacaaaactcttagatttatgatcacaagtattgttcatgtatccttgccctgttctcttcccaccataatctcgcgtgcatctccccgaatctctctcggctgcaatgcaaaagaaaacacagtttgagtgatgtttagttcagaaccgatggataaacccgggttttgagacaatgtaaggaagtttaacagtacctgaatctgactcttcgaagctctcttttcccacctggtaaaactttaatggtgatataaacgccaggctcatcttgctccacccattcgttgtcaacatcactcgcattgcttaccgacatttcctctgaccggtctgcatctctcgacgagctgcttcttatggaagcatctatggaagaagtttctgtcttggctacactgatgcttgaaactttaggagttgagttgagtagaccagagtcatagaactgctggctctgcattgaattatggtcgagtgaatctgaggatgagtaagcagccaatccaggtggacgatggatagtacgaggcaaccgttctttgtttagagacggtgtcgcagcagtgtcttctggatggtactccacttatgcaatatatcaaagatttccaacagggattagtcct

SEQ ID NO: 2356 - DNA, 338 bp, Arabidopsis thaliana landsberg
cagtcaagcaacttttgctcctttaccgtcatcaacattaccagaccaaagtaacctagagcatagactttcaattttctttatgcatcctttaggcaataaaaaagttgacatccaaaagttgatagacccataaatgacaaaagcgataagctgagcccgaccagcaaaagataaagatttaacaactttctagacataacagggaggcccaaatacctgattgggaatgttccaataggaaaaccgtattcagacaaggagttgcgttcaagtaagcccaaacccgcgtgaaacagttggctcttatccttgtttactctgaaacccgtccaagc

SEQ ID NO: 2357 - DNA, 617 bp, Arabidopsis thaliana landsberg
  unsure (1)..(617): unsure at all n locations
agaaaaactaaattataaaatcagcaaaaatattaagcaatattgatttatagtcaaggtaagttcataataaaataaattcacaaaatatgtagcatggaaaaaccaaatcaaagccgcatgagagtaaattcgtttgaaactgaatcctaatcatgtgttgaatcctaattgtgtggaagaagttcaatatttattctttaatgttttggacaaactatcataattaattttccaaaagttttacaaattttattggaaaacttctacttaagaatatctagacaattttctatattttcgaatatttctctgacttttatatattattttactatttataatttcagaaatgttaatcaatgaaatgtctaacaatgattggtgataattataatttcaaaaatattaactaatgagatggctatacgcgattggctgtttaaaatctaacgtggacggcataagagacaaataacctcaacttttatatagtatagatttagatatatgtggaagattaagagagtatatatatttctttntataatagtttctggggtagtaacgttgaataatgtatgatttatatctaattttgataaagggaaacttta

SEQ ID NO: 2358 - DNA, 561 bp, Arabidopsis thaliana landsberg
  unsure (1)..(561): unsure at all n locations
ctttatcctttaagtaatacaatcttctcagagaagtaaaactctggagctcttggctatcattgcactnatatcaaaacggaacccatctccttgcaaactcggaagtttcagacaatgtatcgaacaggagcattgatgcaccgtcatcagacacatagcagctcaccttattcactgggtaatcaaccgctaagatcgaaagaattgtgttggctgtgattatgggaggttccttgagcggatccactgtactgacaaacacatcaaccggtgcaagcttgttcttttccccatcccgttcaaatctcatagagagacggtcaaggtaggtttctcggttaattggaaaccattttgggaactgatcaaggatccaagagagtgcgaaccagatctcgcagatgactgagataagccagagagggtatgcgtctttggctggtgtcaagatacggaaacggaagaagaaaactaagatcacaagacgaagaacgatcacgatacggtaaggactgattttgctcgaagagattgggacttttcttcagagaggttgtc

SEQ ID NO: 2359 - DNA, 207 bp, Arabidopsis thaliana landsberg
ctaactggagataaaactccggaaacaagaaacgccaaaacaggaatagcacttgaaatttttaaaaacgcccagaaactatcatatacgccaagcagaaacatagacgaacccctatgaatgaggaaaaaacacccgcttagacaattccaaacggagtggaatgggcaagggatatacaactcttgggtcaaaacaaaaattcag

SEQ ID NO: 2360 - DNA, 576 bp, Arabidopsis thaliana landsberg
aataatggtttcgatgacatcactcattgctcttcttttattttgtttttttctctctcttcttctaatcgaggtacagggtcaaatggtccgtactccggttatgtcacgaatccatgcaccaccttcagattcacgtagaggccaaggtccgtagcaaagtcccaataaacgaaagggaaaagtggtaacttaaactttatgtccaactagtctcttgtatcttatccttcaaattttattataaaaaaaaataaaaattatcgtgtacataaattggaaagtatgaatttaatgtgcaagttgttgtcctttgttatagttttcaatagttgcaaggtaaataatttctaaggattatatgatgtatatagtatgtaccattcataaaaaggaaagtacatatgtatgtaatgtgcaatttgtttttataatttgattgagtcatcaaccactgcccagctttgcccgtctatacaaaaatatattaaaaactggtcgttactagaaatgattattatcttggatcttattcgcgatgttcgattttgatgtttatctgagtttattctatat

SEQ ID NO: 2361 - DNA, 649 bp, Arabidopsis thaliana landsberg
taaaacgaaaaagaaaggattaaagaaaaagattacgaaagtgtttcttcaggccattcagtgattctttccaacgagggcctccacttacgacatctccgacgagactcctcctcttcctcagccgcctttgcagccgcttctcccgcagatctctccgcctctaactcccttagaaagtcaccaaaagaagccaaagttgtttctcccttgccgtcgacgttaccattggcatttagctgaaaaagaatgagtttctctaactcatctcttctcaaaactatctttactttacgatcttttctcttgtattctttcttcattacttcttcttctttaaccattttctcaacgttgtttcctcccatcaaacagtttcccatttttataaaatttaaaagcagatttactaagaacaaaaaaaaagttttctttttagggaaatacccacaaaaaaagtgttaagaggaagaaaaaagaaaacttgggaatgcccaagaaaaaaagactctcttcttctctttctctttcggagtgggtcacgttgatggaagcttgagccgtatgaatcaatgtgtgacgttgagtttatatataatggcgagcatttcctgttaatgatagatgtatgactcatagtaaggatgct

SEQ ID NO: 2362 - DNA, 575 bp, Arabidopsis thaliana landsberg
  unsure (1)..(575): unsure at all n locations
cgcaccatcccataacgataaattagtatttaaggggttanatattatgtgtactcgatagatagattggagggcttaccttctgagcgagacctatctggtcaaaactgtcatgcaaatcaatagactcgcgcaacctgtcatagtcttcttcttctgcatatatctcattcagagcttcatttacagcagatacattattgctctgaactgcaaccatatatggcttaataaggcgcaagtgaccagcctgagatcagaaacaagaaataatcatcagatatagattgttaagccactggtgataagtttttaacagaaaatattaaatcaatggtcagcctctaaccttgcgcataatatcaacgacacgcgtgtgatctaaccgcagagcaagcacattgagaagatcgttgattatatcagggtgctcttgcaagtagaagtgaacggccttatagtaaagctcannnnnnnnnnnnnnnnnnnnnnnnnnnnnnnnnnnnnnnnnnnnnnnnnnnnnnnnnnnatgattcataacagtggttgcagcattatcaaactcatcatattga

SEQ ID NO: 2363 - DNA, 372 bp, Arabidopsis thaliana landsberg
agcctggtcgggccattcgagcgagccggatcactgatgcatcgcctgcctgtttgctgtttcaggaccaaacacaagaatcttgactgaaatctgctatccgcgtggcttatgcttgtctggcaaaaacctgcaaaaaccctcacctctctcaaacagcaagaggaacatatgtccctaatgaataggtccgcataaacgaacaatacatgctgttgggcgttgccaagaacagtgtttgaaagactacccctcttccaatccactggtctgaatgagcacccaatgccttctttaggcacctcacctggacaagggctcagataaccacctcttaatcatctgagtacagtgcaggccacgtgccaaaat

SEQ ID NO: 2364 - DNA, 637 bp, Arabidopsis thaliana landsberg
  unsure (1)..(637): unsure at all n locations
gtctttcgtatttagtgtattgcttatagaatgtattttttttttaatcaattcaagatagaagattcttaagctggaaataactaaacataagaaattgattcagtctactcggaaaaagggtcaggtatgtaaacatcttcgtctcatttctgagtttgtattttttatgttcttgctatctagtagactgctaacgtaatagttttgtaaatacattgagtcaaatttaaacatacattgataaaatcttttttttggatatgtctgatgtgttaaagtgatttataacttgcaggaactaattaaagcacaacatatttctctatcacatcttgatttcccaggtaaaatactaacgatgtcatggatcggatttcagttgttggagagttctttacacatgaggcaaccaaatgtttcctgaccagtactaaggtgactaatgtttttcatctcctcttacattacaaattttggttgcagaatgatttttccaggaattacatgtggctttcttttctaactctatttgtatgtccgtttttttttatccatngcatcatttggttggggccttggacttganggacaccatcatatttacatgatccggattaatggggtttggactaat

SEQ ID NO: 2365 - DNA, 558 bp, Arabidopsis thaliana landsberg
  unsure (1)..(558): unsure at all n locations
gcccatgccgataccgtcatgccgggcttcacgcatttgcaggtggcgcagcccgtcactttcggccattacctgctggcttattacgagatgctcgcgcgcgatgccgaacgtgtcatcgacgccagaaaacgtatcaatcgtctgccgctgggcgcggcggcattggccggcaccagctatccgatcgatcgattgatggtggcgaaagaactgggcttcgacgacgtctgccgcaattcgctcgatgccgtgtccgatcgcgatttcgccatcgaattcaccgcggccgccgccttnnnnnnnnnnnnnnnnnnnnnnnnnnnnnnnnnnnnnnnnnnnnnnnnnnnnnnnnnnnnnnnnnnnnnnnnnnnnnnnnnnnnnnnnnnnnnnnnnnnnnnnnnnnnnnnnnnnnnnnnnnnnnnnnnnnnnnnnnnnnnnnnnnnnnnnnnnnnnnnnagggtgaccggccacctatggcgttgttgaccttgatgaaaggccagccactggcctacaacaaggacaatcaggaagacatggagccgctgttcgaca

SEQ ID NO: 2366 - DNA, 1868 bp, Arabidopsis thaliana landsberg
atgggtaaagacacatcaacttcaacgtattattcgaacaggaagaacaggtcactggtttaaccatagcaaagagcattgtctggttggagggaagggaaatccagaagtgaacagaaacatcgacacagatgtgattgtcgcagaggttagagaaacaagccggaagccagacgaggtttgtccataattacccacatttttccaaatcgtttcgaattagtatgattctggactcttgtgtgatgagaatgcttgtcaaccaccagatgtatgcaatgttagagaggatcatgccaagagcaagaaagctcgagttattcgcccgtatgcacaatgctcatgccgggtaaagtttttgaacttttaactgtcatatgatattgttgtcatgaatcttatgagtctactgttggttatagatggctatcacttgggaaccagcttaacggtgtccgattaataaacgaaggtcttcgagctcggtttaaagcatcataccctgaaatagatgtccagccaccatcaccaccaagagcctctgcaatggaaacagacaacgaaccaatggctattgactcaatcacagcttagttcaattccaaaaaaaacaaagccaaatgtctcagctttgttggattcatgttgctttcgtttttgaaacatttgtggcatcatgattttgtaaatctttatggaaagttaaaaggaaacaacattaacgaaatttgaaatttttgcttattcgctccagtacttctcatcatcaacatctttatcatgttccgacgaatcctcactgtccgattcattgaccaaacccatcttgaatctcctcacatcttcaacagcagcattcctaaacaatccaacatcaacagctccggcgaccatatggtaaccacgtccccgaatctcaccagctccatcgtgcggcatcgcgaaacccgacaagtaagccccgcctttcgccggatcagtgctcagcacagatttctcagccttcttcatcatctctctcactttcttatgtccaggatcccacaaataccctaaactcgcactaagatccaacggtcccatttgcacacagtcaacaccatcaacggctgcgatttcatcagctttcttcactccttcacctgattccacctggcacataatcagaatctcctctgcgtaattacttaaatacccttcatcgattccgtagttagaagctctcaccaccgtgtgcgccgatccacggataccgtcgggaggaaaccggcaatacgacaccgctttggtagcgtctttacgagattcgatcattgggaacatgattccttgtggacctagatctagagcttttttagcccaggttggtgagttttccggtaatcggagaatggctgatgttccggcggcgttaagagctcgaatacaatccaaagcttccggtatacctccgggaccatgttccatatcaacgacgacgtaatcgtaaccggcgtgagcagcgatctcggctaatgtcggcgagaaggagagtaaaaagagaccgtagagagtttctcctccacggagacgagatttcaaggagtttttggatcgattcgtgatcgcttccacggcggtggcgggtgagtgatcggcgggagatgaagagtatcgaattggagttagggttttgcgggaaaatgaaacggaggatttgattgagctgaactttgaaggagataatgattttccgatgatcagagaagatggattaagaagagatgtcacatctctggtgacggtcacggcggcggggaagattgaagcggtggccattgcggtgaacttgggaagtatcgaagaagtggtaaaagactaaagtttga

SEQ ID NO: 2367 - DNA, 544 bp, Arabidopsis thaliana landsberg
agcggagattcgcttgacgttgttgcgtgactggagaaatgtgatagaaacgatcgatgtggaacattttgaaaccgggttaagggatcaacgcatgagagatgctgacgtggtagacgaagaacagcatgaagacgatatatagataatgactatagaagaagacttcgaacaatctcctccttatcttaggatatgtggcgacccacatcataagtgcagccaccagagctatctatccggctaaattcgagacagtggacctatcccactccaacatctatttacacgaacgatgaattagggcattaatgatagagcaatatcgacgaataatggaaaaaagaaaaagagtgaccttcgagactaattgattcttggatatccaatagataaagggacaaagaccatggctggtgaatatgatcatgaccaagagccccaaccatatatggtgcttgatgcttgactcagacgtaagccccactgcagccagtaacgacgagccaagagccactggatagaacaagaacgccaagcatat

SEQ ID NO: 2368 - DNA, 489 bp, Arabidopsis thaliana landsberg
  unsure (1)..(489): unsure at all n locations
tccacattgcacaaaaaattgatgaatctttagtattaaatataatataagttaataaaaaacagaatgaagaagtgagatccgtgtctattgtgtccttgggaagacacatttaacccattcgagacatattaggtggcggcattagataaaattattaacaaattatagctaaagacattttgaaaagataaccgctgtggannnnnnnnnnnnnnnnnnnnagcagcgtgatgatttgactcctttagaacatttgttcagattttttattttttaaatttggctaaccttatatattaacgtctgaaaaatacaacccttagagcttttaaattcatctgtgttacttaaaacactaatttaattcatgttggaaaaaaacaaaaatagttagctcggtcaaggttgggtgaagtcaaagtctatgtgccaaaatagcgagtttccgcatagaatgattgagtgcgcgcatattatataatatta

SEQ ID NO: 2369 - DNA, 2130 bp, Arabidopsis thaliana landsberg
aaatttgaatccttgggtgcaacaaggaggtcccttacgtcggaaatcacaagccaaacatgggaagttgcaaaattgattggagtttgtccccttgactcatctaaaggttagaaatgaagatgctcatccaatggcctcaaatgaagtcgaaattctctctttaaaagggctaagcttcttcctcttctctctcaaacttcattcccaacaattttaagctccattttactctcctttgctcccattccgattttgctctaagttctcaagctttatctttctcatttcatctttaaaacaacaaaacaaagctctcatttggttttcaagtttgatattcattctatttttgtatcaaactctctttaaactctttgttgttctttgatcatgttcccaagatcacccaaggcggatgaagagaggagacgcaaggcaaagatctatgcacaaggctttgcgttagcttaccggaattcatttcgaaatgaacccgcccccatggaagctgaagaacaacaatactcggtcgagcaccaccaccactcgcctgagttgactcagcaaacctccgaagaccctccgcctctcatttgccgctcgagcaggcaaagaacagagcgagcagctcatacttgatcagcaggccgagtacccgagccgagtatggaggaacagctccgaaacaaagcgcgtgagcgaagaagagctgagatagctcgtggaaaacgtgctgtggtagaagaaaaagacgttcaagcggatgatcctatgtatgaggagccggttgaagaagaacaagttgtggaagaggagatgatggaagaggaggatgttccaatcccgaaagctgtttctaagaaggggaagaagactccatctaccaagaagttcatccaatacctcaaggaactaagctttgagaggactaagcatccgcatggcgagactatggatgttttgggaatccgagaagacgtggagttcctatttgatatgtgcggcttatcaagatacatgacctatgctttcgagagctaccaagactacacatgcgagctcctagcaaccttggaggttcatttcttttcagctcaaagagaagaaaaagcgggtaggggcttcggttacgccactttcgctgtgggaggacgagactactctctcaccatcaaggagctagacaacctctacggtttcccatccaaggacggtcttgaaccaaattttgacaagctcgaacttacgcagttttggaacacaatagcggcaccgggcgagtttaactcatcacggtgcaagagctcatcgattcgcagcccggtgctaaggtatttccaccaatgcatagctcacactttttacgcaaagaaggtgacgggtcctatcaacgatagcgagctccaaatgatggatgaagctctcaagttggatataaggaataccaagaacgggagagttatggaagtagatcgggctggcacatctcttacggtgttatttttggattacttgatgggattaaaggactatgcggctcaactacacaagatgaaacgcaaggggtcaatcgggattggaggtatgattacacttatgctagtagctgcgggcattgatctacgaggactggacaaatcaccggaatggattgacattgcctatttgaagaagaagaacattttagacaagacaaccccctccggtgtgcatatctacttgttcaaccacctcgatgagggaagctctaggctgctcctaccttgcaccaactacaccaccattaggcacggtgagaacattgacttctaccctcctattcatgctctctacgatgctcctgagaatataccaccacctcgctatgagcctccacacctgatagtaggatttttgtcaattaatcctaaaacactatcctgtcgttgtagtattttaggatgtcaatccaatccggtgtgatgcaaacagatgagatatgatcagaaagctctttgtcaagccaagcagaaagttggttggttctaacagtcctagtatgcaataacataaatgaaatgaaactaaaagcagaaatggcaatagcaggcaggtgaataacaaatcagaaatgataacaggcaatca

SEQ ID NO: 2370 - DNA, 564 bp, Arabidopsis thaliana landsberg
ggaggccgtaaccagttatttccacgcctgttcgcctcctgaattagtataaacactttatataagttttcatattagcagagtgaagagctaacttatgaggaaagtaatcatgcctgtgcggatatggcttgagtcactgtatactctgtttctgtcttgaactgtctccatatagatttacattgcaccggggtgatcaaagttcttgatgatggaacctataaaagtaatgagttcatatctgttaagatcgagaatcaactgaagttgaaacacatcgcagcagagttatacacacctcattccaagtgcttgaagccagtggatcagatgttgtgatgctcttcttagaagtatcattctttgttggatccaacagagctacagctagtgtcttctcgatgttatcaggttcatcccccaatcgaatggcagccattactgagagcaacttcaaggactgaaaacaaaaaaccataagaaggtgtttggacttctcaagcctactaaacaaacatgtaagaggaataacaatcgtacagcagatcgagctgatttagt

SEQ ID NO: 2371 - DNA, 609 bp, Arabidopsis thaliana landsberg
agtggtttgagcgcgcaaagagatgtgtgtttggtgatttctagttttgaatgattaaaaagtttagtctgtctctctatatatacacacacatattatcggttcaataccatgtaagcatgagacatacgcctatcttactgctgtttgaccaaaagcaagtcgtcgaaaggcgggggtcgcaaattgtatatggtcaaaaaaaatcgatagttactgacgtacattttgaaataaaaaaaatggtcgaacattttcgaacatttctgaatatttttccaccatttatcttaaccaaatattgaccaacgttatctacttgtgtttagaaatattatataacattatattcaaaaaataattgaaatgaagatatgactttataatactgaattcataataataactcaaataaaaaacatgttttaaaagataaaattctaaatatattgaaacacacataatttaaaagacactaattatctttttttgtttttgtgtgagtttaaaattcaaaaacggttttacaataaattcaacataaaaccgagagaattttgtaaacttactagaacaagagttaaaaagaagtgggagctctgagttatg

SEQ ID NO: 2372 - DNA, 1380 bp, Arabidopsis thaliana landsberg
  unsure (1)..(1380): unsure at all n locations
taattttattaacaatacaacaataaataaagaataaacataaattagcaaaaaaaaaaactcatctagttttttaaaaatttaaaccaaatcagttttagttttactatctttttattcagtttgataataatccttttttatccttttttcctgagactaatttttgataataatcagtcagcttaacattgaaagtccgagcataaatggctaatgggataatcatggaaaaaaatttagaaaagttaaatcaaatcaaatttatttactaggtttagttaggtttgtaggattaagattttgggactaaaatatagtttaacacccctaattataacgtttacaacattatttaaggtttgatacaagaaaaagagagatgtgagggtgtttagttaggtgagaaactctggaccgaccaagtggtcgattcaagtnnnnnnnnnnnnnnnnnnnnnggcaaatctgtcatttcactctgttttcacctgagattcccagaaacaaaagaatgatcatctcttgtgtccttttgtggcacagataatctgcaaaaccactgtagagtcttcatatctcttttcacttaatgatttgtgttaagacaaatttatccttataatttattttgaataataattaatatttctagaaaacattttgaaacaaaaaaaaaacaaaaaacgaaaaaagaaataaaaaaaagctcgaacacgagcgagctcgacttcttcttcgggattcttcctccggcgagctccggcgagccgcattgtcgtttttctcctcctgcaagctgcatcaatctactaagtccaggtatggagagagcttcaaaagctttgaattacatattttgaggattttgagattcaatccaattagatttgggttattgtgttttagcacctacattagaagtttaagtatagatttaggcttcatttggtctgttaatgggtaagcaattgatttcacatgctgattcatactaaattgaactcaaatcgaatatttgttcttgtcgcgaaaataatactggtcgaactagctatagtagtaccgttatttatatagataatatgtttaaatagcaccagtattacttagacacgtagtatttcatatatgtaatagtattactcacacatgtaatatttcagaattagtactagtattactgacaatgtactagaatcggtaatactagtaatattgactgagtatgtgtattgttttggcaggttacaatgaaagagaacgtgatcatatattttaaattccaaggtcgcatgtataatgtgatgatgaagacattaggggagaagattactttctcaatgttagaagataggctaatgacgaagcttggattag

SEQ ID NO: 2373 - DNA, 1799 bp, Arabidopsis thaliana landsberg
gatgggaaaaagtcaccattggacctaagacggtaggttgcattttattaatagcttgacatgagatcaagttgttagactatcaagaggaatgagtttaaagcctacgaataaatatgaaacttgatggaaaccccacttatgagattggagatcccaaaatatgggttcaaagggaaaaccaaatcaagttgattaagagttgagcactgtaagactatgcatatatccagttcctaaagataaaataaatagtgttacctgtaagtgttgaggttaagcattagcttctaatgataccatagctttgagatatttcatgggagtgttgcaggatgtttatataaataaagctaatggataatcacctagtgagtgtgaaatggggccgtttctaggagaataaaagagaggctatattctccaaattcactcatgaataacgaggcatgttcaaggccaaaatgaacacaatagagaactaaagttctatgagaaaatgtcgatgtgcgatatatgttgtctcggtttacatcaaaatttgggtggttcaagacatcatgttcacctcatggccgagtaaacccgacatatattaaaaatgattggttcaaagctgaaaaatgttacctttcagatatagttatattttcgcatactctcgaaagtctgtctagtctagtcaaattgtgtctggtctagtcaagtctagtttagtttgttaaagtttgtcgagtctttcatatgtttagtttgtcatttctgttcatgtgggggattgttgagctgatttttacaaaagcccaattgggtttagtataatcaaagaatgtgaatatcaaatgggccataatggatttgtttgctcaagatggagatccggtagatgacgggtcgaatttgaaaggagaaaacaagtcactgaaggaattggtctcttctgtttcacgatcccttgagaataggattcatggagagagtggttactccttcacgtcgtccactcctagatttgtggttgaataaatttgatttgttgaaaaacaaatttaaaccttgtaatctaatctctatataaacatacgcttcaagtctttgatagacacagtgaagtctttgatcgttacacacaaatagcaatagcaaaagctccaacaatctctctatgttaaaagtaagtctcgagagtatcgtagtaactatgttcgttagagctgagtttcgaatgatgcgaaatcagtaaatagaggttgtatcctgggatctttgaatcacacagaaatcatcacactacgagtgattcaaagggttaaggaaagagttcattaactcgactcctcccatgttttttccttaatgtttgtagtttcaatttcaattacctttatgtagtgtttgcgaattttagctccgacaagaatcaatgtctcagagtgacactaaagtcaatgtagtgtttcttcttgtcacaactgaccaccccttcatagacattccaagcagagggagcacaagagggttttcaacaagtagtgttttattcttctcaaaagtcgagaatatgcgcaatgctatgacgatgttctctagaaactcgggattcaagtctcctgaaatagagagcggaaacagagagcgaagtgagcaacttggcaatggaatcatggattttggcgacaaagtaaacacaaacagtggaaaatctcttggccttgagggtaagctcttttgcagtttctgtctgatcttcaatctaagaaggagaggaaatacgctgaagcaatgattcaatgtcacca

SEQ ID NO: 2374 - DNA, 1326 bp, Arabidopsis thaliana landsberg
tccaaaatcccaccgattgtgacacgtgaacggttgatccagacaaaggataatatccttcatgaaatatgactcaaaacgaattttccattcatcagctaattttagtgacaccaagtgactagtgattccaatctcttgcgagttgcaatgattccagacaaaagtatatataagtacaccaactaattttatgcaaaactggtattgaaagtttaaagtaaataaatttatattttttgtcataaaataaatagtataattttatttatagttaaaaaaaatacgtgcaacataaatataactgtccaatgcatatggaaggttgaaacatccatgtcaaagcaatgaacaaattttcaactgctagctagtgtacattaatgtatacatacatatatttactaaatacatatacgtgtgtgttacaaagttttaggagtgtgaaaaatagaagaaggaaaacaatcctaattgttataaattatatatgtaacaaaaaaagagtaaaataataagaatgggtcacaaagtgctatataaatccatcacttccttttatattgctgaatctctgattggtagtaacagtttacatttcgcacataactctccctctgtcttccaccatcatctcttctgtgattcagacacacaaagccctaaatttcaagctttgtcagtccatcttcttcttcttccataccttatctcaccagcttctccatatctctcaaagaaaaaacaaaccctataaattccacaaaaaaggaggatggataactccgacattctaatgaacatgatgatgcagcagatggagaagcttcctgaacacttctctaactcaaaccctaaccctaatccccataacattatgatgctttctgaatccaacacccacccgttcttcttcaaccccactcattctcatctcccatttgaccaaaccatgcctcaccaccaacccggtttaaatttccggtacgccccctccccgtcatcatctctcccggagaagagaggaggctgcagcgacaacgccaacatggcggcgatgagagagatgatctttcgcatagccgtgatgcagcctatacatattgatccggaatccgtaaagccaccaaagagaaagaacgtgaggatctctaaggatccacagagcgtagcagctcggcatcgaagggagagaataagcgagcggattcggattcttcagcggcttgttcctggtgggactaagatggatacggcgtcgatgctcgatgaggctatccattacgttaagtttctcaagaagcaagtgcagtcgctggaggaaca

SEQ ID NO: 2375 - DNA, 3865 bp, Arabidopsis thaliana landsberg
gctataggtgaatccgaattctatatatggggaccctataaaatcgcctaatttcatggcttaattgattttaggttttcgcaaaaaaaaaaacactctttatctatagcagacgccatactcattaaacgcattggtcattcggttcattgaaagtcagccatgaaaaacaaccaagtttcttcttctcctgaaacaaatattgattctaatccatcaaagaggacccgttttcagagcattgaaacaccacaaagtcaaataactcacagtactaccgcggatactaatgcaacagttcctcttacttcagcattctctaaagtttttaaagatattacaccccttgggtatagctctgttggcagcttttgacatcatctaacaatcaacaatcctattctgcaaaaaaaatgcatttatcaaatataggtaaacacatgtatacgtttttgggaatttatgtaattgtattggctcttatagttagaagagtgaacaaattacccgcagtttcaaatgttagggtccgctgctgtttctggacttgcttcaatggtccaagcaaactcaaggcatatgcagaaatctccagctatacaatttaaagacatgaccaacattcagtccatgtctaatgcgtttggctctaccacactccatcgatctgtgtctacaattatggaaggaaaaggttagtgttttgttcatatttttaatggagattcattgacaatataaaaatatttatgacgaaacacaagcctaacgcaattattacaatctgaatttttcaagtgagccaataccaaagtactacttcttgcactagcaatcacaaacagactcctttgcagccagaacaagatagttttccaaggaaaaatctgcaaaacgactttgagaatgcctttcaatctcatattactcaaggtacctattacatccaatttataatatctcatcacattagaatttatcatctaatccttacacattatgttttgatttattaggtcaaagttctgctgccatcaataatgactttcagtgtgaaatgtctgatgttgaatttatgcctcatttcgactatgatagttcatcaaacaatgcaacagatgaggaccaacactactatctcagttcaactgaagatgacattgatgacgaatctacattttctattccatttgctgacccatcatcagaatttgacaactgcgtgaacaatgcaaaccaaacagaacctacaacaccccatatcaccagacgtgcaaaacatgataaattcatggatactcttgacaaaattctaaagaaaaactattgcaaaagcagcacaaaatcagaatttgtcgcagccaaagaaaagaggaaggccacgattgaataaagatacaacctgtttggctgggaatacaaataaatcaggtataatgcggactttacagtataacaagtatgtataatattttagagttacttttgtttccctaatgattttctatttacatgtaaagcttaccttgatcatggtgatgcaacatacaagtgcaactattgtggggcgttgatgtggtttgctgagcgtataaataagaagcagaaaaacaaatctcctacgtttacactgtgttgtggaaaaggaagtgttaagttaccacttcttaaagattcgcctgcgcttataaacaagcttcttaccggtgatgatgcgctaagcagaaatttcagagaaaatatccgaatctacaatatgatttttgcaatgacttcacttggtggaagagttgataactctatgccaaaaggtaaaggaccaaacatgtttagactacaaggaggaaactaccatttgattggcagcttgaagtcctaatccgggtgattatgctaagtattcacaactttacatagttgatacagaaaacgaagttgataacagagctactgtcatcaagtaatcattttcgtctactattttatatattttattttccctgcagcagctcaaaacaataacatggtttaacaacaaccttcacgttttctgtattttgtagcaagggaaaaggtcgtcggaatacaccagcaaaacagaagctaaagaaagaagttattgaagccctcattgaaatgctaaacaaagtcaacccttatgttgacaaattcagacaagctagagagagaattcaagatgataatgatgaaccgtttcacatgcggattgttgcagatcgaaagggtgttgataggaggacatacagtatgcctacatcatctgaggttgccgctttaatacctggaggttttcagccatcgatgttcgaccgagatatagtccttgaagaaaagactacaggtcatctaacacggataagtcagattcatatctcctacttggcattgcaatatcctcttattttgtgctatggcgaagatggttacactcctggtatagagaaatgcttgccgaattcagccaagaagaaaaagaaaaagtgtataagtatgcgtcaatggtttgctttcaggatacaagagagaccaaatgagtgtaaaaccttgacacgctcaaagaggttatttcaaaaatttctctgtgatgcttatacaactattgaatctaaccgcctttcttatatcaagtttaaacaatcaaagctacgatgtgagaactacaacagtttgaaaaaggcctctgaagctggaactacctctatgaatgaagaaggtaaccaggttttaattccatcttccttcactggaggaccacgctatatggtccagaactactatgatgcaatggccatctgcaagcattatggctttccagatcttttcatcacctttacctgtaacccaaagtggccacatataacaagatactgcgataaaagaggtttaaatcctaaacacagacctgacattatagcccggatttttaaaatcaaactggattctctaatgaatgatttaactgtgaagaagatgcttgggaagactgttgcatgtaagtatggtttagtatactacattactatttatcaaaatcatctaatttgaaagcactcattctgttttgtttgtgcttgcagcgatgtatactgttgagtttcagaaaagaggcttgcctcatgcacacattctcttattcatgcatgctaagagtaaattaccaacatcagacgacattgataaacttatttctgctgagattcctgacaaagaaaaagaaccagagctatacgaagttatcaaaaactccatgattcacggtccatgtggttcagcaaatgtcaagtctccatgtatggttgatggagaatgttctaaactttatcccaaaaaacatcaagatataaccaaggttggtagtgatggttatcctatttatagaagaagaaaaactgatgactatgttgagaagggtggtattaaatgtgacaataggtatgttatgccttataataagaagttttctcttcgttataatgctcatatcaatgtcgaatggtgtaaccagaatggctccattaaatacttattcaagtatatcaacaaaggaccagacaaagttatcttcatagttgagccaactcagcaggctacagctggtgactctgaaacgccacagcaagaacaacgttcagctgagaagaagaagaacgagatcaaagattggttcgattgcaggttagtttatttctctgttttttcttaattatttagtttggtttcacattgaataaaaatttcattctaatacataatgaattgtttgcatataggtttccgcatctgaagctgtttgtagaatttttaaatatccaatttaacatagaacaacgcctgtcaagaaatt

SEQ ID NO: 2376 - DNA, 558 bp, Arabidopsis thaliana landsberg
agtctgaatgattgaagaaatgtttttccttcgatccaaaacagagtaaatctctccattagaactcacattgttatgactattcaacaatgtttcgaaccaaccgcttcctgatctctgcatcgacaatatcgcaaagtacctcaccggattatgtccacattcagctctagtttaagacaacccaaaacaaagatttaaacaaaggaacaaaccaaagagagtcaaaaacatagacaagaacagaactggtatattagttacctattaaaagtctgaggctttggataatgaatccgagtaacaaagcgtagcgagtgagaatcaataggactagtttggacaagttgggaggtttggaagctgacattacttaactgttttaagcaaacagcgcaaatgtagagaccacaaaccatagcaaacactaaaacaatcatccttaagaataatggtgatttctttggttgctttataacaatcgctgcactgtcctgttacaaacaacaaccaaatcaagagtctttagttgcctagagaattgatttaaaaccctaa

SEQ ID NO: 2377 - DNA, 565 bp, Arabidopsis thaliana landsberg
  unsure (1)..(565): unsure at all n locations
cgatctccaatggaattgaatcgcctgctcatcatgaggtatttggtctgaattggataaatttattgctagatttaaagattaagcatctgaatttcactggaaatgttactcaaaatctgtgatgtagttggtctagtgttaagtttatttttatgattcagttttgtgtcacattttagattgagcggtataaggcagagattaagaagcttcaggaatcagaatcagatatcaaagccttatctgtaaattatgcagctctcttaagagagaaagaggttagtttctgacacacaatcttcaagcctttaactatttttctctctttttctnnnnnnnnnnnnnnnnnnnnnnnnnnnnnnnnnnnnnnnnnnnnnnnnnnnnnggagaatggctcattgaaacaaaatctgacctcaactagtgccgctcttaaagaggctagaaccgacatttcaggggatcaaacaactatgctatcaaggtagacacttcatatctttgtttcatctctatgcgattctttgcgcatactgtgtgtgaaggatcacgaggatcatgc

SEQ ID NO: 2378 - DNA, 562 bp, Arabidopsis thaliana landsberg
  unsure (1)..(562): unsure at all n locations
atgtccgaatcataacagaaactgcgggtttgtgttcccggtttctgaacagtcagagcttttccccatcatacccaaaacaannnnatcaaacaaaaaggctttataattagtctaggattcgactcaaaattactcggctattttttcaaaaaaaaaaaaaaaaaaaaaggataaattcaagaacttgatggagattagtttcacctgagagcctgagcaatgaagttgctcacaacgcgaccatcatcaatgttcatacgaggaccatatgtgttgaatatcctcgctatgcgtatctctacaatggccagacaatagaagtaataactaatcagccaataagcttaaatcaaagttttcaagaaaatggtaaaagagtgattaattttaccaannnnnnnnnnnnnnnnnnaatcaaacataagagtctcggcaacacgttttccttcatcataacagcttctaacaccttataatgtgccaccagcaaattcattttgtgttagttcataaattgataaaccgagattattacaaaaaatagtcatataatgactta

SEQ ID NO: 2379 - DNA, 2902 bp, Arabidopsis thaliana landsberg
  unsure (1)..(2902): unsure at all n locations
gggtaggagacaagtaagcttgttggctgtagagataccattcaagacagaggtgattccaacacaatctatatcagttttaagaggggcaatagaccaaacattttgggcaaacggacattggaagaggaggtggagaaccgattcatcttcgtcacaccgtggacacttaccactatccgtgatatatcgattcaagaggtttgtccctacaagtaaagcattctatcccgccttccgtaagagaagttttgtttttggggatgttttgagtgcccatatgttcgatctccagttgaaatcttctgttgtaataatgtcatcagggataacgggagtagtaaacgtctttaatgcctcaaagtaaccggacttagcagtgtaaactcctgaacttgtgggtagccaagcccaggaatccacagcaccaagcgagcttggtttgagcagaagaatgtcgttttcataagcggggatgatcgctctgatgagttctgtattccagatcctagtgcgaggaatgatcaaatccgacaccataagattgtgtgatgcttctgtaagtggtcccatcacagctttcggggcagatagagatagccatggagttcgccaaagaggagtttcaattcctgagccaataaggcgtcctagctggagttttaaaatttccttgcccaaacatacacctctccggccatgggaagaggattttggtgtttggcagtctagaagggattgatttttgcagtatttcccaagaagaatcttgctcaacagacatgaagggttagtgagtattctccaactcagcttggccaataaagccttgtgaaaagtctgtatatccctgaaacctaagccaccagacttaaaagattttgtcattcgttgccaagagatcctgctcatcttttttttttcaggattnnnnnnnnnnnnnnnnnnnnnnnnnnnnnnnnnaatgcgtttgcaaagtgaagtaggaagttggaagcaagacatagtgtaggtaggcatggtggccaagacggacttgagcatcgtgagtttgccagcagaagataagaatctggaggaccaactcaggactcgttgtttaatccgctcaacaatagaggtaaacagatcttttttctctctaccaaaaagttgaggaagtcctaaatactttccttaaccaccctccttatgtataggcaatgttctcttgactctttctcggcagtctaatggggttttaactgaaaaagtgattgaagattttgactgatttatttgcttgccagaggcgagttcatacttgtggaggattgctttgagtttcagacagctcttgttgtctatccggcagaagaacatggtatcgtctacaaagaggaggtggttgagtctaggactgccaatagctactcttaacccaggaaggcttccatttgcctgtgctttcaaacctaaccctgacaagacttcgctgcagatgatgaaaagatagggtgaaagagggtcaccttgtcggacacccctctcaggtaaaactaatccttttgcttggccattaagtaggaaagaataggagactgtagtaatgcattgcataagccaccctctaaaattctggtgaaaacccattctctctaaagttgctttaatgaagtctcattctagtctatcataggctttactcatgtccgttttaacttccatatgacacttctttgttgcacctgagtgttttagatagtgaagagcttcatgtgttattaggacattatcagaaatagcacgttaggggacaaaggccgattggttttcagaaatgcacttgtggagaaccggtttgagtctcttagctaaaagtttcacaataatattgtaatagacagaacatagagctatgggactgtaattagaaaccttttgtgggacaagtatttttgggataagtctgacatgggtgtggtttatcttttgtggtaataggcctgagataaagaaggcttggatttcagaagttacctcatcacttatcatattccagttggtttgaaagaagcttgctgagaacccatcagggcttggtgctttgtcagggtgaattgaaaaacaagcctgtttgatttctagagcagtaggtaagcaagtaagagaatcattcatatcaggcgtgatacaaggtgagagagcctccagagcaatatttgttctctcgctatcttgtgaggtaaaaatgtcttgaaaatattatgagataactttagtgatttcctctttctcataaacacttttccgtgttgaggattccaagactgaaatattattaatagctcttctgcctttggtggcagcatggaagaagcctgaattcttgtcccaagagccaaccagaattgtctacttctttgtttccagaattcttcttctttcttgtaagacactagaagttgttggtttagagcttcaatagtaacgtggacatcattcattgcattctccaattgttcccttagagaagtaatctctttttggttgttgatatgatggtctttgctccatttgataattgcagttctgcagagatgaatacgatggtcaaccttcgcatgcggttttgctttccaggtatctaggaccagctttgtgacttcaggattatatttaagacttctatcatatctgaatatggtttgttttccttgcacaggatcaaaagaggtaaccagagggcgatgatcagatccttcaaaccttaggtattcactgcggcctgaaggataatcaattatccaatcactatttgccattgctctatccagtctacatcgaacatagtgagaatgtcttttccctctccaagataagaagtttcctgtatgttttaagtcataaagatcgcatgaag

SEQ ID NO: 2380 - DNA, 521 bp, Arabidopsis thaliana landsberg
  unsure (1)..(521): unsure at all n locations
ccgtattagatgggctgcatcaggccctggaagctaaagaaaatgtaaagatcgattcttctacccagacctatgctaccgttaccttacagaactattttagaatgtaccacaagctctgtggtatgacaggtacggcagaaacagaagctgctgaactttgggaaatttataaactggatgtggtgagtattcccaccaatgttcccgttattcgccaggatcagcatgacttggtctataagaccaagcgtgaaaaatatggtgcagttatcggtaaaattgtagaatacacagaggcaggccgacctgttctggtaggtactacctccgttgaaatcagtgagcttnnnnnnnnnnnnnnnnnnnnaaaacaaattccgcataatgtcctgaatgccaagcaacatggtaaggaagcccaggtggtggctgaagctggtttgcagggtgctgttaccattgccaccaacatggacggtcgtggtacggatattaaattaggagctggtgttaaagag

SEQ ID NO: 2381 - DNA, 594 bp, Arabidopsis thaliana landsberg
  unsure (1)..(594): unsure at all n locations
tgactttcttcttagtttatgtacacagccaatagttgttgatcgagctgccccaaggagaaacataagtatcgagaaatgataacgtcatttagtatgcattttcgtttatatctccttacctctctcatgtgtatttcctcaagttacgtttggcccgaaactgaccaagcttgtctctccactcagctgcaaatcatataaccaacagtgtattgatcattagagattagaccaagatttacgaaaagctataaaagtttctgttacatacataaatcagattggtctcaaatgctgggccaccaatcataccagtaagttatgtaaccactaataaagtgtacattgtggatatagnnnnnnnnnnnnnnnnnnnnnnnnnnnnnnnnncgctcttcatcaacggcttgcatcattttgctcaaaatattgaactctttcgtatcaagacaagcctgaccatttggtctgcacaaagtcaaaaagtttatggcactcaaattcacagtaaaaagatgtgatctgcaaagattgatctttaaggtgtctgaaaatttaccggtcttgttcagtaaataaataaaccatctg

SEQ ID NO: 2382 - DNA, 5953 bp, Arabidopsis thaliana landsberg
  unsure (1)..(5953): unsure at all n locations
gctagaaaattcaagtattttttctttcttttttcagatactcgcatcaatggttgattcatgtggacagatttctgcagtcgcaatgnnnnnnnnnnnnnnnnnnnnnnnnnctgagccttatgaatctgtttcatgtgcttttgtttcatatggcagctgtgccatggatttggctgagggttggaagtacaggagtcgattgtggtatggtgttggccttccctctaaacccagttcacttggtggtggtggcagaggttcagactcctggaaatctactttagaaaaagatgctcatggaaactggattgaacttccattggttaaaaaatctgtatccatgcttcaagctttgctattagatgagtctggactcggaggtggccttggaataggtggaggatctggtacggggatgggagggatgacagccctctaccagttgctggacagtgatcagcctttcttatgtatgctgcggatggtgcttctgtctatgagggaggaagactatggcgaagataatatgttgatgagaaatctaagttctgaacgctcctcagggaattcagttacattagatagtggttctcagatgtctatgcgacaatcccgatcagctttattgtggaggtaaactcaatgaaatattttgtttctctcttcgtggacaattagatatccatctgcttagatactttgtttcagcatttttgcaccatcgtaatctggtgcggacactatgatgctctgagttcagttgtgtccattagtcgtttgtgggtcattcacgatgatgactacatctcatatagtattttctattggattatttgcacagaagtttataacatggtatctaatgcttaatcttttagttccacaatggatatttggcctgggtctgctgtttattaggagaagtttgacttttttttccttatcccacagtgtgctatctcctatcataaacatgccaatatccgattcaaagaggcagagagtactggttactgcatgtgttctctattctgaggttagtcttccataatcagattggcatgtttaatgatattctggtctcaaatctcatgctgcgattggaaagttgtcatctgtgtgtatatatattgtctttcttctgatgccgtcaagtgtccttcgtgtatacatattgtctttcttcgctttctgattccagaacaaatctgtgtaggtatggcatgctatcagcagagacagaagaccacttcgtaagcagtatatagaggctattgtaccaccatttattgcagtcctccggagatggcgaccacttttggcgggcattcatgaacttgccactgctgatggtatgaatccccttgtcgttgatgatcgtgccttggctgctgatgcgctccccgttgaggtagcttaaagctgtttgcattccctcagttgctttcatagttatatgtttctagattggccactgtttatttctagtcgatgagataccaatattgttatgcttgagttattagattgagctatccaaatttgtctgtttagggtgctctttctatggttactccggagtgggctgctgcttttgcttcaccgcctgctgcaatggctctggcaatgatagctgcaggggcagctggttgggaagcaccaccacctcctacaccttcacatcttaggcgagactcttcaatgcttgagcgtaagactgcgaaacttcagaccttttcaagcttccagaaaccactggagcctccaaacaacaatgcaccacctcgaccaagagacaaagctgctgcaaaggcggcagctttggcagccgcacgagatcttgaacggaatgcaaagattggttcaggaagaggtctgagcgctgttgcaatggcaacatctgcacagcggaggaatatcggtgacatggagcgtttacagagatggaacacttctgaagctatgggagtggcgtggatggaatgtctccaaccagtggatacaaaatcagtttatggaaaagattttaatgctttgtcctacaaatttattgctgtacttgttgcgagttttgcattagcacgtaacatgcaaagatcagaggtttgttttccacctatgtcacattttattggttttgtgagcatactggagtctcatttttggttcaacttctcaccagattgataggcgtatgcaagatgatatcatagcggcaaaccgtctatgcttgggaagccgtgcttggcgaaaactaattcgttacttggcagagatgcgatgcttttttgggccttttggagatggaatatgcagtcctgaacgcgtaagccatgtttaaaaaaagaaaaattgaaacatgttaagaaaattcttagtaatgtgatatcatttaacatgcaggttttctggaaacttgattctatggaaagcttttcgaggatgagacagtctataaggaggaattattctgggactgatcatcacggggcagcagcagattatgacgatcagacagaaacaaaaagtgataatggtagcaagggttctcaatcaaatcctcctgttgttgctgctgaagtaatattaatggaaatagcgtatgaagaggatgaacatggagagggtgatcagcttgatgtcaaaggtaatgctgaagaacataaaagggatgaagggagaatatctgggtcacatgagcatgcatccagaacttcagcaggaaacagtgatcctcgaacatcaaatgaccttgaaatggtccgagattcttcagtagtagcacctggctttgttcccagtgaacttgatgaaaggatccttcttgaacttccaacatctatggtccggccactaagggttgtgaaaggaacctttcaagtatgttagaccaacctgaatgttttggattttctacaagtagctaacatgaaaagagaggaaaaattggatataatcaactagattagttagattggttagatccaagtgaagtcaagaattgtggcatgtagacatcatagaaaaccagaaattggcttatgtttccaaatatgcttttcttgtatgacatttggattgctgattatacctgctgtgcatttctcagattacaacaaggagaataaattttattgttgacaacagagaaagccagaatttggctgatcactcagatgagtcccaatcaggtgatcaagaaaaggatcgtagttggccaatgtcttctcttcatcagatttatagccggaggtaaagtttcatcatcaaaattctgggaggggaatattcctattcactagtcactacttcattttaatattttcagatgatttatctgcttagtatctagaacttttatctttatctaaccaagatatggaattttcatctaaaagaaaatcaggaatggtttatagtttatacctattgttgttcaatgcactccctgacagagtgaaatgaaaattttgaagcactttgattgcccacaaacccaacaccaacaagtcatttagatgaaaatttcatatcttggttgctgaatattacttttttcggttaagttttactctttctgtaggagttgtgtttcatttttattcgggattagtgatatgactgatgatcgatttctttgttttttttctttctcagatatctcctgagaaggagtgccctggaactttttatggttgaccgttcaaacttcttctttgattttggggtatctgcatctaaaactctttctacgtatgatatatttatctctctgaccttgtaaatctccgcatgctgtaatcaattacttttcccaatttgcttgttttacatcatagaatactgagggaagaagaaatgcatatcgagctatcgtgcaagcaaggcctcctcacttaaacaatatttacctagcaactcaggtttctgttttatccttactatcttattttctttaacttttgaattactcttggttcatatttttcttcaatgggggattgataacgcaaatgactaggctgagctacttttcgttctgtactgcaaacttacaaatattgttacctttttagaggccggaacagcttttgagaagaactcagttaatggagcgctgggctagatgggaggtaccaactacactgcacactcacgcttgtcatgcaatttttatccttatccaagaataacatctaatacagaaagatctacatctggataatatctgcagatcagcaattttgaatacttaatgcagcttaacacgttggctggccgtagttacaatgacattactcaggtagatcttgtgctcttttacgttttcctggtgaacttgtcaatgcccttacttgcttgatagatagatatgttattctttgcagtatcctgttttcccgtggattatttctgacaacagttcagaaagtctggacctttcaaatccatctaccttcagagatctttccaaggtggaatcctttgcagtttgtttccaattttacgttcttagtctgcatatgatggatcataaacctagagaatcttgttttgatgtgggtctgtatatgttcagccaattggtgcattgaacccagagcggctcaaaaaatttcaagagcggtattctagcttcgaagatccagttattcccaaattccactatggctcacattactcgagtgctggagcagtaatttctcttctctataatatcctgccacaattactgccattcccagtttaaagtttgtgttccctgaatcgtggacagaaaacaatggatactgtttttatgctactagatggagtttgtacacttttcgacattttatcatttatttcatgtgcgcaggtgttgtattatcttgccagagttgaacctttcacaaccctatcaattcaacttcaaggtggaaagtttgatcatgcagaccgcatgttttcagactttccaggcacttggaatggagttcttgaagacatgagtgatgtgaaagaattggtacgtattggtctccataaaacatcgaatggattaattattcgcctcttccttaacaagtcaagagcctacccttatttagccactaaattacaggttccagagttgttttacctccctgaggtgctgaccaacgaaaattcgattgactttggtacaacacagttgggagaaaagcttggtattgtgattcttttccttgtcatagccaaaatttatgcgtggcatggtgagaattttgttatctgatgcggtttttttatctattagatgctgtaaaacttcctccttgggccaaaaacccagtggattttgtacacaagcaacgaagggctcttgagagcgagcatgtatctgctcatttgcatgaatggattgatctcatatttgggtaggttttcacccttgaactgatgatatactgtcagcacatttttccataacttagtttctccttttacttagtgtgttcagcaaaatattcacaagtgtctttgtaagccactaaattgttttttcattcaggtataagcaacgtggcaaagaagctataatggcaaataacgttttcttctacattacctacgaggggactgttgatattgataagatcgcggacccggtaaggcaatttctctgtactgctggggttgctcagttttagtattaacatgctgacatgacttgcccgtgaatgtttgatgaaggtacaacaacgtgccacacaagaccagatagcttattttgggcaaacaccatcccagctgttgacagttcctcacatgaagaggatgccgttgaaagatgtcctacatatgcagactatttttcgaaatccaaaagaaataaaaccatatactgttcaaaccccagagcgctgcaacttaccagcctcagccattcaggcatcttcagatagtgttgtgattgtggacatgaatg

SEQ ID NO: 2383 - DNA, 618 bp, Arabidopsis thaliana landsberg
  unsure (1)..(618): unsure at all n locations
ctctatccatacactcaattcgcgtttactccgaggtagtgaagttatctccaaatcatcatcgttttcctcgtttggttatttcgtcaccggaaacaaaacagacgtcgttttcgagaaggtggttatgccgaaagttattggcgacgttatttgggatgctcgggttgagattatgtttgcgatgaatacagatgttagatatttaaatggttttttgatggcggcttgtcctcgtattnnnnnnnnnnnnnnnnnggatcaggcggggaaggtcacgggatcgttgcttggaaatgtgaaacggtgtgattatatattccagaaacatttggcttaatgtaaactttttattcacctcctactttcttaaccaattagaatgtgttatataattaagaaaaaacatatttaattataaaattaaatttgaccatttgtttataaaattcaaaacaattatttaataatacatttaaacattaccttttttttttaacctagactgatatttaatttcgtttaattggaaaaaaaaaatctaaacccttattctcttttgtaaaccccaaccgtcatatagactcgtttaattgaaaagaaatctacaccctaatt

SEQ ID NO: 2384 - DNA, 526 bp, Arabidopsis thaliana landsberg
tcgaggtatttatcatttattctcttttccgcgctctattcattccttggtctcttattaattaacacgcactgtatctaacaggcaggagctcatgggctccccactgttgcaacaattaatggaggacctgtcgatatacatcgggtttgtctcttttcatattttaatagaaaatatgcactatacaatcattgcagagcctatgctgaattgctgatatttgctactaacttgtaggttcttgacaatggtcttctagttgatcctcatgaacagcaagctatagctgatgcgctcctgaaactagtttctgacagacagctatggggaagatgcagacaaaatggcctaaataacattcacctgttttcatggccagagcactgcaaaacatatttggctcggatagcttcgtgcagcaaagacatcctaaatggcagagagttgagtttgagaactcaaactccgattcactcaccgactctcttagagatataaatgacatctccttgatctaaacttt

SEQ ID NO: 2385 - DNA, 478 bp, Arabidopsis thaliana landsberg
  unsure (1)..(478): unsure at all n locations
tggtggagaagccatatactctgcttctgtggttgacttcgtatctgttggattgagaggtgttctagagcttgggacagtattactcaaggtactcacataaccagtcatcgatcttatgctgagtatatctcctgcataatgcgtatttgaataacctcctattaggctaagcgcctcacctttgtttatgagtacaacattagacccacctactatgtgcttgaaacatcttttgacagacagcctacgttctttaaatgatgnnnnnnnnnnnnnnnnnnnnntactgtctacaggtgcaggatctggccatgttcagactattgtttacatcaaacatgccacattattagcatcaggaacacgagacatatgctatatgttcttttcagactaaagagcaaacactgtgagaggtatattatctgttaaaagagtatcaccaggttttgatgataacacaccaaacctatcc

SEQ ID NO: 2386 - DNA, 562 bp, Arabidopsis thaliana landsberg
atatgtattaaatatattacgtacttctttgaaaattaaagaaaaacaatgttcatttttttttctgtttgatggttaccatttaaagctaatatatcggtaacgagggtgtatcatatgttattatataaaatacggttttaaaaattactaactcacgagatcatgaaacgtgccaagtctaacggtaagatgtttacatgtgttattaaagatataactttttattatcttaaaaaataagaaactctaaaaagtaaaggggaatttgcaaaagtacctttttctattacctttttgcagcaataacttttctgttgtccattttaaaaaatacatgttctcttgaggaaaatgaacaaattaccctcatctaatgagaatatgaaattataaactgaaatattttggcgccaaaatatttttttttctgacaaaaagaaaattctaccaattgttttctcgccaaaaaaaaagtcgcgccaattttttatctccgtaacaatttttttccagctaaaaacatgcattgaaaaaaaactagtaaaatcttcttaaaaac

SEQ ID NO: 2387 - DNA, 1925 bp, Arabidopsis thaliana landsberg
caaactcgatcatgtattctaataagtagtaatccgttgcataaatgcttaatatataagttgtaacaaaaaaaaaaccttgatctagtaattagattacagtttatgtagccaaattataaacaaactaaaaaaaaattacaataactatcttgtgaagatgggaaatttacgatgtcagagatgagtccatataataaatttgtacgaatacagtttcttcttaattggcgtcaatttatctattaactagtccctctagtagtattggattgtcatgcttgacatgtttcaacaataattgacattattccacaaccatctcaaattctcatgccttaataatcacattacaataatatatatcagatcactacgagcattgaacatccattatattgaaatatctttagtttggggatacaacatccgaatattataaaaaacaaaagctatccggaaattaataattagtacgtaacgcaatccataaacatacttatttttaagtgtagtagatacatgaaccattacttgggtcgatgaaaacaaaacaaccagtacggccgaacctacaagcatcttcgatacgaccatggctttgataatatgcgttcatggcaaacgacgcatggtctaataacgtgttaggttcatagcaagttccacctggttggatcggtgtacaatcaacattctggctacaagcataatcaatatttgcttgtaattgttctcctgtggcattcggcatggccatgcaccattgtctgctagtcacgacagggatcgcaacagcagatagaagaagaaagagcgttaaaagctgcgatgacattgaatgagaaacaagaaatcttaatgtgtttgtaagaatcttaggttatgtatatcatgtaatgtgattttcattgttcttatatagagatacaatggagaataatctagagttatgaccaaagatttcaagggatgtgattatggaagcacttatgatatggaaactacgtattgagaaagtttcttttaatttgttgctcacgttatcgcagttacatggaaactatacaaaaagactttgaaagtacatggatcatatacaaaaagacttttccaaacaatagtgattctctctcgctacttttgtgcttatttgggaaaggacttaacgatagagaactagaagatttattaaacgaatgggagtttctgtttacaaaactaaaaatccgaattcaagtattctgtttccaatttgtaaatttctatatttttttttgtcattataaagtagaagttgatgtccagaaaaaagttagaagttctgaagaagttccctgcaccaaattttttccatgaattgaccaatttgttgatgagttgtatacttgtatatattgtgcaattcctaggaacgtagttatagaaatttaccataagtttgtattgtagtcccatgacctgaaatcgaagacaatcatcgcacaaattttcataggcaatttatttttattaaattataatttagtttgggtattactgtatacaacaacacaaaagaaaatccatattagatataaacaatcaatagcacaatcttaatacagtcgcaaagagttttctttatttaagtatagtagacacatgagtctttacttgggtcgacaacaacaaaacaaccactacggttgaacctacacgcatcttcgacacggccatggctatgataataagcgttcatgacatacgatgcatggtcaaataaagtattagggttgtaacaattcccaccgggttggatcggtgtacaatctacgccgttgctgcaagcaaaatcaatgttggcttgtaactgctcatctgaggtattagggcattggcgtacaccattgtctgcaagtcacgacggggatagagacagttga

SEQ ID NO: 2388 - DNA, 2779 bp, Arabidopsis thaliana landsberg
agcttgtgatattaataggtatattcctatctattgcagagtctctaaaaccgaaattacagatccccaattgtttttgttcctcaatgtagataaagacttcttgactcttatctttggaaattttctgaatacgtgaaattaggtcttatatttatggcatttggcccgagttattcgtactctctcatcagattgttgtatggcgaaaaatggagcgatggagaagcttccttggccctacagttttattgtctctacatcattgtcctagccatgaacggttagtgatcatatctggattaactaattcttatggacttgtcaagcttcttcttttggcggttactatcttcaatctgttactttgtccattatttcgtcagggacctcggaagcatttttacatgcagttggaacaaagaatgaactggagcgctcaaacgacatgttgcttatattttcattgatttacgtcgcattaaatattctactgataagatctgccggagcaataggtttaatcatggcgaattccttgagtatccttcacctatatatatatatatatatgtatatatatatatacttcaactagaatcagctattgttcatctcgtttttgtcttcttgacttctaaaaaacaaagatatgatttttaggatcatctattcagggagattcatccaacgttacttccaggtatgcttgattaaactatagaattatgtaacatcacccattttttcaacaacatttgtattgaacctccaaatttgtctgtagggcacttcttcattctcgttccgaaaatgctttcctttaggttggcaaattcttatcctttcgagcataatcactctcatctcagagaaaaccatcctagatcgtaagaacttttgggaaacatttcccctccatttcggcatcggtgtcatctgcttctgtctttcggccattgtcatgtaagtctcctctcctatggctactacaatatccatttcaaaaaactgacatttaaggtcttgtttcggttctgaaaacttgtgtgttttcgttggtagataccggcgtgagagggtgttcatcaaaagaatcaaacgtttcagggattacaatcacgacgactgaagaacccggtatatgccctggttaaagttcggttaaggattcggtttatagttttgcttagaaaagaattttaacgctgagacagagaagcttttgtattaccgaatccacctttagtgtggaaaaaccctcagtttttataggagttatttaacatggtactactcttcattatttttgtttttggtaatggttgaatcatttcatgaatgaaaaggtacagcaagattgaaatatgtataaaaacttattagaaacaacttgtcttgccgcaccgatgatgattcggaccaaatcctaaaacatttttttatacattcaaaatgtgtgtgtcgacgaccttttggttatattgcaagggtttggtgagtgaagaggtgataagggatgagagtaagcagatcggtggttttggtgtggccatatgtgatcacgaggataatcgactatatgagatgaacaaagttctgggaggtgaagagtccacacaccagcaagctgctgaattggctgccttaattcatgctttgaattgggcgttggagcttgatttgggaagggtcacattcttctgtgatgattccaatatcttagaatacgtaattactcaaccctaaaactttttttcattattagacataaagtatttgcctaatgtttttcttttctatgtaacaggtgacaggtaaagctgaaccaagcgagtccactgtagcaacacttgtgaagaaagtttctcttcttcagagcaaattctcgttttgcgaagcacttcctgtgatgaaggacatcacttttgtccttaagcttgcaaaagatgctatagcttcccaaatcaggtggcgtgaaggtgacgtctacatggagacttgtccagtatgctatgaacacgttacatctgacgagaagtttgaggtacccggttgtttccaccgcttctgctttgattgcattaagaaacaagccgacgtggcactagaatttgcgaaaccactagtaaactgcccaagcttcggttgcaactcagaactacagagagaggattgtgaaggtgttttgaaacctaagcagcttgatcgtatgaccatgtacaagaaggcgagcatgatcaaagccaaagttttagactttgtatgttgtaccacatgtgacaatgtaatggcaaagcccgacctcattgaatacacaaaaacgttcttcgttgatgctgagctgtcaggagtcagaaagtgcacggagtgtgggtattgtttctgcggagaatgcagagcaggatggcactctggcatgacatgtgaggaatactttaaaagagagagtaatgagccatctcctgaggatgtggaacgttaggaagcttcggttaagagtcttagatggatgcaatgcagaaattgcaagtcgaggaaggtatttgatggaggttgcaaccatataacctgcaggtacactctctctttctctgcatttttacttcatatatagtgtattagtaaagtgtgtgtatcatgatatttgtttttttttgtttattaatactggttttgatctcacagttgcaaattcgagttctggagctcttgtggagctgagtggaacaaggaagccaactgtaactgcccgagttgggagttagaggaccagcga

SEQ ID NO: 2389 - DNA, 566 bp, Arabidopsis thaliana landsberg
cataagagggcttgtagttctgcttccaagctgatttgcactgtttgacctttgctttcagctgccggaatgtggcctcccgtgtcatctctgagaatccatcccgcattcggttctgtgtctgcattatagtagctgcagtcataattacatttgatgaatccttgagccggtttattccatccttgagtattacgccttctatcattttgagtctgtgtttcccgtagagaaggtagccattcataagagtctgttattgctttttgcacatcatcctgccagaaactccatcgcctttgataaaccaacagattcctactcttccatatgcgccagagcatccagagaggtatttgcctcgtgatgttatccagtctttcattgttgcagcattgaagtatgagtctgaacttgtcatcaaaggatagatttgcattgaaaaagtctgaattagaaactggggaacctctccagatagcttgtgcatagtgacaaccgaagaacagatgatctaacgtttcagccgctgcacaacatcttttacattgagaatctgaagtgat

SEQ ID NO: 2390 - DNA, 212 bp, Arabidopsis thaliana landsberg
  unsure (1)..(212): unsure at all n locations
nnnnnnnnnnnnnnnnnnnnnnnnnnnnnnnnnnnnnnnnnnnnnnnnnnnnnnnnnnnnnnnnnnnnnnnnnnnnngtgtgaacacctccatggccaacccgtcttttaannnnnnnnnnnnnnnnnnnnnnnnnnnnnnnntggcagacgcgtagctgatcattacttgacccaggcactccagagaggagcaatgcggtctggtcatat

SEQ ID NO: 2391 - DNA, 532 bp, Arabidopsis thaliana landsberg
  unsure (1)..(532): unsure at all n locations
gatttgaagcaaatgcgacagtataccactggtaaaatccattaaatatattttttttttctgaggtaagacggatttgggtttatagtaatacgagacggtatacaatgggtgaaatcctataactaacaattaaaatatagttatataatttaaaatatataacaaaacaaacaattttaacaaaaatatatataatttaaaaatcgacttatggtgtatcccatgataaaatcaagggattgtacaatatatcaaaattaggattatatatttataaaatataaaacaatatgttacatataaataatttataaaaaaattatattttcaattttttttaataaaacaagtnnnnnnnnnnnnnnnnnnnnnnnnnnnnctaattataattattattcaagcaatctttttttgttttttttatgtcaaaagaaagaagtaaatagtttcgttgattgaaatattctttaaattgcatttcgttgttcgaaacgtgttggcctatagatgggtttaaagcccaaaatat

SEQ ID NO: 2392 - DNA, 637 bp, Arabidopsis thaliana landsberg
gtaaaactatttctttttttaaatgaatcatcatatcaaaaatatatttctcaacatgtccgtcaacatctactttacaattttaaagtacatatttgctcatttgtatggatatatttttttttttgtactatatcttaactttttatttttggataagaaaatcaaatatgatgtttaatgctaatataaaacatttgagctaatttcctaaaacttctctacaaacataaatatatgattctcatttcacttttatttgatcttatatttatattattttgaattataataaaatatttattgttaataaaatttagattgtttctggatatattgtgattcaaaagtttttaaccagacatatattactcaatcaatgaaatatattttttatgtataatctaaaatatcacaaaattaaatcactaaaaataatttaatcgattaagaaacatttgctcatttattgtgggtcgggttataataaaatgatgcaaaaacaaagcaaaaatgtttttagaaaaccaaataatatcgaaaaccatataaaagataaaataataattgacaaaaatattgaaaactaacccataagaagccatacacaatcaatcattattttattataaataac

SEQ ID NO: 2393 - DNA, 381 bp, Arabidopsis thaliana landsberg
  unsure (1)..(381): unsure at all n locations
gaaagcagccagaccgaagggagaaagacagcgtatgggcgttttaccaaggaggaaccaaaaggaacnggcgggcacacgcaaccaacaaacccaacacggggaaagaccccggggcaaggcaacccacggcaaaacggaaaaccgacccgcgaacaaacaaaaaagggacagggagccgncacaaaaaacgaaaaaccacgctntaataaagaaaggcctagggctcacaaaaccaagaacacggcccaaaaaaaaaaaacacacgcctacgcggcaaaacaggcacctatccccatacatgacaggcagtgacaaaatcagaacccgccactcagacacacgtccattgcaggcgaccaccagaaggagaaacaaagc

SEQ ID NO: 2394 - DNA, 611 bp, Arabidopsis thaliana landsberg
  unsure (1)..(611): unsure at all n locations
gaagcgtgatgatcatttcttgggttggaacttggatttgatgtgtttaacagttcctggagaagtttgaaaggcttgagccaagatgttgtcaggaacaggaggagtagaaccaaacaaagtagcaccaagagattgagttccaggaagctgactattgaaagctgcaataacagaagcagggacatcaccattgttcttctggaaatggacaagtcctttggggaaagcaaagacatctcctttcttgagagattgagagattagcttattggcagtagtgagaaacccaacgtcaagtgttccttcgaggacgaagacgatttcagtggcacgtgggtgggtgtgaggtgggtttaaaccacctggtgcgtagtcaatacgagagagggagacaccgagagtgttgagtcctgggattgtcattaacgttagctccagtgactaaggcaccgaatgtgttgttggtaagacctggtttagctaatccttgtgagaagaaatcggctgatgtgactgtagctgcgtctttgcatgggaagccatttgatttgattnctgcaaaaaagaaaacaagaaagaaattagaaattggatttttttctaggaaa

SEQ ID NO: 2395 - DNA, 576 bp, Arabidopsis thaliana landsberg
tctaatatcaccaggaagcaatctcttatgtctcaagtttctattttccgaatctcccttaaatcttcaactctgtcttgtcgtctagggacattttgaatttttaaaccagctccgacatttttttgtttttaattcttttcgattcataacaaaggctggtgatttggcttcagcttcctagtcgcatgaatctactgaaatctcgagtagaaaatggcgaagcgtggatataagctacgtatccttttatagttcttcattggtgctatattattggaaacttgtaacctgaataacaatagatacaaactttagctacatatttgatttattttcacccctaactttagaaatttgatgttgttcattcactgtagcgttagggtttatctgcattggtgggtttatgttcttttttttgttggtaaattgttatttgagatttttcatgaaaattttcttctgggttctaatttctgcctctgtcatctaaaaaccaaaccgagttcagatgatagaagagacattgttatctctgtttggcctgactttttctttcgttctggatatgaa

SEQ ID NO: 2396 - DNA, 520 bp, Arabidopsis thaliana landsberg
gtttattgttattttatgtgattggtctcattattccattgtgtgtatttttgtatgtgtattttttcgttggtttttataatgtaaattgtgattatttttatttattttaaggaacaagtattgtttactataacttaataaaatatcatcctcttgacattactaattttagggaacacgtatttttttagtattacctgtttcttaatattactataacttaataaaatattatagttttgacattattaatttatagaaattttcctgtattatttgtctaatagtttttctttgcctaatagttaattatatgctttttcatttatttgattttcttcattgatttttttcttttttaaactgcgaaagtttcggatctttgctctataatttctcttgatcgggaaccagcctttagtccactcctattttaaaaaatgcatcttcgtccaaaagatgattgaacccggaacacaaggtaatcaaccctcttatacaccactagaccaccact

SEQ ID NO: 2397 - DNA, 570 bp, Arabidopsis thaliana landsberg
ttcactaacaaacaaaacttaaataaaaaatccaaaaaaaaggaaaagaaggaactcgtaccagttatctcgtggacgttttagtacagttataccactatgccacaagttaaattgggaatcatgccctcaacttttactatatatttgtgatgtctaaaacactagcttcatgagctttagctttgagccgggcctaatctcggtattaaaatcttcgttttaatgaggcaaacaaagaatttgatttcattagaaatgaaaaagaaccttctgttgacaagaaggctaatgggagcgtagttacatatttggtattatatatagataatatactacttctaggaaataatatttccttcctccaatctctcgaaatttagcttgaaagttgtcttttcgataaaagaaatctatttatattcttggaataagtagtttataaacaaacaaatggttctgtatcttacaaactcatttttgttaaagagtttctttcttttatgacttttgtgacttttggcttttggcgttaaacaattgtaacaattggcgttaaacaaattgtac

SEQ ID NO: 2398 - DNA, 1536 bp, Arabidopsis thaliana landsberg
cattccggacacctaaactgtaaagctcctgcatatacaccggagagattaacaaaacaaaccaattatcataaaactttcagtcactatagtctgttccaaaaccctaattgtggtaatatatatatgaagaaaaatatcttagacgttacccgcacgaaattttcaagcctcttaagaataaagtcttggtaaccagaaatgaaaggatactcgagacgccttgagggaatttcgtaatagttcaaaatgaaatcgttaggccctgcactcacaaccacgaaagcattgtttatgatctccatcgctttcttgtctcccacgatacctttgagacgagcaatgtaactcttgaacatgtttggttgttccgagacacgaatggcttgtgtcgagagactggtcaggtcgtcgtaaccggcaccagctgatgcgaaacagactccggtaagaatgtcttggtcggagagatttggttgtaagaaaggaggaataaactctttgatgttgagtttggttgcgattatgtcggagataagttttccgtttgagaatcttccgttagcttttccgtctggaagatccatgccgtaaggaaagtgttcagctctgaagattgttggtaaagggtagttgttgtttcctgtatcgacggttgaatcaccgaagattagaatcgctgggaagagcggcttcgttgttgcgtttgcggctgcgttgcagggcgctagtaatgttgttgcaatgaagagagttaaggttatggctttagaagtcgacattttttgtttttggtggatttgaagaaatgtgttgtttggtgatgaatttataaggtgaaatttttcttttgttaccttgctggctttgttgagtttgtttttcctttttaagtgactaacaaatagataagtcaagagctttgaatcttttagtttaaatagagatattgatgagcttttcacccaatgattaaaaataaaactgaaaaacaatgctgttatctttgaaaatctgaaaataataataattgttactcaacctaatcatgtaggccatgttaagaccatgatccagatgattttctttgattctgcggtataattaaattagattagctggtgcttattttttttcttattttttttgaattagatgatgattattgaaatatttttatttttcaatataaaatatgagataattattgtaatcttcgcctactcggttgtattttgggaagtagaaatctcaacgacatgtgtcttttgcaaacatattgttcgaagtggaggttttgaagagttcttaacgatttgtttacttccctttttgtgggatctgaaaacaaatagtgaaagaagcttaaagtgtgactttttttggttgtgtacttttgttgggagatcgaccaaaacttagttcgactgatttttatatttgaagcgggtcttcactttagtttttcaaaaaaaatgttgaatatttttgttgatcaattctaaatactcaatacactcccaagaaacagaattt

SEQ ID NO: 2399 - DNA, 501 bp, Arabidopsis thaliana landsberg
taccatacctaagaaacaataacttctcttatgattactaggtttgatcaataccacagtatttaattttagtacaagacattgctttatactcgttccagggacttttcagctatcaggcacacaaaagggatctctccgaatgctcatttcaatagttttgcgcggctgcagtctactcagtgaagactgcgctgcgtgaacatagtatggatgcccattgccatagagtaagacgttcgggagccaaactacagttaggccgcaccacagaagtagaaaaacagaatgccttttattacaggagcaaatagagggccaaaaaagtgtcataagatgcaagacgcaacaaagcacatggatttgagcgaagaaacagatcagcataagtttgggagagaagcgaaagggttgatagatatagtgtgagcaggtaacaaggctaacgaagaccatggagagaactaaaactaaccctgggaaaggtgcgcattaagacga

SEQ ID NO: 2400 - DNA, 562 bp, Arabidopsis thaliana landsberg
ggcacgcctataagtaagtattaaacgtgcatttttcttttttattcatttgcgaggaagtaaacggtaggtaagtcgtcattattatatttaggaagttacgtatctaataatatatttgcatgttaattaatatatttgcatccttgttaagttataatatatggtttcgttgggatactcaccatctgggtaaaagtcattgatttgtagtcttcccaagttaggtcagctgtctcatccttcttaatcttatcttggacgattccttcatgttctctccgtaactcctgcatgactttagggttatcacttatgagctttattgttgccgcaaggacccctggtgttgtttcgttagcaatcacaaacagagtaaatatgtactcagtcgcaatctctatgctcatagttacactttccgtatctccaaagatggtctcgaaaaactcccccaattcctttcctgatgctctattcttaactactgtctcctttattaccttcatcatacgatttcttgcctatcaaaaatacgcatgctcagttcaagaatatatga

SEQ ID NO: 2401 - DNA, 564 bp, Arabidopsis thaliana landsberg
gcaattgtctgtctatacctatcagcagctcttgaagtatacttagcctcaatcttaccaccttcattccatccatgttgcttaaaaaacacctgagctcgattgttccctccaaacatcattgttcttagctgctcaggactccacgagtctaagttcgttgacctgcacaaaaacaatatgatcttataatagatctacaacaacatgaaatgctataaatagagtggtcaacaggaaaaaataagtcaacatcttcctaatcacagcttaaaccctagccagaaggtgaaacattgctacaagtccatgaagctaaaaattaagcctaaagagttcaaatttgtgttcctcaagattcaaagttttacctgacgaagctgatatgaacacctagacttcgatgaacagcagaacaatcgatgcataggaagatcccataaggaacagaagcccatgttggattcttcgcactacaatcaaagcaaacctaaaaaccgaagcaaaatcataaatcaattcggaagatttaggtcgtataaggctcagatcttgacgaaattc

SEQ ID NO: 2402 - DNA, 585 bp, Arabidopsis thaliana landsberg
tatatacaaatataaatgtattagagaatgatataatttgcattacttttatctataaaaaataattcttaaattttaaaaattactacttttaaaaaaaaatcacgggacgggtaaaaaaattatagaacggattttattttggaattgggttatatggtggatgtatttgaatcaatatttataaaattttaaaatattattaatatgctgttttaatagaggttacaacttcagttttttaacaattgtctcatagattcgtggtatagttttacttaataacaattataaactgtaaaatataaaatattttataaaaataaaatttgcaaattttaatatatattacttttaaaaaataaatcgtctcgcggtataccgcgggttaaaatctagttactctataaatacggaaactctaaactctgaagagctcacaaaagccataaaaaaaaaagagagagagaaaaaaacgaagaagaagacacgatgatggttctttattgtggacgtaagttactcgtcgtcctcatggttactggcgtcgtgttcttcgggagtgctgaagcatggagctggagt

SEQ ID NO: 2403 - DNA, 579 bp, Arabidopsis thaliana landsberg
  unsure (1)..(579): unsure at all n locations
caccagtttcctcgtttatatatatgtggtttatcctggtagctagttattttaccagcttaaataactaatgtagtgcattgtgcaatttatgggtagtagaactgttatactcttcaatttatggcatctactttatctcttttaatgcatgcttcaataacacccaataaataaatgaatttgaaaaaacaaatggtggaagctatttgacaaaaacaaattatcttaagatgcatgcttcgcttaagatgaagtacgtagaagtaaaattcgagtttattatgatgaactagctgatagttaagttgtagcaaaattttatgggtaagatgtaaaaaaaaattctttctaaatactaaattgaatatagaaaaagtgtttgaattactatttcaaattcaaatatcatcaataagattgtatatagaattacaatgtatataacatagaatacataagactcatattttgttcagaaccanaattattacattaaatatcgaaaaatgtgtagcttaccattttactattcanaatcanattctgtcaaaaaaatttacatttatatctaacacc

SEQ ID NO: 2404 - DNA, 536 bp, Arabidopsis thaliana landsberg
taccacagtgattaaaccttgagacagattcttcatctctcgtgtccaccacaaatgtgaactgttttgtgatggaagatcttccgatgctgtggtgagcatagacaaaatatatgactccaaaaagaattcaatttgtatcaaaatctcctatacactcataacactttatccgatttgaagatcaccagctgattcttttatctcgtttacttaaaactatgtaaattaaaaaatttacaataggttgtgcctataaatatattatttttaattaaaaagtttggttaacataaaaaatgttaggttatctaatttcaactacctttatatcatttaagaattttaaatatattctagaatcaattggtgaaatgactataaattcaaataaaactggtgaaaacatgtttactaaaataatttgatcaacgatatacatgtgatattcaacactgaaaattccaaaaatgttactaaaatcgcatataactaacatatatcacactctgacgcgtattgacatctgtgatatc

SEQ ID NO: 2405 - DNA, 457 bp, Arabidopsis thaliana landsberg
  unsure (1)..(457): unsure at all n locations
tgctgcgtcttagctaggaactcgctcatccactggagtgactgccccgatttttacctttttgtctaccactacctgtcaccttaggcgatgatgaaacattatcggtattggtatactgccgcactccatgctcagagtcactagttcctagcgcgcactttccattacacacagcactctcactggggaaggtcgctggtgcactcccattaagaacgatggataacttcgtgggagtgggttgagtaccagcagcatatgactacctgcccaatatacattcaatggggccatatgccnnnnnnnnnnnnnnnnnnnnnnnctgataaattgaaaacaccgctctgtgttagaccagtctttgtcggagaagagcttagcaacgagaaaataccaagtccagccggctacagcagtatgcaccgcagatgatagattcatctgcaggaggaca

SEQ ID NO: 2406 - DNA, 569 bp, Arabidopsis thaliana landsberg
  unsure (1)..(569): unsure at all n locations
ttagggaagaccagctcgtggtgctatatcagcagggtgaggattcaattgatattttggagatttaggnnnnnnnnnnnnnnnnnnnnnnnnnnnnnncctggagcaagtttttgaaagtggatatgagaccactactcactggttttgttgctgttcgatttgaccacaactctatcctctgggagcttcttctttgatgagcaagagaaagttgctgtggttttagatgtagacgaacatctacacaccgagaccgctcggtaccgcacaacttttatcattggagatgacggctactttaaatctgtgagcctcggagaagctctgaatgtctatgtgggggaaactgggaatttcggatatactctgcgaatatattgtcccccacttgtgtgctcttcctgttatctcctgcaaatcaaccaaccacgcaaaaggaaagaaagagatgatttcgatttgcttcttgctaatctaactgcttgtcagtagtcactcatgatcttcgttacggttctatctataatagctaataacttaggatgtcgtctatttcatgtttcttg

SEQ ID NO: 2407 - DNA, 1539 bp, Arabidopsis thaliana landsberg
tcgcattgtccagtccaactgatttctgttcgtaggatctgcatacttatacatgtatgagttaaaacttatctataccaaagaggaaactgtttttagttaaatattacataccaaagaggaaataatcgaggcttttgtttgaaacaaactcatagacgagtaacttctcttctccttgtggcgaaaacccgagaagtctaacaagatttatgtgttgaagctttgcaacaacaaccacctcggtcttgaactctacttcaccttgtcctgatgttttcgacaatctcttcaccgcaatttcagtgccattcatgagcatacccttgaaaatactaacagattaagcacataacctatattctccacataggaagcaaactagatggacaacaaagagagtatatatataccttgtaaacttcaccaaatccacctgcaccaagcttgttatgctcagaaaagttgcccgttgctgcttcaattgtctttaaatcaaactgaacagattccgcttcatttaaaacgactattaagctcgttaaaaagttccacttcaatttttaaggtctaaaaaccgaaaccaaacaaatgaagaaaaactcacttggaagttcaatttcttgcttttgctttcttctcttgcatataaccaagcctacaacaatcaatattattgtaacaacaactacaacgactatcgccgcgatagttcctcctgagattctactatctgcacaaaaaacacaatgcaccaacaacataattaagcaaagccgaaaaagtgtgacaaatttgctctaaaatgttacccaaaaaaggacttgccattcttcttggtaatattggtttggttggttacagaaggcgtctttaaagggggcggtgaaagcgggcgtggaggaggcggtgggtgtctagcattaatactatcaaaagcaccaaagaaagtatacaattcccaccggaaaaagcaacttggccgcaatataatggtgcctctcttcccattgtaccatttcttatagaaatcaagacttctctcaagacaaagattacaatcctttgaagaaacatctggagtgcattgcatcaccaccgatatgttcccgtaaaccggttcaggagctacatcctttgcataatatttaccagacaatgataaagaattagaattgtttctcaccgatgaagatgctccttggattgtacgaaacattaactcatcaaacacactatcaaattccttctggtcttcttttcttatttcgtttacattgaagaaatcattagacggctccaagccaagtagcccggagaaggatttgttagagtaacgaacaaggcaaagggtttcttcaccagaccatgagaaaccgtccgtctggtttagacagatctgtagtaaaccctctgctgtgttcttaatacagttggagcaaacatcaggttcagcacctggagcgcacatccccatggcgtagactctgtctgtaccaagcccgaacgaaccattgaagtagccgttctgagccgtga

SEQ ID NO: 2408 - DNA, 549 bp, Arabidopsis thaliana landsberg
ctcctgaaattcacataaggcttctggcggtactaggatttcttacggaactcgtccgcttccgcagggaggtagggccaattatggtcccagcgctggttaccacccgtctgaaaagagtacgcttcgcagtttaaagaagtctggtggtggcgctccgaaatctgatcctatcgctgaggctatgggacaacttttcggtttagcacaatccgcggacgctactccttctgtagcggggtattctgctgccgacattcagaagatgctttctggtgctggtgcggcaggttcttctatgactgcacagattcacactattcgtgacatgaatcaaggtgcacgaaatgatacggctaagggtacgaagcaagttaacgctatgtatcgtgctctcgctcagtctgacgctatggctggaaaccaggctgcaaacgctcaaaagaatcttgctcaacagatcaaccgaatggtcgctacaggaaatgcaggggatcaagcatacgctcaagcataatggctgataacgctaagtacggtggtggaatc

SEQ ID NO: 2409 - DNA, 400 bp, Arabidopsis thaliana landsberg
ccaaaaactcatacgaatttggcttcactatcaaagctttgataatcatgaataagcttgggtagcggatttgtagtcaaatatgactagatgctttgtgtatcattgagcataagaactagaaccgcaaccagattccggaggccgaaaataggatttaggttttagagtttgagatctatggtttagggtttagggtttaggtttaagggtttagggtttagggtttaggtttaagggtttaggtttaagggtttagggataagatccatgggtatacggtttagtgtgcagggtataaggcatatcatcacataatcttattccaaggacatggacctcagcctgcgcatcatgcttttagaggcatgccaaactaaaaagagaccatgtttggcta

SEQ ID NO: 2410 - DNA, 3504 bp, Arabidopsis thaliana landsberg
ttaactttgagattaaggatctgtatttaggataaatatagaattcttaattaatagtcgttaatcacaaaaagagaaaaatatagatacatttttcataatttttttttttgaaaactacatttaattgtatagtcataatactgacaacactctcttagcgtaattctagctctcaggtttttgagaatccatattcgaacagagagaagtaaagatttgaataatatttttttcatataaacgtataaagaaagcttaaataaataagaaactaaactaatagggtgttattggtttatgatttagtgacttaaaatgtcacgtagaatatgttgctattcaattaagtttttttaaaattttgtgttatttatttaagatttgtaaaaagtaatctaaaatcttcataaatctggagctattagatgcatagttttataaagtgagtaaatcttttatgttattcaattaaaataaaagaaactctgattattaatgatttaaattattatgttattgaggttcatgactttctatatttttctttacaaaataaagtcatagaaatattatcaaaatagagagattatttaaaaaactttacaagattatgaaaaactaatcaacaagattataaaaaaaaactctctaacaatagtgtagaattacaaatctattgtgacaaaattgctcttggtaaggtttttctttgtgttgggatgataaatgctatatctggttcggttcaatgtggcaaaccaacttatttccggttcaccttggttgcttccaattacaaatcagatcttgtttcttattttttttctaatcattactataaaaagagtcgaagctatataagcttctaaaaacgtacacataagattgtaatcgagtaatcgcggttggccatcttactatttaacattttttaggttctgatagtttttaatattaaaattttagtaaaaagaaaaaaaattcataaataaatatttaaaaatatgcaaatattcctaattattatcttatgttaataaaaacataatataaaaataatcctaatgtaaacgactaatcgccgttggccatctcactatttaacatttgttaggttatgataattttctatattattttttttacggaaaaagccataaataaatatttaaaaatatggaaataaataattaaaaatatgtaaatattcctaattataatcttatgttaataaaaacagaatattaaaataatcctaatgtaaatttttaattttgtaaagattattatatataaaaacaaaaagtctaaatatatgaaataattatattactatttaaaaaattttagattatgataatttccagggagattgacaaaaatagcatctcttttgaaaaatttcacaaaaagcactacaaactttaattaaatactaggttataaatccacgccacgcgtgggtctatttttaaaacttttaatgattttttgtgtcactaaaaatatttactgaaaatttgagatatatgtttagtatgtctacttattgttaataatttaaatttcttgagttttaaaattaccaaagcaaataattcaatttaaatacataactacaaagaactctaataaaacttttaggttttacaacatttatcaaaagaacatttttggctcatattttgttaaatgttgtaatcgttttgatattatggatgatgacatctttttacgtaagacattttgattgagtctgatgaaataaattgttgtatgaggaataatttcgacgtcgcaaattcactatcgtttttttttgtatacttcactagattagttagtataccttttctttcttttttgtcaaaggtttgtttttcattccattaccaaggaaaccaaatacaaagatggaggggaaatgaattcccaaagtttagaacatcacaataaagggcataccccaaagaaaacatatgataagataacataagaaacataaagggatagatagggttaatcgatatcaaatccttgagggctttgaaccaaaagctaggtaatttgttggtgcaagtgagatcaaaagaaatcgacaaatcttccaagagcaaatcaaaggaagaacaattcgtcattgtcaagagacgaagtggcgttggtgtaagggtcaaagacgtgaaactcgccgacacgaggagaactacacgaagtagtgctttgacaaaggttccagcaatggtgatggtgttctgatacttgaggttgattgctacaattgatgtggataaagagtttagcttaagccaaccatagcaaaagggagtggtagtgaaggtgtatgacttgaagacgtcaaaagagtttgatgaagagtggtcgttggacaagcttcccaaaccaccatcagtactctcgcggggaggattcaagagcattagaccaaggttgttgaagtaaacaaactcatgtctcaagatatttgatgaagctaaaacaaggattcgcaaaaagtgagtttaaagccgtcacctaacaggtggatcctctctcacatggagtatgccatggagattaagaattccacacaaagtttgtaacttgcttgacacataaagataatacacatacctaagcttcataaatttagtcgtatggaagtaatccatgaagttgaaaaattgtacatgagagagctcggtaaacaggggatatgcagataagtggttgaggaaacagcggtaaccatcgctccttggagacgagatcataatacttcgcttccttagccttctcaacaagccttgataatggaagctatcagaaaagggcttcttaaagctttggaaatcattggtaatacttctaggtgattctaatggccatgttctaataaaaaggttgtgccagcaatgatgcatgatatgaatccaattggcgtcctcttaaccattggttccattaatcgatacaaaatattgatgagaatgaacaatatatattttagacaatacatgggctttgacatacacataagtggatagcaccttctgaagttgggcctcggaaagaaaagagataggcctaagcccaaatggtgaaaaagatggcccagtcgggggacattgacatggattaggttagcgtctccgttcttcactggtggcgatttccggtgggattgggcatctgaggaggtcaagagagagccaagcatgagagatcttagcaaaaccaaacaatccattgcagcttcgaaagatgaagtatttctggtaagggataactcctcgaggttcatattcagcgggaaatttgtgagcagaggttaaatagggagaagggttgttgagatccgccttccaatctagcaccagagaaattttcgtcgaacaatgagttaaggagggagggatttgaggataaaaaaattggccaaaagaaaagtagattagagatctttaggaatcagaggaaaaagacaaaacagagatcccg

SEQ ID NO: 2411 - DNA, 236 bp, Arabidopsis thaliana landsberg
gcctaccgcaacgaggaaggcacgcggtgtctgtataaagatagatgagacagcaaacgaacttaatgaaacaggcaggattaggcagggtagactaaagcaagcgttgggggcagaatttaaagtctcgagttgaagactgcgtgcagaggaactgtttgcatgactataccccttagcagcggcagcaatctatgacttatgttgatcaaacaataagctgatgtttgcatttg

SEQ ID NO: 2412 - DNA, 4724 bp, Arabidopsis thaliana landsberg
gcttgtcccctccagtctcaccatgcacagtcttacttcgctttttcacattgctatcagaagatcctctctttcttcgtttatttgtttgtttgtgtgaagagttgtgaacctcctgctgaaaataagttaatcaagaactctcgaattcattttgttaagcaagctcatagttagagtagcctcagcggaactaacacccttacacaaacacagaacaccttaacagatacacaactaacgattctgttcagattgttagttttatcatggatttaagcatacggatccagcacactactgcaattaaaagtacctttagcgaaggataaagatagagaaaaaatgaaccgagtctaacaattgaaacaacatgaagatgaattggccttgacttaattatcaagactctacagaggtgaagagacaatgatgaggaactaaccggagcattttctacttgaagtccagaagcggagcccgtgttgacattttcctcttcatgtagtccctgattgtgctctgcatgttcaagggatccatctattgtgttgtattgttctggagctctgtttggagattttgaggatgcacctgtaggcaacataacggcataaagaaaaccttcgagccacaattttaaggtgactggaaatgttaatggtagcaactagtaagcatctaatggacaagttaagttaggatatactatactttttaagatcttgctataacatgcatatacaaaaagttttaataccttgctgatacgggatgctatcctcttctacagtaaatggtcttgtaacctctttagatgcacattccgcctatataacaaacaaattcacaagagatgtaatcaacaagagatccaaatatgttagtacaaagtcccgtacagtgaaggagaaactaaccagcctttctaaattatcagtttcttcattgatatcagcatcattttccctgtcgccagtgtttctatttgccccactttcactcatgggcacatctacctcttttccttttgttcgcatatctacatttttctgtagcatggctgaacttcggtttgaaatgctatccatcacacaaatatctggattcccatctggacttaaatgagatctatggatgccagaatgaatatgagaatcatcttcaccggacctcttctccactgagtcgttgaaagggctagcaacgtctacagtacccacattagttggggatgtattaggtatatcttttgctataggttgtacattaatctcacaaggctgttgatctcctggaagcaaattatggatgtcaggaaatgaaaactgatccactggtggatttggtgatgaaaaatgttttatcgtctgaggggatggcgagtggctattttttcgaaccgcaactctgttagttcctttcagaatattctgtatatctgacagactctttcggtttggtgggttacttccagatgccttcaagttcacttttcgaacatcttgaaactcagggatagagaatttttctatattaaagggcttgatttgcaagcgctcctccaaaagcttgatggcaccatctccctcaagctcctctcgactgcaagcaagcaaatctttcaacacattgtttaagtctttgtccgtgtctacggttgaatctgcaaaacacagtgtctgaccctatcagatggtagcatgatttaacaaaatggtagcgacaatgatctaacaagtgctcactcaccatctacttccctgtccacagtcgtaacatgtgcagctgtggccctctctaagctttgttcagaagcaatggggaattccttttctgaagcttccaggttgataacatcagtgaaataactatccgtaaaactttccttgaatggacgacgtttcctcctggaaattgaaaatgtaagtatgtaaccatcaagggaaacagaaagcaaaatatgcaaatggaacaactcttaaacatgctctatcagagttgctcatagtacataccctggaattcctggactgcgagggcgccttgatggtgggttctcttgtatatctattacactggagccagtctgtttctgccattctcgattggcaactgtttcaaatccagctaatgacagttatacaataaacgtggaaggctatgaacatcagaaaacatacttctataactcacgttcaaatttatcataagcagcaaagaaatcctcagatcttggatatttactaggatcaaagcttggtgcaactggaggtggttgactgcaacaagaatatttgatagaggcttcaactaacttggtaaaggaatcagataaagtaacaaataaagaaatttgttatactgaatcaatggatcagtggctatgatctttaccttgtcgtaaggtgaagagaaaagctttttcgcttacggtctaatcccggtcttctttctcgtttatttggaatagggttcagctggacatcgacatccacatcttctaagatagcttttgcctgctcctgatgctcactttgaatttcaaaaggctgtaagatagaagccaagaatttgacaattatttagtttgagatactgaagttgatatgtcagtaaagaaaaaatatacacaagcgacaaagaataatgtaaaaatctgcagtttgtttactaaactctcgttctgcaattcttcaaaactaaatccctaagaaaagcattaacccaaaagaataggaagaagccaatgtacattagcaggctatatactgagcaaacatggagatattgtgcctccttgagacacaacgcctaaaccttacagttatccagtataatcatgctgcttaaaatttcaaagtaacagctaagtatttgcagtttaccacagacttttcgtcctaattgaagaaacccaaaaaataaagcatccatcttggtcatttgggaacacccagaagcggatgagaagaaacaaagcacggatacgattaaatcagccagatttgaaattgatttcgtaaccgtcaaaatcacaaactcgaatcgtctccgtaattaattactcactgaggaaaccaaaccctagctaatgcatcaaaatcgaaggtttaagcagatcaagagcttaccatagattgaaggagagtatgagtctgctgtagatcttctgattgataagaaggaggaagaggattcgacaaggattttagtgtgcgaggaaacaacgaaagccctgagtaagcttgaaggggatcctcctcggtatataaacttgaactccggctcacatcagccatctaaatcaccggaaaattccccggcgatgggatttcagttaaattcactgacaccgagagagatcgaaggagatagagtgaaagagagagaggagatgagttttgaaaattgaaaatgatttcagaaagcgggattcggtatcaattaattaaaaatctagggtaaaatataggcgggattgaaaacattgaggaaactaaaaaggacaaaactgggataaggtaaaataaaaacaaaaaacgtgaacggcaggattcgaacctgcgcgggcaaagcccacatgatttctagtcatgcccgataaccactccggcacgtccaccttttgcttagtgtattgctttatcaatacttaacatcaggataaaaatcgacctgtggttaaactcccaataaactctcatctcaccgtgaagttatagaacagcgaagaacacaacatgaaaagacaaatgcaagaaggttaatgtgacatagtttcaattacaatttcatttgccacatctctcaaactattacaacatatttaactatttcaatacccccaaaaaaaaaagcatttctctgcctatttcttcttatacatacgaactcaagtaccatgagaaaaaaggaatgtacttataattagctatgcatcatcttcttaatcttcagtctttagtctttacttctcctccccaacccgcatttccatttttttctttattttttctcccttctaacaatattgagtaattaacatgtaaaaacctgtcgaaattagatccttaacgatctaaattatacgaaaactcgaaacttacccccagtaaaaaaaaaagtaagtaagcgtactgcttgtaattaagctttaggttctggtcttgaactttctttgagctttcaagtcaatcacaatgatggagatgttgtctttacttcctttttgtagagcaagcattgagaggtagtcagctgcggcttggcaagctggatctattcctttgcctctctctgctagaggcggtgcaccgttcttcttgtgccacatcaatatccgtctccttgctatttcgcagacttcttggttgttcattacatcccaaagaccgtcactggctagtatgagacactcgtcttctcttgaccgaggcatgaatgtcacttccggttctgggatcacatatggcttcagatatctgtcacctgcatagttccagaggaggaaagaaacgcgtaggatctaatgtttcatgtaggggagtaattacattatcaagccacgtttgtgtgatgtgcattactggtcatcaaaagaagcaatgcttaccgatggacctagacatggcgagaacaccaaaaacacgtgcgccttgccattgtataactttgcctacagcattttctattcttgcatattcatcctctctatctggctg

SEQ ID NO: 2413 - DNA, 426 bp, Arabidopsis thaliana landsberg
  unsure (1)..(426): unsure at all n locations
tactgagtggtcggaggagcctccgttactttctactcgctcactcttctttctattactctggaacaccactctgatttgggcagccggacccttcggtttcgtgacttggttcatcacatgctgcgatatgctattgcatctatacatttgatggttnnnnnnnnnnnnnnnnnnnnnnnnnnnnnnnnnnnnnnnnnnnnnnnnnnnnnnnnnnnnnnnnnngtcgttgacatacctgactgtatgaactcgtatacgaacttgttgtcgcacgggcggcaccacttcgataactgcatccaacacctaaaggacggtggcatgtactagaggaataacttgcttgaacaaaataaagtgttaatttctgtgtgaagacgcgagatggtatacttgtgatcacctttgctttgtccaacaagg

SEQ ID NO: 2414 - DNA, 451 bp, Arabidopsis thaliana landsberg
gagtaaatgataagctcttgttgggggtatttttaagctcatgtttacgtggctttaaaattaaaatttatagtaaagagtaaaaactgaaaggggatatggctctagaggcttttaaattagttacaaccgacaaagtgtgattgagaagcttttcaaaagtttccacagttttttttccaatcaagctttaaaaaaaatctttaccaatcaattataaaatttatacagttatagtcatagaacaaaagtttctacaacaaaaattcttacaagtaaaacgtttctacggccttaactaacaacgatttccaatcagtgccatagactgtgaagacttgtaaaaaaatgtgaagcctgcaaagtgtttaccaatcatgccattaaatggtgaaacaactacggaatgaaaatgtactttagtagtcaaacttttgataaaggtgtgtac

SEQ ID NO: 2415 - DNA, 2202 bp, Arabidopsis thaliana landsberg
acttcctgggttgattgccaaaccttcctccactgaagcttcttcctcctctgcctctcggagttggtggtctgtaagaagtttggtgcatgcccgaagactgtgagctatgatggttgctttgagtattgttggcccttacatagttggcattggagttatggattgacctgacatgcctaggatgaagccttcctctgaagcccctggccatttcagaaaatctgtatgcttcctcccttctttggcggaaatcattatctgcccggatgtactcatccattttctgaaggagtttttccaaagtctgtggtggcttccttgaaaaatattaggctgtaggtcctggcgaacgccttgatcatggcctcaataacaatttcattgggcagtgtaggcgcttgagctctcaaacgcaggaaccttcggacataagcctgcaggtactcctcatggtcttgcatgcattgaaacaaagcttgggaagtgactggctttgtctagaagccctagaagctagcgactagcatatcctttagcttctgccacgacctaattgtccctggccgaagagaagaatgccatgtatgagccacacttctgactaccatgacaaaggacttcgccatgacagcagtattgcccccatacgaggacatggttgcctcatagctcatcaggaactgcttcagatctgagtgcccatcatacatggggagctaaggtggtttgtaagatggtggccatggggtagcctacaactctgctgccaaagaagaagcatcatcgaaagcaaagttaccatgatgaaagtcatcgtaccattcatcatcattgattgggctttcttgacgaagctccctgtattggggcctttagtcttggccatcctgagtgaggtgacgcatttcttcagcagcttcatcgatcttcctttgaagatcagctagtcgcgccatcttctccttcttcctttgtacgtgctgatggatgatttccatgtccctgatttcttggtccgactcctcctcctagagtgttggactggtggccttcctcttctggcttcgagcttctcgaagagaaagagtttcctggtttgggtctagtggctgcaatgaagtagcccctggtgctgaagctttctccggcggcatgacaaaggtcggtgcttgccgaaggtggtcgaaagagtttgtggttgtgggttcgagccctacggtgggcgctaatgttggggacttgttctcaaatgctttgaattaagaacaaggcaacacagaattttaaatgttaatgctcttcgtccttcgaagcattattccccttaggatataatgatcttcagacgaaggttttgaaggacataccatcatcatcgtagtatatgttaaataaaagaagaagcatatggcatataggaaacaacatagacaattatataacattattaattcattctacttatgtaatcatggaaaggcaggaacaatattgaattacaaaagtatcttcggcttgatagagtacaagtggacacacgagcgaatacaagtccgcgtgaacagtacgggggtactgttcatctatttataggcacaggacgcagcctatgagaaattacattcatgccctttacatttattatcaacttatgcacaattctatggggactaaacaaccctttcccctttaagtcgttcccttttctgtgattgagccgaagctcccttgagcgtggcttcggagcagcgacaaccttcatcatgaccatgctcctcccatcgcgtatgcttttaccctgagtccgaaggtacctgtccataagccatacttggaaaacattgtcaaatcacgtttttgaggaccttcggaagccgaaggcccccaacagtagcccctcgcaatattaatttgctgtaaagataaatttatattgcgaaatggatgaaggctatgagccggaggtccgaaaaacaccttccttttgctagaatagcaacagtcattgacaagcgggaccctctagtttccgacataatgggtgtataaataggggctcgccacaatttatttggcacgctctcttgccatctgttttgcctgctcaaacaactttctgcccacaaatatttggttgccttcctagttttaagcttcggaagcgagaggcaggaatttcgaagagatgtctgaggagaa

SEQ ID NO: 2416 - DNA, 2722 bp, Arabidopsis thaliana landsberg
  unsure (1)..(2722): unsure at all n locations
cttaggggatttcacccgaaactcaaaatgaccaaatttcatgttatagctttagaaagatgaaatattatttacgagctgatgtcgtttcttaggtttccatgccatattctaagtatctaaacaccagcctaaaaagagagtttgaatttggtaaacgataacgatcaccttaagaaaatattaagctcaagaagagtagtagttagtataagattaagttggttatgaaactgatggtgtaacttgatggccactactactcactgacaccacaagttgctctaactttgagactgatatgtttcttttagattgatacattgcttctgatataggccataatcatttaaaagctgtttttgctgtctttctctctaattttcacgtcacgtagggtcaaatttcacctgttttatactatttctagttgatcattgagtgatttgcacgttactgttcagattagacccacccatcgcactacaatagtattggatgatttataaacttatatataaagcgtaagctatcaaacacatccacacaaaactagactgccgtaaaaaaaaaaactaaattatgttttttttagttcaagctctcgaatacatccacacgaaattagattgccgtcaaaacaaacaagtaaattaagataaatcttaaagtcgaatgcacactgaacaactaaactatgtatatacgaaaatctacttgcacatgtgcatcttttgttattacttatttgctttttactatttcatattaatgattgcttcgacatattggaatctaatctcaaatcaccaagaagtagtggaacaaatcaatctttgtaatttgtcttcattttacgatatgaagaagtacaattcaactctaaattctttaatcctgagttcttctgtttgatatcgtccctaattccctaataaatctaaaactttataaatcaaatcgtatgacgtattacaattttaccgtatataaatatagtgtattattcttggtggttttaccgtatataaaatacatcacagtaatccagtcacgtgcttttccgttggtatcaatcacgtgtctgtcacggttcgcttcatgtgcaagaataagaaaaaagcgggagaacaaataaaagaagaaggaatttgttcagatctcgcagcctttttatcttcaaggtttcagtattcacatgcatcacgtgagaatgaatacctgatccacactctggatctatctgtacaacaccctcactgtttttttccttattatttcagatcagataatgcagatgtttatactttatagcagttaatgcagcctaccaaaaaaaacatttattgtttatggatcaaattgtgcaatatctatatttataagtgaaaacatttttccttcatgaaattataattatgggatttaataaagttcaagaaatacactgttttgttctattttcccagtgggtctttttgcagtagaattaaactttttctccacatactgacaaaaaatatacagaatgtcttgctttgaaaaaaaaaaaaaaatcataatcatttgcaaagtggaaaaaattattcatttttatttcaaatgttttattaatagtaaatttcaggatattaatttatgtcgtgggccaacggacctaacagccgttacttacctccgtcatttgtggcggcaataaagaagaataccaacgttaccggtttgagtttatcggtttggttcaattggttataacaaaacttaatttatattcctaaaaacagagaaacactcataaaagtagtattttcactaaaatacaaccaattaaatcataagaaataaaatgcattcgaatttaaccataaaaaaatgtattgtgaataactgaaaattcaatagttgatttttctggttaagtatggtacggttcacgtaaaccagtacagttagaaccggcaaaacaacccaaatgaaaaatcccgtctccgttatctatttagtataaaaccaaccacttcgtcttcttcatttcttcacaagtcataaccgtttcaaattctctctctctttctctttctctctcaatttttgtagtttcatactctagcttactaatcaaagatgcgagagattcttcacatacaaggtggccaatgcggaaaccagatcggagctaagttctgggaagtagtttgcgccgagcacgggatcgattcgacgggaagataccaaggagagaacgatttgcaactcgaacgagtcaatgtctactacaacgaagcgagttgcggaagattcgtcccacgcgccgtcctcatggatctagagcctggtactatggatagtgtcagatccggtccgtacggtcagatcttccgtcctgataacttcgtatttggtcaatccggtgccggtaacaattgggctaaaggacattacactgaaggtgctgagcttatcgattccgttctcgatgttgttcgtaaggaagctgagaattgtgactgcttgcaaggttagaaatcgctctcttcgatctcgtagttgtgtagaaacttagcaatctagctatcgatttggtcataattaggattgatgatgnattagatttgtgtgtgttgatgtgaatgatcatcaggatccaagtgtgcactcactaggagagactggatctgaatgggacgtgtgatacaagatagggagagtacagatagatgat

SEQ ID NO: 2417 - DNA, 564 bp, Arabidopsis thaliana landsberg
acgcaacagattgataaccgccgttaactaatcttcattagtttttcaattttacgtcattttgattatagcgaaaaggggaaagggatcatttaatattccagttttcaaattatatccattttaaccatcaacttcacatatgaccattttatacgtgaactaaacgctaaccaacagtttagaaaataagaatgtgttgaccaggccaaaaaaacatactgctatctaagcgtaggtattcggatttttgtttggatttggtttggatttattcagattcaaataatttaggtaaagagtttattattcgttaaaattttatgactatttatttcggtttctgttaggatatgtatcatattttaatcgatttacgtaaaaaataaaataaaaaataatatttctttgatatctaagttatttagaaaaaaatgtcgcttaatatcttttatttaaatatatatatatatatatatttactcatccatttaagcgtttagaatcaatattttcatcacatcttagtaaaattgatattttcataagaattaaaaaaaaaaa

SEQ ID NO: 2418 - DNA, 450 bp, Arabidopsis thaliana landsberg
atggatgtctcaatacggtaccgttttctatccatcttgttttttttttcttcttttcatagatgatgtctacttaacacacacataagttgtctatgatatattaggagatacatttctattctggactggaacaaaaccaactatatacatctcaaatcatgagctagcgaaacaggtcttgtcgagcaagttcggtttcactattataccggtgaaacgacctgaggtcttcatacttttcggtaaaggactttcctttatccaaggtgatgattggattcgccatagacgaatcttgaaccctgctttctccatggatcggctcaaggtcttttactcttaactatatactttttctgtttgatttgaaaagaactaatatattgcttgcttaaaaatagttaggccatgacacaaccgatgggagattgcccctttcggatattt

SEQ ID NO: 2419 - DNA, 418 bp, Arabidopsis thaliana landsberg
acaatagattatactgagactgaagaactttttattttttaaggagaggaaaccgacgagcggaggatggaggcactgactcagactgttaaagggttgaacaacgatgcctgtatacagaagtgagtgaaaagacaagcgcatgttttattgacattccaaagactagaggtgtgtcgattataggatcagattcgtgcgttgatacacaaaagtagagcgacacggttgggagatggccaatactgtgagcttgaccttaatgcagaactgggtctcaacttacagaacgcataagtctcttgctctcttgtcaatcacacatattgggacatcatgtgaggaatgcgacactaacgtgagtgtttgtggaagatcagactatgtcgagacaacaacactagtaagatgtggcatg

SEQ ID NO: 2420 - DNA, 2767 bp, Arabidopsis thaliana landsberg
caaagacgccgatggggactgacggactcaccgacctcaacaaaggaggtaagtctgttgatcaaaaagcataccgttccatgataggttctttgctttatttgtgtgctagtagaccggatattatgcttagcgtatgcatgtgtgctagatttcaatccgatcccaaggagtgtcacttagtggctgtgaagcgaattcttcgatatttagtcgctacgccttgcttcggaatctggtatccaaaggggtctaactttgacttgattgggtactcagattccgactatgctggatgtaaggtcgataggaagagtacatcggggacgtgccaatttctaggaaggtccctggtgtcctggagttccaagaaacagacatccgttgccctatccaccgctgaggccgagtatgttgccgtaggacagtgttgcacacaactactttggatgaggcaaaccctccgagactttggctacaatctgagcaaagtcccactcctatgtgacaatgagagtgcaatccgcttggcggataatcctgttgaacacagccgcactaagcacatagacatccggcatcacttcctgagggatcaccagcaaaagggagatatcaatatttatcatattagcaccgagaaccagctagccgatatcttcaccaagccattggatgagaaaacattttgcaagttgcatagtgagctaaatgtcttagattcgcgtaacttggattgatctatagcatacatgggttctatgcctttgatcatgttcattctgcattttgttgctcatcgtggtgctcaagttgacaaacactccctggacctcacaagtcctttttgcaagtgatgcacatatttagggggagctgtgctacaacttgaccctttgagactaaccatgtacttgagtttggttgttttagtcttcaaggagaattgaaagggaaaaggtggactttgaccatgcaagacttccactgcactccgatgaaaagagttactttttccaagttcatctttatactctgattgcctttatgttcttatttgaagattttggtgaggcaatggggtttaagggccaagattgatcctgttttggtgcttgatgccaaagggggagaaaaataaggccaaagcaataaatggaacagctaccacttgagaattttgaaaataatataataaagcttttgttttgtcaaaatactcttatgctctttttgtcaaaaggtggtctcttgtggggagaatggttgattatgggaaatagagggagtttttgatattgtgatcaatatccattggaacaactctctttatgtctctacaagtgtgtttgacttagagataggaaattgaggttgatttgcaaaaacaaaccaagtggtggcaaagtatgatccatatataccaaatttgaatcaaaacctttttgagttctcatttgcattgatattgcatttcttttagttgctctttgttgtgttggcataaatcaccaaaaagggggagattgaaagggaaatgtgcccttgggccatttctaagtattttggtgattgagtgtccaacacaagtgcctaagtgaatctatacccatggatggacaaagtacaaatcaagtataaaggtatgtttctaagacttagtatattgttttggagattatgtctaagtgctggaaacagaaaaaatcaagttggaattaaagatggctttgttcagccgaagtcagctcagtctgggtgcaccggactgtcctgtggtcacgacagtgtccggtgcgccaggctgactcaggcgaacttgctgctctcgggaaatcgtcggcgacgtacggctataaatcaccggactgtccggtggtgcaccgtactgtccggtgagccaacagtcagccgggacaacggtcgtaacggcgatctgcgcgggacacgtggccgaccaacggctagaagggggcaccggactgtccagtgtgaccggacatgtccggtgcgcaacggctccaagtctgccaacggtcggctgcgtctgttaaggaaagaaatctggcacggacagtgtccggtgtgcacggacagtgtccggtgtgcacggacagtgtccggtgtgcaccggactgtccggtgcgccagacggcagaaggcaagaattgccttcccagattgctctcaacggctcctagctgccttggggctataaaagggacccctaggcgcatggaggagcacaccaagcattccttgagcattgttgatcactcacacttcattcttgcgcacttgttcgacattcttagagatttgagctccgttctagtgagaaccctgtgatactcttttgagctcaagttttggtcttgtgtgtgcgtatttgttgtggatttgagtgtgtggcttccctcccttactctagtgcttcattgtgattcttattgtaatggcgagagactccaaattgtggagattcctcgcaaacgggaaagagtaaagtaaagaagaacaccatggtattcaagttgatcattggatcacttgagaagagttgagtgcaactctcgtccgttgggacgccacaacgtggagtaggcaagttttgtacttggccgaaccacgggataaatcctcgtgtctcttgtgcttgtccttattgtgtctattgtgcttcacaagagctctcctctctactcacttgatttcatcgttctaactcttaatcaagtttgtggtgttaagtgttaagttttacagg

SEQ ID NO: 2421 - DNA, 380 bp, Arabidopsis thaliana landsberg
cagctatctcttccttcatcttgctttcttcaccgttcttcgctttttcgttcgcttttctcctctcctagtaaacaaagcgagtcagtgtttcaccgccgagaatcactttgtgtaattcatgtgtatatatatacctttagtgctaactccatgcaatttgatgaaacatcaaccatagcttctttgacttgaacaagaacttcgaaatcaatgttaacgttgtgtctcttaaacattttagcgtcttcgtcttttgttcgctcaaccgtttcaatctctcctttaaattctgtagaagtaacgctctatctagtcgagaggatcgttcatggaggctcattttccagtcttgagctcaactagatcccatcaacttc

SEQ ID NO: 2422 - DNA, 419 bp, Arabidopsis thaliana landsberg
  unsure (1)..(419): unsure at all n locations
ttaaggtaaaagatagattaaggtcggatggatggatttatgctttagggaaaacccttagaggcagtttatataagcgagaaatatgaatcaaataaggaaactaaatagannnnnnnnnnnnnnnnnnnnnnnnnnnnnnnnnnnnnnnnnnnnnnnntgatgggctgaaatgggcctccctatgatcgagtatgtcattgatcaaactgggctttagggacttcgccttgcgatcgagtggtctgaagtgaagacgagacagaatggtctagcgaccttgcgatcgagtggatgtcattaggtggcgatcgagtgattttgtcggcttctcttctcttctgaactcttaacttgtctagttaagtacaggacgagtagaatggcctccgagtgatcgagtggtttgatgggtgatt

SEQ ID NO: 2423 - DNA, 552 bp, Arabidopsis thaliana landsberg
  unsure (1)..(552): unsure at all n locations
caagctaggaaggtgctcataaatgttctggagattcctgttatcattgaatctttgcctttatttttttttttgttcgtcttaatacgaacttattgtttattaagcaattaatcttgataattatttatctttctttggaagaaatagtcccagtaacgtattgcattcaaaattagtccaaacgagaatgatattgtttctttagcatctcatgtttctctgttctttgtattctaatatgtagatatccagccaatattacacttttgcgcggaaatcatgaaagtaggcagctaacgcaggtatgtgttattctgttccacttatatctattattctgcttttcacgctgttcctaggaggtaagcaatgttgattatcttctcgttgttacagcagggttttgaaagttctgattttgtactacatgtggcaatgtcatgtcagatgtagacatcgatgttagctaagatgcattntatgtgaatcaagtattggaaagctaatttcagaaggtgcttcatatagtaccagnctccttnttagcat

SEQ ID NO: 2424 - DNA, 566 bp, Arabidopsis thaliana landsberg
cgaaaaataagacagatagtgttaagcttcagggaatatggttattagatcaaacctggtaatttcttgggtggacagggcaccaccaaattcacagtatacctaaacagtggaagaatcaacacaacaagtcaatatatctctctgtattcagtgaaaatgtttattgggtcagtttttgtgtgatagtaaaacataccatgcaacaactacatcgacactgtaatgtttacgagaggcaatgatcaagaggctctgcacaattgcagcgagccacccaaacagctttatgaacctgagatacgggataaacaaaagaatgatgcagagatgtgatttacagagaagcctttaagatgttgccaaaagaagttttaccttttagtgccatatttctgggcagtacggacaaagactagagtgaatatcatgtgcgatgagaaaatcaggtctccgcatacatacatcaccccatgagctgatgagatcaacgtcatcacatgagaacataaacaaacaatgaaatgcctgtaaacacaatctgggactgaggaaagagaaatatg

SEQ ID NO: 2425 - DNA, 551 bp, Arabidopsis thaliana landsberg
attgttccccctttgcccagattccgacaaaatccactcgttttattccaccactatatataattgagcggggaagggtgacatgaagagcagagtcattcttaaccatagagacagaagagataagaatcataacaacaacaacaccaatcattacacacaggttgatactatggagagaaagcctcttgaggttgagccatctactacgacgactaacaccgatgtggtcgattctttcgaggaagagcagagaaaaatcgtttatagaggatggaaagtcatgccttttatcattggtaacgctcctttttacttgtttgtgtctaattcagacatcatttttttcttttggggtgctttgtcggattttagggaagtgtaacattttgtccgtgatgtttttaaatatcgattcttttctcttctctgtgacttgactctagcaaaaatctcgaatttggagttctttctctgagatctcgaagtgaaattggttttaaaactgagatttcgttgaaacaatgaaacccagataatcttacagatct

SEQ ID NO: 2426 - DNA, 1539 bp, Arabidopsis thaliana landsberg
ccaatgatagtatccaagtggtctccagtgattgaagacactcaaccagaaatcacatcaatgcccatgtggattaccatcaaaaatgttccacaaacaatgttcacttggaaggggttaagttttcttgcaagtccaatgggggaaccaaagcgtttgcacccagatacaatgctctgcaacagttttgaagaagcaaaaatatttgtggaggcagatttatcaaaggagctgccaaaacaatttcgatttaagttctactaatggtgttgatgcaatggttgaataccaattcccttggctcccacccagatgctcatcttgctgcaaatggggacatttgcaagaggtttgattgacatcacgttcgctacgacgacattctaaaccagttgagccggaaacagaggtggtaacagaggttattcccagtcagcaggatttgcagaaggatcctttgttggtttcaaatctgctggttaatcagagggaagtcgagactaatggaactgagaaaaacagtgaagctgagactacagaacttaaggaaaacgagaacgtcatagctgtgattgaaaaagaacaggatgacggtacgtggcattctgtctcacctgcaaagggacatcaacgtccgaaacttcagcacgtacatgagaaccaaaatcacgtttctccatctagatatacagttctagctatggaagacgatacagatgaattagagaatcaagaggaaggtgagattgtttctaagcaatcaactgaactcttggtaacttcagagctagtcaatactcaggagactcgtccttcttttcctcgagcgtccaaaacaatgcataaggttgttaaaggatccgtcaatcaaaacacatagggaaaccagagtgtttcaggtcgccgggtcacctaaaggagataatcatatgtcgggtttcttctggaatgtccgtggtctaaataaatcttcaaaacattccattgtccgcaagtggttatctcaaagttctatgcagtttggttgtcttctagaaacgcgagttaatgagggaagatcaccaaacataatttcgtctatttttaaggattggtcaattctgactaattatgaatctcatcgtctagggcgcatttgggtagtgtagagtgcaaatgttcgcataactcctgtattcaaaagtagtcaaatgattacctgctcagttttattggagggaaaggaggaagagtttttctgttcttttatctatgcttcaaactttgtggaggagaggaaaattttgtgggaagacattaggaatcaccatgattcaccactgtttcgcaataaaccgtggatgctttgcggtgattttaacgagattctcgatggttcagagcattcaaactatgatacctcacctttcactcctctcgggatgagagatttccaggagggttgtagatatagctctctcacagatcttggatatcatggtcctcgctttacctggtgtaataagcgagagaacgggtttgatatgcaaaaaaacttga

SEQ ID NO: 2427 - DNA, 1478 bp, Arabidopsis thaliana landsberg
cataattgacaatgtaaatggcttgcataatcatcagaagaatcgcttagagatagtaaactttagatggtaaagcccatggtccttgcctccttgggcctaggtagcaccgaccatgaataagatattatctaattaggtcgaactttaagagatttcagattagtattcttatctctctctctctctttttctctgtccgataataagcaactacaacgacgatcatgaatagagaaaaaaactctgcttccatccctaatgatctcattcctgaaatactctcgagattgcctgcaaagtcaaccgggaggtttcgctgcgtgtcgaagctgtgggggtccatgctttgccgttcatatttcacggaattgttcttagcaaggtcctcggctcgtccacgtctcttaattgggatcctccaagacggtgactggtttttcttctcgtgtcctcagcctcaaagcccatatgataactcttctattgttttagcagcagattttcatatgaagttcggtagagccccaagctacgattacaaacgttgtagatatgctccggtcttctctatttcatgcgtatgcatttctcaagtgaggataaggatggaaagcgtgtgatatgtatccctatcacgagaaagtttgagatcttacctaatctgagacgaataacgcaaagacgctttactgagttgttagggtttgatccgattggtaatgaatggaaggtattgtccatcaataatagaggtacctatcatgataacgttcattatattctgacattaggaactgaaaacgtgagatggaggaagatccaaggtcccttcaaccatgatgttcggggtgcagggatatgcattagtggggttttgtattacttagcttacaagagtgatgctcggatatatgttataggttgctttgatgttaggtccgagacattcaagtctatagttctgaactgctcatatcaagcctctactacattggtaaactataagggtaaattaggtgtgattaatttgacgcatgccaatgaacatggatttccccttcagttacgtatgacggttctagaggattttgagaaacaggaatggtcgacatatgtctacactttgatggctgagaatatagtcgttaagtatgtttccgtggttgggatgactgctacaggtgaaattgttttggtgaaaacaaatgcatgcaaaccgttttatgtgttctactttaatacagtcaatccttaggtttcgttgcctgcaaagtcaatccttaggttctacactttgatggctgagaatatagtcgtttatgtgttctactttaatatgtcttattcctgacatactcttgagattggctgcaaagtcattccttaagtttcgttgcgtgtcgaaactattgggagtgagggaggtccattatttcgtcgtcaatattttcccccagttggttccaccaccaagg

SEQ ID NO: 2428 - DNA, 620 bp, Arabidopsis thaliana landsberg
  unsure (1)..(620): unsure at all n locations
agaaaaattgtaatacgaaactaattttcttctggtttgttttgttgacagattgctggaatccatccagagaattgcagggtgctgacaacagactcttctacaaattacgctctgcgtccagaatcacttcaagaagctgtttctagggatcttgaagctggattgattccattcttcttatgtgctaatgtaagaactacactgttaattacttaccctcttgaagcatgtcctctgaaatttttatttgttatttccaggttgggannnnnnnnnnnnnnnnnnnnnnnncattagctgcactggggaagattgctaatgttagttatttcacatttccaaacaagcttcacagagacttttgtggcatagaaacttatgatatttatcttgctacatttctcagagcaatggaatttggtttcacgtggatgcagcatatgctggaagtgcctgtatatgtccagagtatcgacaatacattgacggtgtagaaactgcagactcttttaacatgaatgctcacaaatggttcctcactaacattcgatggttcccttctttgggtgaaggtatatatagcccacatttatctcatttctcttttctttctctct

SEQ ID NO: 2429 - DNA, 557 bp, Arabidopsis thaliana landsberg
  unsure (1)..(557): unsure at all n locations
gagggatgtgtggaatttgcattatgttttcacgtatccattctgttaacggggggcattttccttatatataagttggaatcttttcatttatccacccctagtaacccctcatgatatttagttagatttgaaacttatcatatatcgattattcagcgtatgctgcgtgcttgggctggaaatttatgatatcattccctaagatttgaagtctacagtagcttgactatgaatgcggttagcttacactttctccaacgcacatacaacatgaaatggcgctaattaattctctctttttattgttctcgtaggtatgacactccacacaaccacttattgtctattttcccaactcttcccactgcttgtctcgagctgtacctaagtcaaaacaaaatgagtttgtagacaaagttcaggaaatgnnnnnnnnnnnnnnnnnnnnnnnnnnnnnnnnnnnnnnnnnnnacaagattgaaacatggcttcaaagagagagagagatttgtcaaccctttcccacatgtcattgtacattggctcttcttttt

SEQ ID NO: 2430 - DNA, 2082 bp, Arabidopsis thaliana landsberg
gcttggaagacgtatcgaaacagaaagagagagtcctttgacattgtggagctgcagagtagagctaataggcggtcccagtcagttgagtactcatgagataggagacgccttgttagattatcccaaattgcagtggtgtaatggcaagagaagaataagtgatttcttgattcttcgacgttgccgcagagaacgcaattgacttgttgtccggaattccactttttgatccgatcacccatggattatctatcatggatcgcaagccacagcaggaaagagtatttgggtgtgttgtatgagaaccaaacacccttataccattgcctatgcgtgtgaatatcccggatgttgtgccaagtgacttttgttatgaaactttgtctgaaattatcacctgaggatcgccacagaaaaatgtctggtgcctctgatctctctcgttgaagaatactctgaatctctgcctctatcttgttgtagattgcagtacgatgctgtttggtcttgtgagaagcgaaaacagtcgcgacagtagctgctaacggtatccccatgtctattgttctacgagcatttgtaacatcaaccagttgccgtagctgtgaccaattatcataccagaacgaagtagagctgccactttttatctcaaccttacacatagatttagccacatctctgtacttaagcaacttcttccacatccaagaccccagactagaacgatcatttgcggaccagaatgagcctttccgaataatgtaagtccaaacccaattaacccacaaagaagactgccgagaaacgagtctccaaatcagcttcaaacaactaactttatttgcttccaagagagatttgatacccaatcctccttcttgtttcagtttacatagcgaagtccatgttttgctttcttggggttaagctccggtccagaccacaagaaagcagaacatagcttctcaatctcttttatacatcctgctggcagcctatatgcagacatccaaaaatttgacaaacttacaatcacggaattgataagagctagacgtcccgcataggagagggagcgagctgtccaagagcttatctttgatctcactttgtcaagaagaggcgaatagtccgcagtagtcatctgtttcgttagaagaggaaatcccaaataacgaaccggtaactgaccactagcgaacggaaaagcggagagaatgttatttctatttagctccgaaacttcagcaagataaagggtcgatttctccaaacttatgtgcagccctgatttacccgcaaactccttgaaaatattgataactccttcaactgatctctgctgcccatcaatgaacaccattaagtcatccgcaaaacataagtgcgttaggctgagtttcttgcatttagggtgatagccaatgtttcggtgaactgcagctacatcaatcatatgagacagaacattcatgcatataacaaacaggtatggagagagagcacaaccttgtctcaggcctctcttactaccaaagaaacccgccagctcgccgttaacttggacagagaaagtggctgtcgagatacagagttttatccaatggcgaaatttttccgggaaattaagagcttctaaagtgttcaacaggaattgccattgtacagaatcaaatgctttcgatatatcgattttcatcgcacaacgaggagagattgaatctttgtggtagtccttgactaactccgtagccaaaagaacattttccatcaagagcctttctctaacaaatgcagattgattttggaggataaaggttggcagcatgactttaagacgattagctataattttagagattaccttgtaaatcacgttacaacatgaaatgggacggtaatctcgcatcaaggtagcttcatcttttttcggtatgagcgctaggattgttgcattgagccctttaggaaggaaacctttgatgaaaaaagatttgattgcagcgatgaagtcttgaccagtgattgaccaagtcgctttaaagaactcacttgtgtaacagtcgggacccggag

SEQ ID NO: 2431 - DNA, 1402 bp, Arabidopsis thaliana landsberg
aagcttattttagtcaagaataggaatctctgtttgacttactgactatatagtatatcgtattctcgccattgtaccactatctggatgacgcagtttgtttcttaaatgataggttgatagtcgtggctgcattaatctatctggcattcttaaggtcacagaaggctatgggaaatctggtaatgtgatcctttcaatttctatatttttccggtgacattcctttttgatgatttgctgattgtctagcgtctttgtttctctacagtatcactctctgtaatgtctggtaatgaagttatcttctgtaaagagtcacaaattgatgaacgacagctaagacttgtaaccgaggtaaagattattttggtgcagtttggttttgtttcttgccaccaagcttttgtcaggaacttgtctctctactgacttctgatcctgaaattgtttgtgttgatcagctgcccgactgctgtactgctggtacaaatctcatgaacctcatcttccaagtgacggagttagatggttctttggatactagcatccatcatgacgaaaaatcaggttgtttccatacaatgagcattgaatctgattcaagcagcgttgaaagtgcaatcagatatgcctttgtccacgggtcctgcaaagtttcttctctctccctacctgagaacgagggtgtcttttcttgcagggtgttccattctcgatatcccgagctgcagatgagcataaaggtagtaattttgaattgggcatgtgttgcactatgtttctactatgggtagaattttcagttcaagctcgtgttaacacactttttcactctgattctctattttttaattctcagattcaggtaacatctgctcccacatctgaaagagaggagagtggatattctacaccgcattcaataacgactccaccacctgaatcagggattccttcaatcacaaatccatggccgactccatgttcacagtttggagtattggccattaggtcatcatcatcattggctctcagtagcgaaactagcctgatggatatgccacagtacactgaggtatagccatcaccatttaagcggcatattttgatatgtctctttcatttatactttagtgcaggcaaaaaaacatctagaatgagctagcttttgtattccgagttcatctcagccgcatgcttataatgttcctttcttactgcaggatttaaaagaaaaaggattatgtatgttttgtcaattttggttttatgatcttttaaatttaagtattcgttttacgtttaagctgcatgtttattaacaaggtttaattggtttcaagagattttttcagttgaaatggaacttttgacaaaggttctcaagatgaaggattgt

SEQ ID NO: 2432 - DNA, 4005 bp, Arabidopsis thaliana landsberg
tatattccctttatgcatcaggaaacacattcttttgggcagcaacggcccagacagatccggcctcttctttttgcccggacttatgtagaaagtcaaccaccgcatgcacgagtcctcgcttgctctccctgtcctcgctatgcataagatccaggaaattgttcgcatggttgcgcacgttttcgccatccggacccgcagctggcatcttgaggagaaacatatgtgctggatgacctgtgcttgccatcaactggccacagaaacccatatcaagttttgaccgcccatccgtgcaacaactcaagagtaacgtgtatgtctgcaaagaggggcgtagaccaagcgccagcatgttttgtaataactcataagcttcagctatcttgttaaccctaaggaaggtactaagaagggagttgcatgtaggaacattaggtcgcagaccagcatgaagcattgcttgataccattgccacgccttttccacattacctgcttttccccacaaatccaccaaaagaccataaactggctcatcaggaatccagtttttctgttgcatctcggtgaaaacagcctctgcttcctcgagatatccacagtgtccaagcacctccatcacaatgctgtatgtcactttgtcaggctcaaacccagcgttttgcatgtcacggtaaagcttcaacgcactctgatagtttctcgctttggcatgcaagtccatcatgatgttgtatgtgaccaagttaggggtacaaccttgatcaaccatctcacaaaagagcttgtgtgcagcgggtaaatgtccagcttttccaagacaatttattatgacactgtaagtgaaagtatccggagaaagacctcctgcctgcattctctggtacatatccatggcaatgtcaagaaatccagctttagcatgaatgtctataagggtacagtaagttacacggtcaggtttgcatccagcctcttgcatttgattgaacacattcatagctttgttcaggtaattggcacggccatagctgtggataagtcggttatatgtaactgtgtttggctgacatccatctctaaccatctcatcgaggagcttgtttattgcaccaaattgcttagcacgaccgagattaccaaccatagtggtataagtatgcccatcatgcttaaacccaggttgcctttttaaccagtagaagaaaccaagagcatttccatagtcattaatctgtttaagaacttgatttgcttggtatgcgtctatcctcaaacctagattttgaagggcctcttcagcagcaggcccccacctgaatcttcgtaaaacgctggaaacattttccacaatgtgtccggaattacaatactgtcttgatgtcagagcagtccctggaggccctttcatcatttccactgaagaattactgaaaccgcttggcacaaatctgttcgaatcaatatggggtctttgcaacacgcttgtcctcttgccataggtgttattggttgtgggtaatgactttcctaccacagaatttgaaacttgtctgaatcctttaacaaacccagttctttcagcttccttggcccctcggaaattgctactgggatttctagttgtaccaactgacgactcttttgcagcggacctaggatagactttggcaaggtgctctcttcttatagctttcacatttgaagactttacacctgaaataggccgagtaggatcaaccatacagcttttaggcaaaccaaatgcatcgcttcctccatcatacgaaggaattttatagtttgctaaatctgacagaaaatttacatttccaataccagccttgaaaatctgatccccaataggtacccccacgtcttctttaataatagcagaagcatgatttacagaatctgctttccctggcaaagcaggagaggaaacatgttgcggaagaagcgatggccgggtgaaatgctcaaccgtctttgggaccaccagcggtttaccagcctctactggtaatatacttccagctagtccagctgctaaattagatgctcttttaccagtctgtacaacttcagtcctaatttgctggcgtttcaagacgccactttcatcctcagcacatgtacaagaatttccatcagcagcactcggtctcgatccactaagaaaaaaagatcttgctgagctagaaagattactaatgtgctttgcacgaatcatcgtctgcaagaaaacagaatcatacgcttagagaaaacacataaagataatatcaagaactaaaaaaaactgttccccaaaactatcttagtaacctataacactacctgaagcctctcaccagaattatgacaacggagccaccaaacgcagtaattaaggtttcaacacttggtcgtgtaaccaagccatgaattacaaagaaaaattacattttattagccatctagctctcttgtccacgaagttctacacaaagaattgagaaactttgtacattacttattcaaagtcaccccatatcttgtataattgtcagagtaaaacccatttaacagaataaaaattgggctttccagttttctctcagcttctccacaaagtatcatcctttcacacaccaataataccaaaatggctataacaagaatatacaacaatgtctattgtctaagctgaaatagaccatccccattctcgaaatgcattctaaccagttgctcaaaaaatatgtgcagtgaaattgagcctctgttagaatctctcttcacctctgattcacattcaaatcttaagaatattgaccaaattaaagtcaacaattagaacatacagtcaaacaaacattatgaatacgttcaatctcaaaattaactctcacaaaaactgataacagccgagttccaagctcgatatcaacgaaaagcagaataacagaagagaaaagaggagaaacccagaaatcaatgacatttattgctaagaaagaagcaaaatttcaatcggaaaagtaaagaacagaagcgagatcacaagactacgaagtcaccttaaaaacggtggtgtttgacttccttcgtctgcttcgttttccccagacaacagaaaaaagaaatcttcaggaggaaatgagaaagaaaaggagagacagaaggcgaaattgccttctccctctgtggccgtcaaatatggaagcctcacaagtttgttttgctctccaagcaaattgggtactactagctccaaaggtcacgactttttttttttttttgctttttactctcttctttttttcttttcaataaatgttttcctttaacatacttaccttttttcaactatacccctaaatctttgtatttatgaaataacatcacccataaatgttttttccttttataaattaggcaactctaaattgtatctgatcgattcgattacgataccttcataattttcagtatattctttaaatataataaaagcagtgttttatattgaagaatttcagaatttcttatttaaatcgctttttccggttaacaatgtggtgtctagtgatgttaatatgggctatcccaccccaattaaacccatcccatttaaacccactccatttaactttaaacccatataaacccatttatttttgaaacccatttaaccctgcccatttaaatttagtaaatccatgtgaacccatttaaaccaattaagtgagatattgccttttattaattaattcataaacttaatagataaataacaacagtccataaacattagctaaatctgaaatatttataatttactaaaacatagatttcaataacatataataataataataccaccaccctttggcgggacataattttctgtgattttggcgggaaaacttgattttacggttttacgggacaatgtcggtatcgggtttggcgggaatcgtggttttccggtttggcggaaacctttttgtgatt

SEQ ID NO: 2433 - DNA, 1082 bp, Arabidopsis thaliana landsberg
attctctaaccatacatttacgttgactaaatcctcacatttaagacaataaacccttaatcagaaaagattgtttctttactttaatcacccaactgttttcagtgttttactgaattttctcatcttttataatcacttcattgtagttttactgaaagaattatttctatacttcatcagccaatctcagtctcatcatctccgatgggaaaacccggcggcgcaaagaccagaaccgccgtatgtttatcagacggtgttttctttctcgccggagctttcatgtctctcactctcgtctggtcttacttctcaatcttttcaccttctttcaccagtttacgtcacgacggcaaaccggttcaatgctccggtttagacatgcaattcgacccatccgagcccggtttttacgacgacccggatctaagctactcgatcgagaaaccaatcacaaaatgggacgagaaacgaaaccaatggtttgaatcacacccatctttcaaacccggttcagaaaaccggatcttaatggtaaccggttcacaatcctcgccgtgtaaaaacccaatcggagaccatttattactcctccgatgtttcaaaaacaaagtcgattacgctagaatccatggtcacgacatcttctacagcaattctcttcttcatccgaagatgaattcgtattgggcgaaacttccggtggttaaagctgcgatgcttgctcacccatttatggattgaagctttaggtaattttctcaaacacatttatggattgaagctttaggtaatgaatgagctgaatttgcatataaaaaatcgatactttcattttccagaacaaaccaagatttagcataaatgttcaaaattgaaactttgattcctaacttcttggaatgattcatattgagctagatttagatctgtatgattgatatgatgggtttggtttgtttatgagtagagagaaaatgggtgatgaggcagagatcaaggaacatttaaagccacaagcttcatctgaaacaatagacaagaaacataatgtgaaagggaagaggttatggcagaaa

SEQ ID NO: 2434 - DNA, 584 bp, Arabidopsis thaliana landsberg
atactcaaaccagaactgtataaaatatgacactattcatttttacccatttgtaatgaaatgtataaagacataggcttgtggaagtatatggatatatatagatattaaatgttaggacctggagatgactcttcacatgtgatattgtgagtcctctcacatccattaactgtaaaaccattttaggagttgctcctgcaattttagggattgtaaaccgaattcatttatcttgaacttgaatgaattcaagattggtaaaaattatataacttcacaagaacagaagttttataattgataaagtaatcttcaaaagttgttctatatataatgacagaaattgtgaatgattcttgaaacatttaagagaaattaaatcataattatagttttaggagaagagaaatgaaaccacttactattttctccaccgagttgttcaacagcttgaacaaaagagttatgaagatcggagttccatcgcaaccgcggcactcttgatctaacataagatctaacgattgggttcttcatctgttttatatcttactgaaactcgcgatgcgatgaaaatcacc

SEQ ID NO: 2435 - DNA, 2397 bp, Arabidopsis thaliana landsberg
gagattgctttgcgtgatgttgagaattcccgagctgcagatgagcagaagaagaagcttgagcacttgtccttagtggagaagtttttcgcgaaaataatcctcggttcctcaatttcctcgaatctcattcagctaaggagacaaccacagatcctatctcaccctctccagctgcctctccttcttcatctgcttcataggtctgaatcttaactccttcctcaagactcaatatcacggctcaaagtttttatctgtgtacttgtgtggctggtacttatgctgaacaaagttctaagttgtagtgaatcgaacatgtttttgtaatttgggttttgtacttttttgaaatgataataaatttgttttcatgcttcttgtattgtgtttatgcttcttgtaatgttttgttttctcaggaaggtttccatctttagaacaatcatataggtgttctaataaaaccaatagtcgcaaatttagtcataaaaaatgtaaccaaacagtcggtttttgataacaattcagtcactaaaatttctgactaaatgatatttcagtcgcaaatcagtcttaaatatagtgacaacatagtcgtaaattttaacgactaattacctacaacgactacataaccctcaagttaatcgttaatttgtagttcaatagtcgctaaatttaacgactaaaatgtcactaaaaaagcgattacttaaacttagtcgtaacttagtcgctctttggcgactaaaatacgactaccgtatttaccgactctcgattagcgactaaatttaatagtcgtttatttgtcgtaaagtggtgtttaacgactacagagtgactaatactgaagtcggtaaatggtaattttcttgtagtgttatttaacactgcgttgtaatgttatggtttgtacgaattcattatccttctcatcaacggtcctgaattttatctaattttaatgcttatattctcataattttctaagccaatatgatatgtctataatttgcatgatttagacactcattcttcaccactttgtcattgtttcatccacatttcagctcattaggagtcgttttagtgtgttttgcatacttaggaaggttttgcattaggattgcatgtgcattgcatatttggttgtttcaggtactttggagctattggtgctcaaaaagaggaaaaacagaacagaaagtcacatttccaccaacatactcgatcaccagtagcagagagggaagcagtcagttcagcagtccattctgccagatatactcgatcgcagaggagaggaggcagtccattctacagttctactcgatcgtaaaggagaggaggcagtccactttgccagtccactagttctactcgatcatagaggagaagaaccagtccatcctgacagctgacacacatactcgaccacagaggccaagaagcagcccaaaccattttgtcaaccaaccaactcgactaccacctcgaccttctgatcaatccgcactcaaccagacaacctcaggaaaggaaagagaagagaagagaaaggcccattcgaagcccatttgaagcccactttgaagcccataaagaagcctactttgagtcaacactcttgatcacatcgtccatgggccgttaagtggcctcgaagcccgctttcttaccttagtataaataagtctctaagggttttgccctgagacagacttggacagactatttttacagagatttctacaacttattcagcagccccttttcattactgcaattttgtatttcgatttttgtgctctatattttggtttaagtttttacaaggatacacagttttaacttcagccattaaacaaatttataaagtctgtatagggcacgggccccactacctctccacatagatccgccaatggttgtagaacccgtggtcaaatctgttggttatgtgttgatagtaggatttttgtcaattaatccctaaaacactatcttgtcgttgtagtattttaggatgtcaatccaatccggtgtgatgcaaacagatgagatatgatcagaaagctctaagtcaagtcaagcagaaagttggttggttctaacagtcctagtatgcaataacagaaatgaaatgaaactaaaagcagaaatggcaatagcaggcaagtgaatgacaaagcagaaatgataacaggcaatcaaatggataaacgattcctaaggatgggggtaatcgaatagtgtggtctacttaatctattcaggcggttgacaaaacttcacagaagctatccctagacaacaagttcaacaacagattaattcactcccgtgatagaaatcctcatgcaaagctagacactgacctaaatcccttta

SEQ ID NO: 2436 - DNA, 969 bp, Arabidopsis thaliana landsberg
tacaaaacagaggaagacagaccaaatttagaaacaaggatccaagtggaagcatccgagcagcatgcagccatacactcgtcacgtcggttcgtcgcgtccgccacatcatcacgtggttctcacgtgtttactctctagactctcatcagtgttcttttctaatacagtaataactcaaactttaaccttagtttttaaacgtctaaatctgattcttacattttttacaagctttacttttatttatgcttacattattacaagccttaattttttcttacacaaaaacaatcgattactatactataacattaaaaccgggttctcccaaaaaaaatcgattaaatttttatttagatacaataataacttttaaactcttttgtcgtttttgttccccgttgtctgtttttcgatgcccatattagatgctgatgtgtaagaaacatgcacttgaataagccatgcaaattgaaatgtgtcaactccatttattttttacagagtgaagccaaaattcattttcggatgaagtcataaatagcaatttaagtgaagtgtaaattgtacgtagtcgactctatatacctggttcttatctcattcagtttatcctcaacaactttaatagaaaaatatcaaataaattccctataaatagcttcacataatgcaagtgagaaaccacaaaaagtaagaaatataagaaataacaaaatggctcgagtctcttctcttctttctttctgcttaacacttttgatccttttccatggctacgcggctcaacagggtcagcagggtcagcagtttccgaacgagtgccagctcgaccagctcaatgcgctcgagccgtcacacgtactgaagagcgaggctggtcgcatcgaggtgtgggacaccacgctcctcagctccgttgctcaggtgtctctttgcacgttacatcatcgagtctaagggtct

SEQ ID NO: 2437 - DNA, 1684 bp, Arabidopsis thaliana landsberg
  unsure (1)..(1684): unsure at all n locations
gctgctcaagccatcacagtcacagatcttgaagcaaaacttgatcaattcgttgagaagttagaagagaagctcgattccgtcgtccaaaggctccaagcacaacaagaggagtatcgacaaggcatccgtgaaatgtttgcaaagtttttcccggtgaacgcaagtgacgaaccacctgagatgaagaaccaagagcatcacgagctccatcaagtcatcaccacgagagctgaagcaaacccaacaaaaaacccagatatctctcttgagaattctgtcgaacacttggtgggcactgaatttctagaagcttctcccaatccttgggtctcagagcttcaaccggcgatgcattctcgcagggaaagaagaacccatgttacacaagctcgcaggagaggatttatttttgttaatcagagccatcataaggttagaaaaaagacaacacgaaagagacgtctcatgatcgatccctcaacacaaatcaacaaacaatccattaagaaacttggtaaaagatctcgctctttctggcttgactcgacagtgccatttccacggttgttagtggctagaaaagaaagtcacagaaggtctttctctggttactatggatctgattcccaagaatctagtgatggtgttgtttctagaaggaaatcatgggaacgtaaacgataccgagaaagcaaggatggtgacattaggtcaagtgaacaaagtgccataaatgggttattgttttggaccaactcgaagaaagcatgggagcaagtcggattagattctcaggaaaagaatgataatgctgctgatagtataagagtattatacattggatttcaaggaacagctcctcaagtcgctatggaggtggaacatgatattattagcaaagacgctgcttggaagggtcagaaaaaacagtcacaagtagctatggttggaagggaaagactggctccattagtgaaggattcacattgtgaagaggaacatagggaagctagagtgtcaaggcccttagatgaaaatctaagaagatgttttagcaactttgagaactattttggtgagaataacatcccggagcaggagaggttacaaattgtttattctaacttggaaggagacattggtcaatggataaagcatctctggaaaaagaattcacctacaagctggaaggaatttaagtgtatgatggcccgagagacaaagacaacaatgaaggtaaatcatcaacctcattattccggaatccaacaagaaggatcagttcgggagtatagagaaaggttcgaagctctttgtctaggctcagttattttaccaggacaaggcttggaggcattgttcttacaagggttgcagcctagtttgcaaactgcagttcgagaattgaaaccgaatggcattgtacagatgatggatacagctcaatggctagaagaaagtaacagtcttatggtctatggaagtgggttgtcagtacaaacagaaccaaaagcctacccaactacacaagcggagttaaggagcatggtgttaatgggatacatgagggaggatcttaaggacacaccaaggcctgcgaatgatgatacaggtacactaaaacatggacatgagcttncagggacagaagtggccacatgcangggaatgcgattctatg

SEQ ID NO: 2438 - DNA, 554 bp, Arabidopsis thaliana landsberg
  unsure (1)..(554): unsure at all n locations
tgacttctcttccatgaaaatcgccctcccacctaaaagtaagtgtcttttcgattatgtagcttagctgcaacaaacttgttgtcagtttaaaagtagcggaaattttgatgctttttgttcatctcagggatatatcagaacaatggctatcttatggtttcttgcaatggaggactcaaccaaatgcgagcagcggtaagttcagaactaatcctcttgctttcttaaagaaatctctttttatttctgaaagctgtgtgtttctattcatgtgacttttggactctgttttctttcttcagatatgtgatatggtcactattgcaagatacatgaatgtcacacttattgtcccagagcttgacaagacctcgttttggaatgatccaaggtgttatgccatccatcttcttactcggagcttattactgaatacttcctttacttagttgataacctctcttgattgcattntcatgtgggccagtgagtcaaagacatattcgacgtggaccatttcataagttctttaagggacgaggttcgtatac

SEQ ID NO: 2439 - DNA, 1919 bp, Arabidopsis thaliana landsberg
acctacatctaactgcatacccaccacatgatgcgtattgtctcccacaagctcaacgctgaaacatggaaggttctttcttcctctacccttaattgaggcaaagcctgcatgggtatgtaatcacaaaaactactgcttcctcgatggcaactctggattctttcaaataccaacccatccaaacgatcaaggaaaaaccacattcacgtgtccctatggtacttatgcctatcacataatgccgtttggaccttgtaatgctcgcgcgacattccacagatgtatgaacacgctcttgacagacatgatcgacaaatccatggaagccttcatggatgactttactgcatatggggcttcatttgaagcatgcttggagaacctttgcaaagttctagctagatgtgaagagaagaatttggttcttaattgggagaattgtcatttcttggtttaggaaggtatagtacttggtcacaaagtttcaggagctggtatttcgggtgataaagccaagatagaggttatgacaagtctacaggcaccagatagcatgaaatcagtgaggagttttcttggacatgctggattttacaggaggttcgtcaaggatttcagtaagattgccagaccactaacagctttgctttgtaaggatgtgaagtttaacttcagtgctgagtgtcatgctgcttttaatcatattaagaatgccttagtgagtgctccaatagttcaacctccggactggaatttaccttttgagatcatgtgtgatgcaattgattatgcagttggagctgttttgggatagaagaaggacaatagacttcatgttatccattatgcaagtagaacacttgatgatgcacaacggaattatgcgacaacagagaaagaattgttagctgtggtttttgcttttgagaagttttgcccttatctggttggttcaacggtaattgtgcattcagatcattcagcactcaagtaccttatgcagaaaaaggatgttatgccaagattactacgattgattcttcttcttcaagagtttgacatcgaagtacgggataggaaagggattgagaatggagttgctgatcatttgttaaggatcaaggttgaagacgacattcctatcaatgattttctgcctgaggagagtatctacttggttgagacaagtttgcaggaaaatcatggcagtgtcgattcacacgcagatgagagctgcagagtataagtgtcgatcgacaccacacaccctgtcgatcgacaccatcgcgcttcaaagacagatggttctgcacctccttcccagcccacatctatttcagttccctctgataggtactcctccatcttttctcctacttatccttggattacttctttagaatctttgaaatgtgcttaccggtaaacgagcatcgagtttctcgagcgtttgtttccactgctgattttgtaggtaaagaagtgagtgtcgatcgacactaccaccagtgtcgatcgacaccaaatgctgcacatagccgatctgtttacacaccgccttggaaggcgagattgcagcataagtctcatgttcctccatccaagtcctgaactctggcaagtcaagctattgactataaacaagcgcttagtgggaggcaacccactggtatggttttctttttctttttcttttattttacgtttttcttttatttttctcgcttactccggatttgaatgccacttgggacattgttgtttaagtctggaggaggcgcttactaactacgtttttctttttgagtcttatttttattcttatttttctttttgagtcgttttattgagtcaaacttttgttaggaattatgatctctattctttagattattgtctggttgatgaatgttgca

SEQ ID NO: 2440 - DNA, 2106 bp, Arabidopsis thaliana landsberg
atatggcttaaccattaccatcgttttaattgtttctctatgtttggttggggcgtgaatgttcatgtcttcatggtctgctccaactgagtctattgacttctctgcaaacgagaggacaaaagatgtagataccactaagagtgatttcaaaagtgaagaggttgatcgaggttccaagagttttccggatgaaaagaatgaggagacggaggttgtgacagagaccaacgaagagaagactgatcctgagaaatctggtgaggagaactctggtgagaaaacggagtcggctgaggaaagaaaggagtttgatgacaaaaatggtgatggggatagaaaaaatggagacggtgagaaagacacggaatcagaaagtgatgaaaccaagcaaaaagagaaaacacaactggaagagagctcagaagaaaacaaatctgaggatagtaatggaaccgaagagaatgctggtgaatctgaagaaaacaccgagaagaagtcagaagaaaacgctggtgaaactgaagagagcactgagaagagtaaggatgttttcccagctggtgaccaggctgaaatcacaaaggagtcaagcactggaagtggggcttggtctacccaattggtggaatcccagaacgagaagaaagcacaagtgtcctcaattaaatggaaagtctgcaatgtgacagctggaccagactacatcccttgccttgacaattggcaagctatcagaaagcttcattcgacaaagcattatgaacatcgtgagaggcattgtcccgaggagtctccacgctgccttgtttctcttcccgaagggtataagcgatccatcaagtggcctaagagcagagaaaaggtaaaaattcaatatgcatataaggaagacaaaaacctccttatcctcctttatattatttgtgaatgatatcaatttattattctgttttctgttgccacagatctggtacaccaatattccacacaccaagcttgcagaagtcaagggacatcaaaactgggtgaagatgagtggtgaatacttaacattccctggtggaggtactcaattcaagaatggtgctcttcactacattgatttcctccaagaggtacaacttattattgattgatctttcatgcaacgtttacacaactttctcatttgactattgacgttattattatatatttttgcagtcatatcctgatattgcttggggaaataggactcgtgttatattggatgttgggtgtggggttgctagctttgggggatatctttttgacagagatgtactcgctttgtcatttgcacccaaagacgaacacgaggcacaggtgcaatttgctctggaacgtggtattcctgcaatgtcaaatgttatgggaaccaagagattaccttttccaggatctgtttttgaccttatccattgtgctcgttgtagagttccttggcatatcgaaggtaaaaagtttttcatattggttgtgtaattctgtctttattttttgtttcattgaaataacctctttttggtcgtctgaattgaaggtggtaaactacttttggagttgaaccgtgcattgaggccgggtggtttctttgtctggtcagcgactccagtctataggaagactgaggaagatgttggcatatggaaaggttgagaaatttattctcttttctttggccatggataaggctgggcaatttatttttaactaacttgtgagatggtgttctctgtttatagctatgtcgaagctaacaaaggcaatgtgctgggaactgatgacgattaagaaagatgaactgaatgaagttggtgctgccatttaccagaagccaatgtcgaataaatgctacaatgaaagatctcaaaatgagccacctctctgcaaagactctgatgatcaaaatgccgcctggtagtttatctatttcccttcttacgtcaattgacaattgaatagtaatccaatgcagttctgttgctaacatttttggtttgatgcaggaatgttccacttgaggcatgtattcacaaagtaccagaagattcatcaaaacgcggagcaatttggcctgaaagt

SEQ ID NO: 2441 - DNA, 1924 bp, Arabidopsis thaliana landsberg
aagactcatcacacttctgatttctgaaagattactctcctagaaatctataaatgagttattaattattcaaattgagtatatgagactgaatatctggtccttggttaagactttcgaacaaccagacttagcttactttactgaattactgttcatgcattccatttgcaaatctccactgaaacttgcagcgtgttttttttcgtatccaagattcaactgttgcatcattctccaatctctatatatccacaaaatcataaaaaagatgaacttcaaaattgattgaacaagaaaatatggagaaataatttgagaggacgtcttaaaaccttagaagtttcgagcgaattttcgagcgaaatttgatattattttctgtatattaattgatatcacaagtaaaaattaaaacaaccttaccatatgatgcagcgagatatctaatattattatcttttaatttatttattataattattttagaatattctaagttttagggttttgtgctttattataaatagccttcttaggcctcctattgtattcagttatttgataaattgattaatcgaaagattgaaagaggtttttataaaccactgtgaagagtattcacaaacctaagagcttttgcgaaagccctgagaggaggactctcaaaccctagatttccgggtattctgaaaatcaacggatctctagtcttatcctagaagcttccgcttcatcagttggtatcagagctgcgtctctttgatttcttaatcaaggaacgattctggttatcacatggtaagtgattgcatctatcttatcatggacgaaagtccttttatcgagagagaggagaaccaccagatctacagagaaattgttggtgatccaatctatgacgtttatgaagatatgatttgtgcaaaatttgtgcgaaatcagacttgtgcaaaattatggttttctacagaagttatgaaaaatccgatctgtgcaaatttcgggtttcgtacggaattcaagaaagatccaatttatgcagattttatgaaggatttgatctgtgcaaaattcgggtatgattcgtttcgtgcaaattttgggtcagatccggttcgtgcgaaaatcgggcaaaatctagagataaagatagattttcgaagatctaatatgttgagaaccctgttgaagatttgagggcgaatctttcttggccggcgggagctgatgcagcatagatacaagattcgaggacgaatcttttcttggccggcgagacctgatgcagcgagatatttggaatatttctaaatatctaatattattatcttttaatttatttattataattattttagaatattctaagttttagggttttgtgctttattataaatagccttcttaggcctcctattgtattcagttatttgataaattgattaatcgaaagattgaaagaggtttttataaaccactgtgaagagtattcagaaacctaagagcttttgcaaaagtcctgagaggaggactctcaaaccctagatttccgggtattctgagaatcaacggatctctagtcctatcctataagcttccgcttcatcagaaggtgcatgaagtttcttaccttttgaaggtgttaccctttaaccaatccattctattttccaatcaatataaaatatttaatgggccagattttccggcctgtttaaggtgagtggtattagaaatgtttcgtttacgtagtaacgtagcttatttccagcaagcagaaacattggtcatcatgctatataggaccatataaactggataaccagattgcgtccatgcatcattaatgggctacgatttgggccctatgggtagatttatgtaaaccttcaagacacgtcacactcgcttagagacacgt

SEQ ID NO: 2442 - DNA, 569 bp, Arabidopsis thaliana landsberg
gtaccgtccccagaagaaaaaagactacttcttacgaattcgtccttccataacacccacaagaaccgcaatggcttgggcagggtatgagtcgcatgaacggcgctggtgatccgaagctaatcatagagaagaatctggactcgaacgatgttgatccacgtcaaaaccgactctcaatccctatcaataccgtaatccaaaacgatttcttgacgcttgacgagtcaaggttgattgatgaagacgaaatcactaacgaagggaatatgggtgttgcagcgtttcttgttgatcagcgaactaagaagtggaacatgggttttaaacaatggtttatgacgactgattcagggagcagttactggagttttgtgttgcgaggtgaatggagcaacgtcgttgagactaatggactgaaagaaggcgacaaaatcagcctttggtctttcaggtccaacgatatcctctgttttgcccttgttcctccaacgagctctgttgttgagtctttagataagtgaaaagaagggtctttgggagtattagggtcttattgtgataaagat

SEQ ID NO: 2443 - DNA, 613 bp, Arabidopsis thaliana landsberg
  unsure (1)..(613): unsure at all n locations
gatttaaaattggcttcgttaaattactatcattgtttgcggaaaatatattgcaccacggagaaaatttcaagcaagagtaagaaacatacatatagtaaaaaaaacaaaaaaaacatacatatagtaatctgaatacaatgggtaatgtttttgccgataaaacttttcaacattcaagttaatagaaactgcataactttgttggaaacaaaaaatatcggaaaaacagagaaaataaccatggtcgaattaggttggatctaataacaattcctgttcgagggaactttatttaatatacatgattagtcccctccccaccacctctaaaccctataataaatagttagttataacttattactaattctttttaacgccactatctaaaagatcactagcattagtgtgctcacatgatacacgatttgtatgtacatgtatatcaccatcttcatttttgtcatggatcgaatcatcatcgttaatctttatggtgacatgatgacatgagtccactgagatctctccatgcgattgcgattgatcaacattgtttgatgtgtcaacgtcacctaacatntgtacaacatgatcatgatcatcatga

SEQ ID NO: 2444 - DNA, 508 bp, Arabidopsis thaliana landsberg
  unsure (1)..(508): unsure at all n locations
catttnatacatttcaanatccaatttttcantatttttcttacacatcaaatacaatatcgggatcaggttgaactttaccaagagtctcctaatctcttggctttcctaactattagttaattgtgaagttattagctctatccagatgatttaacaaatgaaaatatcttgagtctttgtttactatccttgtcctagaaattgaaagcaccatcagagccagcagtggcaaaagtaccatgtaccttataaaatacacacctnaaacaatcaagtcatcgttatgtcaaaaaaagaaagcaatcaagtcaaaatttgcaaaagaaactatggttcacttagaatttttaaatatggacacaagttacatgaaataaagttttgattttgcgctttggacccttgaaaatacaccaatttgtttgtcactttaacaatgtcccggtgcaaatttacttcacgcacatgcgacatttatgtagccatgtcggtctccttttaatgt

SEQ ID NO: 2445 - DNA, 536 bp, Arabidopsis thaliana landsberg
ttcttctctacgtgcagttgtacgtaagtttcatcttagttattgttaaatattcttgtctaaattcttccactaatagttgacaatttattgttaatcgtaactctgtttttcaaaaataggcagcttgtgtggaatacataatcatgatgagcgataacttatcagggctattcccaaacgtttcattgagcattgcttcagggatatctttagattctcctcagatctttgcaatcttaaccactcttcttgttcttccaactgtctggcttaaagatcttagcttgctttcttacctttcaggtttgaaaattttcccactgaaaactctctgattatctcctcattggctatatataatgggccgttcttgtggtcttaattatctagttggaggagtcttggcgtcaatcttactcggtatctgcctcttctgggtcggtgcagtcgatggaatagggtttcatgcaacaggacgagttttcgattaaagtaacttacctgtcactatagggattttggaatttggtact

SEQ ID NO: 2446 - DNA, 3711 bp, Arabidopsis thaliana landsberg
  unsure (1)..(3711): unsure at all n locations
atgttaacgcaaacataataattcattaccaaacacaaaaccatgatgttttacccaaaaaactggtttcaagcaacaaaacttattagtagtctccactgaaccaaattattaaggcgaattttaaaaaaagagcgtgcatgccaaaaatagtctcggaaagagacagcgacagcgacagagagactcaccatccctttgtattgcccctagttctgtcgtctgaactctctccgggacatgataaataagacaagacacagattcatatacgacgctgttctttttgtttttttattccagggattagagacagtaccggtagcccgaggaagaggaggaatgggatggagacagaatctccaaatccttcttgtttgaaggaagctgttacggtggatatataccttcttggaaaggtgagagaggcaagcaaaaatatgaaatttagacgtgtttttagccccttgtcttagctctcttcatgccgaggctattgtaaggtgagatggaaccagacattggagatccttcttctcgaagactgccgttgagaagggccaattcccgtagctgttgtttcttgtagaaatcatgggtttcctcctaaaacagtacacaaaacaagtacggttatatagacaaacaaatactacatgtatctctggtttaagatcttttaagagctaagaacaaaccacgggagtaagtagatcgtctagtatttcacgggcttgcatgagacttgcgtccactatttcaatgggtaattctgcgctcgactaatatgtggagtggttcattgaggtgctcataaccaggtttacctctcatcatatcctcctgcaaacaataacgctatattaatgaagatacaattggagttaaggtattattagactgaacaaatgaaaaatgtgattaccttaatcggatctttaatgctgcctctaccccttattagaacacgacaatcagtactcgcttcaactcgtttgagggagtttcctctaggacccaagagacgaccgacaaaattgtactgcaaattatgaaattattgtttatactttgacaagataataaaggaactcatcaagggaataaagattcatacgtttgggtatttgtcgactggaatatccacccttattgttcgcttgacgatgagaccggacgagctaccaggagagttaagccaatttggtgctggggatgatgaaaccgatctctacaaatgatcaaccaacaaaattagaagcaagatcaacctttaagcataagcacatgaatactgcaacttcttgccctggaacttcattcaatgagagtggtcactgtatcaaggcatttcaacctgtagctgttatatcctaataatatgcatacagtgaccgcagatatatgagaaaattatagcattaatttccatcctactcgtgaggatagtggaggatctaattagtgttgatctaaggtatgaacatacaaacattacggatatgaagtgttagcctacctgtcatgataaactaggactaaaagcagtcaaatatgttatgtcagtattataacttaagtcaataaaacttctattgcagtagtatgaattagagagttatgttaatggttagtagtcatacttctgatggaaactgggaggcccatccattcatgtcagctcttgcattctgaaatatccctccagaagccagagggctagggtggtcaagcccactctgacttaaaactgtagcattctccaacagtgtggttacacgcaaaatttctgttccaaaaatgtcaatttgcaagagtaagacgcaccagttagaattagtcaacaaatcagtcaccaagacaccaatgaatggagagacagcatagttaattgagttagcttaaaatatatttttgctctcactctagttaaatacactctggttaaatagaatgaagtcagtataagaaatatagaattagtcatttcgtgatctacttctaatagctaacaattaggtctctcttagcagtactgtttaagagtttatcaactgtattatagcttcatgaatctgaagcaaagaatgaagtattatgtgagatgaaaatacaaataataaacaacaaaaacagtaatgctcaccttggtttagtagccgaaatgcatgtggaagcacaggcaggaatggagtaagcttatgacgctctgcaagtaactctgaaagatacctgccaaaacagaaattgtgcagagtatccaaattagtaaaaaagcctcaaagacacatcaaacttacaaacagatacactcaaattcactctaaatcgatacaaccagattcaaatttccattcttttgtgaagtggatctagtcaatcttccaaaaatcgtattttttttaacagtttcatcagccaagaacagaaatcaacaataacagaaacgaacacaaccaatgaaatgatcctcacacactaaagacttatgctttacaaaaaatgaactggattgagacaaatctgaaatagactgagctagttccgaaacatagatcctaatataatcaaaagaaaacaaaaaagacaaaaatccagattcgagatacactattaagatctaaaaatcaaaatcagcaaagcaaagatcaacatacttcatcagatacatcagctaattataaaagatcaccaaacaataaaaaacaaaaatataaaagaagatgaaaaactaagattcgattacttctcttgctcaacgaagacagaagactgtgatcggagaccaccggagtaattaggagactgaggagcagaaggaggcaccgaaagagacgacgaatacgtcataaacctccctccgccgccaccaccaataccaccaccacttcctcctcctccaccaccaccaccaccaagcgacgacatcatcatcatctcgaagacaacagaatcagagtaaatctgtcggagattagaagaagaagaagaagcggcggaggcagaaccaaagctgttgttgtctctctataacgtcggtggatttaagaggtcattttatagagactgtgaaatgattacttgttgtttgcttagctgttttttttttcaccttttttctttgtttcatattttacccaattttaccgctcttcttgttagtttctctctgaagactcttaaccatctagaaggttttttacatccggtttactaaaattcgattcggtttatctataccggaatgactaaacgctgcgtttcaggaagcgaagctctgatattcagtaggccgcgaaggaaggttgaagaagaagagttgagaattaaaaaatggaggagacgacgattcctttcaagagcttacatagcagagaatatcaaggtcataagaagaaggttttttttttctatctccagtctaattttctgtactcaataaaacttgcgaaaccctagttttttgctgaatctgggggaatttttggattgaaggtacattcagtagcttggaattcgaatggaacaaagcttgcttcgggttctgttgatcaaacggctcnnnnnnnnnnnnnnnnnnnnnnnnnnnnnnnnnnnnctttacctttttgagctatgggaacttctatgtgtttttgatgatgatgaatacatatggagaagtatttgagattgagttaaaactcgattattatctttggcattgttact

SEQ ID NO: 2447 - DNA, 499 bp, Arabidopsis thaliana landsberg
  unsure (1)..(499): unsure at all n locations
gtgaggaagaggaagaactctaagaagcgacctggttctattatactcttcctttgattaccggagagaagaaccgttgaatcaggttccgggccggatgttcttgnnnnnnnnnnnnnnnnnnnnnnnnnnnnnnnnnnnnnaaggcaagaaagggcctaatcaagatgccatggttgtttgggaggtttgttagatcctcaagtcttccccctttttttttttattgtttctaatttgggatctgaggtcctattgtttcttcttcactgattgtttcctgttttcgtgctcagaattttggttcgaggacagatacaatcttctgtggagtgtttgatggacatggtccatatggtcatatggttgcaaagagagtcagagacaatctttctctcaaattaagtgcttattgggaagcaaaagtaccagttgaaggtgttcttaaggcaatcacaaccgacactgtcattaatgtaaccaacattaacaaccctga

SEQ ID NO: 2448 - DNA, 644 bp, Arabidopsis thaliana landsberg
cggaccttatctagttgtttatacaaatactaggggaagtaatatattttgaaatgtgtttttaacttcttttaaaataaatttatttctatattttgtagtacaaaagtcttttgtttaaagtaacaacttttagaacttcaaaattaaacacttgtgttaaacctttcggcatgaaatatgaaagatagcttttgttaattagaaataaatctgaacttagggttacaaaggaatttcatgatttgttgttgttaggttgttcgatttgagattttatctattggttcttcatctatgtttgttctcaatgcataatctaaaatgatgacctagattaggatcttatatttaattcatcggggaaccaagagtgtcaatgaatctgttgaaaaaattagttgaataaagtgttattagccaacgaaagttgaagttaaggcaactttgtgaattgatcaatcttgaaccttttcatgtttgcttgaattcctaaaatcaaacgagttgttgtcagggatttcattacttagataattaaaactacaagagcacttaactttaccatagtgatttgggttcaagaaccacgtttatttgatccagtttaattatctttttatgctttatgaaacatgactttt

SEQ ID NO: 2449 - DNA, 483 bp, Arabidopsis thaliana landsberg
gattttaacggcttcagatacaagcactcatggtggtttctttgttcttcgtaaacacgccactgaatgcttgccttctttggtaaatatattcttaaagaaaccttctcaattcaagaaactttagcttgaattctcactccaattttacactttttaggatatgacacaagctactcctactcaagaacttgtgactagagatcttcatggctttgaatggaggtttaagcatatattcagaggtattgattctaatcttggtgtgtttttgtgaaactgtgtttggactaaatgagacattgactcattgagtgccgtttttggtttaggacaaccacggaggcatttgcttactacgggttggagtacatttgtatcctcgaaaagacttgtagctggagatgcttttgtgttcttgaggtacttttgaaattgaaactttattcactggtcttgtttagtttcatgaacctaaatgta

SEQ ID NO: 2450 - DNA, 259 bp, Arabidopsis thaliana landsberg
cggagatggacgggcggtgataccaggcggagcagtatagtcgctgatagattttgcattcaaaaaacggacccgcagggggaggaccagggctggatgaagggttgaacaaagtaccgagaacggacggggggggagagagaggcctaccgacaccaattgaacgctccattgatttacgaggtgcgaagctacgataagtgagatctaccaacttaacaccgcaacctgaaagggaggctctaaagctacctttgac

SEQ ID NO: 2451 - DNA, 521 bp, Arabidopsis thaliana landsberg
atagattgacccttttcctaaagtattattaacccccattaaatatatatatatatccaaatatagtctaataaaagatataaaacctacagcatgttaacccaattaattttataaataaaaacataagtccattaaactaggttaatctcattattattgtttaacacattataaattaccttagttttagtgtttactttaccagaacaattttttttctttctcattttatctttttttttttttttttttaaactatcatttgtgatgatattgtcattttttctcaactatcattttttgtttaatgtaacacattataaattaccttagttttagtgtttactttaccagaacaatattttttctttctcatttttcctttgttttcctttctttgtaaactatcatttgtgatgatattgtcattttttctcaacttttttttttttgtatttggcttagaaaaaaatatgacccctatgactaactattttgcctgcgctactgatgacatc

SEQ ID NO: 2452 - DNA, 2686 bp, Arabidopsis thaliana landsberg
  unsure (1)..(2686): unsure at all n locations
tttgataaatctccacgaatattatattttatttgtttttgaaagatattaattgatgagattgttatcaatatcatgttttaagaaaaataataattaaaacagttatttatcgatttggcgttagtaattatcttcatgtaaaatatacatatacgtcataattaaatttaggtttatgctattctctaaataaacatctatctactacaacttagccttaacactaaatatttttaaaatagagaaaaaggaaaattaaatttctcattaaaaaataaaaaattatcgtctttgataaaatcttattatcataaacaatctttatttactcgagaaccgtagtagttaaacaaaagattatgtgtaccgactacccaaagaaagaatatttatacataagcaaatgttataatccgttaaaaacatttgtagttgtgactgttcgagtaaaacacacaagtaaactgaaaatagaaaagagtacaaaaatcaagtttaaattagattgttacaaaaggattttcccctatcttgaagagcaagttaaggttcttagcaataactaaatgtagggttcctaagcgtgaagttgtggatctattggctggctgtcgaacttcacttttatacgagggagtcttcacttcgagatatgtttaacttccttattcctcgaatggggatatgaaaattttctcctttttctcggttattctccaagatttgaattaatttttccttatccccatcaaggtcagtgttgagctaatcgatattggacttcaggacttgtgttctttgtgccgagtccttggttatttagtttagtttttgtgtatcgggatcgatgatgatcagatttgtacagattaaaaattgtcataaaggatttggcgaatcctatattgtcacatacattaggcgaaaaatgttaacaccactctagattagacaaacgtcttagttcttaatgtcattttgcttagcctaatcatctacaaggatcatgactcatgataactggaaccttgataagataatatcttatcacatgagtcaaggaagagagagacataataattacaaagatttttgttttttgattaacttaacctgctacgcatgtaactcataataatatatatatatatacattaattttttaattccacaattatacatacacaaatatattaaccctagcaagaatgtaatacttgtttaccaagccatcatctaccgtgctttaggttcattgatctccgaaaatactccccaactcgaaccactcctctcatcaccaacaactagaacagagtcatcggtcgtggtcgatttccccacgtgtcctgtagtcctactaaacaagtcatcttctccgtccgtggtcgtaccaacctcaccacttggcattagatccagagactccacgttgtcattcttcttcttagcagtctcgtgaagctgaagagcaaactcaagcgcccaaacaacgtcgttcatcggtggccgttccataccacggtcttgaacacatctaatggctatctcacaaaacttctccatcgaggtcgaagtgatatcagcggttaaatctgagtcaatgannnnnnnnnnnnnnnnnnnnnnnnnatttgacttcacccatcggatcaaatctgcttgttccggtggaacactttgcattctgatcggtctacagcacaaaacctccaacagaacaactccaaaagagtacacgtcggatttttcggtcaagatttgacggcgatagtactcgggatccaagtaaccaaacgttcctttaacgacggtggagacatgcgtttgagaagcactagtaggaccaactcttgataaaccaaagtcagatactttagcgacgaagttctcatcgagaagtatgtttgtggttttgatgtctctatgtatgatcgtgtacttggctccagtatgaagatactgtaatccacgagctgctccaatgcaaatctctagccttcgtttccatgacaatggaggatcagaggttttgtctctcctgaaaagatgatctttaagtgtaccatgtggcatatactcatagactagtaccatctcgttgtcctcgtcgcagtagccgattagagagacgagatgtacatgtcgaagctttgaaagcatctcgagctctgtatcgaactctttagcaccttggttcgatgtaatttccagccgtttaaccgcaacaagtgtggctccaccgtctatttgtcctttgtagacagaaccaaacccgcctactcctatgattagtttttcctcgaaatcatttgtggcggatttgatttcgtagatggagaatcgacggcagagatctgatggaagagatgaggcagattttgtatttgtagagcctgtcccgtgcagaagaggaccccatgacgagttcgtataaggcttgttcgtggtatctacactagactcgttgctcttcttctttctcttcataacaacgaggacaacatcaagaacaaaaaacgctagcgcaactgcagaaccaaccactgcaattattattggcaaacatgtgatgacttgccttttcttttagtggcgtatagattgcggtggtggacttagttgaggaattggattaagccccgcggattaccatcagaattactcagcttgagaatctcta

SEQ ID NO: 2453 - DNA, 426 bp, Arabidopsis thaliana landsberg
ttgacatacattcatctttgttcttccttatttccttttgatatatccgacatctccttttcaaattgtgctagactgatacggtgtgaagcaagtccacgaccccatgtcatttgtctactaatcgagtttcctttgattgttttcttttgttcattcgtttgagtgagtcctttctattttatcgagtcaaaatggtgtctttttattgagtcaaaatgttgtaagaattgtgatatttttttagaaaattgcaccttgcttgatttcattgcctagggaccattttagcattattcgataacttagaaggtcagaaaaatccatcactagattgcttgatagtagtccctatctctttgaaatttgcaatgaatggagctttattttatatactagaccttaatatggacttaatttatttta

SEQ ID NO: 2454 - DNA, 1780 bp, Arabidopsis thaliana landsberg
ttatcatatcatgactattatggagtattttgggaaaaaaaagaatttgatattagggagtaacataaacccaatggaatgcactataaagcccaataatattcttctccctgactgctttaactaaacccaaatattcccccaatggccctcatgtcctcgtttgtttcacaaaaatttcttttggtttcttgtaattactgcgtgacaaattccaccagaatgtcgaacgcagaagaaaccaaattagaaaattttgaaacaattgcaagatttagcaatttaggatgaagtttcggataagtagacgaaaagtcgaaaagtgttggtggcgggaataacttgcatctaacgtgggacctctaaagctgtaaagtcagcatttttttaatttttgttggatcacttaagctcaatggtggttggtgattcgggtgttaggtgaaaaacctctgtttcttcctcttcttcttcagggtcggtgttaggtgaagaagctctgtttcttcctcttcttcttcgttttgtgcttgaactaagaaaatttgggagaacaatgtcgtcttcttcttcatttgaacaacctcaagtcataacctgcaaaggtaaaaaaagggtcttttttgttttgtttttgtccttgttgatgaaagattaggttttttgattgagaaattctgtagcggcggtggcatggcgtgctggtgagccattggttatggaggaagttgaagtgagtccacctcaaccacttgagatcagaatcaaagttgtatgtacatctctctgtcgtagtgatctttctgcttgggaatctcaggtttgtagtttctcttctttactatataacctgttcatgaatttggctttataagtgtgtgtctctgatgaagtctccatttcctggtacagtctcttttgcctcgaatatttggccatgaagctgcagggtaagctacttctgttcataacctcatttctagattatgtagaatgtggtgtgaaactgagtgttctgttgtcattcttagcgtgaatgtagcaccattgttgcagttttagcataggactattataactagatttgccagctcaagaacagacctttcgtcggctagttgagaggtaaagctttaaaggagagcgaggagaatgcgttgcattctgaatttgtctagggtcttggtgtaggcattggtcgagagttagcgactttgctcatttttcaagtgtcttatatggtctacttctttgtgaattgagtgaaagaaagagtttactggtttgaatcctatcattgtgtccatgtacgtttctgcagtatagtggagagcattggagaaggtgtaactgagtttgaaaaaggagatcatgtgcttgctgtattcactggagaatgtgggtcatgtcggcattgcatatctgggaaaagtaacatgtgtcaggttcttggaatggagaggaaaggtttgatgcatagtgatcagaagacacgcttctccatcaaaggcaaacctgtttaccattactgtgcggtttcaagtttcagcgagtacactgtggttcactctggctgtgctgtcaaagtcgatccactggcacctctgcataaaatttgtcttctaagctgtggagtagctgcaggtagttaaaaaataatgtttttaaagtgatgaaatgccaacaattatctatagtcagtactgagaatcttgggtgtaaatttaggtcttggtgcagcatggaatgttgctgatgtacaaaaaggttcaagtgttgt

SEQ ID NO: 2455 - DNA, 500 bp, Arabidopsis thaliana landsberg
aaatgatccttgttgatacatttatcttcaggggatgattttgcagctcagttgcatagagaaatgcaggtcgggaattaccacagtatgtatcggttactatataactttggttgctaaggatccatctgctggcggttcccttgtaacttttcagaccaaggttgttcacgaagactattctaaaatcaataccctcacggtctatcttgcaagacttaagtcgcaaccaccaccaggtaaagtgtaacagtttagggtgcattgcttctactggtccatctcattattgcaccatttagaccctttagtttctcgtaatatattacgtggtaagattggcacttttgcttttcctcatgactgttcaattgtttcagtttttctcaaattcaattgtgatttgtttgctcttacagatgaagaaatcggaggtgcgaaaacaggactgggttcgtctatacttggaacttgcattcatccatgcaaatcagtgtctt

SEQ ID NO: 2456 - DNA, 6010 bp, Arabidopsis thaliana landsberg
  unsure (1)..(6010): unsure at all n locations
ggagaaaatgtaacggctataattaggtttaacggttatattgacataatgggcttcacaaaagtattgtaatagatttttgacctttagcctcacgaaaatgacggtcgtatatatttgaattattaatactattttatcattattgtttacataaatgcctgaaactaaattgcttttttttttcttttcttgtcaaagacctaaaactaaattgctactcgaatagaaatttgaaaaggattattatttttgatatatttcatgttgtccataaaatactcttttatgtcaattgtattttttaagcatctaaaatatttaaatttttcttctttctcaattgcaatattttaatattttatttacatatacataaactataccaaaaatcccaaaaaagattataaaaatattgaggtacaatatgagcttataagattactgtttaactgcaaaagaaattgtgtcttgactccatccaaacccacgtgtcaacaactgcgtgcaaaacaacatgtgttcgatgagtaatcgtacgattttcaagatcaaccttggtcgttgggtatatatttcggtgaaaaaatcatcgtcgaaacacaatcgatcattaattcttttatttgtcactgtagttaagccaattgaaactctaataaaaaattaagagcttaaaaacaataaaatatgcatctaaagatttttctttccttcaaaccaagacacaatctttaataatataatcaaagcaaaaaaagtaaacataaaacaaagatgtttgaagacaccaaaaataggacggtgaaatttgacacaagtaataaaaaataaggtttgtattaatcaacgggaaaccatagattagaccattagagtattctcattgcataattatttttttgagtgtctcaaaaccaatatatttaatattttaatattaaaagcaaactaaccattaaaaaaaattttacagaagttgacgaaaaaagatttgctcttacagtttgtcaaagtgagaactggttttcacggtttgtcttttcattcaattttggatcaaattaccctgggaaaacttaataatagcataaatcaaaccgtacagcagttggtatcggtttcgttgatggcataaaccaaaccctacagcagttggtatcggtttagttgatgcggttcagttttgaaaaagacaaaaaaaaaaaactgaaacgaagaaaccgaagaagaaaaaaaagagaagagagtaacggagagatttgagagagaattagaaagcgaaacgaaattcagtatccattgcttcaaaattcgacataacttcaaattgttaggtagttgaattgagccactgaactcccacatccggagaagagaaagttactgtttttcccggcgaaaccaagagaaagttcctgtttttcccggcgaagccaagagaaagttactgttttttccgccgaaatttgaacctccggcgagatagcatctttagctatggctgggaatacagctaacaacaaagtcccgagtaatcagcatggtccagggaaggagaagcgtgtattaagagtttccccgcggagaaaacgctctgcatcaaaggcaacggaggaactgggttagaatctctaatttaccgtttgttgtctttgggtgtatcagaattgtaaagcttgtttgattaaagtgttagaatttgtcggaatttagcatatctttaggatgaaaaattgagaagtagaattgaaaatctctgtttccgccaaaaatatgattttgagttataatctgaaaaatgtctgtgtacgtacactacttcggtttgcttaacagtatatgacttttaattgcaggtagtccaagtgttgctccgactgaagatcttatagttgaagatttaccaccaagactctttgctctagaccggtacccttccgannnnnnnnnnnnnnnnnnnnnnaaaccggagtacatttctgacatagcaaaagtactaaaggggaaatcagagatgcagtttcttctcgattctccatttggggaactttttaaaatacccaaaaacaaggcatctttcaatgctaagcttgtccttggactaatatgccgtcagttagtgacaaagaaggtgaatgagatgtggattgtattcggcggtcatccaattagatttggattaagagaatttagtatcctaactgggctggaatgtgggaagtatcccaagaagaaagacgttgatgatgttatcagtgtgaaaccctgagtgtgagagtgtttggaagactctgtttgatgagaggtttggggacacggttccaacaattgctgatttggtgagctggctgcaggaggaggaaagcatggaggggtggaagcaactggcactatctcttattattttggttgacggtgtggtagcggccctcagtaaccccaacaggcctacttcgaagactatcgagatgactaagaacctggagtttttctgcaaatacccatggggaagggtgtcctttacccgtactttggggaggatagcaaatttccaaactccttacgatgctcacaaactaataaggggtttacttgtagggtcttatgcactccatggcttcccattagctctccagcttttagctttcgaaacaatcccatcaattgctaagctaggacctgatgatgtacctaacaggacatttgctgagaggtctatccatcgtcttgcctctctgcgagcaatccggacatctcgcattttggagtgtgaggctgctgatgaggtgtgttaaattgtgtatgtacgtacataataagtaaatgtacattatctatggttaacatacttatttgtgtaggttgaggtcaactatattgtgaaaccagctgataatgtttgtcctccatctctttcatgggatgatgaagttgatgatccaagggttgattacattgaggcactgttgatagatgggcaccagtggcaggaggatgaatgggttggaggctatgctagagtaccaaagcagttgcgcccaccacaactagaagagacaggtaagtataagtataaaggttcttacaaatttttttggtattgcacccagaagaaaaccaattaatagcagcaactggtctattgtagatgttaagagaaaacgaaatgcaccgggcccgagccctaaagaacctgctatggaaaaacagaaatctgaaatggactgtgataaagaagagaatgctgaggattgttttggacagcttgtgcctgagaggtttattgttgaaatgaggaggtctttcaaggagctggaagaccaaatgtatcaaatgcatgaagatatgaaagactttgtccgtgaccagatacttgctgtccttgatccaaaaggcaaaaggacagaacaaaccataccttcccatgattcgcgggaaccacctacttctatggataaggcaccggttactgggaagaagccatcgagaaggatatctacaaaaggaagcactggaacgagaaagtcttcaaggctgactcgtgtttctcatgatgtggacactcctgcactttctgttggctgtaattccaaagaggaagatttggatgtccctggagtacataccactgctgtcggcggaagaagaaaaccttcaaagccgaagaaaaatgtttcttttgctgttgacactactgagctacctgattccaataaggaagatatgcaaggattcattgatgaacaggtaagtcatgtacgtacattgctaaatattttataatccatatgtataactgtactgtctgcttcgatacagtatggcgctaataatgaaagtgattttactgcaaatgatggattggattcttcggccgctgaagaagagatattagacactggatttttaatagttccttatgctggatccacacaatcccatctggtatgtcgtctactaatactctaaacaatctgtttaaatggtgtacgtacatattcgcttaagaagttagttaaactatgtttcaggatagaggaaatgttgttgttggtaagactgtcttcttaggttcaatgtttgggactgtctatgttacacaggaagagaggcctgtggaagaagctactgttgacaccgagatggaagaagttccatctaatgagtctgcaagagtttcagaggtagatcttctggtaatcgttatatacagatttccatgactatatgcatatatattacattaatttctccacttatctaacgcttaactctatggtagcctatctttcaggataatggaccaaaggatgttgctgaacctggcttagttggtacccatacaggggccgatgaaatagctgatgctgacatagagatggtagacaatccatcaggtttaccttcaacatctgcacaggtatgtgttagtcacttgttctttttccatatgtgtacgcccataagactttgcaaattatttttgtttcaggaagaagcaagannnnnnnnnnnnnnnnnnnnnnnnaatggcagcgagtcagaagaaacttatgagccttctgatggagatacagctcacgtacctggcacaagtgtacgtacatttttgtcactatgttctgtgtacatatatattgtttcatacattactaaaaagcatacattactaaaaagtttctttccgatgataaattctacaggttgaggcggcaggagaatccaaattagtgacagggatggaagttgaaatacctgagaagacccacagtgatcccccgtcaccatttcaagtagttaacaatgtaagctaactcttgcaacaaataaaatgtactattaactgttcaaatgtataaaatttatattatgcaggtcatacgggagttggataccaaagccgttggtgatttggctgcagccactgatgtggaggtaacaatttgtgtgtttcaattcctattctcggaatagcatacataggattatatgtgtacattatatagacttgtgtacgttaacttgcacaggtagtcatggaagagccttgtattgtcgaggggtctgtaggaactgaggatcctaacccagggtcagatgaagcagacaagaccgatattcctaaaaataatgtatgtacctattttaaacatagaaaaacgtatgaaactgttgttgacaatcatatttgttaacaggatgaatcagacaatgctgctgctgtcgaagcaaaataagaaaaaaaatcgtccccaaaggtcccaaaaaaagtgaagaagcaacttgtctatgaacaggatgatgcccatcctcatggttttaaggcaaaaacagtcttggtgcccgatgtaccaactcaacagatagaggttgttatcagggctggaaatgtctcatacaaccccctggatatggttgacccttcaaaagtagaggaattcagcaatatcattaaaggaccctctgtgtaagtacattatattaaaatggattatttaatatctcaatcatcatttttccaagtcttaaggttgttatcaaatatttttctggatttacaggattcacactcttttcgggtttcgcaaagtgcccaacgagttttttgcgaaccttctaacacctggtgaatgggatgtcctcaaagatgcaaacattttcagcatgtgcgacgatctcgatgacttctacgcggcaggccacgatccaaatgacatcaactccgaaggtcgctattgacccttcgtcaaacggtgcttacaagctggtaaccccacggctatttaccatgaaggactgcgtctcgttacacatgagtctgacattcagggagctatcctacacttagagcgaatcgccccaaggaacgccgctgcaacccttgcatgcgcaattctttacatatgtgctggtaatgctcacatgggtggtgtctaccttcgcctcttcccaagcaaccattatgctttggaataaaaggaagcacgtgacatttgtgcggaggtgc

SEQ ID NO: 2457 - DNA, 3784 bp, Arabidopsis thaliana landsberg
gaaaccacctgtgttcccattaacacaaacagagaaggtgggagtagaaatgcattgcgtgatccagtaaacaaatctgtccggaataccaatagcctttaaagcagagatgataaaatcccatctgatggagtcaaaagcctttctcagatccacttttaacattcctctaggatcaatattctgcctattatatccctgcactaactcagtagccaacaagacattttctgctagaaacctgcctggcaggaaagcagattgaaagggggatataacctgcgaaagaagacactgaagtctgttcgtaagcagcctagcaatgaccttatacagagtgataggaccaaagtcgttgcaagaaataggcctaaaatcattcatttttgaggcattcgtgattttagggatgaggaccaaagtcgttgcattccactgcttcaacaaaacactagacgtgaagaactcactcaccgcatccgccacctcagcgcctataacactccaagtctctttaaaaaaattcaacaggaaacccatccggccctgaggtcttgttgctgggaagagagaaaaaagctgacttaatatcctgacgagagaaagacatggccaactctttcttctgatcatgagagcatctgaaaggcaggagcaaatccaaatccttttgaataagcataggtggatccacttctccaccaagaagattagaaaaatattcaatgcaatgctctttaattcccaactgagtatcaatcttaacaccgttgtcatctatgatgatgtgaattgtattaacagcttttcttgagtctgccatcctgtggaaataagacgtgttactatctccctcacccatccaagtaacccttgaccgctgacaaaagaaactttcttcagctttaactaggatgagccatttcctctgggcttccatctctagagcagcattcggaattgtcggatcagacaaagtcttgttttggcgatataagaccagattgtgagcttctttaactcttttctccaagtttgaaaaattctccatgctgaaggttctaatgggattcttaagcgcctttagcttcttagacactctgaccatggaagagcccaccacattgatcgaataccagagctcaccaaccagagaaataaagtcagggttttgaagcaagaagttataaaacctgaaaggtcttttttctctatgcataagagggttgataataactccacaagaggcatgatccgagaagtctggttccccaaaaaagcataggcagacggaaagcgggagcaccaactctcattaacaaggattctatctagctttttagcaaccggccttgtagcagacttgttccaccaagtgaaggtattacccttataaacaaggtcacataactccgcttcgaaaagacaatctctgaataccctcattcttctattcacattgagcaaagtagcctgagaatgttcagcagggcataaaacctgattaaaatcacccaacataatccaaggcttgcaatttcctgataaagacactgacaaaagcaacaactcctcccacaactcttttctggtgattgcctcattagcagcatagacaatagacacaacaaccgagtcatttgaatccggaaatatcacctcacaagtaaccatttgcaaagattttgcaatgattatcactctcacagtcgaatgccaaactacccaaaatttggttatatccaagcttaagcagagaacctaagaactcggttcggcgccacatcatcttgaggtaatccgccgccatgaactgcgtctcgctggagaaatcaactccggtagtcctcagaaagaagcaacggcgggggaaaacttccaagcaccttgagtaggctttatcgtccatacacaccaccacaacgtggcggagtagccgttaggtcccttcgccgattcgaaagccttcaagaaacacatcaaacgtggaattttgttccgcccaagcctgattcattatcgtcactatcaccgtcttctccttggtcgatgcttcttttaggattcttgccaaatttctcctatcttctgcctcaatctatccacaaaacaaaactaaagtactttaatgaacatgctctagtaagaatcctccatttatatattttaagactacttctctaggactatacttgccttaataatataaaattggatacatcactagttttttttcatgcaaacacatatataatatacttcaacttgattgatatacaacatgcttccaataatatgataaatgtgtagatcataaagttaggttacaaacggtatcagtattgttagagctttgtatgataaatttgctgcagcggtagaggcagtggctgaacaagtgacgccaaatagtaaataactagagccagcaaaactgtcgaaacaaatagaaatacattccacttgaccactatccactttgcttgaagtagcaatgacatctgtctcagcggcagcgactctagaccgcggctgctgttgacggaggggcaattgttggccgcctttttcttagggatgattatacttcgaatatagtctttaagtcaaatctctttcgcttagtattgctatgtgtacttcttgactcatgcgtgcaatagattaaatacatccccgattgtttgtgttaacattttttctaaagtgtaacccacaagtttaaccgttctaagttaaattaatttgttaattgtgaacgttaaagagcaacgggaatatatttttttttcttttggcgtctatgttcatactttgtaattagaagttttctagtatatttttaataaagttcgcttgttgttcttttttatttgcaaattaaaatgcgaatttcatttttttgttcgtttgatataatctgagtgatagctaaattgaatattgtcgtgaaaaaatcaatgcgtgtctatatgtattaaatttattagatgttgttgtcaaaaagatgcattaaatatatttttttccttggccaggtagaagactagagtatagtgactatcgacaatctttttccaaggcaccgtgaacgttatcaaattagctggtattattagcttgtgtggctttactgtgacgtataaaagtaaatcaataccaataataaatacaatcaaaagaagatttgaagttttttcttctataaatgattttcactaacaagcgtataagattataatttgtctatatatgatttcatttacaaccgtataagaatcactttagtggtagtgtagtacactaatactaatatacaatttgcaaaattgatcgtcatcttttacctttgattgtatccgtttgacgttaactaagattggagtcatatattggacttacaaaaaaaaattcacaatgaacagtcttaagaccatgtctataaagcctctctgattaaaaagataagaacttcagaatccataatcaagactaaaaaaaaaggataagaatctcaacattgtgacttgtgagaagagattgtctaatgagagcatctccaatggatgcaaaatggagttctcattgttggttctcttgaaaaaagagttgaaaaataaatcaaaatggattaaaggagagagagctgtctctcttgagagagtttttgagagagatgagagacgatgacgtggtgcgttatcattggtcagttggttttaacaaaacaagcaaaaaaaaaaagcgtgaaagaaacccaaacagtatttcgtttccccaaact

SEQ ID NO: 2458 - DNA, 510 bp, Arabidopsis thaliana landsberg
gaaatacctatcacaaaaactcacaaaggtattgaaatcagagaaatctcgggattccaattccaaactaggaaccaaaagccagagacttctccatcttgtggataaaacgcttgtcttaacaacatcctttgtaggaagataattaagtatttgacataacaaagattcatagaattggcttattctgtcttccttcaacctctgattcaacccttttgaacaagcctgttttgatttctttctcctcaccatgtctaattttttctctagataactttatctgcataactaaaattggaaaacacaagtttcagagagacagtttggttttgaattagatattcattcaagttcgacttaacctaacgtcccaatcaaaattctcagtctagtaatgtaaaagactttcacatcaactaaggcttaaaacatacatggtgaccataagctataaaaagattcatgcttttggacctgtttctgatgggtaagaacatacgatatgta

SEQ ID NO: 2459 - DNA, 3126 bp, Arabidopsis thaliana landsberg
  unsure (1)..(3126): unsure at all n locations
ggatgaaaataaatacgagcatcattcattgtttacgtgcccattattaatacagtaagctaatgatccagctttaagaaaccagctcaatataatataaaaatgatagcagaaactcacctgagaaggccttgaccaactcgttcacattcaggttagaaagcaagttaaaaacgtcctgtcaattttaagaggatatatttcattagatgagatcaatagcagagacagtgactagaatattttaaagagcgcaaatcacataggtttgggcaatgtcaaatggtttcaccataatttgtcgaactcagaacactaaatgaaaatatggtaagttctaacctgtagatggtataaaatctcatggtttagagggagctttccttcgataacaaggtcaagataactccggatctcccgaagacgtgcatccaaccccttcaaagcagtaagttttgcagtgacctggtgcaaaatacaataacgttatttatgtccttcagcagaaactattatgttcataaataaccttgcaagaacatcaatacaaatcctacaaggcacccatcatgatttcaacagacatttaacgggatgataatgaaaagttcaagtattgtaaagacaagaacctcagtcgctagggtactgattgttgtatctttcacatccctgagcaaatgctccacgcctgtacaagaacaacaatgaagtaggtaagtgtcagaagaccttcctcagaagaatcacaacagacatttctttagacatcaaaccgagatgatcaaatcatcaaaagaactgtttttcccttttggacataccgatttcctcgacttcatgagcagcaatttctgtagacacgtgaacgaaaactttctggcttttctgagtagcattctggagagacaaagaagtgtttaatcagcatctggttaaatataaggatacacttgtagaaaatggacaagatttagaatgggtatgtatcttacctccttgacctcctccactgcatagtaagcttttgtggggattccaagttctttaggttggacatcaataatgaccaacactggatttggaacatagctgcagaaccagaagcaaagcaaagcttaattggagatgaaacagaagccacaacaaatgtaaagcgagaaagaaaaacggatttctgcctaaaataaagctttatcatacttgaagaaccagaatatcctcaatctataaaggccaataaatagccatctgaatgattaagctggaaactaacccattgaacaacgcatggacgtccaaatcattctctcgaagtttagggcctgtgctgtaccaacctacaacatgctccttggctgaaaagcaaataggtagtgttaaaagcatggatttttacaacgtcataaacagtctaagcatcagtttcctgagaaataccattaattctcttgaacatgtggaacattgactcatgatagttgtggtcaagaaaccagatgcttgggtctttgtcatcctcctcaaagggcactacaattcaagatgccaacaacatccatatgtaaacaacatccatctattaaagaggttcctagtgacagtgtccaaagataagcaacctaaaactatctctttctcgacgggggaatcgattgaatcctaaaccctagcgagaacgtgatttaactgaagtaaacatcaactctagaagagctcaattccggaacagaacagccacacaaaaaccctaaattggtgttattatacacatctgcctagaagccaggtatgaataacccctcaattcaagtttcagtttagcagagacctcaacagaatctgagatctgggatccaagagaactagagggaaaaggataaataaggcatacctgcgtagctgttggtgacgtcaacagtaccacgagagctacttccgagcagaacgccgacgacgcgcttgctcgtgtccttggctacacgattgtaatggtcgacgatactaagcaagacaagtgggtgaacgatcactttctcgattgtccttgccgatatttgttgcgtctttataacatccattgttgggttaatcaaattcgcttgagtaattctaaatttctttctccgggaatgatcaaaacctcaacttttgattccgttnnnnnnnnnnnnnnnnnnnnnnnnnnnnnnnnnnnnnnaaaacccctttaattaatcttctctaggcactatgggtttaaccaaagtttgggccttctctgtattataaagcccaattagatgggcctaaaagacaatgggtctgggtaaaataatattaaggatattaatctgttcgtttaaaagagttggttttattctgataagattgtgcacgttttttggtctaatggttgttgatcaagacttaagtatttcgagatgatgtaaattttgtaaattgatagagataagttttaagtttgtttttttaacatcttttaagttttaagtttatctgatatttctagtatttctgtgatgcaaatagaactattcgttaatgatgtctttcttaaattatttttaaaaaatatagaaaaatacattaacaaatcacaaccttagttatatgatgatatacatatactcattccataacatagattcttatatcaaacaaaatgagacaactttttgataaaccatgcattggaaaatatctcataaaccatgcatcggataatatgtcataattcaaaatacaacaacattttaaaggctaaagcatctgtttttttttttgttaatgtggtcaatgacttaaagaaagcttaatcgaagatctaatggcggtggatgttccatttcagctccacatgatgagtatggagaaaacgacgtcgtggtggtctctcgaatatattcacggtactggttattgcctctagctctcattttgtccaccttggagttggagtcttcaaatgaattcaccggaaagagttgtaatgtctctatcaccttctcttcctcttgacaatcttcttcgcttatttcaaaaacatctataataacacactattatccattatatatatagaaatatcatataaaacaataatgatatataattatatatata

SEQ ID NO: 2460 - DNA, 496 bp, Arabidopsis thaliana landsberg
taatattaaaagaaccattataattctaaatacgaatgagcaggaagttggattaggaggcatccaaaattaaaagtgttatccaggttactcacgttatttgtttaataaattaaagatagtaaaaaaaattcaaaatatttattatgttcaaacttatatgaagtttcaaatattataaatatttgaactttaaaaattttaaactttgtaaaatgtgtaatatagttttaatatataaattctataaaaagttgataatattaataatttctgagatctataacaattaaaaatatatatattatgtgaaccattttaaaaaaacgagttgaatcagatgtcttttaaatagaaatataagttaaaagaagaataacaaaatgatgtttaatattgttggacggggatatatagtgtgacggatttggatagatattaatatgagacgatatatacacgtgaaatttcctggaacttacaatcaaaatacaat

SEQ ID NO: 2461 - DNA, 422 bp, Arabidopsis thaliana landsberg
  unsure (1)..(422): unsure at all n locations
gcttcccaatacacatccctcttcttttgttttttatcacnnatcaatatcaaatcaagggaaggttttcattttaacatttcactagcgcaccatctcccacaatttactttcacttttaaattttatttcacatacttttattcaaatttgtaatttctttctaatctctcccaatctctctataaactaagacttataccttttcttcacactacttagttatattagaatcaacttcttcatgttataaataaaaattcccactttctaccatcctctcattcctcattttacacaattaacactatatcctttaactaaacaatatcacatatctataaataaatactctcccataacatcattcctcttttttattctaaataacaaccttataaccctctttattcttcttcccc

SEQ ID NO: 2462 - DNA, 532 bp, Arabidopsis thaliana landsberg
  unsure (1)..(532): unsure at all n locations
ggtcgatgttcattctactgaagagnnaccgttgnctttgcgggcggggaaagatacctatgcagatgttaattttacttgccgtgctccccccacaccattgttcccaaaggttagtgtcatgtgacgtatctattccatgaaactataagagtttcatttctctttcgggattctgtgagaaatttagatgttttttttgtgtctgttttgaaaatgttttcagctttgcaagacagtggtggaacatcccgatatagtgttccttaaagtaaactttgatgagaataaaccgatgtgcaagagtttgaacgtgagagtgcttccttttttccacttttaccgtggagctgatggtcagcttgagacattctcatgttctcttgctaaggtaaagaaggctatttcggtttcaccttttccgcaactagaactnggcataacgctttaaacaaagagaactacttcgttgttctttttcgataggatctatcaaatattatccaccctttggtgatattgataccaaaac

SEQ ID NO: 2463 - DNA, 432 bp, Arabidopsis thaliana landsberg
tagttaaacttggagactttggagtttcagcatgtatgtttgatagtggagaaagaatgcaaacaaggaatacattcgttgggactccttgttggtacgttttggcttatctctgtatatgttttgttatttggttggtttgttttagccaatgtgtttctacaggatggcacctgaggttatgcagcaactagatggatatgatttcaagtatgtatgcacttttctagtctatctgcatagcaatcattgagcgagtaggttattgattctaacacttttctgtttggcattatagagctgatatatggtcgtttggtataactgccttggagcttgctcatggtcatgccccattttccaaatatccacctatgaaagtgctactaatgacattacaaaatgcacctcctcgtctagactatgacagaa

SEQ ID NO: 2464 - DNA, 593 bp, Arabidopsis thaliana landsberg
tttattgatataataataaaccaatattggcgatggtgggagtatattttacgaaagtcctactggagatgaagacattgttatatgcaaaaaaaaaaaaagtgtgtctaaacatactcacaacttacaatgtctctcatgtcatactcatttatacttctatttcatcaagtcggacattgactacatcatcaaattcttttaataatgatgtcttcccttttggttatgactcacaaatggttgaatctcataattctctccaaaattatcgatgatttttcaatctcgtacacattcattagtatatgtacacgactcttttaattaattgaattttcatattagctccatgataagtagagtgtcaccaaaatctctaacacgtcatgtcttatatttcttaacaaaaattcagtccatctattataatgtaaactttgctactacctttactatcgtttttaatagtcatcttcaacgtcctgttcgtcatccccaacctctttctgttcattctctttatcggcttcgacttcttctttctcaatcgtttatctacaatgggttctaaatatgctttttgtgaattt

SEQ ID NO: 2465 - DNA, 527 bp, Arabidopsis thaliana landsberg
  unsure (1)..(527): unsure at all n locations
aagcagcgccgggtcgccgacggtcagttcgtccatggcgccgcctagcatggtgatgaccttgtcggcgacgacggcctgcacgaacagcacgcggctggccgagcagcgctggccggcggagtcgaacgcggagccgacgacatccttgaccagctgctcgggcagcgccgaggagtcggcgatcatggcgttctggccgccggtttcggcgatcagcgcggcgatcggcgcgtcgcggttggccagcgcgcggttgatggcgcgcgcggtgtcggtcgagccggtgaaggcgacgccggacacgcggttgtcggatgtcagcaccgggccgatctgggcaccgtcgcccggcaccagctgcaggacgctttcgggaatgcccgaggcgtgcagcagcttgaccatcgcgtaggcgatcagcgtggtctgttcggccggcttggcgacacggcgttgcccgccaccagcgcggcgctgatctggncggtgaagatggccagcgtgaagttccacgggctgatgca

SEQ ID NO: 2466 - DNA, 194 bp, Arabidopsis thaliana landsberg
tttgttgttgaaagctatcaactactaagagtattatatgcagatcaggtctttgatcgtaacgaggacgctgctaaccaaaactgaagaagagcgcaagccaaagaagtgttatttttgccactgattgtatgattcaatattggttatatttatctaactgaaacactctgagaaacaacacatgtaggaga

SEQ ID NO: 2467 - DNA, 613 bp, Arabidopsis thaliana landsberg
aaacttttactgagtatttttctaattaagtgctattttaggaagaaaatgttttgagtgctatttgtagatattttcaaatgaggtgctatttttggaagagaatgatttgagtgctatttgtagatattttcaaatgagatgctatttttggaagaaattttgtgtgctaattgtgtcaatcttttttttttttgttaaccgatattaattagagctcaacaaagtcaattcacgtaaaatgttgtttacatatgtgatatattgtggttcaatataattttttttgtgcaaaattatccgtatttatatttgcactatgaaatattaaaggtaaataaaaacttatgaattcttctttattaattccttcaaatatactgagaataataattcttgtaaactagagaaattttaacattaacctatttttctattttctttgggagtttcctattaaggtaactttaagaatagaaactagttttgtatttaaaacgatacaaactaggatatctaaattgtattaaaaagattgtacattcaaaatttgtatacgagaacttcaaattttgttttaaacatcggattataaaaatatttttaataacta

SEQ ID NO: 2468 - DNA, 1770 bp, Arabidopsis thaliana landsberg
  unsure (1)..(1770): unsure at all n locations
tttactttatcaggttcagatggtctttcaaaatggaattagaagacccattagagcgagttttgtactcttccatagaagacagtgcagatttggacagtgaaacttctacatatactaagctgctagatgagaccgaacatgtgatgcaacttacggttgaagaagctcttccatctgtgactccaacgccgacaactaattcagattatgatccagcaaaggctcctaaaatcgacttgaaaccacttccagtagggttaaggtacacttttcttggtgaaaattctacttatcctgttattgtgaatgcttctcttaatcccgcagagctcacnnnnnnnnnnnnnnnnnnnnnnnnnnnnnnnnnagctcttggctattctcttaatgatattgcaggtatatctccggatgtatgcattcataggatccaccttgaggatgagtctaagtcttccgttgaacatcagagaaggctgaatccgaatctgaaagaagtggttaagaacgatattatgaaactgctggaagcagggattatctatccaatttcagataacaatttgggtagtccagttcatgtggttcctaagaaggaggcgttacagtggtcaagaatgagaaagatgagctgattcctactcgaacaatcacaggccatcggatgtgcatcgattacagaaagctgaatgctactactaggaaataccatttccccttaccatttatcgatcagatgtcggagaggttagcaaatcataagtactattgcttttttgatggatacttaggattctttcagatcccgattcatccagacgaccaagagaaaacgactttcacttgcccctatggtacatatgcttatcggagaatgccctttagtctttgtaatgctcctgcaacattttatagaggtatgatgtctatcttcacaaacatgattgaggatatcatggaggttttcatggatgatttttcagtttatgaatcatcgtttgaggattgtttagagaatctctgcaaagtgttggcaagatgtgaggagaaacatctagttttgaattgggagaaataccactttatggtgcaggatgggatagctctcggacacatgatttctaaacatggtatagaagttgataaagcaaagatagaggttatgacaagtctacaggcaccagatagcgtgaaatcaatgaggagttttcttggacatgcaccataaggatgtgaagcttgacttcaatgctcagtgtcatgctgcttttaatcagattaagaatgccttagtgagtgctccaataattcaacctccagactggaatttaccttttgagatcatgtgtgatgcaagtcattatgcggttggaggtgttttgggacagaggaaaggcaataaactacatgctatccaatatgcaagtagaacacttgatgatgcacaatggaattatgcgacaacagagaaagaattgttagctgtggtttttgcttttgagaagttttgctcatatctggttggttcaaaggtaattgtgcatacagatcattcagcactcaagtaccttatgcaaaaaaggattctaagccaannnnnnnnnnnnnnnnnnnnnnnnnnnnnnnnnnnnncatcgaagtacgggatatgaaagagattgagaatggagttgctgatcatttgtcaaggatcaaggttgaagatgacgttcctatcaatgagtttctacctgaagagagtactacttggttgagcaagttgcagaa

SEQ ID NO: 2469 - DNA, 2673 bp, Arabidopsis thaliana landsberg
  unsure (1)..(2673): unsure at all n locations
aaatttcattttcccggtgaatcagacagaattaacttcaccaaagtacataaagacaccagagaaagaaaaccagaggatgagagaatagaagagcgtacaagatgaacaggagcttgaatgtatttgacgagaacagaggtacactggttctttctgcagtggtgaagatgacgcaaccttaaggactgtgccgtcactagagctccgtacatctctgtatctgtatcgtctcctccgatcatctccatctccgaccaaccagatatctcttatcttctttctcttctttccttttgaggaatcttgttggaagtggatataatagaagcaaacaaagtaaagcttcgatttttatttatgtttggttggttaggctaagaaaatcaacgaagacaccgacatatattaatccaccaacggatttacgatgaaccgacaaatctttaagatagattacgtgtcttagtttaactggtttgtcgtctacctttttggattagctgttgactttaagcacgtgtgtatatctctcttctcctgccaagtaagcttcccaatttttacgacacctatctatctccgaagtatgatctcatcttctctaaaaagtagatagataaaagaatcttgtgagaatctatcttattagataaagattgtagctgatgtcagcatgagatcacaataaaactctgttttgacccgatttacacgttccaattcaccgacttcattaccacaaaggctttggacatattagctttagctgtttccatcgtctcctcagcttctttcaccatatctgccgccattgtcgccgtttctcccgcctttgtggccatagccgccactttttccaccattgtttcaatctcctccaccatttttacaaccttttgcgctacgcccttggcgtcatccgccattgtcgatgccttttctaacattgctgtcacttcctttaccatggctacaaagagacatcaccgagcgagttttgtaagagtaggtttttggtgtcaaaacagagagttttgcgtttttaacaaacctctggctttctcacgttcttcctctattctttccttgatctccacggctgtgtcgaaaagccctagagttggctcgttacacacaaaacaagtatcgttctcagtgtgatgctgcattatgaaaaaaaataacaaggaaaatctgttttgagtgtgttttcagaaattacgaaacttgttgtaaggaaaagattacctttagagcacacttgtcgcagaagtaatggttgcagttggtgacaacaggatccaagaatgggttttggcaaatggaacaggctaagggcaatgcatcatcatcctcttcccctgttagcacaaagtcaggttcaagcttcctcgctgnttctttttttatcttcttctctagtttctctaatctggagctttcgttattcgaatcttcatcttctactgcatcaagatctcttttctttaagtttttagtcatttcaccttcttgagtctctgtttcttgctcagcaagttgagattcttcctccgacgttttagcttcatcagaatctgacattctatatcaaattaacaagtcaggatttattctctgaatgaaacatatacggattctaatttcgattagatgttatgacaaatcatacactctagagatctgattaccaaatttagttcgaaaagagaaataagaaacatgatttcaactaattttaaccaatacgtaacctaatgaaaaccctagttattagatgattctagggaatgtagaatcaacccttttactgaaaatggcggcaaagtttctgacttcgaaagaaagaacggagagaagaagatttgaaaataaccaacctcgcagtaagagtaaagcagtgatgatcagaaaacatcgccgtagataataacatcggcggtgaccacgccttcacggtgagaagaatatgaagaagaaagaagttgcaaaaagatttggggacactgaacagtttagttaggccggtgggttcgattcgaatatcgaattgggcttttaattaagggtaggcccatcaaatgtttttttgactcttaagttaaggccattaatggcgatgtctctgtatgttaggaagtagttttctttcaacttagtaaactctctgtagacatttacgcgtaatcagtgatgtagcgagtcaagtcccaagtctttcatttacaacaatctttagtttatttggcatccggattagaatatgatcggttcattcaattggttaaagaaggtactataccgaactacactatgttcacatatatgtacacattaagcaaaccagatgttacaggatatagatacatgggtccagtccggtttcaaagcctgtgaacaggctgggcaacagggtgctctgggacacctaactcgactaatccgattccaccatgaattgtccttaaatgggcataacaaggttctgcctgagtgaagacgtctaagcaggtccaacaaatgtgctttccacaccggcactgcagatggttacacccatcagtcttctctatcgtcgacttgcaaatcggacactcctttaagaccatcccttttgcccagtccttaagcgacaagtccggattctccttgacgttgtaccatacaagt

SEQ ID NO: 2470 - DNA, 398 bp, Arabidopsis thaliana landsberg
aacttaaccgtttttgtttagctagaggacacacaggacaatgagactcgactaaagaactattcttaggcattgaaagtgtaccagacaacaactttaacttgtcagaagatgggtgtccgaggcgctggtgccatagatgtccatctaccatcaaggatccagagaaatgaggtgcagacaatgatgaatgagtagcaggatgtggtgaatcaagctctagaatgtaaagattatgcagaagaactcctttaccaatcatcaagtcctgaatagactcgtggatatagcaaaaatcaggaaagaaatgagctgatgcattactatgttttaatagactactaacagatataagattgaatttgaatgatggaacatgtaaaacatcgtgcaatata

SEQ ID NO: 2471 - DNA, 1608 bp, Arabidopsis thaliana landsberg
acgactcaccgcttggttcaccgtcgaggatctcggcatgtaaagaacagaaaggcgaagggtttaagtgaaaaggtcagcgacacagggaatagtagctaggactcttaatgaaatagttaaatcgtgtgggcgtttttgcaaagttgtgcaggcgtaacggtgggcgcgcacttctgctatccatggaccgacttgggctgcttccagcccagcactattcaaactttccccttttctttttctaccagaactaaaacaatatgtagaaaattgtagcaaaatggtaaactaccaaaccaattttcttagattcctaattttccatagtatttaataaaaatagttttatgatttttagatcaaatggggaattttggagcatttaaaatagctttaaacgttggttctggatttttagaaaatagataataattccaaaaatgcccaaactttttatatgaactcaaaacattatttagaagcctttagtagagtttggtttgatttggaccttgtttgatgcttagaacccaaaaccctaccccctgccctttgaattcctttactaactccggaaaccctagtttctcggaaaaccgtgaaggaaagttgtattcaagaccttagaaataaacttctactattcttgcactttcatgagcattacatggcattcattcttatatatatatggttatatttagaaaacgaggaagaatttgaagtagaagaagagaagacaccacacacttcggaatctcaggccggaaattgtttctacttcgatatctgcgggtccgagcctgactcacctactaacaaaggcaagccccggtgcatgtgccaccttccttgatgtttttaaaatctttctcacttgcttgctgcattaggtgataggagttgaatgcctaaacaattcctgcattaccttccttgaacttgattacctcccttgaaaccctgtttttaccaaaaggttttactatgcttagtattgctctagaaaaacaaaaggatttgttttacaaaagatgattggcaaagtgggagggttgttttcaaaaataaaacttgatggtggatccatcatggccatgatgggtttaacatcggaaaagatgtacctctgccaggtaccaagattttgggttaaatgattaagctgagaccgggcgggtgacttgcacgagaaaggagtctcggtgtagtgtctccgtctgagtcgattaaggaccttgtcgatgtaggcttgatgatcgaggaccctctaactggtcacatgcctcgtcatgggtaagccttgcctcgggcagactaacgccagaataagataacacgaaatgggcgtggagcggtggcgagagtagcgtgtaccctccgtggcaagaggctggacggtggtgtatctgtgctctcggtttgcgtgaacctgatctggtcttaagaaccccggtggcgggttgacatatgcaagggttaagtgctacatatgtcgtgtgattggagatcctcagctgagtataatcgattcggatcgccgtaccttcgcggttatgaagacttggtcactgacctacacgtagcattccactaaagatgatg

SEQ ID NO: 2472 - DNA, 615 bp, Arabidopsis thaliana landsberg
  unsure (1)..(615): unsure at all n locations
ggttatatcccaatgcgccctccactccttaggccatatatggtaaatttcatacaaattttactgtttagttttctctattgtaatcaggcttaactttgacagtgctgtttattaataggtggccttacccattcttggacttatcatcacactatgctccactatggtaacttcaaagttttatagcatttctcagcatctcctttgttttattggaaatttaggctgatgacattgaaatgatgtgaaatttgttacaggtacttctcagtggcagtgatgcatttgccatgctatggagcctttgccttattggtgaaactaaaacatcgactgctacgaagagggtttcctgagtcgtaccatagtcctcggtagtagcttgcaaagcaagcgaccacgtttgattggaagtttttcttaagtagaaagaacgatttttgaatgatagaggattaaaaaaaatagtggggcaaccaaactcatcatgcttataaatataattaattctttgcagtatttatataagctttttggttacgaacgtgaataaaaggaaaaatgtgnatcgaaattgaacattaatacattatcatcagaacagaatttgaa

SEQ ID NO: 2473 - DNA, 511 bp, Arabidopsis thaliana landsberg
aaaggtatttgtttcttttatttatttattatggtgctcattggttcaacaatgcagaaacaaataacacagcgagttagaaatggactctctaccaagctttatataataaccacctgtgttgcagaaagaagagcctagacactttgtgaactttcttgagtatctatgggattcctcaattatacaatgacttccatgttatatcttttattctttaatcccttggcaacctctgttctttcaggcaaggatgtcctagctaaggccaaaacaggaactgggaaaactgtagcgtttttggtgagacataccatacactaagttggccatttggtaatggatataacctacatttgggatctgtgcttattgctgatgtttatttttaagcttccatcaattgaagtagttgtcaaatctcctcctacaagcccggataataaccggcccccaattcttgcgcttgtgatatgccctactagagaacttgccaatcaggctgctacag

SEQ ID NO: 2474 - DNA, 511 bp, Arabidopsis thaliana landsberg
  unsure (1)..(511): unsure at all n locations
cgtgagacatctttggtcttccaaagaagaaggattcacgcatgctactgcgagttcaataaatttccagatagaactagagtcataatctgcagcgagacttggatccacaatattttcaatacctcctttggtaagcatagtaccaacccattctgcaatgtgtggcttttcacggttttgatcaatcacagattgggttgtgataatttccagtaacacaattccaaagctgtagacatcactcttctcagtcaaccaacttgtttggttatatctgaaagtaaaaaataggattctctcaaatgaggaaggaagaaatattttagttatatttttcttgcgagtaaagcttactcgggatcaagatatcccggggtaccagcaacaactgttgtcatatgtgtttcattcccaattggaaatgatctcgaaagcccaaaatcaacaagttttgctcggaagttctcgtcgataagtatgttggtagtctngacatctctatgaacca

SEQ ID NO: 2475 - DNA, 566 bp, Arabidopsis thaliana landsberg
atctcgtaatcttcgagattgtctaatactcttccgcaagcttttactttgtaacacgtataacattgcacaagcattggatcatcttcacagttttcatacccactattgggtcactaatggcgtttatacctcgccataagattatcaattcgatagcaaaatactttagtagttgtgtatctccatcatcttatgtcaccatgtgaagtgaacgaaatcatcaatcggttcatgctcataattcacagcaacatcatgtcatcatctttgttggatccacatatacccgttggagttcatcatctatgtggctacatcgtatttgaagttataacgacataaaaaaaccatgataagtttggaggaaattttagaagtgatatagtttctctcaattttattcaataggctaatatgatcatttatacaaagttataacttgattaacaagttctttgcatatggaacaataggaaatctacctatttaataataagaatatattttatgatatcaactctcctttcaaatcaatctcataatccccgaaatcctctaataac

SEQ ID NO: 2476 - DNA, 549 bp, Arabidopsis thaliana landsberg
tttaaaaattatcgggccggaaaaaacatcagcgacgtttgcatcactaaacggaaacctagaccggcgagtaaagttaaacccgaaggtagagagaggaagtaaaagatacaaagcaatgttgtcaattatggcttctaagctgtcttatgagaatataaactttgtcagctccgttcttcacaaccattggaaggttttattctttaattctttctttgttgtttactactttacataataaacttacaggtttttactacgctatacactgtgtataatacacactagtcacagtcaatataatttcgtttgcctagtaaatgaaaaattattcttttttgtttaaagaataattaagatgataacaagcaattttgggattaaaaataataattctagagtctttttcttttctaaatcacatattttttaattggtattttggtttcctttgaaaagtaaaaaagagaagattttcctcgctcaaagtatttacataatctcatacgacagctattgcatatataatctaattaaattagcttg

SEQ ID NO: 2477 - DNA, 610 bp, Arabidopsis thaliana landsberg
  unsure (1)..(610): unsure at all n locations
ttaaaatcaatcacatgtttgtgaagaacaagtattcacctattctatttttttttggatactaatttacttctgcgtgtgccatattcatagtatggtcatgctccttccgtgacctctctttcattgcaattacctctgcttccgcaaggctcttagattcgatctccctttctttttccttgagcttatcgtcttcttcctgagaaaccgatgatttgcaggatttttaaaatctatatgcaatagtaattcctaaatattggtttggtagtcaatcatctagtggttattgtgtatcagtagatgaatactcttatgatatgtctaaaagtgtaaaaacattttagaaaacaaatatataaaatacattaaaaatgttctccgtggttaattaagtcttagttttatctaaaagcgaagcatacagtaatcacttcacatttttttttgtttggtaggaatcacttcacatttatatgcacagcaaaacacactgttttttaccttactgttatctcaaagctctatatttacattntacttaattaccatggtaacacctnctgcatctgctctggatatgaagagttttcaccgaggagggtgt

SEQ ID NO: 2478 - DNA, 564 bp, Arabidopsis thaliana landsberg
aataaaaatcagaaaacatgttgacaagtaaagtttaagaagtgttaaagaataaattttgtgatttcgtcgaaaatggttagtttttgagatagttgaaattccttctaaaacatttagaatgtgttttctatctttagggtaaattctaaaaacaaataatatagaacatgtattttactcattgtacatgttctacacattttggaattgacatatgttctaaaaatttcagaattgaatttgaaatgttctacggaatttagacattctacagtttactctatttttacgaaatttttgtatatgtattatacggattactctatgatctatgatttctagattatattttctacactttacctatgttctgcataaataagaatatatgttctactaaaattaaaaaatacattctacaaaattttgaattccatgaaaataggaatcagctaaagaaaaataaagaaactaaatctaaaaattagacaaattctttatgagttacagaactaagaagttttggactatgttcaaaaattatggaaattgatcggtata

SEQ ID NO: 2479 - DNA, 438 bp, Arabidopsis thaliana landsberg
  unsure (1)..(438): unsure at all n locations
ttaccattctattttgttatacacgtttttccttcaattttctaaaaactttatcaatctatttcataataattatacacactccatcatattaaagtaatctacactctatttctatatttaatttagtatattttttaaaaccaaattttaatcttatacattcaattttacaatactatttaactatctattttatcataataaagtttgttttgattctacgaattttatcttaatggataagtgctatgattttatcaaaacaatacgtatatcatatcaaatttatatcttagttaatatttaaaaatttaacatataacanaacataattaacaacanacattgtttaaattatagttttttatattacctaatcttgtagttaagtttacctcatttcagtttaattttaaatgacttaaggtttataat

SEQ ID NO: 2480 - DNA, 244 bp, Arabidopsis thaliana landsberg
gaaccaaacactttacgtaattgatgtttattgtcattggaaaaactcagacacaacattctcttatgcttcttaaaacgctactcgctcgttcaccaatcctaatgccgatcccagtgtatcattatcccttcacacatggggagaaaagctttgattagtggctctatacctttcatctttctttccttcacacgtggatcgattctctattaccggaatcggagcaatatgtttggggatt

SEQ ID NO: 2481 - DNA, 485 bp, Arabidopsis thaliana landsberg
caaagatattcataagagtctgacctctttgcaaacattttacttttatattgtagcatctacacatacgggaatgggtctatttttgttagaccatctagacctgaacacaaacttattctccaacgcccattgcctcatcttctacattaactcacacttggccaggaaatatttgataacaaatatatcatcatgacctcgagctaaatgcgcaccgcctataggaattggactatgatctacaacatgcagcatagccaatgacatattgcctctttccttttcagatgcttaacatgtatcactctatggcacagacatcgacgacgttctgactgatggatgaggatcctacatatacaatacaaatgagctgacatttacaacagacatctttggtataggaaggtcattctgaatatgtatgagtccttgctaacacgtatacaacagagcttataccttctgcctttcatgtactg

SEQ ID NO: 2482 - DNA, 573 bp, Arabidopsis thaliana landsberg
  unsure (1)..(573): unsure at all n locations
aggacacaacctctagaaaatatttttttatgaaccggaggaactaatgtaagattttagtctaataccaaggtttagttataataggggtcgaaatataattatgctatataaaaaaattatggtagaaaaatcgtgttcgataaaacaaaactagagagaaaaacttgctaaacgatattttcttctaagccgttgatcaaccttttcgttttttcttgatctccgaatctttgcctttgttttttattttcttctccaagtctgtttctttgttctccggtatgttgcaaggaatctctttttcaaatgagatgaatttaatctggtgtggtcccgcctctaaaaaattaagaggttttgggcttaaacttctagatattaaaaaaaaagaaaaggaaaagaaaaactttcaaaagctctttatttatgtgcaaagcatctaggactgacgaaaagaaaaagcatctaggattaagagtcaagacataaatacatataaacacgaacnnnnnnnnnnnnnnnnnnnnnnnnnnnnnnnnnnnaaggaaataacacgaagaggaaatgaca

SEQ ID NO: 2483 - DNA, 443 bp, Arabidopsis thaliana landsberg
taagggctgaatatctggaagaagtttcaatgttgggatcagggttggttgctaaagagaatggcgatgagattgaattttttgtgcaatccgtggtgaaacacaatgaagttgtagctggaagtactcaatacatgccaaccaaaactgagaaggatcaaaccgtgtctaagatggcaaccttaacaaagaaggtaaggattgctgatttgattggagtagttgaggtctgcatttctcttaaagctgcattttcaaggctagtctgtttattaaaagacatggaggttcttgagagacaagaagtagagactagggaatttgctaccctagattggagacaatataaactgatcaaggagtttgatgtggtcatcatggacaagaaaaaggttgcaggtgcaggatcgacaagagttaagacaacttttccaagctttcat

SEQ ID NO: 2484 - DNA, 585 bp, Arabidopsis thaliana landsberg
tgttctgtttttaaaaattgttaattaaaagcaataggcaagaaagcgctatgatctaagcggatggttacataatgcttagtgtctaaaacgtttaatcgaggtttagacaattttagatggttcaagcatttataatataaatattattaatataattttgtatataaatattatataaaatatctagtaagaaataaatatgttaaatcgtaagcaaaaattaaaaaaaaatattcatttaagtatattaaacagtatatgaacatttataactatttatataaatataaatttagttgaaaactagaaaaaatacactaaaacaagatatatacaattttaagcgggttaaaaaattgtctaggcgtcgcatgaacgcgtagcacctagtcgggacctagacgactacgtaaaccgctttttaaaacattgattgaatgtctcaataaaaaaaatgcttggaacctttgaattttactgccgcttgagtgataaatgttgcaaggaaaataaaactaaaaatagaccattgttattaaagtaaactatcaatatgtaaacaagacctagtatgtgatctga

SEQ ID NO: 2485 - DNA, 3853 bp, Arabidopsis thaliana landsberg
gttaagttatgtcatttgtggctgagttgttttatgttgtggctgagtaaatttatgcttacggctgatttatgggttatcagatgtctgaagaccaagcaagggattaccgtccaagactttacctagagggggattctaatctggaggctaaagccattaatcacaacaacaagatgggagatttccctctgattagagaataaataggacaagatacatgagatcaaatgaaagagacacctcttggattaattgctaagttagttgatagccattttgtttggtgaggtaagactttacattatctactctgtagaaagttaagaatactgaagaaggagatttggtgtctcgtggctagtcaacctatcaggtttgacttgaatgaatttggtcatatccactacctacaaaacagttttgagcctgcagcggactacaaaacgttcttcagtgaattgggtgtgccaaccggtgaaggtcctaagttagaataacttaggcgaggcttagtagtgtgcagagcatggcctgttgaaaagcgtatatggtttgggttattgactcttctagcgaatggactttatggcttgcatcctaactctaggataccatttgagagtgctaaaagagttttgatgacaaagccatgaagacttatccatggggtcggtcagcatttgaaacccttgtttctataaagttgatgaggcctgttggcaagtcgtacaccatcagtggtatggttttcgtgttataggcttgggcatatgattcaatcaacaccattggagagcgatttgggaacgtagtcaaagaggatgagattccgttgcttaaatggggttgcaaccgcacccatgctacaatagaatcagccattgctgaagatatcacaacgcatgatggtgagataaggttttggctctgttatgatagtgatttgactgagttatgttttgtgatggcagagttatgttctgtgatggctaagttatgttctatgacggatgagttatgttctgtgatggctgggttattgtttactgatggtttttatatttgatgcgtgttttattttgcctcaggcttttacctgaaagaccacacgaatactgaaagtgcacaatatataggagtagtactttaggatcgaatccacaaggagagaagtacttcagagaaatcctttagaagagagtgaagctaggaccaaacaaaaagagagggggttgttgtatgctatgagtaactaaactaaaagactactaattaaactaaacgagaagcaataagagagaagcgttaggtcatcgggggtttctccggatgtcatggttcaataaataaggtatagatctcaatctaggtgataacatggttaggtttgcttactttcaaattcttggacatacgaaactctatcaagaccagctaaccctaactgttagtaggtgaaagccggctattatcactaatatcctgcgtactcagttgccctatcggttagtaggtgctaacatggtttcaaaatacaagatcaaagcattaagttcaaattcaattctagtccataagtccctatcactcggcgggtgtgcaacagttatagttctttattcagttgagctagttcaagcattcatacgagattttgccaaaaaatgaaatacctaaggtcaagtactaggtggcgttccagacatacaagcattaagattaaactcaactagaaagaatagtgtaaacgatcaaacaaacccatagaaaccaccaacctagactttcgatctattaatccccatgaattcccctttgaaaccccctcaaacccaattacagatctattcgctcatggtaaaggagctaatcaaaagttgaaaaaccataacaaaaagatgaataaaacttaaaaagggtttagagattaattatttgaatgtagaatacaagaggcaaagctccaccttaaagagtcttacacaaaacgagaaagagaaagagagagatggtgatcttcaagcttcaagaagtgcgacggtgagttggcagccctcgacgatggcagtctttgcttgtgatgaacgcacacctagggttagggcttagagcaagtatttatacttgagggccaagaattaggtttaggggtatcaacatcattccgccggataagtaagtaatcaggccgagaagtcagggaaggagcctaatgacggtggcacaaagagggaaggacttgggtgtgacctaatggttggtggtgagctactcggagctgcccgggttcaagactccatggccggatgtgtgttgaacttattatttccaaaaggctggttcttgacatatcttcactcttcgggtcatatcttccaaatgacttcatggattccttcgatttgacttcgactccatgcataccaaaatattttgttgccgtgatggggagacgtcggccggatgctaaacttctgaagtactggaatgattgcctttcgataccttttgcttcaaaactcttaaaaccttctttgcacctaaaatacgtgtttatcctcttatttggctctagaatggcaccaaattctctctgaaacataagaaatcaatagctagaacgggctaaaagtcgtgttatcaactcccgcaaacgtagactttgcttgtcctcaagccaataaaagaacaaatctggtggagaggtttgaatatcgtgggaactctcctgttatcagtgaccgtgtctcaattatatcttacagaccacataaacaaaagttgcgttagaatggccgctcaatagtcctacaccttttttgtccttgtgcatccgctttgatcctacagaactcttaattcacgtcagtcaactctttacattctttaaatgatttggcatggactttctcattagaaggtgtcattcggggtagacggcgcttggtatgtaaggggattttggtgtttaagtggtggagttagagtgtttagggttatcgtatagtctcgaatgtaggatatgttgcaaaatcgcaagagagaatggatcagttgaggtccacagtttccaaccacgtcttctaataaacacctcattcttctttacttctttcttactttcaattccccaagaattaggtttttccgagggggctctcttttgtaattggctcatctctcctttatgtttcaatgtctttccttggagctatgccactagactctcttggttgtactatttcctttccttccttttttttattattatttttatttatttttcttttcttttcttttcctttttttttctcttttttgattttttatggaaggggaaacagaacttctaaacactaagtctattgagcataccttttgaattggttccaaggaaaaataaactcttgggccgtttgttcaatcccttcttttacttccttcttccgtctttgtggcgagaaactatgttgttcttttctctccgacgtttatgcacatatctactaaatgaaaaaggaaaacagaatgcatgaggcttgaaaagaggatagggtttaagggtaggaaccactaaaagtgagtggccattcaggatcagcagagagtggtaaaaagggaaaagaagtcctaaatgtatatgctcgtttcctcgatctaacacctcttcatgagaaagaattaagttcaggttaatcgtccaatatagggtagagttgacgtcggaaccaacagaaatttccgcggggttaagcttccgggggacggtccgggcgtagtgttcaaggttgcctgttccttgcgaccatgtaagtgttcctcaagaaacaattctccacacataatggtc

SEQ ID NO: 2486 - DNA, 1357 bp, Arabidopsis thaliana landsberg
gattctgtccgccccaaccgccataaccattcaaacccctaattatttcatcagataacattatacactaataatcattgcactcaaatatgtcacacaatcatataataaataacaatgattaaaatgaaaaaattgttgtggcgccgcataaaatagaaatcgtgagagacgacgtcatctaaaaattgccttgctgtccacttttcactttgtcctctcttctcatctccgttcacttccacggcgtttcctcagccgccaattttatttatttcccaaaatacccatcacctatagcgccacaatcctctacatcacaccctaatctcattaccatacaccacccaacgaacacgcgccacttcatttgttagtatctaaaataccaaacctacccttagttccacacgtggcgtttcctggtttgataacagagcctgagtctctggtgtcgctggtgtttataaaccccttcatatcttccttggtgatctccacctttccctcacctgatatttattttcttaccttaaatacgacggtgcttcactgagtccgactcagttaactcgttcctctctctgtgtgtggttttggtagacgacgacgacgataatggaggagctagatcgttcacgtgcttttgccagagacgtcaaacgtatcgtcgttaaggttcgttgagatacgttcgcattttcagattttgttgttgatgattagattcttaatttgtgataatgtggaaatgaatattatgtaatttaagtgcatctaaactctttgtttattgaattcgtgaatctgaatatattttctaatcccagaaactaaaacttctcgtatgaatcttaatttgcatgtcattagagacgaatgaataatcagaatattcgagggattttttttctgtttggtgattaaaattttggatttttgtttatattatgtaaaaaaaaaaaaggttgggacagcagttgttactggaaaaggtggaagattggctcttggtcgtttaggagcactgtgtgaacaggtaattgtcaaattttaataatctcctttttgtattgtgtttataaaaaagtgtaaaggtttcattttttttcacgaaagacatgtgaaattattcatgcgtagtggcaactttaatttgtaaaaaaatatatatatataatgtcagcttgcggaattaaactcggatggatttgaggtgatattggtgtcatctggtgcggttggtcttggcaggcaaaggcttcgttatcgacaattagtcaatagcaggttaaagcttaatggctacacttcattattaatccctttcccttataacaacatttggaaacaaaaa

SEQ ID NO: 2487 - DNA, 1126 bp, Arabidopsis thaliana landsberg
aggaacttgtgtctgtgcatgtaaagcataagaagagacaagaggttagttagaaacccatatgtgttctgctttcatgctcagggctgacgtgcttaatactatttttttttctctccaaagtttctacaaatgttgaatcactagtcttcctttgcgatgattaggttcttgataggacgttaagcacatgaaggacttgaaaaacgtgaagcaaaaaatcaagaaactcgaggataaacttggaaagccttgacagatgctcagaaacagagagctctctgataaaggaagaaaaagctgcagcaaccacctctatgaaagcatgaagcaatcgaagctcggaaagtggaagaggtacttttattaagatatgactgtaatatgtgcagcttagatggtgaaactgagagtatgcatcttaacttgttggaattgagaatcctagattaaatcctgcaagaagtaaagcttggttgtgaagaacagaagaagcatcgtaagaagaagacgatgtcgatgtcggagaagagacatcatgacgagaagggtcaacgaaaagattcattgtagcacaatggttaaaattgaggatcattttttggtaaagaccccaggcgaagcttagaggtcgccggttcgagtgacggttggaacaaaactaatataacatgctgtggtttcgggtctggagggattacgagattcggcctagaacctcctggtatttcaaaaaaaagaagagaagtgtaaatgggctgcagatggattaagggcccaaatgaagaatgtgtttcttgtggcctgcaagtaaaaaggcctaacaagttaagtgtgttttgttgtaaagtatctaaggaactagtgatgttaaagtgttgttgttagagtcccaatgagtagtgtggctacactcaaagtaggaggcttgtgtaagagttcctagaactaggagtatggactaatgtgtaagaattatgattaggtctaagtgcaaatgtgtcaagtagaagtagtatatgtatgtgttgtgttgtgtcttgtaaaatatcgaagtttattaacaatgtaaacaataaagtgtttaaacgtgttcatgtactttctgtttaacaagaacaaaaat

SEQ ID NO: 2488 - DNA, 611 bp, Arabidopsis thaliana landsberg
  unsure (1)..(611): unsure at all n locations
tctttgtattgtcaatggctcctccttttatgtaaggatctatgttcttatccggaatttagtgtctttattgtgtttgatcgattttgggattataagtttcgcaaaattcatgttttttacattaagtctattcgatttcagctgtattgggaatttaagtttttctgtggcttgattctattgagacagttttgtagaagatcgtccagctccgcttgatgctacttctgatccaccgtctctcttcgacggaaccacaaggttaatcttcaatgttgcttcttttatgcttttggttttagctctgttctgtagtttattggatttcccttatgtcttaacctcttattgttttgtgttaccaaaggttgtacacaagctacgtttgcccatttgctcaacgagtttggatcactcgaaacttcaaggtttaacagcttctcctttgtactagtctctcacctttaacaatatttttggtcgtattagggatatttgaagcccgattggttatcttggtgaagtttggtaatttgacgtctcacanactnttatctttcttgcatatgtgtactctatttataagtagttggattctttggtggttt

SEQ ID NO: 2489 - DNA, 6576 bp, Arabidopsis thaliana landsberg
  unsure (1)..(6576): unsure at all n locations
acttggggattacattgagttttataacaaatattttctatggaagtaaatatatttaaatttaatattttgaattcaaaatataattatacaattttataaaaataaaataaaaacaaaatataatgttgacgcagcgtaagagaaacgaacacaaaacttgcggttgcggctgcggctgcggcagcgtcggcgacaacaaaacgaacaacaatctgcggtaggtttgccgcagacgcaaccgctagcggtgacgaaacgaacatgctaaatacgcataaccatcaacttctaattaatttatagtttctcatacatatacttttgtcctccaaaacatagcagtacttgcacgccgaaatacacatacacacgtacacacacatgtacatatatagcaatagaagtagaaacagaaacataaattttaagggcacttgaggcggccaccgtgagtggtaatggaggcgtagcaaggacaaaggtgggtgtttccagaagtaccaggtggcacacagttgcagcgggaacaacagctgttgcacgctctcaagcatagcttcgttctcgaagatttgctgcatctatctttgcatctcccaccacaatctacaatcataaatatattcatgcattcatcaaacacatgtaagtaatttagtccgtttaaacccatcaaaagtatattttcttttttttgttgcaaaggaatcccaagctttttagtccatagtttccttctccgagatataacatctcattaaaagcttgagacattctccataacaaagatatatataacttgggaagagagtgcacccatcagaaatattaagttatataccaacatgttatatataagttagggttacataccgattttcactacgccttcaccgacctttgcaccatcagcagcgtggacgtgaagctgaagagaatgatatcagtcatgatcatcattattatataaatatgaattgagtataatattgctaggtgttcttggggaactataaagaccaaaaatattatgaacctcaaaagtggtgaggcagaagaggatcagcagtaaaactagtgtacttcggaagattgccatgtctcaaaaagcatgcagtttcgtgcaagatataaaactattctctctgattctctttttggtctttcgggtacaatgaagtatataaatctaacacctctttgggtttatttatagtgtgcttattcaaatattttattgttacaaattttgtatattatacacggcaaaatagaatcactaaactagtttcatttttttttgtgagctgcgtacgttaatgaagacatgtgtttgagatgtaagtgagtgtggtgggtgttttcacgtttacatggtgatgtggaaagatatgaacatgccacccaaagtagagtccacatgtcacccaatggaaatgacctcgttaaaagtggtatgtcctccacaattcattttaatgaaaagatttggtggcatctccaatttgttaacactcatcattcgattcacgcgttttcttttacacgcgtatgttttaatctctatacannnnnnnnnnnnnnnnnnnnnnnnnnnagcctaatccatgatatggttttgttccttgaggagtttcgtggtagttactgaggattctgaaaagaaaaataaacaatgcatcttgtcatattagtgaatattttttgatggctcattaatggtttccttgaatttttttttttctttttaaagcattctccaatctcaagtttaggttgtgctttagaaccaatttcaggttcagagtatatggtttatggtttaacgcacacttaaattaattaataggtaaaatttcaggttcagggtaaatcatcatcatttaaagcacactcaaaagatactaaagccatgtctatgacattgatgtccttctaagactcatcttgcttttgtctatgaaaaagaagatgcaaaaacacaaaacatgcatatgtttttaaccattaatataaagagagatcctagtgaggatttaacgttttcaaaataaaaggctttgataaatcaaacgaaagggttcattttcgtattgagatctcaactctactttttgagaccatttccagaatagatccgaatcatatccattacaaaaccactttttttttgtcggcccattacaaaaccacttctgcataatagtattacagttcaaaaaatataaaaacgtaacgagatttcatcgttttcaatgtctattaacgagtagtctccaatcattttgaatttttattttagggttgccaaacttggaactaaccgaaattggttgttcaaaagtaacacggtttgatttagcgtgttcgtttagtggccgcaggtcattgcggcagcggcagacgcaagaggtgttgttcgtttgatggacgcacgtcgttgcggccaaacgctgcggcaaacgtaagtcgttgcggctaaaaattattatcgctaattaaagtcagcgataaacgattaaaagttgcgttatatgtggtaaatgacaagactatccttactatgtttgggaaactacaaacaaacctaaccttattttttcttcttctttcatcatttcttttttatagtcatcgatctcaagctctttgaaactaatctctctccgccgtctcaatctcgctttttcggtgattttagctcaattagatctcccgtcgttagttacttttgatacgacgttaaatctctattccgaggtacttttgttattcactgattcaaatctcttgggaattttgagtttcttttcgatttgtgttctcttagttactcttagtttggtgggtttattctacaaattctatgtctgtttctttataatgggtctgaatgtttggaactaatacttacggtcttcttcactatatggttctaaatcactaatgcttacttgcttcatatgttgttctctactctttatatggccattggagttaattggatttagatttgcattgcccttaacataaacacctgcgacaacggcagagtcggcgtcagcatcatcaaacaaaaataaattatgcgtcagcagtgacgaaacgaacaataatctgtggtagaatttaccgctatcgtatacggtgatgaacaaacagactaattataattgcaatggtaatttattggtttactataatattactaggtacgagtacgtttaaatgagaaatgtatgaattagttagaatattttgttaataattcgttgcaattatgatttgttggttttgttagatttttttcaatgggattgtccccttaaaaaaactgaaatccaatcaaatttcttactttctcgtttcgatttggtttattcggtacgaatacagttaaaccgggtaccataacccaataatgggtagcaaacaatggcccgcttaaatttataccactaatgggcctatttcccaactttaaaggcccataatattttgaaaaagaataataatgagttggcttacctgagtaatgacgtaagatcacggaaccacgtcaggatccttccgccgtcggcgacgtcgctcctgacgtcacctcaacacgtaaaccacacaattaagttttattcctctctctctccgtcaacttaaaccggtgtctgtatataaatctgattgatacggtaagaaatcgaaactcaaattgaagaaaattcgagaagctttggatttgaatcgcgaagacatggaaaaaacagaatctgtatcaggaaatgggcggagagtggtggttatcggcggcggaatcgccggctctctcgcttcgaaatttcttcaattcgattccgatctcaccctcattgatccgtaagcttttggttcattaatttcaaatgttggagacattgtgttttattttgtcttaaatcttggttaatttcaattaggacatgactttagtttgatcagtttagatgtgtcttaatcttgattaatctcaatttaggaaggagtattttgagattatttgggcaagtttaaggtcaatggtagagccatcttttgctgaaagatcggtgataaaccacaagaagtatttacaaaatggtcgtgttgtgacttctccagcggttaatatcaccgacaccgatgttttgaccgcggatggtcttgtctttgggtatgattatcttgttattgctactggtcacaatgatgtgcttcctaaaactaggcaagagaagttatctcaataccaaacaggtatgaatatgatcttacttcgagtgcaagtatttggttaggtatatgttttgttacatctgaagtatttggttgcagaacatgagaagatcaagtcatctgagtcgattctgattgttggtggaggtccgtcgggtgtggagctcgctgcggagatagctgtcgatttccctgagaaaaaggttactatagtacacaatggaccgagattgctggaatttgttggtcagaaagctgcagacaaggcattagactggatgaagtccaagagagttgaagtgatattgaaccaaagggttgatttgagttcagcttcagatgggagtaaaacgtaccgaacatcgggtggagagacgatacacgcggattgtcacttcctctgtactggaaaacctttgtcttcagaatggttaaaaggaactgttctgaaagataacttggatggcaaaggaaggcttatggtcgatgagtacttgagagttaagggtcgcaagaatgtattcgctattggtgatattactgatgtcccggtaagtgatatcagaatgttttcttctttctttagttactataaatatcagctgaagatgtatatgattcctatgacaggagatgaaacaaggctacattgctgagaaacacgcctctgtagctacaaagaacataaagttgttgatgtctggtgggaacgagaagaagatgtcgacttacaagcctggtccggacattgccataatatctttaggaagaaaggactcggttgctcagttcccattcatgacagtctcgggttgcatacctggtttgatcaaatctaaggatctgtttgtcgggaagacgaggaaggcaagaggactaaatcctaaacttgtataagtttgattcctatttgtgttttcaggttacatcttgtgtgcagatgtaatcatgttgtttgtgtttgtgtttgtttttgtgttgatttcattgtttcagtgtggttgattttgcttatgttggtatctaatgtataaataatggaattatttgagtcgactaaaccggaaaatcaaataagatcaaaccggaaaccaaacataaaccagaaaaaaaaaacaaattgaaatcatttcgttcaaacctctgagcattccagcgactgttttaggttgaatcggagatctcttggcggagagacatacaccggctagttcaatcatccctgtaaacccctgaatctttccgttgaagaaactaaagtttaaatacctaagagaacgtttacttatgagagtgatgtgatcgagacttttgtgagtcgaggtttaaagattcagaagataagcgatatgtctcgtgaatcagagaacactgatgatgaaccatcgaaatgtatgtaattcgttcctctctatgtaataagctttaagatgcattgaatcacgataatctgtgtataatttagtctgttggattaacttgattaggattagtaattgcatactaagatcttggagcttttgaatttagtcattgttgcttctttggattgctcatcataattttaaattctgattgtatagggatgaagttccgttcactactggtgttctcgatgcttctgcgtgtgtttttgattgtttatggagaatggcaagatgctcatatggaggtccggtacactgatgttgattacattgtattttccgatgctgcttcgttgatggcatccggagaatctccttacaagcgaaccacataccgttattcgcctttgctcgcgcttcttctgacccctaattccttctttcatcggtcatggggaaagtttctcttctcagcttctggtatggcatttcttatagttatctcatctttcttatgtttattatgtcttaacagaagaaaattagtagaaagttcaaccttttttggtttagttcatcagcctcacaatgtgtcgatgatttgtttctctgtcgttttggaatctatttccatgtttcagatttactggtcggctggtttatccataagattttgaaacaacgtaaggtgcctgagaagatatgtacatattctgtaatggtttggcttttcaatccgtttacattcactattggaaccagagggaactgtgaacccatcgtttgtgccatgatattatggatcattctctgcctaatgcaaggtagacacctactttgagattagtacaagtcaagggaactttttttctgtagactattattaagtttgcagcttttatgcattgatagcctacatttagttccatgaactaatttatatcagttcaattcatat

SEQ ID NO: 2490 - DNA, 568 bp, Arabidopsis thaliana landsberg
  unsure (1)..(568): unsure at all n locations
tgcgaattttttcagatataaaaaaaactttgatttcatcggttaattcaaaaatattttacttattcaatatagtactattcattttcaagctcaattaactgagacatagtaataaaataaaatatatttgaataaaataaaattgcaaaaagtcttttactatgaatctatgatcatatttatagtagaatatgcaataggaaatactttgttttatctaattaattcgaaacagaactatagttatgatatattatttcgatctcactagcctttttgatttttttttatcaccatatgctgtnnnnnnnnnnnnnnnnnnnnnnnnnnnnnnnnnnnnnnnnnnnnnnnnnnnnnnnnnnnnnnnnnnnnnnnnnnnnnnnnnnnnnnnnnnnnnnnnnnnnnnnnnnnnnnnnnnnnnnnnnnnnnnnnnnnnnnnnnnnnnnnnnnnnnnnnnnnnnnnnnnnnnnnnnnnnnnnnnnnnnnnnnnnnnnnnnnnnnnnnnnnnnnnnnnnnnnnnnacccttttggtattgtcaagttttaaaatcttgataataatata

SEQ ID NO: 2491 - DNA, 523 bp, Arabidopsis thaliana landsberg
aacctgtttttggatttggttcacataattatatatttcttgttgctggcagattgcttcggtgagcccgatattcgctaagtacccaaaatttgcggatgatatcaaaccaacaagcaaagcggtgaagacagtatacctgaagattctcctcggccttatcaagacagtaaacaagcctccagagatcttttcagagactgaactaatcaaggcttatagcagcttaattgatctaatggaagtgggctttagggtgaagtggttgaagtcaaagcttgatgagatttccttggcgaggaagaaaaaagttgatgctgatgcggctcgggtccaagagctcgagggaaaggtcaagaatcaagttgaactggacaaggagaaaaccaagtctcatgttgaacctaaaatgttatcgttcaaggattatgcctcccctgtgagtccttggattccacgaaggaagagatccgattaagagacagactgaaagacaatatatatgttcatcgcttcttttttt

SEQ ID NO: 2492 - DNA, 457 bp, Arabidopsis thaliana landsberg
  unsure (1)..(457): unsure at all n locations
tctccatattctgcatcgnnnnnnnnnnnnnnnnnnnnnnnnnatttgttgttgaatgaaggatgcttttgtttgctcctttatagaactacaacctgattatgtgcctattgacagaagcccaactggtgttttaggttattgaaatgtccagagtttgggctgttacggacatatggagcgagggatgcactgttatagaacttctgacatgtgtacctacttactatgaactgcaacccgtgccatgcctctttcgaattgtgtcaggtatatgaccacagtccatgagaacgcatgtaagtcaatcagagataggagcactttccgtccacttctgcatggcgtaaacacttctgtcctgaaaaaagcacaagcttgttgccagacgagacagactattttttatggaatcgttgcaagatgactaccctcctattactgatagccattctac

SEQ ID NO: 2493 - DNA, 309 bp, Arabidopsis thaliana landsberg
  unsure (1)..(309): unsure at all n locations
cgacacgaaaaacaaacagcactcaggcgggagcaaacaccgacttaccggatacgaaccagcgacccaaggagaaaccgcgtctacgannnnnnnnnnnnnnnnnnnnnnnnnnnaggtcggaacgacaactaatccacgcacgcgcacagacccaaaaacccaatgaacacaccgaaccgcactaagccagcacactcatagggaatccctattacaaaaatgtaaacaaagccagaaaccataaaaacaatacatcagaaaaacactcaacaccctgccccaaaacccgaaaaaatacgaaaaaag

SEQ ID NO: 2494 - DNA, 507 bp, Arabidopsis thaliana landsberg
  unsure (1)..(507): unsure at all n locations
aaaaaaaaaaaaatcggggtacatagatagtgngaagtcgcgttttttttacgggccagccgggaaaaaataaaggtgcagctttgtcgaagatagcgactaacaatcaacacggtgagaactcagagtactttgatggatggaaagcttacgacaaagatccttttcatctttcccgtaacccccatgggatcatccaaatgggtcttgcagagaatcaggtacagattatatataatccaataaatcatgttatatgttgatgtcgatgtgcatgaacttccatctattagctattatatatgaacacgtatacacatcaagctaatacctttttttcttcttttcaagtcaagttaaatacttaataacacatttttctaaacttcttacagctttgcttagatttgatcaaagattgggtcaaagagaacccagaagcttctatttgcacccttgaaggtattcatcagtttagcgacatcgctaatttccaagactaccatg

SEQ ID NO: 2495 - DNA, 398 bp, Arabidopsis thaliana landsberg
  unsure (1)..(398): unsure at all n locations
acctgtctcattctcctccaccaccttgtaagactaagatccctatttctaactcgcaaccaagatcgctggcgccggctacaagcttcagtggatctaattcccaaagcattnnnnnnnnnnnnnnnnnnnnnnnnacaggacttgtgggtgcaactggaatactatacagtgtcatgatcttgcaatgggtctgcggtcacacgcagaagaatatgaagtgaaagctcgatcagatgccgtactactgaagcgatgcttacccgcgcaggaaaaagtatgtgcctatcaaaaccatgaaccctagatgatgaattttggggcccaagagatagacaaacaactatgtcatctaactatctacacaaccttgttccctaactaagccccggcccgta

SEQ ID NO: 2496 - DNA, 476 bp, Arabidopsis thaliana landsberg
gcgagaaccgatcgatgttagacaaaagctggttaacctttttgaaaaagccgagagatgccagggaagagggagccaatgatgctgattaagccaccaaatctagaagagagccggtcatcgtagttaagaaaaccaaacgatgccagataaaaaacggccaacgcaaactgatcgttgccggaagaagttgtagtcgcttcttctctctaaaagatatagagagataagagagagaagccttttattttgcgttgcttttatgttggtactaaaacccaaatctttactcaaaacatatttacaaatgtaatttaatagagttaattgtccaggaaaccacagaaacttaaaaatttatagatttaggttctttcaacatgacttacggatttaggtacttttgcttacctgattttacctctttgtccttcgtgtaccgtttcgattacttgattattcttattattcctcag

SEQ ID NO: 2497 - DNA, 553 bp, Arabidopsis thaliana landsberg
  unsure (1)..(553): unsure at all n locations
ccgttcatgggctcagtttactctgtttccaatcttgtatttcttaaaaattgggacttgggtttgtgttagaagtgtagctttctgggtagttgtctacatttaatcatgaaatctttacctttaatcaataccttaggacattatctgaatatgcttgctacatttataggaatgcttcttcatacaaaggttatatagttgatgctgtctgtatattgctttcaatgtcgaatttaaatctggtttagtagtaacctagtggaattaaacattttgaggtttgttccttaaatccttctacccaaagtgttaacatattttctaaatttgtcccatttctgcagatattttgtcttcaggaaggtttatcttcgggcccgatgtaagatcacttggtctgaccataagtcttattgtggcacctgttacaattttctgcatcttcgtcgctagcaaactaatggatgacttctctgatagttgnggagtctcaataatccctgttgctgttgtcttcaccatttatgtgagtacaaaagtttagctttgc

SEQ ID NO: 2498 - DNA, 604 bp, Arabidopsis thaliana landsberg
  unsure (1)..(604): unsure at all n locations
cttatcggaaacttaaagaaagtattattaaagtaatataagaacttcaatttatagcaagaaaattaattcagattaattaaaatgacttctttctagtggtcttattctaatccgaagagcttagatcaaaattatctgaaaataaactaatattccatattcataccaaaaaaaagaagtataatactgtagattagtagtaactgatattgctttattggaccagtgaaactgtcaccgacgacgtcaagttgtgagggtaataatagttgaaaacgacgttcaaaattacaacttttgacctcaattttcacgaggttattcgagaaaacttgaccaaacagaaaaaaagtttcatttaccgacaatagaaaatttgttttgggaacttacaaggatcttgaaggtagagnnnnnnnnnnnnnnnnnnnnnnnnnnnntaatggacggtgctgatgaagagatcatacatatcaacgactcccattggtttctacccaacgaatcaccaacgaacattatgggttttgtctctcatttcttgtagaaacttcactccattgaatctgctttcccaaatggagtataatcagaaaggggt

SEQ ID NO: 2499 - DNA, 589 bp, Arabidopsis thaliana landsberg
  unsure (1)..(589): unsure at all n locations
gattcaacatctaagacaagacccatttgtgttacagagaaccaaaactttcaacctttcaaaattaatcttacaagaaattgctgcattattatagaacatggaagactgtggctgaacatgtgaatgtgagaaatctgtgaacgttttcacaaatcccattaaactattttagtccaaagtttcatcatgatttcaataaattagtcccattacgcacaaatgacaaagacaacaagatgttgacaaatagaagaaagaacacaggaaaattcacctccagaagaaacaatgttgaaaattagagcaaatatactccaactaaagacagcgaactaatagaaacaacaaaaccatgtttttaagaccaaacaaaatgaagaatagatgtgtaaagctagttaaagtgagagagagagaccgtcacttagataaggttgacaaaaaacaacgtctgattctgataagagcacagaatgatctgctctaccttttttcatctccttgcccgtctgattctgnnnnnnnnnnnnnnnnnnnnnnnnnnnnnnnnnnnnnnnnnnnnnnnnncctgacttgacttgtttaa

SEQ ID NO: 2500 - DNA, 539 bp, Arabidopsis thaliana landsberg
gcatttgttaagatatacattttgatgttgattgcacattttttttagaaatacagcttgttgatgttgcttttctctccgatctagacatcgatcgtgtttttcttcgatcaatagatagtgatggtgatgtttttctttcttgttagacgggtccagatacagaagtgtaaaaatcaaaaattttagtaaattaaggaaattaagatcaaatcttgactacaacatttagatactgtattccaatttcaaacataatagttatgattattaaacccaaaatattaattaagatattttggaggtctcaatctgaatatgaaaataatgaaatcttagatatgatccacacctaccggctagaacatttaataagcttttaccacttattactaaccacacaaaaaaaagtctatatggtgatttaagtttgggattcatgacaccactgcattttacactactgctttcagaaaatgatagacttttttttttcttaattccggtagatatcaaacacatattttttataaagatct

SEQ ID NO: 2501 - DNA, 487 bp, Arabidopsis thaliana landsberg
atccctgatgaattgatccttcgtttgcgccactgaagctatgttatttcaaagtgtttggtttctaaagttcccttggtctagggtctacgtgcagattctggtgaagaaagtactggtgattcttccaaacatatacgcaaaacgcagcttcagtaagtacatggctcgtgcctttcacaacatcaagtttcaccattctcattcctgcaccctccgtatgggagctttcactcatggtgttaaatgagccactcgcgccactctcttgagtggctgggaaccttgagccacacacacacaccttattccatccttttttcttctcattggaactgaaaacgttttagagctcagaaacaaaaacataatgtaacatgaaggaaaacaatatgttaacatgaaaaaagcttttttgcttagtggagaaatcaaacattacatgccgtttttctgtcacaactcacaagacgtacacagcatgccg

SEQ ID NO: 2502 - DNA, 577 bp, Arabidopsis thaliana landsberg
  unsure (1)..(577): unsure at all n locations
caggaaaaggctataaacaatataccagtactgacaccaaaagcgaagttgctcgatttcaggcctattcttttcaacagtcttgtaacattcatacgcagggtaagcatagcccaacaccatcctataacaaatatagtagtaaattaaggagaactaatcaacagtaactaccacatcatatatcgtttagcaaacaaatgagaatatgattttggtacaccaatcctcttgtaagaaacgatccaatcatcttgcagaaactgaaagcagagcaaaaaagtatcaattaacatgagaaatattttcgaataagatcagatactgcaaaattgatagtcctacactagtttaaccttgtttaaaatgctaactactgagttaaaaccttcacgaatcatccatgtatatgagcttagctctagaaaaatcacaacagaagtaatgaaattgagcattgaagacggtgaatgaccaattacgctatttcataatcctctnggatcgagaagaaatcgacaaaggagatgagaaaatgttacagagaatcaagtcaggaaaacgaaattgaacaact

SEQ ID NO: 2503 - DNA, 5075 bp, Arabidopsis thaliana landsberg
  unsure (1)..(5075): unsure at all n locations
cgcgtaaagttgcaagttgcctttgtttccatcccatctttcctgaccgttaggtcgatgctcgggtgttctnnnnnnnnnnnnnnnnnnnnnnncttgacgaaaggatctaacgtggaggcgagagctgccaaggcgtctgtagaggtgttttctcctctagggatcctggtcagttcgaatgattcgaactgttgggtcaaggttttgactagttcgaggtacgcttccatgcgctcgtctttagcttcatattccccgtggaactggctggtgacgagttgggagtcgctatgggcgtgtatatcgcggatccccattccttaaggtagcttaatgccagcaatgagggcttcgtactcaaactcgttgtttgatacgttgaatccgagtcggatcgattgttcgatgacttccccggtgggggagggagttgtattcctactctggatcctcatcggttgcaggaaccgtcacgtggagtagccacttcttattggagttgggttccatccaggtccgctaacgggagctcgattacaaagtcggctaggacctgtgctttcaagctggatctggtgcgatattctatatcgtactcacttagttatatagccaattttgcaagtcaacctgattgagttggactgtgcagaatggttctgattggttgagacgtcatcactacgatgggatgtgattgaaaatatggtctcagttttcgagctgacatggctacggccagtgctagtttttccattgctggataacgagtttcagcgtctatcaacgttttactaaggtaatagatgggtttctgtccttcgtgatcttctctcaccagcacccagctaatcctggtttgagaaaattcagtgtggaggtacgagggttctccatttctgggggccgcaagtatgcgcgcctcgcaaatcgacgcaagaaaatgtgttctcccttgcttatggtttaggagcagtaatccctgtcgatcccatggtaccaagcgtgagaagaaccgcctgtcctgctaacccggacctgaacacgcaaatgttacaggacaacatggacttcatcgatgaacgcagagatcaggcaatgatccgagttcaaaactatcaacaagctgccgcccgctactataactccaatatcaaaattcgggattcgaagtgggaaagctcgttttacgaaaagtgttcagcaacacgagagagctaaacgctggaaaactgggaactaacaaggaaggtccctatcgaatcagcgaggtggtacgtgacggcgtctataagctcgtaaaagttatcaacggagtacttgagttacggccttggaatgccatgcatctcatgaaataccacgaataggtactcaaaaacaatcgaactacgataagacttgatcccttggcagggtacgtaggcagctccccccaagagcgcaaccaccacttcaatcgaattaccaaggggcttaatcccctaaccaggtatgcaggcagttccctccgcaaacgcaattaccatctcaacccttccatttgaaagacgaaacttcaacaaaggaaacagacatcacatcttccatcaacgaagatttgctgctcacctgacaggtcaatcacatcagatcgtcgtttgctttacctcatttgtacttaacaatttcgagataagaataaaagaaaattttgatactcaatatcatgtttcgcaaaacaattgtttctactacgatttaaaactcattcgtaatcttacgatatcgaaagcccaacacacgaatgttggcggatcctctttgtgatctcgcttccaaaaagtcgacagtgaaccttacctataaaaacacatcacttcaacttcatcggagctcacttacgactaccatatctaactccttccttcgccatcaaaacgtaacatactaaacaaggaagaaacgaaggtttcattcgcgatctggcgataccacaagcccagctcccaaaatctggcaggtccttagtgtgacctcacttcaacaggttcccgagataaaaccactcaaacttacttaagtttaaacatacgaagaacataccatatcacatccaaaatagcctggactcaaaacaagtccaattattatccggaacatgaacaaaacgaggtgatcatacaccaaaatcgataaagtgtcaacacgcgaacaagaagcaaacaaagtacttgttaaaagggacaaaagccttcccaggcaccaagttcaaaaaggaacaaacaacaggatgaaagccttcctaggcactaagtctgaaacgaaaacacaaaaacttaaagaaaggagcataagtaatcactccttcggttccccgaccggcgcggcaaagacagtaccgggatcctcagcgagacatcctggaaatgcatccttgttgctcccaaactcatcaaagccaatcggcgttccttgctcatcaacgtccattggacgtaccaccgacatctccaacacttgtgggatatccagcttgctcagagtgaagtctgatacctcctttgatgcgcacctcgcctccaggtcatccagctcagcttgctaccaaggtctctccacggtcagatcgatagcagccttcgcgatttagtcgatcaaagccaagttcgactccacctcggctgcttgaccttccagcacggtgaactccttcttggcgatccacttctccttgatcccagctagcaacttcgagtacgcaacagctaggtcaaccttagcatcgtgaaccgccttctttgctccttgtgcagtcgaagtaaggtccatcactattttagagagctcttccctcctctgctccaagcgatgaatctggtttctcgacgtctgcttgtcagcttgcaatcccccgacctccatctccatgagcccgatcttctcagcataacctttctcgaggtctttcgaagtggacagcttcatttccaacctctcgatctccgcctgaaatcacaatcaggtcagaatcatcgtatcatcgataaaatatatacaaacaagtcataaccgaggcatacctggaacgaaacctcgcgctcctgactagccttcacactcgctgtcagctcctggatgagggtcttcccttcttcgagctcgttcgccgagggaaccttgctcagacgttgctcatagagagcaaccagcttgttcattgcagctatcgcctgccaaaggcaaaacagaaattataactagcataagaatagaattagaaggagacagttatcgattattacctggccctccttcgccatcatgtcagcataagccgccgcctcggccatgttcttcactccgagaatctaggagttcctccctttgatgtggcgaagcaggttcgccaacccagccttatccttaacgatcagatgatcacggtcgtgagtgtaagaccagtggaaaggcctgctttccgcggtacctccaccagagttggacgtctgcctcactttctgagaccggtttgaagacctgcccccacctctggagcctcgttcttcgccatgggacctgcccgaggaccgcctattcgcggacgcagctgcgtccggtatagcagccgcagattctatcgtctcctctctgggagaggcgaccccctagtcactcacgaccaactcagtcgccggatgcacctccggctgggtccacgctctcttcggagaggactgtgcacaattataacgacctgctacagcggaggccccggtattgatctcaggaattgagggatgagatgctgaggcagatgcgctggagacagctagagtctgtcgagccgcagtcatcgcggtcgacagatcatcaccacgagcaggagccccggcgttggctcgttgaacacgaagacttggacgcctcattcttctgatgagcgggagttctgaagtggagctggagtcaggaggaactgaacagacaaagcacgatatgtgttagttagcagctcgagttacgcagctgcctcagtaacccgtacattgtctaaaaaaaaaaagaaaaaaacggaactcgtacctataggcagatcagcctcggggatcggttccatccgcgggacctcttcgatcggatcttgctgtgctgctggaaggacgattgcgggaactgctggaggtacgataagagttgcatcaatatgatctctgctgaaagtggcccagtcggcctgaccacgtcggagaagggttaacagcttgagttccatctctgagagagtaacctccttggttcttgctgtaaaccatcaaaagaaaatcaacattagtatcgatactaccgttcaacaaaaacagtcaaggattcaacagaaacaacaaaaaatcaagagactcaggtctccatctaacccaggttagtaaaccaggtcctcgtcatcctcgcgggatcaaaactgtcgatcgaatgacgatctactctgaaaaagaagtacttggatcgcaaattggtgtctcgacaggctttcaaaccgccgaggaccagagatccgggacgtgcactgatgtagtacgtcccttggtcactcctannnnnnnnnnnnnnnnnncagacctgaagcgggtcatggcaggtgaattctctgtttacttcccgagcttgggtgaataacgccagcacatggcagacaaagttcggacacatcgggggaaggcgaggccgagacaatagagcaactcggggatacacgccggaattgggaaaaataggccgtatttctcgaagaaattggcataagcgcagcaccacccgaccgacacgttctcaagatgcagcggtggccttgggagtatcatatgtacctccaccggaaccttgcatctcctccggaggtcgaccaggtcgtcgatcgtcatcggcgtgcctctccctatgcttggcagcctttttcttcttcggcttgtcggctcaggttgacggcggacgaattagacccattccgcctagggttatgacgcgtctttgtacctccgcggtgacgccgccgacctcgtctcggacaaactagaatcgtctctgtagctttg

SEQ ID NO: 2504 - DNA, 587 bp, Arabidopsis thaliana landsberg
gatgaacaatacaataaaaacatctgtgtttccgcttttagtttaaacgatgtgtaacactaatatttttaatatttatttcgttttatcgtcagaaacatgatccattacagtgatccagtgaacatctggaaagaaccaacaattgttcccgattgtttatcaaagaacctcgagatcttggaatggatagaaatatgaaggcacagagcaaatggctgcgtacatactagctagcaagcgttacttttctaaagatggcgacattctcgacaagatgtagaaacagacaatataatggcatgttaaagaagttaaagcctttggacagagtttcaaagacatgtcagcttgtgtttgactgaacttatgtgatggtgtgtgtctttagaagatacaacttagttttcttcttctttttccttgactttatttttggtgttttttgggttttgttttacaaatgaaatggtagttgaattaactctttataaaaagaaaaggaaattaatcagttcggaaattggatactgaaatagttaaaggaatgatttaaattcagaaattaatttttttggatttatttt

SEQ ID NO: 2505 - DNA, 2035 bp, Arabidopsis thaliana landsberg
ggactcgttcaacaagtaaaaacaatggaaaaactgaactcatttacattttgctaaaaaaccaaccttctaaaatgaactgacttaattaacggaaaatagtagattcggtgtcatagcttaccatcatacagcagttgtcaataacaacctactcgtaagtgatctcaggatacttctcagcaacctcacgacaacactgaaaaaagaaacaaaataaacattgtctcagaccaaatgtgaaaaaagaaactaagcagaaataacaatcattgctttgatcctccgtataaagaaaatatttggacttataaaacgggccgaccttgagaaaaagaccgtcagttttctgcataatgttggctttgtggatagcagaaactctctctcttccatgagtcttggcatagagaaaagcatactctgcaactctcaaactcgcctgacgggtaatgattttaagactttccaccacacctctaacaacctattatatgagtcaggagaaagcaaaaccatcattagaatcatttattagaagaactaacctgaaatattcgatcaatagacttaaaacaaactaaacctgatgttcaaggccactgtattctccttccgtgttttctctgatggtaatgagatcaacatcatcgtaacgagttttgtaaccaggaagactgtaacaaggtctaacattggcatatagattaagctctttcctaagagtcaggttcaaagaacggtgacctttcccaattggagtagccattggacctttcaaaccaactttgtttctacgcacagattcgagactttcccatgtcaagaaactctgtgttctcggatctatctcagtcccaacatagtgttcttcccactcaattggtacaccagctgttgtaaacacctggatcagtacaaaacgcaaaaactatcaacaaaattgccgaattcccacaaattatcgtacaaaattcaatcaaacaattatctcgtaactatgacttccagaactcgaaattctgcgcagaaaacagattaggatgaggaacctttttgacagattcggcgatctcgggaccgatcccatcaccagggaagagagttgcggtgatcggagtggtggaggagcagaaagccctagccacagaagtagccgcacctgagctagagttcacggctccaaggatctgagtcgatcggtttccgatcagccgtcgcgctagatttgctgccatggtcatcgcttcaagcaccaaaaggacgcagcaaatgaaaaattattattcgagagagagaaagagaggacttttctgcgttgtgggacaaaagttgtaaaagaagaagcgaatatttcttcttccgttaaaacgctgcgtagttgcattaggtaagtacggaatttaaacggcaagatgtgattacgttaaagtactaaacagaacgaagtgtttccttaaaccccaggcccaatagagagtttaaataaacaaaattggttacagcatcggccaaaagatagtgacatcttatttaacacacaaactacatacagtaggatgtttacgtaagtattacgtcatcgcacacacactaaaccggctccggtgacttctccatgactttatgcggtggtgcaggtgccgggaaattagccaacggcggtccatagtgaaactgcgacgctgattttataccttccctccggccgattttccttccgatgagataaaaggcgatagcgacgatcagaaggagaagaatcgccgggaacgatatgtagattacataacccattgttttagttaatctgctgtattttttaagttccccagaaatttgaaggacttagacgattcgagaagaaagattggtaaggacacgtgtcagtaatctagcgtcgatgtgtcagctacgtgcagagatccggtttaggagatttaacatttcaaaccgacgatttgtttatgattcccgataaaattacacaaaccggcttcggtttgtagctatggtcctatgaagatgatatatg

SEQ ID NO: 2506 - DNA, 468 bp, Arabidopsis thaliana landsberg
caaagaacttctcagtatcgtggagttacaaggtacgtacgttattaaataatgatgtctaaacttttgttttggtttaaatgatgtctcaaacttacacgtaagaaaaatgtgaatgccacaattatgttacttatgtatatttgtcattttattttgtagattatgtataattgtgtcgacacatatttatgttgtgcgtgtatacaggcatagatggacagggagatatgaagctcacttatgggataatagctgtaagaaggagggacagacaaggagaggaagacaaggtcagaaaaaacaaatacaaaataattttccgattcaatatgctatcatgcatgaataatcttactaacaattatttaattttggcttcgtatgtactttcgaattcgcttcttgatcatcacagtgtatcttggtaagccagaactttattttacagcctattatgattgagat

SEQ ID NO: 2507 - DNA, 616 bp, Arabidopsis thaliana landsberg
acaccttaattaaagttttctctaaacttcttggttatcttatctattctaaacccttaattaatttgttttttctaagtgtaaaattattatttgtgtaagaagtgtttttagaatgatttttttcttctttgtaggataacattgacacttgtcttgtattaatacaaaaccacgtgtaatttaacgatctttgactttgacttggcaatagagatgctaatagtacggaaggacatgagacacgaaccaataatcgcttcttcttcttcttccccaatctcccaatcgtctcttccatcaagctcccaacaatggcgacggagcttaaccctaagaacttccctgttctctcttatgtcttggatcgtctcccttcattcaccgccaaatcctctttctcttccgatgtcgagccaccaccatccaaatccgatccttcttcatcatcaaaccactctatcgagatagtgactcagatgcctcacttggctcatcctgatgttcttgcctccatgactaacgcaaccgccgacgtttctcagacccgatctgttctttgaaccctaggaccaagacccgatcacgaaaccgaccacagagctcgtgtttgctc

SEQ ID NO: 2508 - DNA, 536 bp, Arabidopsis thaliana landsberg
  unsure (1)..(536): unsure at all n locations
atgtacaaggtttttnnnnnnnnnnnnnnnnnnnnnnnnnnnnnnnnnacgtggctgtcttttcttannnnnnnnnnnnnnnnnnnnnnnnaagttgtcttcatatttataactactgaccttgaaaatgttccccggaccattcagtcaaggtgccagaagtttctctttgacaaactcaaagattctgacatagtagtgagactaaagaaaattgcttcagacgaaaatcttgatgtagacttgcatgcgttggacctgattgctatgaacgcggatggctcacttcgagatgctgaaactatgttggagcagctgagtttgctgggaaaacgcatcaccacagctttagtaaacgagctagtaagtttttctagttctttctgtaactgtgcactgaaaaaaagtaaaatttattaaagttaaaaatgtggcattatgtgtttgttcaggttggtgtttgtttcagatgaaaaattgttggaacnnnnnnnnnnnnnnnnnnnnnnnnnnnnnnnagagactgttaagcgagc

SEQ ID NO: 2509 - DNA, 255 bp, Arabidopsis thaliana landsberg
gcctgtggccttaccaggggaagaaatgcttcagtatcccacccattgcccgcatggagatttcctatctgtgagagcaccgcacagctcacgggctcaatacgcaatgcgaaggaaggctcgcgatgaaggctagaacctctctccaagggcaggggtggttagcccaatcgagaagggaaaaccgtcgcgctttcctggcaagacggtaccaacaaaacaatcccacaaaagatgcaagacccgcatgtgaaa

SEQ ID NO: 2510 - DNA, 588 bp, Arabidopsis thaliana landsberg
gtccatgccttttttaattgactttgaggttctggatgataatctataatggtttttgtgacttgagcttggcatcactgccatgcacgtgaagctccgtgctactggaggaaacaaaaccaagactccaggtcctggtgctcagtctgctcttagagcccttgctcgttctggcatgaagattggtcgtattggtaaacacacaaacttagtctcactcaagttgttttgttttgttttgttatgattgctcattggaagctgaatctttcttgaatgcattttgcagaggatgtgactccgattcccacagacagtacacgccgaaagggtggacgaagaggaagaagactctgattgcacgatgaggctcatcatcgttgcaatgtgctcttgagactgtgggtattttcttgggtacacttcgaagttagctttgtctctctccaatttatctttccagttgctttgagaacattataagctgggtttttttgtatttggagtttttggtattgagaaaaaaaatgttaaagtactgatcgcgtcgggttactggtaggtggcttattgaattttacattttct

SEQ ID NO: 2511 - DNA, 2228 bp, Arabidopsis thaliana landsberg
acgattatgtctggccaatgttcacaattcaaaagaaaaagaaaaaaaatctaatgattagcaatagagagttcacacatcgtatagaaaactcacctgcaaggattgcttgaaaatattgcattgggaataatgtttcgaagctcttcggttaaatatttcggtaaagcgcatcttggcaagactgttgagggacctgtcaaatatgatgagattttataagtcatgttacctcatggatctcagttaaagattatttacatagtaatggtggtgatgatggtacctgcgtcctcaggacctggaatgaataaaaaccgactattttctttaagccgtggatggtttccaatcattctcccaagtttaccaaactgctccctgcgaaagaaatggacacaggttatcgacaatatataagaagaaattcccatttaacaattgaagattctaactacaatgatcccttacctaaggcttgaatacgaaccaaaggataagttgcatgggcgagaacaaaaatttcccataaaaacaaacaaggagggtactgtctccacactttcaaaaccgtcaagaacagtttccagcttcctcataaccttctctacggacaacatattgtggcgatcaagcaatgtcacaaaatattgatgctaaatagagtacttggtacaccaactcacctcttcgtcgtccaaccatatgtcagacaatatgacaaatgtgtcattcaccgcttgtctttcaaggtctgcaagtttaatctgttggcaggcaaaaaacacattatttttagtgtggtttacctactatgtaagggattgcattgaaaatttacaaaattctcaatccgagtacaaacaacgaatcaaagattaccgtctcttctttagttagtgtgccgcctccgaagaaatcatattcagaatgcgcctttagtgttttgtccctgtcttctaagggaggaaattcacatgtaatcaccttcaccacaagatgagaatacacttttagaagaggatgagttggtcaaagaacgtattatgaaaaactgagctttgttacaggcaatctgatcaagtgtttattggagacaggtgtacgtatgttttgtcacagaatggaccctatacatgactaggttctatgatccttcatatagctaatagcctaatatcttgaccccaacatgaaaaataaaacaaaatcgtaaaatctatgaatgtgcaccttagcaaattatacaaatatctccctagttaaaaagtaattaactcagaatgggggagagaaaggcccaaaattgccaccttcaattctaattacctgaaagataccgttaacctgcatttcgccttctgccaaaattatagtattctctgtgaagaatcctgttgttatcttgtactgattgtcaaagaaaactattcaaagcacaaaaaactcaaacgcaattccttcctatgtctttatcagcatgagacattaaacaatatgttgaaatgcaatgtccagtttttgcagattttagaaccaacttaaaaaaaggatattgctttggacagatcaatctctacagaagctgaaaggtcttccaggtagaaatgtccatcttccaactgtgatatcactcccatcacccatttccttcccctttgagaaatcagagactggattgaagatatctactagacataacacagtacaaactccttagtttagttttgaacacaaaaataacccaaaagaaaaatgagaacaaccacatttgacagaaaacgtagaccaacctcattgttctcaaactgcgacatttcagcatcaaatgctggcctagaaaaatgctctgcacgagaaactctctgcgacaacaacatgaatcgttccctgtataaagctgtttttgcagaagcctcaccgtgaataggcaagctactcttatgcctagtatcaattaaaatttacttcaatcagtccaattctacaatcaacaacgcgcaaacgaccattacaattcatcactataaagttccatcatctaccacacataaaccctaagccacctataaaactcgtctctagaaactcactagacacactcttagtaggaaattagagtggacttactcgttgaactttcttttaacagaattatatccaaactttggcaccagaaacgcgtccatgatccgccaaggaagatgcagacgtttgctggctcctcc

SEQ ID NO: 2512 - DNA, 303 bp, Arabidopsis thaliana landsberg
ggaacaaacgaggcgagcttgtatgagttgtcgcaactgggccatatcaaataatctgtatcttgatataccacaagtgtgcgggcttgggtcagcggcctccaatactaaactatctggaactcacgctgctgatatcatactctctatgtcatgtggaacgcatgccttatgcctggctacatgaccttccttgaacagtgtccttgctcagtatcaatgggtcagcactgtatccggttagtagtgagtgggttatcgtcctgtacaaagctcactgccgcagaaccattacctgatgga

SEQ ID NO: 2513 - DNA, 385 bp, Arabidopsis thaliana landsberg
cttttaatgatcttattattattcggctctaacttttatttttgctcatggcatgtctgcttacttggtgtggatggactgattgaatgcttacacgagaatctttgtaaacaaacacccattgattcgcgttatcactaatagccctgaattttgatatactcctgtgcctgttaaaacttcattctaatttttggtctaaacagcatatacatctcatagattggcattacaaactcatgtagaaagtacatattattgccaattcaaacgcagaccattttcttagaccactactcacttacagattatctactcaccgcagaccaattccatcaaagaaagacattgttactcaaatacctatactgtcattcttattcac

SEQ ID NO: 2514 - DNA, 560 bp, Arabidopsis thaliana landsberg
gatgttgaaagagggcttgtggtgaactcttcgtatttccacatgaagagttcgacgtttactgttagccacaatgtgacgacccaaatcttcttccagtgctcgtacattagctctgcggtcactacaacgtatttactagtcggtgttctgtaacgttttgggatcatggctcgcgttagctgttgcgatttcctcacgacctttgtgagtcggcgtttgtacaattcctgttagtagcacctcgagttgccacatctggttgatgtaaactaaaaaaatgtcagagtgggcgaggcatggaacacaaatgtatttttaacaaaacaaaatgcaacatataaaatatgaaaaaaacttcgagttaattgatcataccctatcttcaaaacaatgaaccattaattacactaaccagttgattttttttttttagacctacaagtttataaattacgaatggtcactctaatatttcgttgataattatggaaatgtaatcaagatgaaacctcaatgtaaccctgctcattggggtcgagctcttcatgatcaaagag

SEQ ID NO: 2515 - DNA, 2947 bp, Arabidopsis thaliana landsberg
catatatatataaaattatatacatcagattattttgctaatccgaaatagcaaaatgtctcgaagacatgaaaaccaaaaccaaaaaagtacatagggaaaaaagaaaataaactaagaggaattaaagagaaacaccaaaaatagggagaggttaaacttcaatattcccaaatatggcgaaaggaatagcgaaatggtatgagaccccaaagaagacgagaaaaacctggaaaaacattcgtcaaaaataaccctataaaaatgcctcgaaacatttccacaactcgaaattcaaaccccaaagcataattatatataacaataaacaattagtaccaaaacacataaaaaatctataactgttatctcaaccaaaaattgtttattgttatgcgaggggttaaactcttggccgcgtgcctctacctggccgctgccgcaacggtggtagtccgagccgaagatccttacttccatcacgtatggaacgtgacctacggaaccgtgtctcctctcggtgttccacaacaagtcattctcatcaacggacaattccctggtcccaacgtcaactcaacctccaacaacaacgtcatcattaatgtcttcaacaacctcgacgaacctttcctcctcacatggtaattataacatttgtttcacggttcaccaaaatatatcattttcaatatgcatgcttataatatatgttttgtttttgcgttttaggaatgggatccaacacaggaagaactgttggcaagatgggactccaggaactatgtgtccgatcatgcccggcaccaactacacttaccatttccagcctaaggatcagatcggaagctatttctactaccccagcaccgcgatgcaccgttccgctggtggattcggtggtctccgtgtgaacagccgtctcctcatcccggtcccttatgctgacccagaagatgactacaccgtcttgatcggtgactggtacaccaagagccacacccagttgaagaaattccttgacagcggtcgtactcttggccgtccagatggtattctcatcaacggaaagtccgggaaaggcgatggatccgatgcacctctctttaccttgaaacctggaaagacctacagggttaggatctgtaacgtgggtctcaagacatctcttaactttaggattcagaatcacaagttgaagcttgttgagatggaaggatcgcacgttctccagaacgattatgactctctcgacgttcacgttggtcagtgttacggaaccatccttaccgctaatcaggaagctacagattactacatggttgcatccagtaggttcctcaagaagaaagtgagcactgttggtgtgatgagctacgaaggaagcaacgttcaggcttcaagcgatatccccaaggctcccgtcggctgggcttggtctctcaatcagttcagatccttcagatggaacttaaccgccagtgctgctagacctaacccccagggatcttaccattacggaaagatcaacatcacccgtaccatcaagctcgccaacaccaagaatgtggtgaatggaaaggtcaggtttggattcaacggtgtatcacacgttgacaccgagactcccttgaagctcgctgagtacttccgcatgtccgagaaggtcttcaaatacaacgtcatcaaggacgaaccagcagccaagatcacaacactaaccgtcgagcccaatgtcctcaacatcactttccgtacctttgtcgaagtcgtcttcgagaaccacgagaaaagcatgcaatccttccatttggacggttactccttcttcgctgtcgcgtaagccctttctcttttacccattaaaccaattggcaatgaatgaattgacctgcgtctcttatacaagatatgagatccctaacactttctctaaacgttttcacacagttccgagccaggaagatggacaccagagaagagaaacaactacaacttgctcgatgccgttagcagacacaccgtgcaggtataccccaaatcctggtcagccattctcttgacattcgacaatgccggtatgtggaacatcagatcagagaactgggagagaagatacttgggccagcaattgtacgtcagtgttctgtcccctgaaaaatcactaagagacgagtacaacatcccactcaacaccaacctttgcggcatcgtcaagggcttgccattacctacaccctacactatttaaactcacttcgacaaagttttttcaatttatatgtaaaattctactttccaagtgagtgtatagcgtgattaattaaccctttcctaatttcatttaaaatactacatatactatcatttaactacagtccaacttgttgtttctctaataatagtaaaacgaaatcaacttaagtaacctaaacttcttcctacacaagagactgtcattgttcaatccagagaggataggagtcatctgaaattaatctcaagaaattaagtagaaggataatttgttatgagtctcctcgatcatatcgatgagtaaatcatgaaaatcagaagaagaagaagaagaaatatttcgaagaagcaacactagagatagagaataagagattcaaattatgtatttcatgcacatccgattaatttcacagcttgatttttgtttcgaagcagagaggaagcgaagtttgatatacggactaggaataacttaaccctaaatcggaactcagagaaaacagaaacgaaacctagatcgaaataaaaccctaaatcacctgaaaggttaaattccaccgcaagcaagcgtgacatgtacactagctctattcatcgtaatctgagagcaaaaccggttgacgacttgaggtcaaagtcaaacagagcaaccgatgagaatgtgaaaagaaagttcacgcgcgcgtgt

SEQ ID NO: 2516 - DNA, 581 bp, Arabidopsis thaliana landsberg
  unsure (1)..(581): unsure at all n locations
tgagccaacgcattttgaatacgttttcgattaaaaaccttagttaatttaggaattaaaaatgaataacatactttttcaaccgttgccagaagcttcgttgagagagatatcttgaattggttcggtagaaatccaaacggtggtgttgtagcgatgaatctcgtagccattcccggcgtggacaacctcataacnnnnnnnnnnnnnnnnnnnnnnnnnnnnnnnnnnnnnntcgataaggtctgaaccgccggagagaagggtgagaaggaacgagagcttgaagatgctcagagccgcttccattggcggatttgttttccgttgcggccatgcaacgtaaactgatacaaggttttatacatttatgaagaaaaacataaacattttttttgtaacagataaggttttatgtgtgtggttcatcttcggataggattaaattgcattgtaaacacatgattaaatataacaagttggccgacaaaaataatatgcattaaaaatatcgaaattacataaattatcgctttaatttatattttcctaatanttatttttcactctttnttttcatg

SEQ ID NO: 2517 - DNA, 467 bp, Arabidopsis thaliana landsberg
ttttgatgaaattattcaatcaagtcctgaatttgataaaatggaaaagtaaaaccctgaaatttgattcctcaagaacacacattaaagcaaaaccaaaaccatttataagttcaacgaaacaataaagccaaacactttcactcctttgataatgaatcacagcaaaaaaggtctagcattgaactatgaacagtcctgcatttcgtcaaatttccaattttgacgtaattgatttgattccatctaaagttctgatttttaagatgtaaaaccctaattctgtttcagagagaacttaccgaattgaaaagaaggaaatggcggggaatctaattcgagccagaggtttttgccctttctacgagcagagatgatggtttttccgaggattgaggtctggaaatcggacggcgagactccatggatcactttgttgtcgtcggcgataatgactcgcttaatct

SEQ ID NO: 2518 - DNA, 331 bp, Arabidopsis thaliana landsberg
gcgtgtgagcgtgttgacgaaactgaggatgtcctcaggaaaggacacagctagaggaaatcattttagctgtaactgcagccttgcgtctagaaaggccttacggaacaaccgcatgtgttcttttccctaaatgcaagcgctgtgatggatagagaacccccttgaagagactctaagagcctgtccgggaatatttccaaaggagcctggactgtgtccgatcgagaacatggatgccaggtatcagattgtgcagccgaagcttagagggcaatcaaatgaggtgtggaaacggactgaaataagagcatccacatagagttatgcc

SEQ ID NO: 2519 - DNA, 549 bp, Arabidopsis thaliana landsberg
tgtcaattcatatatcatgagatgcaattgcttcaagaataacaatgatgattcttttatcttttcgagtgagttgacgtaattaataggtaaggattctcaattaaagccaaaaatcacattatattgatgaaaaggtcatgagaattactgataaaaatattattaaaacataaagagaaaaaaaaacatattaataaagctgaaagagacatacacacattattaaagcggaaagagaccgaatacaaacacacacttgacaactattaattttcaaataagtcgtgactcaaacttctctaaaagctctttactccgatcatcgagattctctttttcacttagtctctcataaacatcttcagcttcttagattcaatcatttctttcattaattggtttgccttattttgcgccatgcttattttgtctcgtttcaattcttggtccttagattggttaaattcattacactctttattaaccactactaaatttacgtgatctttctggatgtattttctcttgctttgatgtgcatagtct

SEQ ID NO: 2520 - DNA, 3019 bp, Arabidopsis thaliana landsberg
  unsure (1)..(3019): unsure at all n locations
taattatctatgtttgatcaattatgacccatagtttttttttttaagagcagcctctgtttttttttttcctactattatttttgcaacatttaaaccatacctatgagcctataataatatatatattaagagcatcttcatcgagagtttctggatcagaatgtctattaaaacagaataaaaaattcgaaaaaggtggagagagagtaaaaacgtttctcacttgagaaactcagagaaacctatttttgcttttgttttgttttgattggttcaaaaaatattaaataacaaaataataataaaaggtttctcaccgatggagatggtctaaccactctgttaacaaagtactaaactttgttagtggttaagttgacctgattagtatacattatatctgaacgtagtaactacacaatccaagaaaaacaatgaatgtaaatttaacgttcgatatgtatatatgaatttcagtgtcagcgtttgcgtcccgcactctcctctgcaacgtgatccaagcatcggaagttgcgaatttctgtgtttcccacaagagaaattaaatcctcagcatcatggtttttttttttgtaaatttaatattcttgtattagtataaaaatattgttgttgttaaatgtacagtaccttgtttaaaattatagtattaacaattaatcaatcacataacaatcaatcctttaattaacatcctcaacatggccgttggctcgtgccaaccccatcctccacttcctcatcaacgtaaggagctaaattcaaataacaattaccgtggcagttctcgttattatcaccaacattaggattcttactcgatctatttgctggccaccgtgcacggcataccacacagatggccggccgccgtccacgactctttctccacgccagcatgcattcatcatgaaccttgttcttgcatactctgcacttcaccaccgcggtttccttctccttccctccaccatttccaccgtctacgttttctattgcgataatatcgtctagacatattggacatgttgccggctcttcatccacctcattttcctattcaatataacaaatgatatatgcatgtaagatctatttatatcccctaaaagtaaagtaaaattttatttaaaacattggttatttaggagtatttgtttagcggtgtaaaaaaatacatgtagtttagatatatttttatgtaaaacgacgtaataaatttttttaacaaccatttcccattacaacgacgacaattatattcgtacagggtaaaagaagattaccattttactggtggaggaggatgagttagtagtatagccgggttgagaagtggtggctgggaaaagctgaagaaaccgttgttggaggcggaaactggcgaggcagtcaggccgtgtcggggcagagaagaggtggaagaggaggcatggccggagtctccgttgcctgagacacttatcgtcgagaggaattccaagaactcggattaagacaaacaagatgtgtttgcacggcttcttacggtcgggacaagtgcaagtaggtgtggccattagcgtcactgtgtagacgttacacgttgcaccaagaacgtgaaaagttcctgcattaggacggtggagaagacggatccggtgacgagagctcgaagtatcctatctgccaccggttgagccaagaaatgccgttggtcacggttacttacgtacggagatatttgattggatccgacagattccatgatttttgagaattccgttacggcagttggagaatttatgcgagatatatatattcgtgttaagtatataggtacagttacttatacatacacgtcatgtaaactgtgcggagattctttgtatgaaacgttggcacacgtgtggaataacggcgacgtgtaggagatcacaaagacggcgttacacggaaggtaaagtttacttggtttaatggatcgaaaattaaacaattttagacgtcgtgtggtttttggtatgactgtgggacatcatgccgtttgtttgtcattgactttttgtttgataacgtcgtcgtttttggttaaacctcgaaaaacccctctctctctttcttgctcttgttaacctagaaatcaaaatctcagcttcaccattcgtttcgtttttccggcaaaatggcttcacgatgtcgatctttgtcaaaaccagcgtttactgcgtttagatctgcaatgaacaagccatctattcgtcccaaatcggcttcatcattcatcggcgtccctccttcgcctggattttcgaggtaaaacggatttgagttggattcgtattcgtgagttctcgattgatgtaattcataaaaggttttgtttttggatttgacaggccgattggtcagctgggttcgcttcaatcgttgcttccattgtacagtgcggtggcttcagctagattgacttcgtgcctgggtatcgattcacagaattctaggtcattagctcagggtatgctctgcagtgcgaatccaggagtttgatattcttccaaatgttttgtgtttagtatatctgtaagcaacttttttttttaaaactctttgatctttgcatagcttcgaacttgcatgttgtttactgttggtagtatcaaatcagagacctttgattctcctaatgcagaatctgtagcagtgtatagttttgaaattgctttaattggatagctctgtgaaactttaatacccatctttgcaaaaatgagcattgacactgaactcagagaattgtcgtagatatctgactttttaccgtatcaaaaattgtatgatcttgctttcccattcctttcacattgttcaatttcactagggctattgcggttttcagaatttcagttagtgtttgcagggacataggttctttggttactcnttcactaataaaaaaaatgttttggcataagaatgcttgtattggcttgaagatgaaggatatgtgcatgtt

SEQ ID NO: 2521 - DNA, 4364 bp, Arabidopsis thaliana landsberg
aaaaacccctcttaccagtttctcactttgttgttcagaatcatttaaaccttttcaacatgaaagaaagtgagcatttctctttatttgaaataaattaaccccaaaaattgaaggatcttgttaccgttggttggaagatcatacttgtggcggtaggatatgttggaggatggtagtagtagcaccaagcaaagtactaagcaagtggcgattgctatcgtgagctttatcatattggagatatgttttcttcctgttttctactttgttgcatagatttatggtttcatgttatggtcatcacgaggtgaaagatatcttataggtttgcatgaatcatttgaaatcttaggtactaacttgtagtactaaaaagacatgttaagagatctaatttaataatcagtttatttgcatgccaatgtttaataattactatgttaattttttttattttgaaacaacttttagtaatactaaaatgattttatggaagagaatactgtatatatatcactatttatgattcaataatatgtttccaaaatttaatacacttttaattactaaaaattatatttacttttgtggaatataatatgtaaatttgtattcactaaaatttataactaaatataatttctataaaccatatgaaatgactcccatatattgtttgagaagtgtttttagtgatttcaatatcacttaatttgtagtaaggttttttctttgtagtagttggagttatcattcttcgccaaagtgaaggaaaaaaatcttgaagaaaggcatgttataattatttaaatttaaactactatatagaaatcattaaattaataaataaaactttgaatttagtgatccaagtacacacacaaaaataaaagctagtggatttcagatcaagcaacacaaagtaataaaaaaatttgatttctaatttgaatcaactagcttaagacccgtgatccgatcctcacaatacataacaaaaggggtgatgttcactttcttagcttgacaaccatagagtggagctctaaggaaacatggctccattgacacggcacgaacacatggtggctcaggagctgtgtggttctttggcttgtagagtatccatggctttaatcctccaagaccttgagcaacgtatccgaacgtagacgagtcgctcgtgacaatgtaatccgttaaacttaagagatatatctcagcgagtgccttttggtcatgaagcttattgtctgtttgctgatatatttcttgacttggttggtaaatttgtattatctctcctgttgaactcgggcctttccaatacatttgccttagaatctccgagtactctgggtaaagagaagtgacaagaacagctttaagtttcgagcttcttgatgtgttagtgacttgtgtttctaagacaaacacttcaggtaatagtttctctctttgtgtacaggctaagatctggtccatgacatgttggaaatatccagccggcttgctaaaaactcgtacttgaatcccaagtctctcatcagctcttgataaataaccattataggatcttgtgatcatgccccaaacttggttagtcgggtgaaaaagatagcgagccaaatggtgaaagacggtttctttctgtgggaatagcttgcttaattctgactgaaaagaagggatcaaccatagagatgggataaagtaaagattcgagttgaagaccaaccaagggacttgcctgatgagaatttggtcactttcacagaagaccatcttatcataatcgtcgtaatcgtgaataagataaagacagaggtcggaggggatgatgctttctgttgtagttgagttaatggcatgattcttcaacattgttccgtaacagcgcggagattccttgttgaagctatctaattgatctgttagtggaaaatccagagggagtagccagaaagtacctggaaaaggctcacagaagaggtcacttatgtccgtacgttggtcaacaagcatgattctgtcagtcaagagagcatagagaaacagagaagcaagagtaagtattctgtttcctagcccataaacagcaatccacacaatgtatctgcattcaccaacagatttggttgaatgattctcatcatcatgaccaagaatctccgttgctttcttgtaagcttctgtgcctggaccgcaacgcttgtgaagcatctcatagcttctaagcttagagacgagatatctggatggtttgtatggtgaaggcttgcgatacaaggaagactcatacctactcaagcaagaatcttcatcaaaatcagctgttaaaagccctcctaacagtttatcctttgatttcctggaatcctttgaacctaagaaaaatgaaatattgagtcaaaggagaaaacttgagtaacaacagcaagacctaaagattaaagattttaccgttggttgtagcatccagaagctggtaattgaaaatattgaagaatgagagttgcatcactgacaaaagaaataaacaagtgacgactgttatcacgaccttcatcttcttatctcattaagaagcaatgttgaatttattttgaccaatcccaaacttttttttttggtttttttaccaaacccaaacttgttgttaccaagtaccaactatcattatcaaattttaaaccattttataatagttcttttttaatttatggcgaattcaaaggaaacaaaagagtatttcactgcacatataaagagaatgtctttccaaacttaaaatataatatataaaaaagaaattattagtttaatttttgaatgtctacaaaataaagacaccacgtcttaaatgtttgatagagacatttttaagaagtatctccaatttaaagaaccaacacatttgattaatgttttaaatattattaaagacactaatgcgcttttaagctaaaaaagttggtacacacaattagagtacgaccgcgttaaccggttttggttcaaatttatttttatatttggttggagtcggttcggtgtcggtgtaaaaaccctccgataagtgagaaaatctctgatgctaatcgtcgtcggaattagcctctgctagggttttttttccggcagccacaagatcggaaaatatctcatgcgggttatcccgatttcattactctcgcatgtgagaggattgattcgaagagcaccctcgtcgcgattgtacgtggttcctgcacttgcccgggcgaacccgataatctcatactcggagcaagtaaaagaaggtacttttgattataaagcattgggaatttaaagaaattggggttcttcgtgtgttgaatagtatgaaagatgatccttatcttgctttatcgtttctcaaacgaattgaaggaaatgtgactttgcctagtgtccaagcttatgcaactgttatcagaatcgtttgtggttggggtttggataagaaattggatacttttctatttgaactcgttagaagaggagatgagggacgcggtttcagtgtaatggatttgttaaaggccattggagaaatggaacagtcattggtgttgttgattcgagtctccactgcattggttaaagcctatgctaatcttgatatgtttgacgaagctattgatattttcttccgagcttactattctctaggacgtgctccggatataaaggcattgaattttttgatcagccgtatgattgcatctgggagaagtgatatggtggttggttttttctgggaaatagagcgtctcgggttggatgcagatgcacatacttatgttcttgtggttcaagcattgtggaggaatgatgataaggaagaattagagaagcttcttagtagactgttaatctcagagactaggaacccttgcgtattttatttgaattttattgaaggactgtgtttgaatcagatgacagatatagcttattttctactccaaccattgagggatgcaaatattctggtggataagagtgatcttggaattgcatatcgcaaagtggtgcgtggtttatgttatgagatgagaatagaagacgctgaaagtgttgttcttgacatggagaaacatgggattgatccggatgtctatgtttactcggcgataattgagggacatcgcaagaatatgaatatacctaaagctgtggatgtttttaacaaaatgttgaagaaaagaaaaagaataaactgtgtgattgtaagctcaatccttcaatgctattgtcagatgggaaatttctcggaagcttatgatctatttaaagagtttagagagacgaacatttctcttgatagagtttgc

SEQ ID NO: 2522 - DNA, 2613 bp, Arabidopsis thaliana landsberg
ggagaagaagattagtttaataggcatgtgttttgttattatttaggatgtcatgttttgttttatgtttgatgataatttttacgtattgtattaatgattagtggttttaaatttttatagtgatctaaatttcttttatcttgtgtttacaaaattttaggtttttcgtatatgccagctgagatcacgaggaatccaatttctaagttacgaggacagaattgagttgtggaatttggaaaacgagcaatttaaagatttgataattcagccagcattgagttactacaatcagtattttcaacgaggaccatttcaaacagatggcggtttgggatggcacaacatttggcatcgtctacaagaagatgatgttgcttgtttacagttattacgaatgtctcttagttgttttagaacattaagtgaaacattataactgaattatggttcacaaacaacatcgaagagagggtgacaatgtttctacggatatgtggttacaatgaaatttaaagagatattagattgcgatttggacaaaatcaagagacagttaaaaggaaattttttgaggttctaatagcgacagagttacttgcttgtgattatataaagactccaacaaggcaagaactacgccaaattcctgaacgattgcaactagactaaagatattggcaatattttagtggatttgttggagcaatggatgtagttcatgtttgtgttaaggtgaaacctgaattacaaagaatgtattgggatcgacatgggagaacattattcaatgttatggtaatatgtgatttgaacatgtatggaatgaagcactaagattttgtaacgatataacagacaactattatgtagttgattcacaatggagcaacacaatgattctgaatttcctttgcatccaacagacaactattatgtagttgattctggctatccaaaaaaacaagattttcttgctccgtataaattttcacgaataggaatattcagtatcataccttacaatttaaaaatggtcctcctcctagaaataggcatgaactgtttaatcgatgtcatgcatctttacgttctgtgattgagagaacatttggagtttggaagaaaaaatggaggattcattgtgaattttctggatataatactcatgaagaaatgatctcagaactcccttttcgtcaatagtacacctcttatatcctgttttaatctccatatcccctactgaataagtgatatgtgtgttgacgattttaccctctcttcctctttcttattattgatttttaaatgagaaaatggctggaaactccctttttgtcaagagaaaatctcatatctcccctgaaaaaacagaagctattttttatttaatttaaatgcgtaaagttatgattttaccaagatacactaatcgaaatcaaacatttatacactgaacctggatctattcgatccagacccgacccatttatcccaaacggataagtttgctagatctctcattctttcttttgaaaacgaaactcaactctctaaacttgaaaaatctttttgatttctctttcactcaaagaaaccgctctcgatctctttcaatcctctcccttctctcttactcaaattctcaacaagaaccctaattctctctctttttactcagaatcttttcttctccttctttaaccctaacccttatgccgccgaaaacaatgccgcttctaaagaagaggaagagaggagttggaacgaaggagaattcaacgacggaggagcctccgccgggaacgaagccaatcgttgctgtcacgaaggcaacgatggagcctccgacgacgacagaggagccatcaacgacagagcaaaatctggtcctgaccgtagtggaagaaggagagaagtctgacaacaatgatgaggaagaagagagtgaaaaagaagagagtgaagaagaagagaaagaagaagaagagaaagaagaagaagagaaagaggaagaggagaaagaagaagaggagaatgttgccggagaagagtcctcagatgatagtagtagaagcttgggggaagagacctcctccgatgagaatatggacgatgagactgtagtggaaattctcaagtatttgaatggtgaaaaactggtagaacagggtaatactatgatttgtggagaatactatcaatactaggaaacaactacgtgtatgatttttggataatactgttattactaggatataactatgcgtttttgggtcatactgtcaatactaggaaacaactacatgtatgatttctggataatactgtcattactaggatataactatcaatttttgggtcatactgtcaatactaggaaacaactacgtgtatgatttatggataatactgttattactaggatataactatgcatttttgggtcatactgccaatactaggaaacaactacgtgtatgatttctggataatactgtcattactaggataaaactatgtgtatgattctatgtaacattgatagtaatatgaatgaatgtctgttgcaggagatcaacgagaaaacagaagcaataccacctg

SEQ ID NO: 2523 - DNA, 5605 bp, Arabidopsis thaliana landsberg
ttgtcagtatagtagtttcattcatgttttgagttttgttgttgttttcttgagtagtctcaattgacctcaacatttttgcagtttcttgatatttgaagttttgtctttctttatacatatatttgatcctcttttttcttggcttggtttagttgatagtttaagcggaaaattaaccaaattagattagttttgtatggtatttctggttcgatatcttaatgttaagaccttgctttggtttctattaggattcggtctgtcggggttctggatttgaataacggtgacactatacaccacattatggttcaattttcagatcatttgtttgttctgtttcggtgttaccgcctaaccagtttagtttatttataagaggtttaagcactttgtataagagtattggtaatttttggttcagatggaataaagcgaaaaattgttagatttgaatagcctaaaccagagagagttaggtttggtatggcttaggttactattttttaagaaagtagtaaactgaattgcctcgtgaaatgccaaaaactcaaactctcaagcatgtaacatgtatgatgtatgtatgaagattaaccagcattgtcatgtgtgatataacatcataagtcacaaaaagcagagtccatggtggttgagaagcttttatatctgaaaagaggaaaattaaatgccgccaatgaaatcatttaatgatataactttaaggagagccgtgagaccaaaaaacaaaagcaagaaaaaaatcaatagaaattaccaacaaattaattagcagagatttgcaaactttaaactaatactgataattaagtccttaacccctcccgtcggtcacgtgatcatcaccgttaagattacgacacgtcaccaaatcacaaaaacccttgaaaagaaaacccccaaatttactgcggctgaaacggcggaattcgaacgcaagattcttgttgttccttctgtcgccggagctccataactttccgatgagagttcgaatgctgagtcaatacaaacgtcggactcgacgccggtctgtattccggtacaagcctccctgatttgtaacgaactccacaagcgttacaaagtgttttaggtccaagcggtccagttctccactgtggcgttttctccgaggcacagtgcgtgcaccgcctcgctccatccgccgtaaccgattcagcgttgtagactttcttcggtttaggtttagcgacggagtgacaaagctctgattcagacatcggagcccaagttccagctacggaaggtgctggtgctcttgatcggcgacttctaggttttccggtgaatgaaatctcgggtctaacggtcatggttaaaggattcgctgggaaatcggagaatgaatcgtcaacgaatcgcgataaccattcgagatgagctgcgtcgtcactctgcaaaactcaaaatcagaacttagaaattcaaaatcaaaatcaaaattagggtaaattgaaatttgaaaacgtacgggaacgcagagatcgtgagtgaagtcggtgaggagagtaggagaagtgtaggtggaagaaggaaagctgaaagggttttcggaagaagcggcggaggaagcggcggaggaagtgacggtggaagaggaagagaagatttcgtcgttggagaaatcgagaaggtcgtcgatacgaagcaagtccggtgaagacatgccgtagacgtccattgttgactcggactcgcttactgagtatgtttgtggtcactggttcagaggtttaatatagagagagagaattagtgtaagtgaggaaagagacgaagatgagaacgtgcatagagttagcatgcaccgagactgacctgaccactccctttttttctatttatttatccactttaatatatttgtctacatttttctttgaacatgcatgtgctatttaatttacttaccagaggattaattaaccatgaattacataatgcatatactagtctttttttttaaacgcatatattatagatcgagcttatattctaaacaagcattttgaaaacatttctttcaaaacaggcactctaaacagtaaaagcatataataactctaattttcattgttacggacatttttgcccttaaactatgagctggagttgagaatgaggtgaaaagaatgcgtttatcttctaaaaaatgcatccccatctctgattcaattttaagtttcttttgacattcagagatatatggcttagatagtggacttgcagcttcgacggtagacgtgaagctttgacgatagcacaaagatttggtggtggttcacggttttgacggcgaggggtaacgaacggcgtcaatggtaaacgctataccctagaattagacttgtaaacccaaaccgtcaaatatacagtctgcaattcttacatacacacaataacacaacactacaaccatcctcattatcatcaaacaccattaacatgaacaaaaatcaatgtacttgtagacatgattatgaacatcaattgcgcaatcaacaaagtatcaatcacttcttgaattccttaacctgcacaaaaatcactgaacaaaaaaacgtgcaaatcgtaataccaaatcgtgagacttttttgtttcttgttttttttttccagatctcaaaatgtgggatgttaaaaatgtagatcgcattcacatctcatgaggaccaattgttagtcgtctgaatttccaatcgtcgctgacatcactctgtaatcaatgactccaaagttgttggtgttggtcgcacgtatttttgatttctagtgtaaaacgtaaaagttcatcaacaaagaaagagcaacatcatctctctgtaaagataaaaacgactttccccaagaaagaagtgtctaaatctaaagatcatttcaaaagtgcctaaaataaaatatatatctaagacaaatgccttatttgcaataaactcattatagatcatagtctatagttttattaatttaaacaagtaatgaagcggaaattaaataaatgcaaggttactaattttattttgttcaataagcctctctcccttttgttaattaaattcttctgccatctcctaaaaaggttttctgattttttttcttaattttgctgaaatttgtgagttggatcatttagtatcccgttgagttttttttattttatgttttcttgtccaaagaaaataaaataatattttccggaatgtgtaatcaatcatagagttgaatttcaacatgaccaaaacaaggaaatagagaacaaattggctcaacaatttattaatacaaagtgatgcgaatgtataactatcttgtttcttgtgcttacatgaatatttcgcattttgcaatcacacttacagaaaaagaaagagacacagaagtgggactagcttcgatcgttgtagaatagagtgtacacaagtatctaatatcattcttcagtaacctagcatgtctttcacaggtttgattaagaactaatgtgataacgtttagaaatatccttactaccagaagtaacgaaaatttagttttgataaagagttgttttgacatattattttaaacattgaagagataactataaaaatgtagtggggaatgggaaaatggatggagacaatgaaggagatgagtcgaccgacgatccgaagtgcattgcactttggttctataaattcctatggccctctttttaggtttatatatacatattttttccctatcatttatcttcttatgtctctttcatgcattgctccttcattaatttattcagtttttcaactatacagaaactactcatatatgtacaaacacgcacggcacatgcatatgatataaagaatggggaaccaattgttgcgaacattgtgttcatattcggctaaaatataaacattcatatgcatcactatcttgtgttcaatttttatgtggcaccgccaatcatcataaggctctaattcgggcagatgtatctgatttcttatgtcttaaccatctaattacaaggtacaattgaattagaatttaggtaaatacattgcgtgtatatgcagtaaaaacatattccaatattgtactttggatggaggcatcagttttaaagagtacacagaaatatctctgcagggctttgatgtgagaacagtgactcctttttcttttctcttttacaactgcaatacatgaatttgttaaaatttaatacaaaataatacattaagtcacatatatcatcataattcataaaataacaaaattgtatataaactgattgaaggttcgcagaatagcgtggcgcaacgtgttgaagtgtttggtctgttccacaaacgttctttcttttctttttttttagtcactagaaatttttttagaacttgagatggaactttacaagaaaccaaacgcccaaaagaaggaaactaagtcagcggacagctaaaagtcctcaaagtcataagccggaagaaacagtgaattctccggaaactaaaatggaatcaagatacactaaaaatacaaagcataaagttcaagccgatatcaagagagctcgaaatccaaatctaagaacattagcaagctaacatgaaccttaagaatgatgctagtccaaaagcaacaaatccacttcttcttatgatagtcctatgaacgttctttctatagtagagttttgtttggcttataaattagtgatttatgatacgaagccgacaataataattattggcctatccataaaagttctgaagctgaaaatatttttataatatctacgtaaaagtattacaagagaaaaatacagactaatcggtaaatccacgtggctgcatgtggggaccgttctcatcttcacgttcctggaagataaagaagatttgttgtagttaaagtacaagataaaagaagacgaagttgtggaaaaagaaaagaaaaaaaaaagaagacgaagccatgaagaaggtaatagaaaaacaaaaacaaaaaagcgagaattgtggctttgaaagattttatatatactaggtttttagttactacaaacaaatgtaatcgtaatcgtaagatgacgtgatatattttcctataatagtcgcaacatttctgaatatcgtttattcgtttactatatgactcatacttgagagtccgactgcagtggacattaacttctaaaccaagatggcacgaaactagaggaaaagctacggagataaattatttttattcaatttaatttttagtttactaccgacaaaagtttttccagctggcaacttctgtctcattcagaaggttcactttcgtagacccatatatgattattttttcgttgtaaaacattttttttggtgtcctttatttgcaaaacttttaaaagttaatcacaagtagtaggaaaaagttacatcgtaaattttgtatagtatttgttgtcatttctgtccgagcttacttattctgatgccatgaatttgaagttttgaattatgggtgtctcacaattgcatacacacttaaccactaggcaactctattttag

SEQ ID NO: 2524 - DNA, 370 bp, Arabidopsis thaliana landsberg
  unsure (1)..(370): unsure at all n locations
taataaactaatctcattgagtgaatttcaattctagaggttctcagcagcatcttttgccttctaaaagatcgtacattttggcataagctagtagaggcagagctcattgcttattatttgagataaacactgtgtcatcgtcatatccacttttgnnnnnnnnnnnnnnnnnnnnnnnnnngttttaatcagaaatgtcaccagatctctttctctgtaaggtattacgacgatgctgcttgtgtgctacggaaaatgtttttggatgcaaaggctcctcatctttcttcaacaattcctcccattctgccatggaaaatcaacgtacctgtccaatctaatgaaggtcttacccgccaaggaagtc

SEQ ID NO: 2525 - DNA, 527 bp, Arabidopsis thaliana landsberg
agttgcgagctttacggtgaggaagaaggattgtagggtaagtcttgaaggttcaagacaaggagtgaaaggtccattttcgattgcagcagagatattcgaattgacaccatcgttggttggtgtggaagtcaagaagaaaggaggagataaaacagagtatgaagatttctgtaacaatgaattgaaacccatgttgcaaaacttgacagctgatgatgtattagctgagcctgtcgcgggttcagcggttgatgaaaccgcgatcccgaattctccaaccatttctttcttgccgtctgacactgaatagaaggacttgatggaagaccacaaagccagagatcatgaggggtatgtatgtacactgtatgttttgggttttgtaaactggattgggaaagaaaataagctgcttacggttggtgaaatttagaacctgattatatgtaatacttatgtttatgttggagaggatcgttagagaaattgagttatgttttttactaaccctttactagtttttt

SEQ ID NO: 2526 - DNA, 197 bp, Arabidopsis thaliana landsberg
ctgcattagcgctggggcatgtagaggcttgaacaaaaatctggacttgccatcattacgattttactacaggatgagggtcacagtggaaagggggaagaggttgacaagtctccctctgccgtcactaaagtagatgaaagcagaggctctatggagatatacttgacgataagaaagcataccgatcccgaggc

SEQ ID NO: 2527 - DNA, 568 bp, Arabidopsis thaliana landsberg
aatatctatctaatgaaaacattaatttctttaggataagtatagttacatataaaaaatatttatatttattataatactgctatttttaaccatgtaaaaaattatataacaaacacgtaataatgcaccttaaaatatacactctaaataataatgcgtataataaacaattttttaaataaacaaaattaaaccaacgatatactaatataacatcaaaaataaatagataaaaaatgtaaggtgataaaataaaaatataacttgaatagttaaaataagataatattaaattaaaaaaattatttatttttgaacgtaaataatcaacctgatgtgtacggtggatcaatatctagtagtttactaaactaggtaaatattttcgcataaaattgttcattatgttggtcttctttatttaaaatatcatttataaatttctatttattggatttgtctttacttaattaaacaatcagtttcatatgaatataatggttaaatgatgtataaacatattttttctttttgcataaataatgtatatatatttaaaataata

SEQ ID NO: 2528 - DNA, 1766 bp, Arabidopsis thaliana landsberg
gtaaaatatcatgcaatagctaggaatgtgggagtcttatgtttcaacctttccatggtctcggggagttgtatatccctattcttactgttgttatctatgattttggtagtagttttagagtctattttttatttctagagtcttttctagtcttttgaggtctttacaagtttgagattcatttggagataatggagcattctggaggaaaacaaagagtttatgctgctgaaccgtgtaggtgtctagcaacaccaatacctgacgacaaatcgaagacgcaccttattgacgttttgaagatttccaaattcggcccataactttcccttatttctaaagaaggtccatcacgtttttagatcatatgtatagtttttaggtcattgtttagacctaagcttggagaggctattctccttatctcttttgttcttgggagcaaaaccctatggagactccctttagataagatctttcttactctttctcttgatatattgactatttatttcgtattcagactatgatttgtgtttctttgatcatgtctgagtaatccacctgttaggtttagggtttctgattagggatttatatggtttaatagatcgcccccctgctaggttatctatagaattcttcatctttaattgttcttaatgctagatctatattgatcacctagaacttgaatccagacaataaatatgtccaacataggtatctgtagttggatatattatttgatgagccgtgtttataggtgtgcaataagaatcggcctatctactaaggtgaacaattgaattcgtttagaatgcatgtttagtttaaagatctctcggcttctccggttattcttagctataggcatagggagtttcgcggaacaccactggttattctataattagagtttgagtttaagaattgttcgataacaatctggctattattagatctactaaccaatattttcctgagaataccctaagccctgaggtttttactttcttgccttacaacctcacaatctgctattgcttccttttgtttctttttattttcaatactatcttacttagcttaattcaaaaccttggtctattgtgtgatccgagagctttgtggaattcgacccttaaatactgcaattgatctcttatttgagagagtagttgttagggtaatttgaacctatatcaaatttggcgtcgttgccgaagttcttgggaatttccattgagtttagtttagagatttcgtctagtttttacttctatttttttactcacgcgtttcttgtcttcttcttttctgtgtttcaggtgtatgcctaggcaaacaaggaacacacaatagaaggagcttatcaacttgtctgttctggacttgggaaaacttgaacgcaccaaccgaaaaactcataaattagcaatggctgacagagtcatcagagctgatgcagaaagagttttgagagatgaggatggcaagcctacaatgaggctggtcagagattggatgatcatggactcatcctacctgaggacgccaatgaggatcaggcggccttaatgcgcaattagctgctagagatacaggagggctcgtgtcgagcgacaccaagtgggtctcgatcgacaccatcgggagcagcacgcggatgcaatcggtgtcgaacgacacaacaaaggtgtcgatcgacaccaacaccagattcctgcagctattcctccagctgcggaaccacgtcgtac

SEQ ID NO: 2529 - DNA, 514 bp, Arabidopsis thaliana landsberg
  unsure (1)..(514): unsure at all n locations
tgcacaccaacactaanaaatagagcttctttgcaacaatatcttaaggggaggacatttttaattatacgactttcttttagcgaaataatctcaattacccattataggatgagaatatgtaattggaaactaaaatgatttgggtcaaacttgtttttctcgccaaaacaaattgtatgtaaaaacccttgtaaatcttttaaaaactcttaaataaatctgagctaagatttttaaatcatatgagaaagcggttgtagagtctggtaaaaatgatagtaaatcatgcgaaaacctactaaaatccttgtaaagtatttaagtgcccacttttaaaacctttgtaaatatttaaaatccttgtaaaactataataccattgtaaaagatttttaagggttcaaaaggctttcaaaaatatttacaagaattttttatgagcttttaaaaatttttaaaagatatttacaagaacttttaaagatttttttaaaggatttacaaaaatttt

SEQ ID NO: 2530 - DNA, 3636 bp, Arabidopsis thaliana landsberg
tttgtagatatcttatgaaagtcgatgtatgcagccacaagtgaacccgaagcaacaactcttgagacagttcccaaaacagtatgaagaaccgcgttcttggtgaatagagcatcgtagagaaagccgagttcaatctcaatgattcttaaagcttcctctggatcttccaagttctcaaagatctctatgctctcgtcacgctccctgaagctgaaaataacgttgactacaaggcccttgaatgtgttgaagaatttgtaagcatactgagcaatttcaagatgagtcaactcttttctttttgtctccgaggccagggatggatgctctaacttcttaggcctatgttccttgtcaggctcatcaatcagaacgatcttggtgggtaatcttgcttctttcttggccttgtactcctccatgagcttcgcataatttggtcctggatctggtccttgaatcatagaatccctaaacttgtccaaacttgcactatacagagccgttgtcctttccagatactttatagtcccagaaatgaacactaagagtattgttacccaaaggctattgggcagagactggagaaccacatagacaccagcaattgcctgaaagacaagcccaaaaacatgtcggagccaaagagcgttatcttcaagcgcgaaagctgttatagtgtctggtccaccaagatgtaagagcaagaatggtgcccataaagccatgagctttttgtcctgtggagggtcatcaggtttgagatctttaccttggttcttagagatgagaccaacagcgaaattagcagaccaatctgctaagagataagaggaccaaatgacgataatcaagtgccttcttggtgttcgtttccttaatggagagaagcaaatgagaaaggcttgaagggtaagacttagaaagattgttcctctaatgttccatctgtcccacgcatctttgatatgttttggtatcacgtccaccatttttgctctcacttgaggaaaagagataaagcctctctctctgtctctctctctttgttattcagatcatgagatgtttttttctttctcagatttacttgagaactttggggtttgggcaatgtttttgggaagccattgatgttgttgttgtttttcttttcttttacctgggagtgagaaagacgactcagcaacttgtcttttcttttctttgttttcggagcaacttatgttattttaaagattgtcccggattagtctttcagtcgagtcattatttaataaatcaagaaaacaaattttccccctagctcgttttcttgtcactaaataaacaatttgattttgaggttcattatatattttagatgaatttggtgtttttggtactctttcattaatggtggattcaaagacattgagagagcttatatatattcttattcgatttcttctattggtttactgattttgaatgatcttttgaatcagaggaatcagtcaagctcacataaaatgaatgtatcagtgacagaagaaagacatgagtaatacaatgcagatgagtattcaagtatatatgattgctggcaatgatatgaaagcaacaaccagttcaagatgaaataataataaataaataaacgcaatagaagaaaatgttgggaactaatttttttttttttttggtttagtgtgggaaactaatgttgtttctactttcgttgcttattcgatgatgatcacttgcaataatgagtttggctctgggatctccttggttgatctggaattgatctgctagtctcaaatggaccatcaatagccaaacaaacctgatgagttatcctcctttgcttagctgagctgcgtgttctatagtggctgggaactatgcagatttggttttaaatgttcatgacttactgttttttcattttccactaagaaaatgttggtagtagtggaaagtcttctttgaaaatgtaactagatgatccgacattagatatgaagacttcttagagtttggatattttgaaatattggaaagaaatactcaacgcaatggagaattggtttccattgcttgcgaccttcttcgtatttcaatcacaatagtagcttctgaattctctttaagtattggatcttcagttttgaacaagtataaaagccgtcttctaatatggtgccgcatttggataaaatgttttgaagcatatgaaaatggtaagtaaatagttttcataatttttacacttacaaaatcataaatcatgtattgattatgttacttttatgtgatatatatatatatgtagaggcggacgaagaatttgctaaagattggacgttacctactttccaatcaatgttgacgatgaaatttgatattgttatagaaggatcttgagtttgagattgatgtttttagctttcaatttcagtttaataatttagtttaatgcttcggtttaaacaccattgtgggatacgggctttgccctccatgcccaattcggcccaagcacaaataaaacaagtcaagaaggtttctaacaaggaggaacggcccatcagaacaacggcccatcagaatgactgctcggcccatcacagctcggcccatcacagcttggtccagcccgataaattcagaagggcaaaacggagaaatcgcaagagagactaagagaaccctagatcagctccttgcctataaataagaggagacactactacgaagaggggtccagacctaagtcaccactcagagaatttaagagagaattgctgcctaactctttatctcttactttctggttttccgttctgtattttctggttttccgaccatcaatatcggttttccaacctgtactttcggttctccgttctgtacttacggttttccgttctgttaattactgtctttccgttcgtcattaataaagaagttactccgttctccccaaaccccttaatcattattgttacgacctcgttacaaacaaccataaatttataaatgaactgtacttccaaaccaaataacacaaatacagtactttatttctgaacatacgtgatactttcacaaatactacttaagttaaatgaccgcgtccggtccgttaaaacgttgggctttgtaaagcagatatgagcttcgatttgtaacgtgcggttgttagcaggccggcccaattcggaccagaaaaaaagcgtcgtttaagtagaacagctcaagaaaaagaaaaaaaagaaaaatttatatgcagcgaaacccacttaaaatgtggattgaaattgaaatcgaatcgaagggagagcgattgttccaaccctagaatcagtctgaaattgaagctctttaagtatcgatgaggtttgatttcagtggatttgattgtgtgtggtttcttcattcttcagtcgtatcgaggatcaattagagtgatttcaatttagtctatgcggcttcttctctcatatttaggctatgcggcttcttctctcacagtcatcgtgtgtgctattggtttcaatggcggccaaaagatttcttccctcgcagatttcttgagttttgaatcagaattcacatttactttcattggttaagggtccattg

SEQ ID NO: 2531 - DNA, 339 bp, Arabidopsis thaliana landsberg
tctctacatctctacgatcccatacccatctctatgatcagacctcacgcatgtgtgtctcttacaccgtaatacctctagctcactttcctcagtattccttgcctaattggaacttctctcttttttttctggggccgagcgtcacatggaaaggcgtaaccttcccttcgaatttgatcacattgcaaaaagaccatgggagcctgatttttgttgcaccgtgcgacttttgatcgcaagagcaagtaatttccagagagatattcaacagaggaagcatgtgccctctctccaaggttcaacgaaggtaaggaactctgatattagtacctaaac

SEQ ID NO: 2532 - DNA, 548 bp, Arabidopsis thaliana landsberg
caacacaagagggaggacgaacattaccacgtgtcgagtatgcaacacctatatttactaagcatagaaggaatcatgaacaaataaataaataaatcttgtaatcaatcaatacgaaaccaaaatatctcaagcatggacaatgcgtgtgaatgagatgaaacctttgtagtcagatgactcagatgattgatagtataaagtcttctatatgtaattatggattgcggcgtaggttttaatcgcttcccaagttatgaaattctaacatcaaaactagggctagaaaaaaaacaaaagccgaagatttattatattgggctcgaaattaaacttgaacccgaagatttactatatcggatcctaaattttttaatccaaaaaatcgaagccgaatccgaaaataccggtattttattcgaaaatctaaattgatccgaaaactataattttatccaaaaattcaggcatttacttaaaaattcggagatcggctctaaaagaaccctgaaaaattatattcaaaccgaataaaaaccgagtggata

SEQ ID NO: 2533 - DNA, 225 bp, Arabidopsis thaliana landsberg
  unsure (1)..(225): unsure at all n locations
aactgagaagnnnnnnnnnnnnnnnnnaagctcacatgtatgcgccataacgtgttcttgttttttcttgaactatgaactatatgtttacgatccgaattccacctaagacaagctaacgagatggcaattggtttgaggaatggagaggctcaagagaaagtcttgtggactactacagagcagctatttattgcagccaatttagttttgtcttgagaggcg

SEQ ID NO: 2534 - DNA, 596 bp, Arabidopsis thaliana landsberg
atttattctcaaggtataataaatagacatgaagaagagaagtgagaataataaagttttgttttgcactttccgctctctcggtaaaaggcgtatttcaaccccaactatttcgacggagtttttttctactcgtacgacgagacgatgcttaattttttaactatttggactcttactataaatggcaaaaattacatttactaaatttgacgttagtcaactgttaaaaaacgctgacaaagcatgacgaaatctgtcttaaaacgtctttgttcctattgattaaaaaatcaaacaaaatatcacttccaaaaagactcgaaccatagaaatcttagagtatataaagtttaaatatccctaattcatatatatatatatataaagttttaatatatatgtgtattaatatgtatgtatatataaagtttaccaagttgaagttgttttttatatttcaaaaaacatatgtatgtaagaagtaaacaaacatgcaattcaactaatttattaaatatatatatatatgctcgaaattgtaatgcttcttcattaaatgtaacaatatgattggtgttaagatagatattatt

SEQ ID NO: 2535 - DNA, 496 bp, Arabidopsis thaliana landsberg
  unsure (1)..(496): unsure at all n locations
gaacggctgtagactctaacaccactcttaccaaggtcgacaagaacctcatcggtgtatggcttcagccattgaacagggccaacacgactctggagaagaaatgattattgcaagaatcaattagaggacttgacataaagaggtaatgccaagcaacgtttatatcggatgattagaacaaacctggtatgccaatttatggtcgttaagaacccctctggcttttagctcttccattatcaagtcaatacactcttccatctgcttctggtacggatctccagcattctctacgtagctgaccggaacaccatgggcactgaagaatatcataacctaaatcacaaaacaatggaccaatttaaccagtgttcagactagaaatgtgcaatgaagaggaaaaaacagagggggggggggatataactatacctncttaagatcagagaaaagttgaagctccttctaatgaggtcagccatagaattgacat

SEQ ID NO: 2536 - DNA, 578 bp, Arabidopsis thaliana landsberg
  unsure (1)..(578): unsure at all n locations
atattgtaggttatctatgacaaagngacttgnctagtaggggttncggatttgtgacaatgtcaaccgcatcggaagttgaagcagcagctcaacagttcaatggctatgtaagcagatacttgtgttcgctactgtgtctttacttgttgataagagttttgtgtggacttgtttgtttattgagttgcttgtattgtttcttgttcttggcttgtgtgtaatgtggaattccatgaattggattgtatgaacgtttgagatagagaaatagtgttgtttatcttctgtttggtttgtggagacttcgtggttgatgttgttttatattctgctgataagatgcatcttcttctaggttgttcgtgtttctcatttgggatataagtagccgatttagatttgtacatttgtttttgtcacattgtcttgttgttcataccttcaagcttgtcttttggatttcttacattactacactggctgttttcattaatcctgttgatttttaacatttcaggaatttgaggcagacccttgagagtcaatgcttggccctctncacctaaaagagagga

SEQ ID NO: 2537 - DNA, 559 bp, Arabidopsis thaliana landsberg
ttgcagatctttccaaatatcatgcaattgtcttgactaacatcgattttctgattatataaaactttagaccgcattagcttcttgatttcctaagcattattaccttctggcaaatattctttcataatctcacaaatcgagtccatacaattctgcggcaaattataatcagtcttcaaactcatgaatcgagcagctaaagagaattgtgaaagtccttctttacatccatcataaattggatgctttgcaccctccaaaatatcataaaacttttttgcatcagcattaggctcttcgtccatgttttgatcaaatcctgactctgtaaaatcaaacgcatttgaaaccattgtcacataaggattcgctgactccgttaattagacatagaacctctattatattaatgccttgacacaacctcctctggtagtaaaggttttccattctcgcatttgatacatggacacaaaagtttcccggtttccagatataaaaggggatttttagctcatctcataaaaattttcaatccttggcaaactcttttgat

SEQ ID NO: 2538 - DNA, 556 bp, Arabidopsis thaliana landsberg
aaagaagaagcaatcttggggttctcaaacacttcgtcgtttcttgtaaatttgccacgtactcttggtctgttgtccgccaacgttttccggcatgcatacttcaatttttgcatttaatatataagaaaattataacggtgcaaaccaaaattacaaatgtaaagttgtaatttgtataaaattgtagaacaattatttaattaattgaatatgtgcatataatttgagttttgttctttttttcttttatacaacggggaataataaccaagcaaaaattcaagttaatttccaaagtctctgaaatagtttgatttatattccagtttctttaaaagaacatgtaattcagttctatttctggtttaattgttattttgaccaattaatatagagaaaattagatatttttttcgtttgattgagaaaaaaataaacttgttaaaccgaaattaaattccgttagaattttatattgctaatagctaaaactagttattaaatagtagttatttaacttaatattaacctaatggttttggtgaagttctct

SEQ ID NO: 2539 - DNA, 599 bp, Arabidopsis thaliana landsberg
ggatcattgttgaattcttttacagctatgtctcttgctactagagacattgtaccatctaatcttcttaattttatgcggttttggacaaaagaatgctcaacaaagtcaagcataccagtccactgatactattgtctttattggtggagtgtctggactgccttgctctgcatgcgactgaagaatctctatcacagctcggattttcgatgaaataaactcgccttgatgcaactaaagcatttttatcttcaggatcatcataatcgttgatgcaacttctaactgcagattcagtgaaaacaacatcatgtttaagctggctgtggcaattaagtgcagggcacgtattgttatccccgttaatgtttacagacacacactcataacaaaacacatgggcacacaaagttacaacagggtcttttggtggatcctgcagagaacatcataagagtaaaaaaaagattattaattagaacataatgagagagcttgaagagacaaacaatgctcaatcattacaatgtacttacactacaaacagagcatgtggttgaggacaatttcaagagatcgaggaacatgattagatt

SEQ ID NO: 2540 - DNA, 497 bp, Arabidopsis thaliana landsberg
ataataattcattgctaaattcatatttgttctatgtttgatgataaacagcacctattattgtatcaaaagatttggtgtcgtgggctagtcattatgattatgccttactcgcaactggtgctaaaaatatatttgctacaatgaacgaaattttatagaaaaaattctaaaaataaccaaattaggaaaatgtctctataaattaataaatattaatttatcgataaattaatacctctttaaattaataaaatttcgtgatcccaatattattaatttatagaggttttattgtatatccatttatcatttccctgaagattgattgcaagttcaaacatacaatggaaatacttatctgatacactttggttcagtcctaaataatggtctgatacggttcaattccagttaaaattccggctaaagttcacgcaattcaagggattttgcttttcaaaaatttcaaaattattaaatacacagctcacgag

SEQ ID NO: 2541 - DNA, 471 bp, Arabidopsis thaliana landsberg
caagaaaacacacttttctattgttttatatttgtatgcggcttattagtctgaccctcaatagaatgaagtggatgatatggaggacgaaggctttacgactaaacccgaaatgtctatcagagacattgacaagtggcatcccttgtatcacggcgtgtctctcctgaatttccaacgccatgtctgagatgatggcttgaagcttggttcctatcgctaatgtcaacttcaaaccaaacacaattagtcggttctttctttatattgctatttccgtggaagctagcacacgctacaaaggtagattcagttacttacaagtggaggaatcatggtgatcacagcagtaacataccaccctataccgcgaacaattagcttctaagctctgtatgttgaagaatattacaacacacgattatgaaaagacttaccgtgaacatcaaagaggcaaaagagcattacaag

SEQ ID NO: 2542 - DNA, 606 bp, Arabidopsis thaliana landsberg
aatttttctatataataaataattcttaaattttaaaaattactactttaaaaaaaataatcacgggtttgataaagatattacagaacgggttttattttggaattgggttatatggtggatatatttgaatcgatatttataaaattttaaaatattattaatatgctgttttaataggggttaaaacttcagttttttaacaattctctcatggattcgtggtataacgttatttaataacaattataaactgtaaattataaatattttataaaatttttttttgcaaattttaatatatattacttttaaaaaataaatcgtcccgcggtataccgcgggttaaaatctaattccttgtaaattaggaaccaataacacccctaagtctttaacatcattgggcaacaatcgtttatttatcgttaaaaatgttacaaagattgtaatttcagtgatctcactacacaactaaattactccaaaagccagctagagattgtcatataatttccgtaatctcacttggttttatttaacaccaattataatataagaaaagagttcttcagttggtgatatccattctttttccataatcga

SEQ ID NO: 2543 - DNA, 609 bp, Arabidopsis thaliana landsberg
  unsure (1)..(609): unsure at all n locations
ataaaagatagcaactccgagggaagagggagggttgcattcaaggtccccatcgccacatcctcgaggtttaatcaagaaaaaccaagagacaaaagagaggaggccaacaccgataacgaagatgacttggaatatcgtgcaagtcaagtaacgaccccaataggagtcactaagaaatgccccaacgagagagaacatgtaaactgttcctgtccacttgcttacattgttcgcagcttctgcattaccttgtcccataacacgtgttaggaacaacaccaagtttactcccacaccaaagaaggccaacgtagctaacccttgatttactgttcagataatgatgaattatgtaagattatttgaacttatatacaaaatctttaattttagtattaattatatatcatacctagcaaaatgattgcgtttgtccagccaccattcttcttctcctctttcttcatcatctttttctgaaggtcagaatcgttggacataagagacaccacactttgatcatcttgaacctctaccacttcacgaacttncaaaatttctgctctctcccgtccttgcaataattaatgtctcattcaattaaat

SEQ ID NO: 2544 - DNA, 525 bp, Arabidopsis thaliana landsberg
ccgtgatgtaggtgttattttattattttgaccctagatcattttttctttctcgcaatttttttacatttcactttatctttatctgcatcaaaaaaaagatgcataaatattttagtaaatacttaatgatcgattctcctatatgctagctatacacacaaacaaaccaatataacaatcaacacataaatcatgaaataaaccaaactaatgaacaattatccattgacacaaccatctcagggattgaataatggtaccaaaaatactgcctatacatacaacaaataaatcacacaatctcaattgcttaaataatctcatggtcacatactcaccttcaaacaaggatgattttcaaaccaaaaacaacaatcccacaacgagcagtaactttctactaaccaacaatatctcaactcaccatacatccaactacaacaacaaaccaacctttaacctaaattggaaaaaatctgaaaaataaccccaacaattggtctcaaatattgaatcacgaat

SEQ ID NO: 2545 - DNA, 2887 bp, Arabidopsis thaliana landsberg
  unsure (1)..(2887): unsure at all n locations
aaacaactgcaaattcgtttggtgcttaaaccgattagtggtttgattaatgcgggtttggtttgaagacaatcggttagggtaaaatagtaaatttgccaaggcaaagtgcctgatgttttttaagtgtcgtaacacgtctaatgtttagaaaaagtgtctgagtatgcaatattctcttcaaattgatcgggaatggtatcaaatcatgacagtgtggtcgaggagagcaatctgggcatggttcagttttacttcaatttcattgactacgcaacagacaactagcaacgagggcactgagtttatatggtgaaccaaaatgcttacaaggctatcacatcattatcccctatgcatatgcaacaattctaaatgaaacactctagactcgatcctaaatgtaatgcaactacatgaacactctttttttgtgaaatcattttctgaaatttttcaattttttttggtttttctatgccttagatgaatgcagactcaaaaatatacacaatgcaacacacacttcctgagccctcccccaaacttaaatcacacagtccattgtgcgaataaacttggaagagagtactcaggacaaatccaatcacagaaacaaaatgaagaaacaaatcacaacagatgatataatacaatggtgaagtgaggcgcttacctcagtcgaagaatgaacgaagttggtcgtcaatggctgcctgtgattgctcccaggccatatacgaaccgccttgttccgtatcagctccagcaggtgggtactcgacctcattagctctgtcacggtcatcaccgctctaaggatactcgacctctcttcttctgctgcggccagcaccgcggtcgagtgatctcctcgagtgaattaggcgtgatctgctgctagatcgagtgagtgtagccttccttcttctcttgtgctcccgggactcgaatgacgaatgcctagccgggacatgtgagactctctgctcactaagctcaggcctgtgctcaggctcatcaaatctcctcgatggcatctctagaggaggttgtccctgtgggatagcaaaagtggaggaggaacaactcagcttatctgtcagaaacttgatagtcttgaaacacttggcgagcagcttgtcctgcttcttgcaccacttctgcagtttactgttgttcctatgagcttcactcaagctcttgctctcccttgctggaggcacatgttcaccaaagtgatacatgctagtgtcaaactccactgctctgtcttcgtccatcccatcatcagcagcttcttctataagatcatcctcatccaatggcgaagtgttctcatagtagaggcttccaatctaaggccgaaaatcaatgttattcccctctattatccgagtaacctcagggctagggagaaggatgctagctctcttgtctgtagagtactcaaacctgaaccggtgcaagttgccaaccattgcgaactccaggaatttgcagtgacgtagatactcgatatccattgcccgtggctcgagtccatcagatgtgattgggactccacaagcgatcagaatcggtgtcacaacaccacttatgcacagagcgcctcgtgctctcttgtggttattgctgacagcccagctcttgtatccacacaggtggatcagaagaagtacagagagaggtgtgtcattgatttcaccttggagagacatgttgttcttagtttggcggagagtgcctttgagagccatagcgatcatctccatatcagaattagtaacagtccctatgatctctcgggagtagagtacattggctatagaacgctggaagtacctgatgagagggctacgtatctgattgctctttggcctggaagaattcagcgtgtaaagctnnnnnnnnnnnnnnnnnnnnnnnnnnnctcttctccgtcatacttgggcttagtactcgttccactggggaaaccaaacaatccttccaagcgcttgattgataacctatactcatgaccatacacagagaatctcaagaatcccaatccttcataatccaactcatcaaaggtcataccttggtagagctccacttgcagtgtggagaggaattgaattgtctcttcttcatatgctacatacgcataagccatcagagtgtgcagatgacaactctggtacagatgctgaacattctccaataatccaagttgtgcaagcgtggtcgagcatggttaccttgtgctacacaactcattgaatttgaagaggctaatatattcctcagcaggcaatacatcaggtttgtgcagaagtttggtggctctccgagtatgctcaggcatgtacttgtcttccagatcctcatctattagctcatacctctctgtcattgctctcttccctagagctatctcagcctttcttctgaagctatcatattctctctgttctctctctggcctcgaagatgacgactctgtctcttccatgttgtagtcaggatcaatggaagacctaccactgtaattactcatgattttcctgtagaagatttacaactcaaaacccaaatgtcaataggttagtctcaaagataacaattgaatcaaaattgttatcaacaagcaatggaatgaaccaaattggtcgagtatgtcttgtattcgagtaaactgggctctcgtagagttctgcttaagtgaatcaagctgaaaagaaacctgtggtcgagtaaatcttacggggtcgagtgagattgatgaaatcagtacagctggtgagtttagaaggtctagtgctttatcggtgagccggaattgggaggacaaaaccaaaatcgggggtcgatctgctggatgtagcgagtagatctcaga

SEQ ID NO: 2546 - DNA, 1839 bp, Arabidopsis thaliana landsberg
ttgtgttttatgagattgacccggaccaaaatccggttagcactgatttttggttttgagtttctgtggtttgcataaagggatctatcgaatgaaacaagtgagaaaacccagaaaattgagctctcacgccgaaaccctagcgatgggagaacacgcagcaatgcccggcgtatgcgaaagatgtttaatctagagtatgtgtttcgcacatccttacctatagatttgagatatgtctctactttgttgacgacaataacgacacgtatggaaggtatggtgtccttgtcctgtactcagtgtctggtttaattggtagagtgtctagatagagtttttgatcaattatgtcatgcaagcagggggagattatgaactagtccctgagaactctaattcctttgtaaactctctagatgttgataacgaagaaggctagatctagttgtgggggagtttaggattaagggggagtttttaagctgtgtttgttaatcatgtccttttggttttagtaggtttttgtttctaagtactggatgatgtattttgaaccttaaaaacttatttatgcaatctatgatgagaccctctattggttatttccgctgcttattatctctatgacttgatgtgtgcttgtgagttttctttgaggggtttcttgcaggattgcttgaattaacaaattgtatcaaaaagggggagattgttagtgcaccctctgtcaggacaaaccagaaggagtgctgtttgctggaacaagctggaagctgtttcagattactaaagtgaagatcaagtaattgatgctgacgtggatatgccgctaaatgaacgaatgacgtggagatcacaacaggatgagttcagtttggagaggagatattcacgcgaagatttggagtgatccaagatctcgaaggctaacctagaagaccaaagacctcgatagtataaatagaggtgctaaggttcttgttagacttggccgtgattgtgagtgaaaagctagtgcaacacttttcattattagagactaaggtttagtctgattggaattctagagagatcaaagagtgtgttcttgtgatctgctcttgtgtgtttagggaaatctcaggtgacaaggtaaagtagtttagatcttgtgtaaaaccaattaaggtagttgtaaacttcttaatcagatttctaataaagtgatactcagtggttctgagtttggggaatacgattcttggttcatccggaatttcaaaacttactgattccttcctcatgagtcacccttttggcgcaatcccagacgcctttgtagttaccgaacccattttggtacctcagcttcgccatatcaacaggagttgaaacggcataactccatacaaccgtgaaggcccaggaaatcacgtgcaccacggggttgtttggattcccggtagacaagaaattcttggatacatcgtagaaggagaaatgtacgaattgagcgggtcccatggctccatgcctcatataccatatcccacggtacagagccgatggtccttccgtttggattaccgaacgcagagcctgccggattccgacatgtctttgcgaatacgaacgatgcagcatacgttgatccaaggtgcgaacaggaaacatcgtcatgttcttaaaggaaccagcaactgaacctgcaatcatcaactgccacaactggaggtcttgttccttaaattttggtgccgttgaatcttccaccgccatgttgggaatgtttggagcatttaagctacaactatacaatacctgatgattaccttacagaactctaaccagacaatt

SEQ ID NO: 2547 - DNA, 1932 bp, Arabidopsis thaliana landsberg
  unsure (1)..(1932): unsure at all n locations
cgacaaagtcgcaggagaaacactgcggctatcaaagttgcgaaaatgtaaaagcgagataaaaacttataatatcggaagctagcgattgcttctccggggttgcgatagagtgatttgccctggcagggctccgaggctgcgatagagtacttttgctgaaggcgtcattgggcattctgacttcatgttctgtttttcctctgtatgaactccaaaagcatccaaagtacctgaaaacaaccaaatatgccatgcacatgcaatcctaatgcaaagtcgtcctaagtatgtaaaacacactaaaacgactcctaatgagatgaaatgtggatgaaacaatgacaaagtggtgaagaatgaatgcctaaatcatgcaaattatagacatatcataaatggaagtagtcgctccataaatacatgacaatcatgactcttcatgtctgaaaacttttcattctccatatctacacaactagccaaatctgaagaataaccatctagaaatctaatatcatgtttcacacattgtaataaactctgtttggcttcttctgtcaatgtatacgctggaaatggagctttacccttactataaatatgtaagcctagccgtaaacaaaaattttcaatatccaatcttgacatgatattgtcttttgatttacccttaaaactcatgagagtgttcatgatgttgtcaagaaatttctactctgtatgcatcacatcaatattatgtcgaagattgaggtccttccagtaagacaactcccacaagatgctttccttgtgacaattatgttccttcccatagcctcgcatcttcttttcatgaccattcccaccaacatccttcgtttttggtggatttacactagccaaccgctcgtaataaacttgctcccctgtcaaagattcgggtggatactcgctagaagcatctcttccttttagaaagtcttttttgttcctacgagatggatgaccatgaggaagaaatctacggtgataatcaaaccaacatgtcttccgtccattgggtagataaaaagactttgtactttccatgcaaactggacaagacaatttaccatgagtagtccatcctgataacatgctatacgccggaaagtcgctaatcgtccagagtggtactgcttttagattaaaattttgactcaatgaaacatcgtacgcatcgactccagtacaccacaactcttttagctcctcaataagaggttggaggaagacatcaagactagctcgaggatgatttggtccagaattcagaatggtaagaaataagtactctgtattcatgcacataccagggggtaaattatatggagttaggatcacaggccacaacgaatgattacaagacatgccaaatgcattgaacccatcagtacacaacccgagataaacgttacggggttcttcagcaaaccggggatgtaactcttggaaatatctctactctgccgcatctgaaggatgattcatttctccctcctttgattggtgctcagcatgccatcgcattgacgcacctgtcttatggctctgatacattctcttcaaccggtccccaataggtagataccacatacgactatatggtgctttggttcttcgatggtcgtccttaggcttgcatctttgcgccccacaaaattgacattgatcttctttttcatcttctttccaaaaaagcatacaattgttctgacaaacatcaatcgtnnnnnnnnnnnnnnnnnnnnnnnnnnnnnnnnnnnnnnnctggcaatgtgaagtggtagcctggtttccttttggacaaaaatctgtaaacatttcggaaacggagtccaccaacttttcactcatattatactacgccttgctgcgcatgagtcgagatgctaaggataactgtga

SEQ ID NO: 2548 - DNA, 577 bp, Arabidopsis thaliana landsberg
  unsure (1)..(577): unsure at all n locations
aagatttttgttttgtgcagacaaatcttaagctatataaggtgtatagaatggacgttggttctattctatgaagaaggaacatttgttccattctatgtgatcgtatgactatatggttccattttatgtaaacgtatgacagatactgctctattatatatgaacctatgatgtttaggaaaagtttgagtaagtgtatttagttnttttttggcccatgtatgtgtttacctaagtttttcttttatatgtatttgtagcagtcgcctctgttgatatcaaagtagagaggtagagctaaggaggtgtttatatgtaattccaaaagttgacctctctccaagtggctcagaaacgtatctttacccagcaaaaatttgaagtggtcgaagttgatggttgcaagaaggtggttgtacctaaggaggtgtttgtaggtgcaaaacctttgtgggaagatttcataatcggaaagttcctcaannnnnnnnnnnnnnnnnnnnnnnnnnnnnnnnnnnnnntgaataagatctggcgcttgcagacagatcttcactaattgaatgttttgaag

SEQ ID NO: 2549 - DNA, 567 bp, Arabidopsis thaliana landsberg
  unsure (1)..(567): unsure at all n locations
ttatatcttactacaaagaaaactctacattgatagcataacgtaatagcacggtatttcaactgcnatcgaagattaattgtaattttaatttcgtataatagtattttatacatgttagtaaataattttactaatataggatttttattaacgctatgatagaattcttctagcccaagaaactaaaatgactcataccgccaaatatttagacaaaattttctctttttgcctcataattaattttcccctattttctcgagaaaaccataagacttaactatcactcctaaaactctctcagaccgacgaatcgagtcctagagccagcgattaaactcgccgcctccgtcgttgaaggtagccactgtcgttgaaggtagccgcgacacataacctattttcggccccaattcactgattaaaccttctctttgactcccaaatcgaaggcatgtcttactgaatatgtagttntgtttcttccttttcttaacctagcttgttttctttagctatcgtgaagttcgacaactattttgttcttaaatctggttttatgat

SEQ ID NO: 2550 - DNA, 2390 bp, Arabidopsis thaliana landsberg
accattgtagcaccggattgtgggatattgccattaagagagctggaaacacctcctaacttctgcaccgtattgtgactagaatgactcgtttccttcgcattctcgtcatgatcacaatgttgttcgtcttcaagagacacaccagtgggaatactagctcctccagctttccattccaatcttctcctcacgtttggttttgtaagtgatgctgttagactggttttcttctgatcaatgctttttctattagcctgcttcctagccgtggtggctagtgaactccccggtggagtcgatctgttaaccagatgagttcttgatttagcaggtgttgaaccaactctagaccctgaaggatatcgtccatcacttgcatcacctagaataaaaaaaaaacaggacaagtaagcaaccactaacattgtaccaaacaagaaaaagcttcctgatttggctaaagatcaaatggtgaaggaagatacctttagaagaagcattagatctgggtggagaaacctcttctgataaatctggaacctgtttccaagcctccatcatctgattcatcacctctctcacagctttcacctaaaccatatcaaagttcaaatctatgatcatctttaagccaaaccttacattccaataaaaaattcaaggtgatcaatttaaaccaaaccttatcatatttcctgctttcaaagatcttcaagcacttagccttgaactcacctagctcatttctctccattgtagctaacctccccaaagcttcagcagctgctttcctcgccgcccaatcttcactaaccaagaagctcaataagcaatccacaagtcctttcaatccaccggagctcacactggttccagacaaaccaccagcaccaatcacacttccgatcacaacaactcccgccgatttcgccttaaacgcgttacacttcacgaagcttctctagtctaggcaaaagtgtctgccctaaccgaaccggatccggatcagacgctgaatcaatcgccgccgcgagacaaagcgccgctccaatctgcgcattaacctcctgctcagtgaaaagtgtatctgctaacggtttcataaacgccgagtaaaacggaggcttcgtcgtgcgtgaagagatcgccgacagagccgcgacgcaagttgatcgaatcgaagagtcgggatcacggagacgtctcgtgatgcgagtgaggatcttagagaggaaaggagatagagaattgagaggaagagaaactgataaaacggcgagcaagtgaatacaatgcttacgaaccgccggtttatctccggtgtcgacggagagtataacggaaataaacgactggagattcccggaggaggaagaaggatcaatctgtctagccattaaatcaagctcacgagccgccattgtgaaagtatctcgatctccgagcttagttaacaacacggacatgttttgctttgagttcttcgtcgccattttctaattgctgaaggatttatctctaaaaggtgcagtctttgaagatgaagagccacgttctattctgccatcattttagaaaaactattctgagtaccatccatttattctgagtatcactcggccatgtgtaattacatctctcttcttaatgaataactgagggagaattcaaaataaatagtaaatcatttagtaaaaaaaaaaaaaaaacggtcgttgctcccaaatcgcgattctctccgacgacttcggacgtgattttttccaactttgccgccggcgacttgagctccgatttcgccggcgatttgagctctaatttcaccggcgagttagcttccgatatcgccgtatcttccaagccgatattctgctcccaaagtgagcttactcttcaacggcaaaagtaaatccgatctcgttttaatttgtagattaatgtgaatttcttgttgaagttagttgttcataacataaaattgttgtattgttcattctgggctgttttatcgttttgaatcagagagtttagtgagtgttcaatcgaaatttacgatttgtgaaacccagaattgacgaactgggacaaatggtaaaactgagatatcatagtataagcggtacaaatgttttattgagatacaataggacaggtggtacaaatggtattagtgagttataatataggtataattatatctaaatctaaacgattacgtaattgtgtttttataatttatttgtaattacaggagacgatgaagaacaagcacacattcatacaatttgacaatgggtattattcagaagagcatgagtggatttcaaacaattctttaagcggtgtattgttgaggatgtcaaaggtcccatactctatgttagtag

SEQ ID NO: 2551 - DNA, 557 bp, Arabidopsis thaliana landsberg
ttattatttcagtcatattttgaaccaccacaccatttccgttgtcgtctcactgcacaattccgtcgaatgggaaaccaccaccgagacttatactcaccaccgtgtcttggcctttgaccttcatggaatcaaaatcatattcactattattaattcactatcaaccgtctctttccgccacaaaatcaaatagaccattctttttacgaagataacgagtggactaggatgaaaaacaaagcttcaatactccaaacaattgatcagcttgatccaactcaaccacggttttgataggatgtgtatcaaaataattcagaaattagttatctctcctcttccaccaccatttttgatttccttctttttttctcgcatagaacacaagcaagagagaaaaatatgaagctaaaggcaaaatagtctaaatttattgtacagtacaagacataattgaagaggagagataactaatttctgaattgtgtgagcatagacagacatattagtctttctactatccaagttttgttggagtgtgtgaagtttcaatc

SEQ ID NO: 2552 - DNA, 5114 bp, Arabidopsis thaliana landsberg
cttatattcgctttctcatcttcttttacttctcacgttcattggatcttttagagcagttctcacttttacttatcctcctggcttgcgtgagttagacgtgcgacattgtttcttcatcttaatcataggttacgttttcttgatctcgtaaggaagaatcttcctcactaggctctgatctttgcggtggaagattgcttctttctttgtgtatcaaattttaaagttggattgaagtcctaggttttatcatctgaggtttagatgtatcttctttctttgcttatgcttggttttactactgattatgattatgctggttaattggtgttgctttagggatttcacgttacacttgctcccatggacaatgatgttttccagattcgccggtccatgcgagacgctatgtaagccttcaatttttcacattcactcgttcctcttgcactctttttcttttctctgttagttgctgctgtactacggattgagttaatgtgtctgggaaagtgggaatgatctaacttattactgctttttggctctgtgatcatgtatttctgctttgtttcttaagaaacaatatcatctattagtgtttctactactgaaatgttacttatttggattccagtcttgtcacattggtgttcatagttgttttcctctctgcgtgtatatctccgaaccacactagagggtttcttgatgggttgttacctcatttgaggaaacgtttcaaattaactgatcatccaatctttccagcttcgtccagttagagaagcgaaacccacttccgaatgatgatgcatcaaaggggaagcatttagatgctgctaaacgcttagaggaaggactttttaaaatggctatgacaaaggtacatcaattatatttacttgattagttataagcatttaggatttgatttactgagaatttctaagttctaactaaacaagactggttgatgccttctgacatgttgtcactgaatccagcttgtttgctatatgtcctcccttataaatattttcgtttctgacacttttaacttcaaaactcacaggaggaatacttgaacccgtcaactcttgaatctcgcttgacaagcttaataaaaggcaggcaattgaataagtacaagcaccaacatgctgattcttctacgcttggaacaaccataacacctactccaggagtctctgctgaacccacaatggtacattacatacatcgaattattcacgagctttaattaagaggcgtataattcgaaatgtaatattataaacattctgaactttgtgatgttccaaatttttttggtttggagcaggataatgagaacagagatcagtgcgagacagagattgctgagaatctgaagtcagtgagccttgagccatgaagattatcagaaagttctttttacgacttgtttggaaacgttttcattgcttatgttacaaggaaaagatgataacatatacaatactaacgcttctgccttctccattgctactgtattgctaattgtaagatctaaagtaggaatggtaaaaccggttatgatttgtttccggttagacttggaacatgtatgaatttgaatggtttattattagttactcttggtaatcggtacagaaaaaatggtagttgcgaaagtaaacagagcaaaaactacaagggtgtgaagatttaaattactggaacatttgatcggacggataggagcgcatgtatctccgacacttctccttggctgttggattgtcgaccttggttcccccaattaactttgacagaggttccttgatgattcgtattcagacataagtaacataaggtaagtgttatttaatgtgtcttttgttacttacaaaatcaaaaccaaaaatccctaaatagccaaaaaaaaataaatcaaaatccccaaatcgaagaattcagacttctctgatttcgaaataatttgtcgatatttcaatttcctcgtcgtctaggttttggaggaatctcgttctgggatttatctacgtacttgtgtttgatcctattttttatcctggcttgtgtgagttcacacgtgcgacatcggctgttcagcgactttattgctccgttctacttcgttttcaagattcgatcatcgtaatctttagtaacgtttttggggaagattttttttgctgggttttgctctttgcggctgaagtttgtttctttgtgagtcaatttcaaggttattgctcctcctgttgtctgtttcgtaattgtttacaattttgttggttttgctattgggttttagttgctttgatcatagtctatgattctagttcgactgaattgcaatcatgtcacttcaattgaaagtgtggaatattattttgcaggacacttgacggtgctaggtgtattgagctgctactctgagatcacttgtaagaataataaagagcaggagatgaactttcgatcttttggcttctcggggacagaagagttatgcagtgcctgttagtgttagttgcaagacgaattaggagacgacgacgaagatttaagagataacatgaatgttcaggctcacatgtctggtcaacggtctgggcaggttccaaaccaagggacagtgccgcagaataatggaaactctcaaatgcagaatttagttggtagtaatggtgctgctactgctgttactggtgctggtgctgctactggttctggtactggtgtaaggccttcacgtaacatcgttggtgccatggatcatgatattatgaaacttcgacagtacatgcaaactcttgtgtaagccttcaatttcagctatagcactgcttgcttgttagttgcctctgtgttatggattgagttaatgttgtttcaatgtgggcggggaatggaccaacgtattactcctttggctgcattacggcatatctgcttcatttcttaagaacttagtgtttctgctttctgagatgtcttgatggttactgcataggggactatttctaactgcccttcttgttctttcattctttccaggtttaacatgttacagcaacggcaaccatctccagctgatgctgcatcaaaggcaaagtatatggatgttgctagacgtttagaagaagggctgtttaagatggctgtcacaaaggtataaatatttttgtgtgtctaaaggaaaaatacttgattggtacttagcatagatttttttttacatgttggctgtgtactacaggaggattacatgaaccggtcaacccttgaatctcgtattacaagcctaataaaagggggacagataaataactacaatcagcgacatgctaattcttcttcagttggaacgatgatacctactccaggattatcacagactgcgggtaatcctaatttgatggttacatcctctgttgatgctactatagttggcaacaccaacatcacaagcactgctttgaacactggaaaccctctaattgctggtggcatgcatggaggttctttcgttaaagtgatcatagatacttttcctggaaatttttatctcttgtttctctgacaccttaaaatcttctttttgcaggtaatatgtctaatggatatcagcactcgtcgagaaacttttctcttggttctggagggagcatgacatccatgggtgctcaaagaagtacagcccaaatgattcctacacctggcttcgttaacagtgttactaacaacaacagtggtggattttctgctgagcccacaattgttcctcagtctcagcaacaacaacaaaggcaacatactggtggtcaaaacagtcacatgttgtccaaccatatggctgctggcgttagacccgacatgcaatcaaagccgtcgggtgcggccaacagctctgtaaatggtgatgttggagcgaacgaaaaaattgtagactcaggttcatcttacaccaatgcgtccaaaaaattacagcagggtaacttctctcttctttccttccgtccggatgatctcatttcaggtcagcatattgaaagcacgtttcatatttcaggggaaggttatagcacaacaaatcctgaccccttcgatggagctataacatcggctgggacagggacaaaggctcataatatcaatacagcaagtttccagcctgtgtccagagttaactcttctctggtgagcaatcagtcaattttactttgcatgcaacaatgtagaccaattaaacacttgtcactttgagtatttagactttcaatcttctttcctcattatctgcagtcacatcaacaacaatttcagcaaccgcctaatcgatttcagcaacaaccaaatcagattcaacagcagcagcagcaatttctcaatcagaggaaattgaagcagcagactctgcagcaacatagattaataagcaatgatggcttggggaaaactcaagtggattcagacatggttacaaaggtgaaatgtgaacctgtaatggagaacaagagttatgctccacagggggagcatgtgaacgattccagctttctcagctccagtaactaatatcataacttctggagaattaactgccaagcaaaacgctcagcattgtcccattactaaagtcagagtgatatatgtacatcactcccccaaaatagccagcagattcagcaaatgatgcacccgcagaatataggttctgattctagtaacagttttagcaatcttgctgttggagtaaaatcagaatccagtccacagggtcaatggccttccaagtctcaggaaaatactctaatgtctaatgctatttcaagtggaaagcacattcaggaggatttccgtcaaagaattaccggaatggatgaagctcaacctaataatttgactgaagggtctgttattggtcaaaatcatacttctactatatcggaatcccataatctgcaaaattctattggtaacacatgtagatatggaaacgtaagtcacgatcccaagatcaaaaatcaacaaagatggctactgtttctacgtcatgcacggagttgcaaaccgccaggagggagatgccgagatca

SEQ ID NO: 2553 - DNA, 485 bp, Arabidopsis thaliana landsberg
  unsure (1)..(485): unsure at all n locations
atcattaacaggatcgcgtccaatatagtattgggtagtcttcagttgaccttgttgagttgtgatgtttgattttacggagggtaaggtcaagagttgtttggtgctagggttatagatacacgcctttgttccgaactggaaacacagcaagccaggaacagaggcgaagaagtagcctgggatgctcaaatcttggtcgacgagtacaaaacaagtgttgtccggtgacattgatgatagtagaacacattgcttgtctttggccactaaacacatgtatagacgtggttgttgttgttgttgatgttgccgtgttacacaagtaaatcaacggttgcaaaaatatcgaccagagataagnnnnnnnnnnnnnnnnnnnnnnnnnnnnnnnnnnnnnnnnnnnnnnnnnnnnnnnnnnataagaatttctatcatgagatcaggagggatctcgcaatcctgcctattgcacatatctttga

SEQ ID NO: 2554 - DNA, 2203 bp, Arabidopsis thaliana landsberg
cggtccgccgtgacagctaggtaatttttctctctcctcttttttcctttccctcccatctctcgctctgtctctctctaaacaattaattctaaaggtccagacctaaacttgttttcttaagcttccagaaagagacggaactcggcccaggtccatttacttaggcccaatattattatgtaggcccatttatttatggcccaattacattaaatactaactaacttgtgtcgaaacaaaacagaaatcagagaactaataaaacatatagatttacaaagtaaagtaaaaaaaagttgaatctctgtttttcgtctggtcccatagtgaatcgtggctcagatggcttcctagggtttgtggaaatcggagaggggaatacagatttgagatgcaaagtagctccagctccggtggtgacgaccttgaaaagcagcagcagcagcagcagaaggacaagtctccccagaagcagagcgagtcagccaatgaatcgaaccacctcacaatcgttgtctgcaatggagattctagtcgggaagaattggtgggtcagatcccaccggaaaaggaggttagcttatccagaaacggaagctcgcacgagcagtgcagggtttgtctacaagacaaagaagaggttttgattgaactaggttgtcaatgtcgtggtggtcttgctaaagctcacaggtcttgtatagatgcttggtttcgtactaaaggctctaaccagtgtgagatctgtcaagttgttgctgttaatgtcacacctcctgagactcaaccaactacaaactattgggtttggaggattgatcctagctatagacaagaagagcgtgagagaggatgctttagtccgctttgggttgcattttcgattctgatcggtggtttaatgcttgatgtgttgatatctatcacacttggggtctctgcgcttccggtgaacatcattattggagtcatagttgtgcttgggctaggaacagctctaaggctgactttggagttctgttatgagtggagcttgagaagagcggttcacagggcggtgcagagggcggaagcgaacaacttcagtaatattgcgtacccacctgccttgtaggggggaaactatgtcaagttaaaaactcgtgtgtgtgtaaaagttgtgtgagacgtgtagaactacaatgctggatttgttgggaaagaaccaaaaaagagcaaaaaagattattacgagttttttcaatgcatagttaaaagaagtaacttcgaaacaaaattgctatgaataaatgaatttatattaaaatcatcagtgagacaccatttatcacacacgtataacccaacaaacaaactcaatgggggagagaaaaaggaagcttcggtgtgtgtatacctcaacaaactcaacaagcctttgatatctgtaaaccatcttcacaaaaactatggaccgacgaaatcagaacaaacaaaaatatgaaacgggttcactttactgggactaaccatacttacatatgttacagacgaacaaacatgtccacaatctgattttaagatttccacggcttgctacacctttgacttccccgagtattcaaacatgagattttccttgccgtgagtttccgccattctgtatcagtgaggtttgattcttttctctcattcccacccgagcttcagcatctgatccaccacctttaagcttaactgcagtgattaacaaacttcctttgtcaaaaactatgtacaatgagagaaaatttgcgtctttgataaggatactgatttgtatggagacttggtagtaaatcatagcaactgaggattctaaccctaaacaccctctaattttgtagtagattataaacttacagccggatcagtgaagattatcaattgtttatcttctgtggaaactaagaggttcgtgttgtcaacgttcagagccagtgcggttatatcctggccttgaccaagctttagcacatggaatacctacaagacaaagatctcaggttgtttcgaccagcaaatgaattagttgatcttttcacggagttatgataatacctgtagtgtgtataagttgaggaagcaaattgaaggagatggaacatccagtctttcaatttctttgctatctttcgatgtatcattactactcgaataatccgagtggaacatgagttca

SEQ ID NO: 2555 - DNA, 377 bp, Arabidopsis thaliana landsberg
agcgcccaaccgcgcaaacacagtcagagtgggctgagaggttctttacatagctggttcggcagatcgctcgcgacacacacggaagacctcagataatcctacagacgcgcgaaggagaaagactttatctcccgaagaaagagggagcatgaatattccagaagatcctcagagactcactaaaatcgtttacgagcttttcggcaatggcaggtcaatctcgaaaggagcaagacctcacttggggtgaaggagctctgacccgatccgaatggtactgccaagccgagggagagcagaccctcagatcgtgcatgagcgaggcgaaacacgctagcacgaaagaggcggacccgaggtagcaaggaacccgg

SEQ ID NO: 2556 - DNA, 609 bp, Arabidopsis thaliana landsberg
gacactatgtattaggtagagaaggtgcaggaaaattagaggaacttggaccagaacttgaaggtgtcagagtttgttccattggtgaatgttcaaatatgttactactctcttcttgtcctcgctcgagaaatgaccgttggcctgaactttgcaacaactttgtataactccaataatttatcagatcctcttctgctttattcgccaccgtgtcagctggtgaacgaagaagaggagggggaggaggaagaatccttacatcctctgggaaatttagctttgctttatttccacggaaccggagtgcagcctcgtcgtaggctctagccgcggcctccgctgtatcaaacgtcccaagccaaaccctagcggctctatgtggatcacgtatctcagctgcccatttgccccatggtctctgccttactcctctgtacctgctttttttctcccttgcttcctctggaaattgcctgctaatggattcttctgtacaaaatagcgattctttttatgatttgacgtgtaatttttttgttttatcagacagaaccattaaccaatttatttcttgtcttgagatgtagagtcatgtttagcaataat

SEQ ID NO: 2557 - DNA, 5035 bp, Arabidopsis thaliana landsberg
  unsure (1)..(5035): unsure at all n locations
cgacgaaaaacgcatatattgagtaatagacccaaggtggtgctccaaccgtgctttcagggtttaatatctccttcatgtttagcaagaaaggtgaacccagaatactaaaaacaataaattaccttattagacagccttagatggtaacaataacacaaagaagtaagaaacaggaatgatttaaaccctaatagtaagaggttcttcaagcaatttaccttgcaagaatgctggggaatgccaaaagatatgtggttgtgagaacaggttgcattcctgccgggttgatgttaaaaggtatgtacggctccacctctgttattggagaaccttctctgcccaaatggcaaaacatagcataaacacaaatatgagtaaaccacacgttgcatccaaatgtactttaaccgtaatctactcctagctatattggtaaaagtggcaattatacaacaatcttttcgataaaataatgatgctgagctacatatatcacctcgaagcagaagcaagtttaaaaccataatattgtagtttaatcttcctgcagccctcagtaacaacaacagcgaacatagttactacggtaaaaatgcccagcaagcctaacaagtaaggcaaccagttcgagaaacttcctgcaaaagagaagaacgcttcctttttttataaatcaattgagaagataggcgaatgatagttgcctccaggaaatgtggaagacatgcaggtctaatgtaaagactaaccataagtttgagaaatgtggagtaagaaaaaccaaaggtacctgagatttgattgagcatcttgtgtaaagtctctgtgtagcccgtcaatattcccacacaaataatcagagatgagccatgacctgtaaaaggcttagaaacaggttatgagcaagctccaccaattactccatatcagcatcactttaagctaccaatggttatagagatagagatatagagaatcaaataccaaatccagattctgatattgtatcacagagccacgtcattgtcattgcaccacagactagcagagatgatgtcatcatcacatgcttgaccctgaataagcatgcattattactttagcatcagttgtggcaaaatggatgatagaatttaaaagcaccattttgataccccgaacgtgaagaatcctaattaacttactgggcagtggctgcaaaaactgaatattgaagagaagtgtaagccaccactaatgcttccactatagcgaagaaaaacgatagccaccatctaataaaataagaccaaaaaggcgatttagtaactttgtttattgaagcaaaaaagtcacaagacaaacaaagtaattgtatgttaagaattcatctcacggcttgagaggtaagaaactaaacacacatataactcttgatcttctcgtgaccatctaagccttcctttcgcagtttcaccaaggatggaagaacgtgacaaagcacctggtgtttcatgagcactatatcatcaatcataatcttaatatataaagaacgcacagactcaggcaaacacatcaaatcgaggagagatcttaacctgcataattatggatgctattatttgtggactgagcccaagctggaagagcgaaagcttgatctctgctccaaactcacccagttcctctatcaaaaacataaaatgttaactacaaatacatagaaatgtcaaccaaacaagggactataagactcaaatgacatgagaacactcaccaacagaacccgagacaaagctaaggtaatcttgaggtattaatcttctgtcgaatccaggtaaaggtataaaatatccaacacggctaagtacaagcaaaacagccgttacaaacaacctccttcttatctcgctcttaaagaatctttctgctgcagtattgagtactgaacttatccgaacaaaatcaagaaacctatttctaaaagactttggcctatcatcctgtagtgtgttggagacagcagagttctgtgaattacgaatgtcctgtgaatctggcggaataatctccacatccaaagcatctgtatgcatctcctcgctactcatagaatcatctctgaacttatcggaataatttatcgaaaaactcttcctttctttcataagaagatgtcttctgttcatttgtatagaatgcccttgtctcgttcttgacatattcaaattcgtagtaaggcattttctgggttgagaacacagaaatgggtctcctgcaaaaacattatcaaggtcaaaacacatgcctcaacaattgtttctgttcataaagttggatactttgagagaatttccgggttaagagaactagtctaagagatagtatcagtgaaaaagttatcaactttgcaggaacagtgaaaaacccaggtcagtgcttttgaaatagggtttaatcaattcgaagcaacgaaactctaacgattgtatcctgaactagtctaggtaacaacaatctcttaaaatttcgattcccaagcacttaatttggggaaggaaaacttacgtttcgagaggaaagcataggagggatgcgaaagcgagattggtctaagaggaaaatggaagaagcaagcttgtgaggaattcatcgagaggatgaggagagaaaacgcggcgctgagctaaggaagaacagctccggcttcaccgagtgttactgttataacttataacttctcttaaatcttaaaccaaaaaaaaaaaaacttctcttaaatctttgtttttttcattaattaattcttttacttagcctctattatagttccgaaatgtatgattcatgcattttattgtagttctactatttgcccaattttatgcccaaagattagtgtatgaagatttgaggttacacatcaaagttcactagaattagatcactcatatttttgtaaaatgaaatgacaatttttttttgtaagaatccaaataattgatgatggtattagatgaatttttgttgtcaggggaagaatcacaatgctgttaagaccaaaatgccaatgtaaaaagttatatttttaattactgtgtggtttgagaaaaaaacaaatccaagtaatttctgacaaaaagaaccccaaaataatattagtctcctattgggcagattaccaactataatttttcaacatcatgctattgtagtattatcaatcacataaataaagaattagattcctataaaaacaaagattttaataaataatttagaaaaaaaatctattaatacaattcagttatacttctttttaatatatatatatatatatatttatttattcgntgatactaaatcaccatctgaattgagtacaaaataaatgtcatggttgatcatataaataaaaatactattgagttttaatgaaaatactaagatctaatataataagtgacaaaaaaatattatagatatttatgcgatataaaattgattactttctccaagaagtaaaggaaaaaagaaaaacaataatcttcctccaaaatcataatcatttccatttgttgagaggcatgttagattttttggtactaactttatgaaaatgataaatgtgatgtagtaagtgatacaagtctacactctattccagttatcgcaaacccaaccgatccagtctctttagattccctttctcctagatcagaccacaaccatttggccacttctgtcctaatttattctctcatcaaaacctctattttgcttctccctttccttacaagctgttcactatatcccctgcgatttgtgtttcccacaaaccctaattttgcaagaagaggggtttcttctaatttatataaatctcggttctttttgccatttcgttttctctgatcatggattctgaagaagacatgctcgatgcgcacgatatggagtctggagaggatgacttctacagcggtggaactgatgattgtaatgatagtgatgatggtgaacctgattatgggtttgttgaggaagatgctgatgattctgctatgatcgcctctcatcgctctcaggtgggtttttgtttttgtttcttaattcattttggtgttggttgttgaagctaattgcttttagaactcgtgcatgttttttttacttatctgatggcgaaatgttgaaactttggggcttttcatgataaagtggtttttatttgggaggtagagtctaattgaggctacaaagtttagcatggaatttctctctactcatttagttccatgtctactgtatctgtgaatattgactcattataactataatgttacttctttccagaaaaacttttgtgttctgagggaagaagatattcgcaggcatcagatggataatattgaacgagtttccgttgttctctcgataactgaggttgaagcgagtattctacttcgtcactttcactggtaaacgctatgtgtttcacattagtttcatttgcatatatataattccttgtttacctctctttagtttttctagaatgtatatccatggccatacttgtgtggttattatagcttcctgatgcaatgataaacatctcatttcaggagtgtcggtagagttcatgatgagtggtttgctgatgaagagagagttcggaagactgttggcatattggagagtcatgttgttccaccatctgatgacagtgaagtatgtcctttaaattgtagtatctgaagtggttttacatgtttctcgtctgacaattcatggtctcactaacacatgatcatatgtgcagcttacatgtggaatctgtttcgattcctaccctcctgagaaaatcgcttcagtttcttgtggccatcctttctgcactacatgctggacaggtcagttgtgtttttttcattagtatcctcaagactcttacatctttagttaaatcaaagaatcaaacccgcttcattttccttgtttttgtatgaggtaaggattagaccattggttgttactttngaattct

SEQ ID NO: 2558 - DNA, 217 bp, Arabidopsis thaliana landsberg
  unsure (1)..(217): unsure at all n locations
cgagaataaaacacccaagaaacagacgtgacctcggccgttactatatctcaacaaacgnaagctggtaaagaaacgaaaacccaaacgatccagagaggagaaacgagaaaccaacgtggggctgaagatacaaagaacaagcggggactggccaggacacaacttctgacacaaagcataccctcaccacaccaagaagtaccatcccccctaa

SEQ ID NO: 2559 - DNA, 537 bp, Arabidopsis thaliana landsberg
  unsure (1)..(537): unsure at all n locations
tgccgcattgagtcctttcttccgagagtnnnnnnnnnnnnnnnnnnnnnnnnnnnnnnnnnnnnnnnnnnnnnnnnnnnnnnnnnnnnnnnnnnnnnnnnnnnnnnnnnnnnnnnnnnnnnnnnnnnnnnnnnnnnnnnnnnnnnnnnnnnnnnnnnnnnnnnnnnnnnnnnnnnnnnnnnnnnnnnnnnnnnnnnnnnnnnnnnnnnnnnnnnnnnnnnnnnnnnnnnnnnnnnnnnnnnnnnnnnnnnnnnnnnnnnnnnnnnnnnnnnnnnnnnnnnnnnnnnnnnnnnnnnnnnnnnnnnnnnnnnnnnnnnnnnnnnnnnnnnnnnnnnnnnnnnnnnnnnnnnnnnnnnnnnnnnnnnnnnnnnnnnnnnnnnnnnnnnnnnnnnnnnnnnnnnnnnnnnnnnnnnnnnnnnnnnnnnnnnnnnnnnnnnnnnnnnnnnnnnnnnnnnnnnnnnnnnnnnnnnnnnnnatctttggcgctagaataaaggattcatccgcatcaccgtggctaggttctcatttctctat

SEQ ID NO: 2560 - DNA, 504 bp, Arabidopsis thaliana landsberg
  unsure (1)..(504): unsure at all n locations
acatgggggagncgttcgtttttgatttattcgggcgaaatcattaccaaacccgncggcagcaagcaggggaaattttatagggggtgctccagtccaccctactccttctagctctagagagctcataatatcttgcacaactaaggtaaaccttttcttgagttatttagcctttaaacgtgtcctgataccttctaagacttctggtataggatgtaatttaggacgtggtacatgatgtagttcagcagtttgtgaagtaagattgatatctgcatcaagaagactcctttacctttagtctttaccgacgtgatctcattgcaattttcttcgtgggaaagaccgtagcatttggcattttttcatcaacttcatcaacatgagttttagcttaagtatgttttaaaggttgtggcgtgaggaggttaatgtccctggcggtctgagtttatggtcgataaaacttttttcacctattgagccaaaaacatataatat

SEQ ID NO: 2561 - DNA, 444 bp, Arabidopsis thaliana landsberg
aggcatccccataatcgacaaaaatttacgcgcaagggatgattaccacgacgacagaaaagcctaaactgaaatatttgggacttatcgcaagtcatccacgataatgagggcttttgtatgacaagcccatatctagaaaataatgaatcagatgatatagactatatagtgcgctgatacagtcactacggataatgtggacattagtatcgcaagccaatttcttgaaaaaaatgaatcagattataatgctagggaatgtaaatgaaagtcattgaaaataagcaaacagagcgactctatttattaaggatgataacttgagacaggaaacaaatattggttaatcataagccggaaaaagaaagatgtggcacgacaagaaaaaacgagcacagtgggccgtgtggaaataattgctggacgagagagcgaaaccct

SEQ ID NO: 2562 - DNA, 570 bp, Arabidopsis thaliana landsberg
  unsure (1)..(570): unsure at all n locations
ttgaaaaaacacttacttatttgattacttattatggagaagttatatcgctgnccccttattaacttatggggaatatcttactcaaaaccttaccttcnnnnnnnnnnnnnnnnnnnnnnnnnnnnnnnnnnnnnnnnnnnnnnnnnnnnnnnnnnnnnnnnnnnnnnnnnnnnnnnnnnnnnnnnnnnnnnnnnnnnnnnnnnnnnnnnnnnnnnnnnnnnnnnnnnnnnnnnnnnnnnnnnnnnnnnnnnnnnnnnnnnnnnnnnnnnnnnnnnnnnnnnnnnnnnnnnnnnnnnnnnnnnnnnnnnnnnnnnnnnnnnnnnnnnnnnnnnnnnnnnnnnnnnnnnnnnnnnnnnnnnnnnnnnnnnnnnnnnnnnnnnnnnnnnnnnnnnnnnnnnnnnnnnnnnnnnnnnnnnnnnnnnnnnnnnnnnnnnnnnnnnnnnnnnnnnnnnnnnnnnnnnnnnnnnnnnnnnnnnnnnnnnnnnnnnnnnnnnnnnnnnnnnnnnnnnnnnnnnnnnnnnnnnnnnnnnnnnnnnnnnnnnnnnnnnnnnnnnnnnnnnnnnnnnn

SEQ ID NO: 2563 - DNA, 470 bp, Arabidopsis thaliana landsberg
tgattttccggggatgggttcgtgtctctatgcattttccgatgatgggttatgagaaaaagttttttctcttttttaatctttgctttgtgtaggtggatcttgagaaattgattttagttcaaagcttctgatggctaaaaaggagagacctagacctgagaagttgtctgtgtatctttatatacctaatattgctggtgggtctttatttctctttagcttttttttcttagcattaaagattgttgttgtgatgatgattttattgattgctttcagggtatatgagagttctcttgaactgtgttgcttttgctgtgtgtttctccaacaagccacttttctctgtcctttatttcttcaggtattgcaactttcttctttgatggtcattaaagattcttttatgttttgggtgatgggattaaccagtctttttttgatccatggggctggctttgcttttg

SEQ ID NO: 2564 - DNA, 453 bp, Arabidopsis thaliana landsberg
  unsure (1)..(453): unsure at all n locations
tggatttttggattaatatagaaagagaagatgagtttgtgttttttgtttcgaatttgtttgggaagcttcaactacacttgttgagcttggaatagctacaggaggaccaccgctaacctttcttataattttgagtaaattctctttggttggaagagaggcacactacttctgatcatgccttaagtcctccaacaatgctccatgctaaatttttcattgtaatcttgnnnnnnnnnnnnnnnnnnnnnnnnnnnnnnnnnnnnnnnnnnnnnnnnnnnnnnnnnnnnnnnnnnnnnnnnnnnnnnnnnnnnnnnnnnnnnnnnnnnnnnnnnnnnnnnnnnnnnnnnnnnnnnnnnnnnnnnnnnnnnnnnnnnnnnnnnnnnnnnnnnnnnnnnnnnnnnnnnnnnnnnnnnnnnnnnnnnnnnnnnnnnnnnnnnnnnnnaaaat

SEQ ID NO: 2565 - DNA, 571 bp, Arabidopsis thaliana landsberg
  unsure (1)..(571): unsure at all n locations
gttggcaaattaagcccatttacctaaaaaggtgaataatgttttgaattttaaatttagtattttaaccagaccgttgctgttccgcttcacgcacttaaaaagttaaaaaaaaatctttcatttcttcttcttatccagagatccaaagagagaaagagggaaagattggaactttgaatccaaaatcagttcatcagtctctcacaatgcctgtggtgagaacgagagcgaaatgttcgattcccgtcacaaaccctaatccaacagtcggaggaggaaactcaaacgtctcgatctacgagaaatgcagagaagacaggatcaaggagaaccttcagaggatgaagaatctcggaatcatggatctctctctcnnnnnnnnnnnnnnnnnnnnnnnnnnnnnnnnnnnnnnnnnnnnnnnnnnnnnnnnnnnnnnnnnnnnnnnntctcctattcagctttccgtctcctctagacgatcctcaaggtaatctcttcgttttcagtcactgacttttctcgattttgttcacattgcttcaatcttccaaaattaggggttttagag

SEQ ID NO: 2566 - DNA, 495 bp, Arabidopsis thaliana landsberg
  unsure (1)..(495): unsure at all n locations
aatcctttcttcctagtcttgctttatatttttcatcgtaccatatggtcttcacttcttctcgaattttcatttatgncaataatcaatcaattcccatgtatgattactcaaaatggattcaacttcactcttaattgtctctttccaataaggtgcatatgatgactcgattacagccttttatgtttgacatccatattcactcaaatatgtcataaagtccgttccaaaatcgttagctctttttgctcttttacttcttcttagttcattttcttgttcttgaatctttgaggcacattcattgtctcacatacatgtttagtacttgtttctctacattttttgtatggaaacacatcctcaaagagctaagcctcatttaattcaatgttcatatttaactntgcctattagattgatgaactctataggctatactattttccgaaggaccgatgttcacgcaatccaccgtttttggtcctataa

SEQ ID NO: 2567 - DNA, 5187 bp, Arabidopsis thaliana landsberg
  unsure (1)..(5187): unsure at all n locations
cttccgggttttcctcttcactccggtttccaaaccatcggattcctcccgaagagagtcttaagagcgaaaattctgaatctttggagacgaaaacgccatcttttgcgaggaggaccatgcattggcttgcagggagacaaaacaagattgttcagccttctacatccaatgtctaggtttttattttcttttgcttattaaatttttatttttttctttacaattgtgtttgaaaattttgtgtgttttcattagagagaaagtagatgaatagtgggagattaattagaaatgtagggttcgtacttcttaggcccattgaaaatttggtcggtctgcaaacattttagccattgttctaatctccttatttgagcagtttaaacaaagttaatgtatcgcaatcatgttaattaccagagtctttatattatgaatttgtgactttgtcttgtaagaatttggatggatcctttcattctaattcatcatagttacattaatcacaaaaagtcaacaataatacgcaatgtagtttttgttttgttttttcgcacgagaacaatacaaattagatacttaacgcatcctagaattcgttccacaaattataattcatttctaccttacgcagatcttaataaaaattctgtaaattagaacttgtttttttaccttacgcagattagcattcgccttatgcttaacgtaacaattactaaaattttacatagatttttcttaactcgtatatcttaatatatgttttctgtaaattagaacttgttttttactttatgcatattagtattcgtctttgtataagtgttatattgcgtattatttttaacttcataaaattatttcataaaattaatttgcatttttggaaatggatggtaaaatcgaaaaaaattagcgagttgaagggttttcttgcacaaaatccttgaataaaatatctaatctaataaaatcttaaatgttactgaaaataaaaattaaatgttacaaatgagtgtgctgaaaacctccatagtttgtagtttatggagggcttatgtgtatgaaaatcaatcgaaaacacattgatgaggctctaatgtataaatagtataacctctgatatggactagaaagaactaaggaccaagtttggttcaactcggttcaggtattccggttttccattatttcggttaagggctaaggtaacaaaattaaccaaactaaaattcgggtcggagaataagggactagtaacttccatcttgccgtgaaacaagtacagtatgattaatcaacgcatgtatggtttaaaacatattccgataacgtaaaaccgatatatgaccagattccacgaagagacttgcattcgttgactttgtttcataaaagaaagcatccaaaatgttactatttactataatataaaaaagacaggttcaacgttacgacactaattgttgaacgttaggacaccatgcgtcgagcacgttgatatccaatatcaaaaatctttaaatcctccactgaaacttgagaaacgattataaaaaataaaccacatgaaaacaaaaccagatgtgaaaagttgatgaaaactagggaggtcgtgtttctccgcttcatttgcaatgaagataccatcagcctcatgcaaaactccggtttgatttatctattctcccggccggttcgaattggttttctttgtaaaccttttcttatatatatggttgtaaaagtcgataaacaaacaagtcttactcacttgttcagtatttacactatgactcgaaagcttatacgttaaattcacttattttttacgtatatttttctcaatatcgttaaatattgatttggtatgaatgaatttaaaaggaaaagaaaaaaaactatgactcgttggctcacttcactccacaccaaacttcaaagtaaacggcttggatccaaaccatgcttcaaataatttcagttttaaccgatcttaccaagaatgatatgatcccacgacgtgccctgccgttgacattttcctaaaaccccgaaaaaaaaaacagaacacaaaaagttattataaagaagaagaatcaaagatcatcaatcacctattgttgatcaaaatggaagctcaaaatatctttctctatcttataatcgtctttctatctctacacttcgtgtttacaactctgaaaggacggctaagccccgcgaatacacggcggcttatccgccttctccatatcccgatcaaatctccggtcgccgcagctattttcgcaagaaaagacacccgtgagtttcttgattcatcaatcaaattagtaaacgaagaagacgattttggtttcaatttcgatttcaaaccgtacatgatcagcaaagcagagacaataaacagagcattagacgaagccattccactcattgagcctctcaacatccacaaggcaatgcgttacgcgattctcgcaggcggaaaacgtgtcaggccaatactctgcctagccgcttgcgagctagtcggcggggaagagcgtttagcgattcaagcggcttgtgcagttgaaatgattcacacaatgtcactcatcaaagacgatcttccttgtatggacaacgacgatctccgacgagggaaaccaacaacacataaagtcttcggagaaagcgtagccatactctccggcggcgcacttttagctctagctttcgagcatttgacggaagctgacgtgtcatccaagaaaatggttcgagccgttaaagaattggctaagtctattggaacgaaaggactcgtagcgggacaggcgaaggatttaagcagtgaagggttggaacaaaacgatgtcggattagaggatcttgaatatattcacgttcataaaaccggttcgttgcttgaagcatctgcggttatcggagcggttataggcggtggaacagagaaagagatagagaaagtgagaaactttgcgaggtgtatcggattgttgtttcaggtggttgatgatatcttggatgagaccaagtcgtcggaggaattgggaaaaaccgccggaaaagataaggtcgccggaaagctgacgtatccaaaagtgattggtgttgagaaatctaaggagtttgtggagaagttgaagagagatgcgagagaacatcttcaagggtttgattctgacaaagtcaaacctttgatagctcttactaacttcattgccaacagaaaccactgaaaattgttgtttgctaaacaagttacgttaagatgtgattttgtcaaaatatatagtaacagtggaatatgaatgtgaccaacacaaactatagaagtttctttattgcgagcttgtagtttccattgagcttagtagccaaaatgatttcgtgtttgatatgtcctttatttttcttgaaactttgtaatgaaactatacggagtttctaatttcatctttcacactattaatacactgatggacagtccgcggagaatgagaccaagaaagctattccctgtttaatatcaaagtttgtataggtgaataaagaaaccaaagagaaaaacattacacttttagtcatggctcttacagcatttggcaagtgtgtagcaatccatgatggttgattgtttgaaagatcccaaagtttcacactttcatcaccagatcctgtagccaaaagttgcacatgacggagaataatgacttaaaatgctatgaatatgcacatacactctgttttgctttccatgtatgtactcacattgggggtatgatatggatgagacttcaccatcatggcatatgaatgtgaccaacacaaactatagaagtttctttattgagagcttgtagtttccattgtgcttagtagccaaaatgatttcgtgtttgatatgtcctttatttttgttgaaggataccaactttgtaatgaaactaaacggagaattgatctgcaacaggattgatctgcaacaggattgatctgcgattcgattccggattctcttattttgcaagtcagcaaactatattctccaaaggaaatttggaaagcaatcaaaacacgtcacatggggtctgaacatgttaaataagcaagaatccaaactctaatgtcagagtttgaaagaatcaagatgagagacacggacacaatcgatagctttgcggaaaagctatcagaggtggcatccaagaagacactcttggaaaaacaattgaagatcagaaactcttgaagaagtttctcaacaatttaccgaaaagcaaatacattcaaatcatatcgtctcttgaacaagttgtagacctaaacgcaacaggatttgaatgaagagcgtattcttaaggaggagaatcacggagaaatacaaagcaagctgttgtacgcaaactcaaaacaatagagctttgtaccttcacaagggagagcttaggaaacaaaacgttctttctgaagagattgaaactgagtatgatgataatgatgatgagccaaaacagagaattaggaggaactgaagaggaaaacccctagggtgtttgtctcatatgtaacgcccgaccgctcctactagtgggtcccacgtcctcttttgggcccatggacccacccatgttcgaaggagggtacgccacgtccgggaggctttaaagacttgttacaaccttacaaatcaccacatgatctttacccatgatttgatatcactcgcatggttccgacaatcacttttcggaatgccacccatcctgaaactacttcagcccaaacacttttaactgtagagtcctctcaagacctttaaccgaaaagataagtgcactttggtggcataggtggccaaatcaattcttttaaacctctttgcatgcaccatcatattcctaaaattagggtgttacagaaatattattacttgaattttacaattattatcatcaatcgaattatttcaacattagaaaaatacataattgctaaatataaaaaaataaaataagaaacacccacacaatcatccaactatattcagttcatattatataagtttaatatttttataaaaaccgaaatataacttataaacaaaaggaaacttacatagcagaacacaaaaaaaaaacctcaacangctggaaccatatatttcat

SEQ ID NO: 2568 - DNA, 322 bp, Arabidopsis thaliana landsberg
gcaggattaaccagctcttccaagtggattgacctattcttcatatatgcctttaaatctcggtattattatgaccgctcgagctgaagtttctgatcgggctctacattaacaatcgaaagcttatttggatgagcatatatggcaaacatttaccgagaatcaagctaacaactaatcattatgctggttttcgattttctgattgaatatatgcttttatgtcatgtatcttgaaaatttaagcatttgcaataattattcagttgtatgaaataaaacatgcctaattgttatttcaataataataaaaaatatactt

SEQ ID NO: 2569 - DNA, 601 bp, Arabidopsis thaliana landsberg
  unsure (1)..(601): unsure at all n locations
acggtttctccggatgcacccagaacatgttccagctttgcgtttgnggatcccaattgtacatttttagcnggccgnaggcgccgaccangatccgcgtcagccgcggctcggaaacggagaccaacggngggacgangnaccaaaacgacgccgngggagnngaagggnnaacgaaacggaaccgggagangnaaggaaaggncatnaccggaacgccgacgaaggctnccccggaccaaannccggaggaccaanacggngnggnncctttgtaaacaagctggaactcgttgaagcttggactcagtctcagggagtagaatcccggcgaaggatcgaatagagtccgccacgaagtcatagccgttacaccggtgacattcatccccggaagccacgtgtcagtcggattatcaaagctctgccaaaccggagaaccgtcgtcgttgatcaaaatcagattcccggtttcagagaaccggaaatcggttccgggttgtttgttatccgtctgccaaacgacgccgtcacggaggttactgacgattaggtattcggtggaggtgagctcgagagtggaagagtcatgatccgaaac

SEQ ID NO: 2570 - DNA, 268 bp, Arabidopsis thaliana landsberg
caaacctacaaacaaatttaaactaatcaaaccactaccaagaacttaatctaaccaaaatcatacagttcttatcagttaaatcaaaccacaaacaataactaaatcttacctaatcgtacagttcatatcctaatgacactaattcatggcaaacttacaaaaacgttttaggatccaatgtggaagagatgatagtggtatattcctcaaggtcatgcgtcctaagaagctcatctaaagtagcgagtatatttgccgaaaaaat

SEQ ID NO: 2571 - DNA, 577 bp, Arabidopsis thaliana landsberg
aggcggttggagaagaaaaataaaataaggcatatgcctttgaggttgcataattgaaaaaggaaaatttaagtgtaaatccaaaaagaaaaggaaattattaatataggccatatcttttaaaatttcgtatgtataccaacaaaagtaaaaattatccttatatttatctaagggaaatttgcaaatataaccaacaaaaattttatatttgcaaaaattacacttcaaacaatcaaaaccgatatttgctgaactttatgtaatattgccaaagtaaaccatgtgtgtaacacacgctctgttgcttcttcattctgagttaaccatcgataacttctatgtctgcctttgtaaaaattcaaatactggtttttattcaaagaagttacaatacccaaatctgaagaatctggaactgaaaaagagaaacccgggaaagttttgaagagggatatagaccggtgcagtacgagtggcgagtctagggtttaagcgaattgaacttgtgggtttcgcattgtgggtgataaaggctttcgattcgcggaattcaaaacacaaagcttctacaatt

SEQ ID NO: 2572 - DNA, 547 bp, Arabidopsis thaliana landsberg
gaccacatttaaacacatcaccggaccggaaaaacaccagtttaaatttaaataaaaaatgtatttgtaaaagtctggtattacaagaaaatatggtcgatcgttccatgtttaattgtgtttcttgacactttttagttcttataaaacacctttactacataacttgataagttggatgagaataaagaattataatagattctcataaaaataactttataagatatattctcttatatatatatatatattatgagatttcctaatctaaaataaaaataaatgtaaataatatatataaatattactaaaactaatatatgttaatattttaaatctttctacaatctttatgatttttatattgttcgacgatcatctcaaccattgactctcgatctccaactacagataaagtaaaattttaccaaagaaaagtctagtgactcatcataccaataaaaaacacacaacacctagttttaccaaaatgagactagaaatagtgctatagtagttatgggacgatggagtgatggttttg

SEQ ID NO: 2573 - DNA, 1385 bp, Arabidopsis thaliana landsberg
acgctcttcacagcagtatccgctgaaccaaccacaaatcaaccccatcgtcatatttttgtttaaaactacagaaccaggttacacaattccaaaacgtagtagtatcgtatatgtcaaatccacagaccaaacccattcaaaatcaaagacaagcacacaataaatcatcaaatagcaatctggatctgtaaattacctgcagcggagccgatttgacgagagaatatggaggaatatgcgggaatggaggatgcacgagtcgagagagaaaggtgagtggactctacgacggcgtgcctgcacgacggagccgcgcaggacccgacggcggagatggatttaagatgcgatgaaacgattctcctccacataatggtctcgattcttcgggaaaattaggtttgtcgtttccgatctcagatgattctcagtctccgactacctccttcaaacggaaatgaattgaataaattgaagattgaacaagacttcgactttttggcgacggcctgttgggcctggatcatgcgacttgttgacccattatctaatttgaaacaaaaatcaaaatcaatatgtaacaagattaaagtaaaaacttctgtcgatgattaaataaatttttgtaggatatatattttcttaaaaattaattaacgcatatgatctaatactatctcttattagattttattggctcgtaaagttgagttaagacttctcagaagaaaaaatgaaactccgttatatataatatatgttgaaacggtgattaactagttaataaattttgtgggactagttcgtaaattacatttttattatgtaacatgaattacaattatccattaatgtagtatattcaaccgaatgagtcaacgaccccaactttcatcctcggagtttcccaaccgctaccagcctaacatcatcgatcaccggaccacatagcgagccagagtgatcgcttttcatgtggtaaaacgtgctcaagaaagtgacacgtgtcctggccgacactgccttgaacacaagcctcccacgtctaaacccgccttttcctttagaagcgtagtccaccatgaccttgccctgtccagcgaacgcttccacaatcattggtccctcacaaccgtctctggcgtctcccacgttgaacgtgagggcgtagaatttgttcagtgacgtcctcactatctgagaaatggcgctctctttgcctccaacaagctcgatggctcggtgtccttcggggacagcgaagtgtgctttgtctacgtacttaacggctttgagagactcgatcatccaaccgggcaatgggctgttatcgtcgtcgatgaacggtgggatcagtctcccattttccgtgggaacacgta

SEQ ID NO: 2574 - DNA, 533 bp, Arabidopsis thaliana landsberg
  unsure (1)..(533): unsure at all n locations
tatttctcttataagaaattattaattattacaatctgacaaagaataatatggagcttaaatatatgttaaattttaatactgatctaataggactatacataaattcatgtctatttggacagctctgatcacctcccttaagtacactgatcatctcccttaagacactgatcaatgtcacaatgtgtcttttcgccatctaccagactaccactattattttcttttatttacattacggctaataacttaatatannnnnnnnnnnnnnnnnnnnnnnnnnnnnnnnnnnnnnnnnnnnnnnaaaagatagacatacttgggcgatttgcacaagaaaaaaaaagaagaagacatacttgcgcgatagaaagatccaagtccttcataattcctatctctgcacctgaagtataaccaagctgccaaacaaaaaaacaaaacaaaaaaaaaacgttttaatttgtttttacttgttaaaccttgagcctccctgaataaaatacttgtttcttaaggtgaaatataaa

SEQ ID NO: 2575 - DNA, 520 bp, Arabidopsis thaliana landsberg
cggcgaaaaattttactcctgaaatttgtgatgaaacttgcaagaaaatctgctacaatcaactattcggtggtgaaaaatttattgtacctcctcctaaaggaagctcccacttctgtagatggttgcctcagttttgttaattccgaattacgaaaaaatttagatgttttattttttgcatgactattttttttgtaaaactttatgcatgactaagttattaatttgtatctacttaattcatcgttcttattaaacaagcgtttatgtgaacaaaaacatttaccctaaaaaaaaatttcgatttaactaaactaggtcaactcaaatatatacataaccattggttattagatcttttgagtcttcttcaaagacttaataaccatttgtcgcgataacatcgatacatcaagaataaaaatgtgacttgaaatcatcatcaaacaacttttacaaaacttattaacaaacaaaacttttatttaaaaaaaaaaaaaaaggacacctgcaattc

SEQ ID NO: 2576 - DNA, 2347 bp, Arabidopsis thaliana landsberg
tgaacttgaggaatatcttttggcttgcaccattacctagcaactcttctccagattgggttgctccaggtataatatctgttttcatctctgagagtaatagaaaagatctaaacacttcatagtttcaagatgatcttgtctttcattagtatcgtggaaaacaattgtagtgttacgtttgacatcttcctttcctttgattgatctgtaggtgtacttgtggttcttgatgcgcatccggatggaatcatataccgagatctcatccctgactatgttaagtttgtaagaacaatatacgaaggtttgaacaactctataccttctctcatctcactcatcaatttgcttcattgtagatcacatttgattacacatacatacactcaaagtctcttaaagatttatgctctattgaaactttatgtcttatccttctccaccagatgatttgggaacaaccgcagttgatgtcaattacttgaatgtcggagctcacgaacctgactatcagcttttcatgtgctgaaacaaaccagttacagattcacaattacacagttgtgtgtaattgaaactttgattaagatttagttactggagctggtcgaggttcaataacgttcgagttggttgataatttagagaggtctgaagtattgtcggttacaaaatagctttaacaatcacattgctgaggctttaagcttaattgtaaaagtttaggattagatttgacatatcacttggctttgtttgattcacacagttcgccttagtgatgtaaattaattaatttcgagagcatcaataacatattaatgattagttattttccaccaggtaaccattgccaacggctacaaatacactttggtgtagacaaagtatacgaaaaattaaaacaaaaagctccgatgccgggaatcgaacccgggtctcctgggtgaaagccagatatcctaaccgctggacgacatcggatatgttattggaactgttaaagaactaaatatgtattaaactttaatatgaatgataaagatttccttaaataatctggtaataaaaaaaaagcaaaaaaaaaaaaagagagcacaatttgaaaggaaagcccaataatagaggcccatggtgaaagtcttaggccccgggtggtaatctaatcacgtttgtagtgataatctaatcacgtttgtttttaatgataatgcgttgtccccatccttgttcttaattcaattgtcaatcacctccattaattttgtgttcacctcggttagaaagctttgttttaatttgttaagacgatgctgatatatcccgaatcatgattaaattaaaatccttaagttaaagtcattacaaaaatcacttttgaatattgatcagatattggtcccatgcccaaaacgatggtgcaaaatgtctaaagagtgataagctagcaattactagatatatactaaaagaaatagcttcagttccaagcatgagcactagtcatagttgaggctcacaaatttcttgcaaatcatcttcgagttttccacgtccagagatggtctccttcctcctgatacacacacaaacactaagtatcttccatcgtctaaaaataaacaaaagcagacgtaattactcatttcccccaccttcttatttataatcaagttgaacaattttcaaatcatcaaagacacgatcatttatcaaatattgatatatgcaatgacaaaagatccaaaagtattaacttcaatgacattcaatttttgctatttttttatttttttgtacgaatagtcttcagatctttttcagttgatgtcaatccaaactttaatcatgagtctatcacaatgttgttgaagtacataaaacaaggaattgatttatttataatcgagttaggaaaattttaaaccacaaacataacatagttacacagaattgtatcaaaatatcattattgttgttatatgtattcatttagtgaaaaaatattaaaatcttataaataatcagctttatagacaaaatatataaattgatatttcaaatcacaaatgaatctaaccataaaaattatcactacatattatggatctaattttattaataatacaaaaataaacaaatagtaaaataaattagcataaagaacaatcaatgtaatttttttttaacaatttttaaaacaaactcacgcgtagcgtgggtagtcatctagtacaaatataattttacctgatttcataatcgcatattgctgactttggacgtcttcagtgatcactttcatcctcctgctttttcgcctcagatctagccgaatgatact

SEQ ID NO: 2577 - DNA, 461 bp, Arabidopsis thaliana landsberg
ctgtatgcatgccaatatcacattatctccattaaaagcagcactaaacgttctcttttttttttttgttattagatttgaactgcagcgaacagagaccgaagatatatatatatatacaataaacagagttttatcaaaatcagagatcatagatatgttatcgagaaaggtcattaaaaagatatatgcagattttgagaatgaaggttatggtactgtcgttaggcaaggcatcaccaagtaagttttcttctttttttctttctcaattttctcaggaaaaatccaatgacttcaccttcaagtttcatataatttttcttgtggggttacttcaggagtgaccatgagttattggacccgttcgtctcgctagttgaattttcccgtgaaatatttccggaatgtgtaaaataaaatattttgattgtgataattacttgggataatctaagcag

SEQ ID NO: 2578 - DNA, 635 bp, Arabidopsis thaliana landsberg
  unsure (1)..(635): unsure at all n locations
tgttaaaggaactatatcagtgtgggggcagggctttgaagtcccatatagatgctcaagcctgcccaatgtgacacagttcattcctgnnnnnnnnnnnnnnnnnnnnnnnnnnnnnnnnnnnnnnnnnnnnnnnnnnnnnnnnngctgccttgcttcccagtatggtgataatggactgaacctctgnnnnnnnnnnnnnnnnnnnnnnacatattttcctttataagacttaccttagtcatggtgtcccttcacagcaatgaaaccctaactaagacagaaagaaagattggatgtttgtgtacacttgtaatatagcagcatttgagaggctgaggcaggaggattgctgtgagttcaagtccagcttaggttacatagtgagatccatttcaaaactgaaagaaaaaagagaaagtaaaaaaatatcactgctaattgttcttcatgaaggtaccttgctctatagcagacatctttaaagcaggtcccacagctcataggtgtttgggaaaacacacaatgattccctgttaaacctagcttgtgaaacttagctttgagccaaatcaagtaccgatcattaacatagaatccctcactacctttaatcatgtaattttctttatgaa

SEQ ID NO: 2579 - DNA, 2238 bp, Arabidopsis thaliana landsberg
aacgaaatagaggatatatgtagtagtataatattatatatttttacttaagactttttcatatagaaagtgaaggacttataaattcacctaactataatataccaaagcaacaacaacaaaaattaaacattgattttctaattgaaaaaaaaaacaaaatatcatttattttgaaaccaaacagaacggtatatataccacttgttttataaaaatgactattactttctaaatacattgaatttaatttactgttagacacagccaaaaaaaaaaagttacaacttgaaagaaaaaaaaatcgactagtcaggcacatgtcaaattggtaccactaaaataatgggtcatactttgaccagttgattttttcctcgagaattaaaaaaactagtttaataattggtcaacttcatcctcattcttgattcatattaaaaaatattatataatattttgactttcactaaacttcaacgtataaatagtctttgtatcttcatattcaaacataaacaacactcaaaagtctcttcttcttcttcttcacatcgatcatcatacaacaacaaaaaatggattacagagaatccaccggtgagagtcagtcaaagtacaaaggaatccgtcgtcggaaatggggcaaatgggtatcagagattagagttccgggaactcgtgaccgtctctggttaggttcattctcaacagcagaaggcgccgccgtagcacacgactttgctttcttctgtttacaccaacctgattctttagaatctctcaatttccctcatttgcttaatccttcactcgtttccagaacttctccgagatctatccagcaagctgcttctaacgccggcatggccattgacgccggaatcgtccacagtaccagcgtgaactctggatgcggcgatacgacgacgtattacgagaatggagctgatcaagtggagccgttgaatatttcagtgtatgattatctgggcggccacgatcacgtttgatttatctggacggtcatgatcacgtttgatcttcttttgagtaagattttgtaccataattaaaacaggtgtggtacttaatattactcaaaacaagatttggtaccacagagaaacaatcaaatggttgtgaatatacattataaggttttgattaatgtttgtttcactgatttagtgaagtttggtccattgtatacgaatctattaaagaagcctagcgcgagatcatgtttcgtgattgaagattgagatttttaagtattcgtaatatttttgtaaaatacaaatatgtttctgatcagctattattcgatacgaaatacatgggcgaaagcaggcgtcataattgcgatgctttcgcccagtgaaagactccgacaaatctacaagagttcctccaagtaccttatagcttaagtcactgatttctctctcaagtgtcatttgtaaagtctctgtttattgaatgtgtctcatttccaatcaagattgaccaccaaattgcttctggagatccgtgaaggatacggtggctgaacctcttcgtttggcctgcgggtgagacgaatgttctctccatcctgtcatgtaaatcacctacaaaggaatgccaaacgatatatactttaggcctcaaatgttgtcaaattcacttgtagtatttagcataaaattgttttaatcatggattgtagcaaaacatcttgaataatgaagctaggttatgggtttttttcactgttgagttagttctgaaattttatggacagacctgaaaagtagcgggtatagtgccgtcctctgtggcaaacatggagtcatatatggctgccgtggcaagagcagtttcacgattcaaaatcttgtttctctcgagaagagcattggtttcacccatcgcacgaagatgctctataagatccatcgctgagtagaaagatataaacgagaaggcaaatcagaaataattcttggaagatacacgttgttgcaaacgatgaagtaggaaaaaagtggaacagtttaccactcttgtatttaactacatattcatcaacatcaacaccagaaagactaaaacccgccctggtcaacagattccctgcgtccctaacctgaaaaagaaaagagaagccatgttctttcacctcagtactagaaatcaacttgatcatgctaagatattcacacacacctgtgccaaaggtgatagccgaggcac

SEQ ID NO: 2580 - DNA, 382 bp, Arabidopsis thaliana landsberg
gaggctgaaaaagaaaccagatcgcacctggcactgtcctagagtgtgctgtcacgcgccgacgtcatactatggcgaagacaccgacgtcgacgataccccgatgtcattggcttactacggtcaataatctgaactaggtaagtcaagaacggatgatcctagatacggaccgagctcgctacagaccctgaccctgtcgtatctgtactgagtgagttctgatagggcacggccagagactgctcctttttgagcatatagaaatcggaaaacgctgttagctgtctggacgagaaaaaacatcgttctgttagagaatgtgggtgcgatagtgtcttattaagaggccaggtgacaactatacaaggagcatccatgc

SEQ ID NO: 2581 - DNA, 758 bp, Arabidopsis thaliana landsberg
agaatgtcttctatctatctttggagtatcccgcattctcctatcttccaattgcttctgaatgatatatgctccgtggaagtcacctcaaagacaagctccgtggaagtcacctcctctacttcaagttcaaatgtgtatatatgctctgttaaaactggatatataaattgatagcgtggtgtacactgaactttgagatcattctgttcgtccctgatgacaatgtcaacgctcatcgatttccgatcatatctcatttcttcattacccttaacaagcatgatacaagccttaaatctcaaggttgtacgaagagacgactccttcaacttgattttcaaggaatccccagaagtagctctatgattgaagcatggaggcacttgtgtcccgggtaacatcgcacatttacgagttgatgtgtgcatgatgagatctctggcttcttgattcagtttgaagcagttggggaaatagagactaatctctggattgttaaagcaacagtccagtctctcgagggacttacaattatctgcatatatgtaagcaagggaatttgaaagttgggggagtgataccagattattgcagttgttgagtctaagatcacgtaaacgagacattctcttgacccttggaggaacttcttgtatatcttcacttaccaaaagtaggtcggtgatgatgtcaagagcataccggaattccttaaggctttcaaagtatgacatttcatatacagcaagacgaga

SEQ ID NO: 2582 - DNA, 518 bp, Arabidopsis thaliana landsberg
  unsure (1)..(518): unsure at all n locations
ataaaaatgagtgcagcagctacaatgcctatgccccgagaagcgtctaattacgatgagatctctatgcaacagagcatgctcttctctgatagtctcaaggtagattctaaagtatcaagttgaataatcttaatggattttgtgatcattgctaaagccttaaatcttctgtttacatgttctgcaaatagtttagtaaacatctttgttatacaggatctgaagaatctgagaacacagttgtattcagcagctgagtatttcgaactatcctacacaaacgatgaacaaaaacagatgtgagtgagtttattcctctccctaattgtgattgttctcttttcttggagttttgtaagtttttacttgtgtatgtagagtcgtggagnnnnnnnnnnnnnnnnnnnnnnnnnnnnnnntgaatacagttgaccatttggggtctgttacatataaagtaaatgactttgtagatgaaaaagtcgatgaagtagcaggaacccgactgcgagtat

SEQ ID NO: 2583 - DNA, 496 bp, Arabidopsis thaliana landsberg
  unsure (1)..(496): unsure at all n locations
nnnnnnnnnnnnnnnnnnnnnnnnnnnnnnnnnnnnnnnnnnnnnnnnnnnnnnnnnnnnnnnnnnnnnnnnnnnnnnnnnnnnnnnnnnnnnnnnnnnnnnnnnnnnnnnnnnnnnnnnnnnnnnnnnnnnnnnnnnnnnnnnnnnnnnnnnnnnnnnnnnnnnnnnnnnnnnnnnnnnnnnnnnnnnnnnnnnnnnnnnnnnnnnnnnnnnnnnnnnnnnnnnnnnnnnnnnnnnnnnnnnnnnnnnnnnnnnnnnnnnnnnnnnnnnnnnnnnnnnnnnnnnnnnnnnnnnnnnnnnnnnnnnnnnnnnnnnnnnnttatccgtttggctgtggtggtaaacgactggtttaaagatttacagatctactactttcagtacactgatcacttaatagatacatggatctattactaactgtgactaatatactaatatcgcattagatctgattaataactagtaatcttgaatattggcgtgtatgattaaa

SEQ ID NO: 2584 - DNA, 515 bp, Arabidopsis thaliana landsberg
cttattagtggatctgattaaatcaagattctccttaaaaacagagaatcttaacttcatctccttcacactttgatacttcttcccataccttcaaaaaccccaaaatgtaaattttcacagttcaaaacaagtcaactgacaaatacagattgagaatttacctgtgagtgaagcgagaaaaggatagaacatgacgggactgtcctaggatctggacgacggtgtcttcaagctcatggagattgtcggagaccattttgattggattagattcatagaatccgatctgtttactcgtcgccgccgcactgagaattaatatgattgaggaagatcggattagtttcacagacatggcttgtctctggttctttactcttacaaaagcttcgtggtcatgaagtgacaagaagaagaagatgccagtttacacgtggtgagcttgtattgggtaacattttggctttaataattggattactgacgtgcattgtgacgtttacatttataac

SEQ ID NO: 2585 - DNA, 553 bp, Arabidopsis thaliana landsberg
aaaaccctttgcaggtgtagaccagtgttacactgttgaacaattttgcaattcttacgctgctacattttctcctgttgcggacggtacagcttggccggaagattgcagagttccaacactgtttcctcctagtcagcagcttagtcctaacacataactagtaagaagaagagctggaagttagatggatttgtgtcaaaccaaaccgagcattttggttgattatactagtgactatgtagcatcttttgactttaggaaagtaggataagtcaggttccggttatataacggagacgttatgtttatgcttgttcataagcactttttggtgatcccctaaaaaccgatatgaaaactaagctaaactggattagaaatgtgacgccttcttcttcttcttctttacgatctctttcccaatcttattgtagctttcttttactcttactctcgcatccatgcctctctcgtaatatacaaatagtatgtgtatgtgtgcttatagcatggataatcaagcttcttatctgcaaaggctaatgtggac

SEQ ID NO: 2586 - DNA, 556 bp, Arabidopsis thaliana landsberg
ggagcttgtggaaatcacgactgttgaaacaccgatcttgcggccttgtgcttcaatatcttcatcttctttctcgaggctacagacagaaacagcagactcactctcaaggtcatcctcattgccaatgagaagagaatgttaagatagaaatatgtttagttgttccattttcaatctttctttctcatctcctaaattcagggttataagttatatgaatttcttttactatatatcataggtacttatagcatagtaaatagatattacaaaatggttcacatatatcctttggtcattgttaaagatggctacatattttgtttatactcgttggtcaccaactacttatttgtctcttgaaccataacttaagtacttccatcaagtactttgtccaaaaaaaaaaaagtacttccatcaactttatcaattcgtcatatgttttatactaacttccatctccagaataacccttagaaaactggcaatgggcctgcgacatacggctcttgaaattgtttttagctgtatgagagctctacatcgtaat

SEQ ID NO: 2587 - DNA, 567 bp, Arabidopsis thaliana landsberg
  unsure (1)..(567): unsure at all n locations
ctgagacccatattgaccaaaagattcaacctttaaaacacagctcacattcagacagagaagcaaaaacagtttcttatttgatacacataaagacaactgacgaaagatttaacctttccaaacaaagttaacaagattcaaaccttttcggcaagacccattgtcatataacgacaagattcaacctttaagacaacacccatttgttacagaaaacaaaaagtctcaaactttccaaactattacaagaaatcgccaaaattagaaaaacagagttttgaacattgttaccaagttctctgaagaaacatcaacactttgaagcaccatgaagaagcttttgttattcctttcttctttgcaccgaagatatccagggttcgtagtagccatcgctttcgttggaaatttctttctctcgtctctctctcacactctcttcttctctacttatctctctgatatgaatatgcaccaatctctctacttattattttctaacaaatgattcagtcaaaagtggtcacaagtgataaactngtcctctcagacagaacttaagac

SEQ ID NO: 2588 - DNA, 610 bp, Arabidopsis thaliana landsberg
  unsure (1)..(610): unsure at all n locations
ggaaattagagtctttgccacttgataggcttgtgctctttgtctgaacaaaaagattcatcacttggaatctactatgtagatatttgcactatgggctaacagtccaaggaagtatggaggtctgagctactcaacgaatgaagtcggtacagttcttgctatnnnnnnnnnnnnnnnnnnnnnnnnnnnnnnnnnnttgtgtttttagtgatacagaacatcgtcgatcttgatgtctagtgttttagtgataagaacttgtgaaaatgatgattagagtctgctttgatttgaatcagcatgagagttaaccaatcataaataagcaaaaattttactaatgaaattgaaactgttattagttattactcatcaacaattctgctttaggtctcggcctattctcttttcaggtatttgtttatcctttggctgagaaactgctaggacctgttctggtcacccgatatgctggggtcagttgatttctctttattgcttctctgcagattatagtgcacttgattgcaacaagatagagatcattcttctgacaagttctttcgtttcaggcactgatgatacctatacaaatgagttatccatt

SEQ ID NO: 2589 - DNA, 571 bp, Arabidopsis thaliana landsberg
  unsure (1)..(571): unsure at all n locations
caagttcgtatctagaggtacatatcattgtacgcaagacattacttcaacgagtgaaactttcagatgctatttttgtggaaacaatggtcatataagaatttattatgataggtactgggnnnnnnnnnnnnnnnnnnnnnnnnnnnnnnnnnnnnnnnnnnnnnnnnnnaaaatcagatataagttaagaaagatgatttatactcatctatgataggaagatctttaggaagtagagcatgactaggtttcagatgcaacatggctctagtcactaaagaacgtgaaagaaccggtccttggtattttgacagtggatgttctcgtcatatgacaagaacgagagactatctagaagacatcaaagagataaagggaggaaaagtgacttttggtgatggaggacgtggagatattcaaggcaaaggaaaaacaagcgaaatagtcccctcaccttatgaatgtctatctagttcatggtttaaaggcaaatctgataagtgtaagtcagttgtgtgatgaagtacttgaagttactttcactaggactgattgcaggcgttcaatg

SEQ ID NO: 2590 - DNA, 277 bp, Arabidopsis thaliana landsberg
  unsure (1)..(277): unsure at all n locations
ctcattttataaacaagcgcacggagatgtacnnnnnnnnnnnnnnnnnnnnncgacacttggtagataaccaaggctttgaccttgaagaaaaataagactaaggtgccaaatagtaaagaactcggttcttttgcttttattggacgtaagtgtttcacatttgaaatcagaagcttcaagatgtttagagattgatccatatgaacatcattcttaaataactgaacagacctacacttatgtttgatttctcagcaaaatgttatttctcaga

SEQ ID NO: 2591 - DNA, 350 bp, Arabidopsis thaliana landsberg
ggacaaaaacagagagccagtttagattgactccgagaaaatattcgagcagatgataatagtcatttagtgtgagcgaagccaacactggactcctcatttacgaagacaaaaacagcggaagagcgatcgacactgccgctgagagaggatctcgactatctcggagagttaccctgctcatcatggaaatgaggggatcggtcgcatgagagaggataagttgaggtgatcaagtatccgggtcgtcatgacaaagaggcctaaggcggtattgacattggctagaagggtgtttggcaggacaggaaatttcaatgcttgaagaaaataactatttccttagaaga

SEQ ID NO: 2592 - DNA, 560 bp, Arabidopsis thaliana landsberg
  unsure (1)..(560): unsure at all n locations
agttactagttatgtcgtgtatatatacatgttttttaagttttagttaactatattcacatacaaaatctaaccatgtgtgattttaggagaaaacaaagatgaatgtccttgctatcgcgatatgaaaaactccaaaagtggatccaaatgcctatgcccttgaacatgttttgaagatagtcatcagatgcataacatctatctattctatgtatgcaaatatcaattacgactattttagacggcgcctgtaataaaatatttgagcttaaaatgctcaatgaaagaaaatttgagagttcttgacaataaaagtagataatatattttatatttaaacatgagattctataaacgtaatagagattaggcatagaaagaaaagagaaaataaagagattttgaagatgatgtgagaggctttttcgttcatatacttgaggaaatggtattcagacatttgatcattccctttaacttaaacaancatagggctattacaccaattcactcttaaaaatactcataatctcatgtgtaagaactaacacatttat

SEQ ID NO: 2593 - DNA, 338 bp, Arabidopsis thaliana landsberg
aactcgataaaaagcaaaggtaatggctaatataccttaaaaagctaaatgcaaggcaaggtttttttaagaataagaacggccgaatacgagggaaaccttaacaacgaacacccgggattcgcaatctgaagaaaaaggaggactataaagaacaccaggggtaactgaaagctcgaacaagaaactgtaaaggggcacggattatattacaagagcgactaatcgaggtaaagcgcgtgcgcagaacgacaatagacacaagcagaagatgcagaacagagagccaaacacacaatatgggaactgtccaggcgacgaagaaaacacccaacgag

SEQ ID NO: 2594 - DNA, 431 bp, Arabidopsis thaliana landsberg
aattttcttcgtttactagatatagcatatagccatgtaacaaatcccattaaagacatatcaaaatcctaattaaaagcattacaataacatacttgataactgtttaaacatgtttgtagtaatatactaacatttgttgatcatcaatacttcaccaatctctacaatttgaatttgttgataaaattttgcttcattgttggcggatgcagaggatgaaagaagttgtgaatcatgcaacaaagctcaatgaagcaatctttggtatgaaaggtgttcctgtcgtaagagctcaaatatcttttgggggtcactacgatggactttgaatctcagccatcataatagttcataatgtacatacatgaatgtagtataaggctttgtaaatttctattattttgttcaaatattgattaattatgtgg

SEQ ID NO: 2595 - DNA, 382 bp, Arabidopsis thaliana landsberg
agcttatcgcaatggtatatggaaaattgactgtttctacactttctgcagatgttaggttgaaattcattgccggaagtgcttattacgtggcccctgaagttttacaccgtacatatggaactgaggcagatatgtggagtattggagtgattgcttatatactactctgtggtagccggcccttttgggcccgttctgaatctggaatctttagagctgttcttaaagcataacccaattttcaagaagcttcttggccatctcttttacctgacgctgtatattttgtgaaacgcttgttaaataaagattaccgttagagactaactgctggacaggctctatgttagtaattataaccaacttgatgcttctattg

SEQ ID NO: 2596 - DNA, 457 bp, Arabidopsis thaliana landsberg
  unsure (1)..(457): unsure at all n locations
agaagagaccngaaccccanacagaagcgaaaccagagccagaaaacaaccccactcgggatgatcaggaggggaaaggccacagcgcaggggaggaccaaagggcgcccccggcaggacaaccaggggagaacgaacaaaacaagaggaacaaccggaagcagaaagaaacccagccagaaggacaagcacaccggccaaagccagaacgagaaagacaggagcggaaagccgagaaaggaccaggagagaaggacaccaaaaaggggggccaccggggcaagaggaacagggaggcaccaacagccnacnacaaacaaccagccaaaggnggggaaacgacagccggggcaaaagcagcagagacccagacccaggacggaaaacgagaagaaaaaggcaacaggaacgcaaggaaaacgaggccggggaggcccacaaagaagagggcgccaag

SEQ ID NO: 2597 - DNA, 387 bp, Arabidopsis thaliana landsberg
taagaaaatagaatattcatcaatcaatttatctttttgaaatgaattgatgacatcatcagggattggtgcactgaaaactcaacccacgcagccttgacttgaaaaccgcagtccttttataactgatacgatatggatgagatgaatgggaagcattggatccacaatctagactatatgaaacatcctaaccatacttcaccttttgatcaacctgtatatcttcatctgaaaacttggcgatgacaatatactgaacaacaaccctgaaccgactatatctgacaatgaatgaagacagtggataaaatctaccaactattatcagggaagaatcatgactaatcgtaaccaaaccgtctctgtgcacataccgacacagct

SEQ ID NO: 2598 - DNA, 291 bp, Arabidopsis thaliana landsberg
aactctctgaaacttgcgttgatatgtataatgctagtagctttgatcacgatctatttttttcgttatccaccgctacaaatccctgaatttccaactagcttcggacttactaccgatcctcgctatgtcagcctacagctgatatcatacttggacccatacgttaacatcatgttgagaagcacgccttcggtagaagcgagtaccaaggaacttggcctcataaaacattaacgataacgcagatcgaacgattcaaggaggtaacaaatatctgcctgtgatcac

SEQ ID NO: 2599 - DNA, 1978 bp, Arabidopsis thaliana landsberg
aatatctaaactcaagtaatctcttactgttgaagaacattttaattttgaattatggataagtttcttactgctcttatgcgggatcaacaaaaagcattccactcagtaaaaaattttcaataaaaaggcattagtaagacttaaacttgggttaatgtgggacaccattaagtaaaaaccactacactacttacattgttaacaacctagtgcaaatttatataaaatttattgaattcagggcacatgtcccacccaagaccaacgtacatgaagaggaaaagaagcaaatttcacattttttccaaagcaaagcaataatttacacaaaaaaagaaaaggaaaagtcataaatgaaaagtcaaaggctatgacgatattttctttaaggacgaaaataacgtttcttactaattatagaatctaaaatcagtctcgttctgacgaaactgatgatcatacgaacaaggagagcgtttctgttgctgcgtttgcgtttgcggttgtggttgcaccatcctaacaccgctaacgctacttctagccgccataatctcatcaagtgacaatctttttctatcaggacgttgtctcggtgcactatgcgaacgtaccttagctttaaacgactgcgtattagccatatagctaggtgtcatcaaaccaggataacttggcctaaaacaagcgtctctgcaaacacttttcgccggcgatgggggcgtgtagtaatagttattattagccattgatgaagagaatctcggcgtgttttgagccgtaggaaacttgcatttctctcccggaaaactccattcgaaatctttggcttgatagatgaaatcatctccacattcggatacagccacattcattctctttgatcttgatttcgtcttgtaagtatcaatctccacaatcttgggactggtctcatcgtacgcattgttgttgtgattactctgtttctctacagagattgatattctcttgctatggatttcacttcttgaatcatccaacctctcctataatcaaatcaatccatcaaaacataagttttgactatagagattatgttagaaataagacaaaagaaaaagaatggttattacaagtgagtgtcgaggatgaaacatgttgttgcggttgatgcgttgcgatcggacgctggtttgagctctaatgagagcttgcatgctatgcagcgtttcggcggcgcgtttgcggactaagtatcctcttaccaaagcttgtagcttcactaaacctttcaaagctcgtaacgcttttctcgcctataacaaaaaaaaaaaatacttagaccaaataaccacattttagtgtttaatcagaaaagaatctaactttcttgaaattagcaaagatgtgttgtactgtttcattaacgaagatgtgtaaggagcaagtaaagtacagacatactttcttttagttttgtcgaatctaaacgatacccacatggcaaaattcaatctttttgcgtcgaaatcgattacacaccaaaaaaaaaaaaagtgttttggaggtttttaagaaatttaccaaatagcccttgaagactgattgaattttcactgcggcccaccgctccattgcgttcccggaatatcctccgcttcttccgttacttgttaacctgaccaccgccacagcagcttgagccgctgcaaccgctgcgtcagcagccgcggctgtagcagcagcaaccgcaatcgcgtgtttgttctgttctttgtctgtttccgcaaggtaagttctgagccagacggagtcagcttggagaactttccggtgaatgttagaaccaccggcttcccctccaacgtcgccggaaacacagttctctttctctttgctcttcttcataccaaaaatacccttgaaaatctaaacagctcttcccatcttctctttcaattcaaatataaagaacggtcaaaaaaagtttaaa

SEQ ID NO: 2600 - DNA, 3210 bp, Arabidopsis thaliana landsberg
  unsure (1)..(3210): unsure at all n locations
ccttaccaaagatccggatgctcttggacacagcttccaatggtaactttctcaacaaagatgtagctgaaggttgggaacttgttgaaaacctagcacaatctgatgggaattacaatgaggactatgatcgcactaacagaggcagtagcgattctgaggataggcacaagaaggagatcaaagctcttaatgataagattgacaaattggtgcttgctcaacagcgaaatgtccactacattacagaagaagagcttacacaactccaagaaggggagaatcttactattgaggaggtgagctacctacagaatcaaggtggctacaacaaaggatacaacaactacaaaccccctcaccctaatctctcttacagaagcaacaatgtggcaaacccacaagatcaagtctaccccccacagaaccaaccgcctcaagctaagccctttataccctataaccaaggctacaaccaaaagcagaactttggacctccaggcttcacccagcagccacagcaaacttcagcagaagactcagagatgaagactctacttcgtcagcttttgcaaggacaggcctcatgctccatgaccatggacaagaagctagctgaactcaccaccaggattgattgctcttataacgacctaaatataaagatagacgcacttaacactagggtcaagaccatggagggacacattgcttctacttcagctcctaagcaccccggacaacttcctggaaaatctgttcaaaatccaaaggagtatgcccatgctatcaccacagtgagtacttctgccactgcggacagtgggattcaagaaggtggggttttgagaccaagatcaagacaggagattgaactcgactttttgctcggcttgtcgaacgagcatatgacccgagcaacccaatccctattccacctgcctatgaacctaaaccatactttccagaaaggattgcacaagttaatgcaaggatcttccagaaacacaagatgatgttcataaagtgtatcaaagagttagaagagaagatacctttggttgatactcccaaggaagtaatcatggaaannnnnnnnnnnnnnnnnnnnnnnnnnnnnnngagttttgagtgcagcgctatcattcaaaggaaggtgataccaaagaagctaggtgatccaggttcctttactctaccttgttcactaggacccttagtgttcaacaatagtctttgtgatttgggagcttcagttagtttgatgcctttgtctgttgcaaagagattgagatttgataagttcaagcctagcagcattcatcttattctagctaatagattagtgagagtgcctcatgggatgctagaagacttaccggtaaagatcggttcgattgagattccaaccgactttgtggttctagagatggatgaggaaccgaaagaccctctcattcttgggagaccatttttagcaactgcgggcgctcttatcgatgtgcaaatgggtaagatcaacttgaaccttggtaagaatctccatatgagctttgaaattgctaagaagatgaagaagcccactatagaagggcagcttttcttcattgaagaaggaaatttagatgctgagttgttgagtgggttggaaaatcctattccgtactccattccgactcaccacctaggagagcccgaggagcttcttatgatagaaggaggacctagcttagaggttgagactaaagggaaccattttgatgttggtcctattgctagagagcttatgaagctcagaaaacagtatggagctcaaggagagacggagctcaaggagagaccatggaaaagttggacctcaagatggaggagctgaactacgctatcctggagcttaaggagatgattaaaggttacccaggtcctgagattgatgaatacttcgaggaacccgatcttggaaaagaggactatagtactgatgagaaggaggcttactttgaggaaagatcaaatgagtactccacactccagctatcaagagaaaatgcggagtatgattcagactttgaggattcagcaagtgaggatgaggacttctcagttcctctcctcaatctcttctctacctaaacattgtgagagtcaagcttagtgactttaaacaagctcacttgggaggaagtcccatgtctatctttgtatatattgctttcttgttatttttgatgtttttgtttaagtgtttcagggaaaaagacttctagagaatttcaggccacactcgaccgtactactcggctacaggccgagtgtgggcttcaattgaccaaaggcccaacaagatgcagcactcggcccgaagccgagtcagaaaaagaagcccatcaggcccaacactgtactcgacacgcgcgtcgagtatgtcggccgagttcacacgtgcgaggtcaacacaattcaaattcgaatttgaattcgaatttgctcggccccaccaatcaaatcctgctccccaaagcccttcaaagattcttctgcaaatagtgagacatgtccccttgatcaaatgaagggtgaagatctatggtgtttggagggctaggatcaaatcttctggtctataaaaccacactcaacaagctaagtcactcacactttctctttgctcaaaaatttcgaattttactccttctctccaaacatttcaagttcttactctcacttctctagatttctcagaaattttaccaaaatctcttgttacaaaccttttcaaaacctctcttgcaacctttgttcattcttaaacatcaatttctcttctactttgacctacctttggttattttgtggtgactacctgcagtaaatcatcccaagatcatgaatcccgaggaatcaagaaggagagcctctgctcgagccgtggcaagagggtttgagatgattaatgagaagaatcagtcaaagaatcaggaagctgcgagtcctggttttactcggatgacaggccgagtacaatggccgagtatggccccggagtcctctatgggtcgttttgcggctgctcaagagaaaatagcaagaggcaagagggtctgggagtccgagccagttgcagaagaagaagtgcctgagatagagaaggaagcatctgaggaagatgcgcaagttgatgaagaggtcccgaggggatcctctggactc

SEQ ID NO: 2601 - DNA, 583 bp, Arabidopsis thaliana landsberg
  unsure (1)..(583): unsure at all n locations
cttcatcgagggacatggcgaccacaacgcccttgccggcggcaaggccgtccgccttgatgacgatgggcgcgccttgttgcttgacgtaatcatgggccgcggcggcatcggtgaaagtggcgtaagccgcggtcggaatgccgtggcgcagcatgaaggccttggcgaaatccttggaggattcgagctgcgctgcggcctgcgtcgggccgaagatccgcaagtccgctgcacggaaggcatcgaccacgccttgcgacagcgtcgcttcggggccaacgatggtcagcgcgatctgttcgttctcggcgaaagcgaccagttccggcaccgtcgtgannnnnnnnnnnnnnnnnnnnnnnnnnnnnnnnnnnccggcattgccaggcgcgacataggtgcggctgacgttcttgttctgggccagtttccaggctagtgcgtgttcgcggccaccaccgccgatgacaagtaccttcatattctaaaaccttgagtaattgtagcgagcggcttcatatacgaggagccacacagcgaatgacgagacataccatgatggtaggcgaggagtgagcga

SEQ ID NO: 2602 - DNA, 231 bp, Arabidopsis thaliana landsberg
  unsure (1)..(231): unsure at all n locations
nnnnnnnnnnnnnnnnnnnnnnnnnnnnnnnnnntttaagaaaagaatcccgttactccttcccttttcataaaaagcatgccgagaccaatgttctttatgtacaaccgggctgctccnnnnnnnnnnnnnnnnnnnnnnnnnnngaaaccatgtgctactgggtcatactcgtacgcaatcgtattttcactaggagtagtagacaattggatcccacttttatcatta

SEQ ID NO: 2603 - DNA, 491 bp, Arabidopsis thaliana landsberg
aaccagtctcccattagcttgcacgggagtattcactggatcgccagcactagtcacagtgaagatgttgctgtatccttcgatttatacgccactggtacgagctctgttcaatgccgtgtgactactttccctgatttcggaaaacatcccaaattcactagatcgttctccacttgtcaaggatctctcatgtatatgaatataatctctataaccaaagttgatggaagtctagagataatatctgcaagactttattggtttctcaagtatttattttattttgcattacgactcttagttcttttgtatgaaggtgtttcaattatttcgagtattttggtttggtctcaataagagagaaaaatggaagaaaattgttaccacaatgtcagccgactccattatcatagaagtgaagaaaatacataaacagaaaaataacgtagcagtgttgttaaccttgaaacccttagaggcatgtatct

SEQ ID NO: 2604 - DNA, 330 bp, Arabidopsis thaliana landsberg
ctctcagctccttctctagtatcacatctgcctgcctgctgccatgctccccatcatgttgataatggttagaaccttggaactgtacaccggccccaattaaatggtttcctttataagagttgctgcggtcatggtgccttttcatagcactgcaaaccctaattaaaacagcgcatgaacaacactaaatgaacttagcagcctatatgtatgtgtgtgagcatgtctgtgtatatatccatgtgggtatgggcttgtatatgtatatatgtgggcgcaagacaaacaataattttgtgtgagattttgtgggtctgacaaattata

SEQ ID NO: 2605 - DNA, 1868 bp, Arabidopsis thaliana landsberg
tttgtggcacaaggtccagtaactattggatcactctagggagaacatccatgtttagagacatgagtgtaaagtgtgaattatgccgattaccgacgggcttccaccttgaggacaaggtggttctttacgggggcggtattgttatgacccggatacttgagaactgggcctgggagttgaagatgaacatcgaagcccatgataatcctttaagcccatatttatctataggtcaacatatttacagttgtgccatcgtctcttacgctttggtatttagtctctgtctttctctgtaatggttatcaaaacaatcaacaacaatatcaatatcaatttctcttctcatctcatactctccgtcgacaatcggcgcattactttatttactctgtttttcttatgtttttacgttgtttactttaagagataagtccagagcttatcagattgaaatgagttcgatctctggattggtggaagatgaaatcagttcgtttttcgaatcgtctccacctctgaagaacaaggaagagatcgtagccaatcttaatcagttcattgagctgaattcttcgtgtcaaggtgagatcagaatttgtgtatatatgtaacattttgatttctgaatgacttagagggttttttctttcttttattttatcaggagggatgaggaggattgtatgtgtgacttcaggtggaactacagttccattggagcaacgatgtgtaagatacattgataatttcagctctggaaatagaggtgctgcttctactgagtaagtttttatagtttttgttttcaattactctttatagaactggtaaaaatatatattattgaatacaaactttggttttgatttggattgcaaaggaatttcgtcaaggctggatatgctgtgatatttctctataggaggtaacaatttgaatgttgttttgtatttctcagctgtgtgtagtttaaagatttagtgaaatgatgcttctttatatcggttctattatgtcatctttaggggaacttgtcaaccgtattgccggtatcttcctgatgatccattccttgaatgttttgagtttccagatgccaaaaacattcaaggtttttcattacaatctctttctcagttcatatcaaacttatgtgggttttagtctggtattgtatcaaattatgtgttttttgttcattttttttttccagttcatgggtcacattcaggagctgtgaagatggctgttatggaccagcaagctgtatgcttagaccaactgtgttttattttacggaaagctgattacttttatgtattttcgagtcttttgtgtagtaaccgtgcaaattaacattgcaggcagttgcagaaggtcgcttgcttaaactcccattctcaaccatatatgaatatctccaggttcttaaatcttacactagctacttcagtcatcttgttttgtcttgacacataaaatgtaatcttaactgcctaagaaaccattagaatttatctcaatgcttgtgggatttctttaacagggctgcaactgagattatttttctttggaatacaaacagatgttgcggttgattgctacgatattgaaagatgtcggtccatgttcgatgttttatcttgctgctgctgtatctgacttctatgtgccatggttaagcatggtaagagtctcatcatatccctgtgattatggctacacaattcttgcgtctgaaaattgacttcttatatatttgtgaaaccagacagagcacaaaatagaatcaggatctggtcctttggacataagactagctcaagtccctaaaatgctttcaatcttgagatcaaattggg

SEQ ID NO: 2606 - DNA, 445 bp, Arabidopsis thaliana landsberg
tccgtggttgagacgacaccaacatcttttttacatccgtcattagcgaaaatcgtaacggttaatctcgaatcgccgtcgtagctgaagacaagaaagtctccaaattcaagagattgatcgcttgcgaaactttgctaaccttttgtgaagaaaacacagaatctttcttctgtatcttctgtttttgtctctacacaccataaccgtccaatctcatcgactaaggacgcttctttaggtaatggcttctctaacatatcgatgaatgctggaggaatcacctgcagatttatttttgtaaattaatctccgcatggaatatattttgatattataagaataaactgatgacatataaaacaagtataccagttcgtgagaaccgaattcagggagaaagacctggaaaaattgtaagtctttactgagatcaaccatgatt

SEQ ID NO: 2607 - DNA, 398 bp, Arabidopsis thaliana landsberg
tccacatgaaatgtgaattgcttataaatattttcctcagaggcaatgagaaggcagaacaaacatctttagcatgactctcaacatcttcgctttaataaataacaaaagataaacggaaattggctatacatccttcgttcgttctaaaagtttcccatctagacctcacccacaaccttctcatgtcgatgagcagttgtctcgtttgagatcttctgaggaatccttaacatcttcaagctttcttatcttccaaagacttgacaaccttcaggatctacatgaagctcttgacaagcttatttacctactcttcacacaacatgctctagctcaagaacatataacaagaaagctgttgaacaacttcttgatggatctatgaagatcttgga

SEQ ID NO: 2608 - DNA, 1351 bp, Arabidopsis thaliana landsberg
  unsure (1)..(1351): unsure at all n locations
tccactcaaaactccctcaccatattcgccacatagtactcaagatgcagcatcgctagcccaatcccgggacatatccttcttcccgctccaaacggcatcatctttattcctctgcttccggttatgtccatccgcttcttcttctcccataaacctctctggcttaaacgccattggttcctcccacacctttggatccctccctatctctgccaccataaaattaattgtccccttcttcgggactttgtatcctcctaacacagtgtcctcagtgacactgtgcgggagcacaaaatgtcccggaggatgtctccggagaccctccatcaccactgcctttagatacggcatcttttgcgcgtcttcttcctccacttcctttgcttcttccccaactacgcttttgatctcctcgtataacctcttctgaatatccggggttttcaccaagttcgccatgatccattgcaacgcggtggccgttgtatcagtcccaccgttgagaaactccgaacacaaactcacaatctcatcctcgttcagcttcctcttctcatctggaagctccagctcaagcagagtatcaacgtatgattgtacatactctttgttgtcttcttcttcctctgatgatctcttctttctctcttcaacaatctttctccgagcacgaatcaacggaagcaaaacgtcatgctgctctctccgcatctggaaaaactcttcccatctctttcgcaaaatcaatttagtaaacttaggccagagattgagaatattgaatctcgagaagccaagaagctgtcgtctctgaacatattcaacttgtttgatttgcttctcatcaagcttatctccaaaacacatgagaacaagaagcgcaaacatcgcatagtgaagatgatcaacaacaacaatcggttcttcacctctgtttttaccaaatcgaccaaaaagaatctcaagaacccaacgccgcgcgtgagagtaagattctcacgcgcgaggggtgaagaatctcagaagtgagattccggcgaagaagacgccacgtggctccatataaacaagagctgatgttatgttggttacttgaaataatcttactgatcggagccgccggtggacgatcggcgaaaacggcaccgttcaaaacgagagcctggtgagcaagagaacggtcggcgacgaatatagcggggcgggaagtgatgcgaagggtgatgatgggaccgagacggtggtggacggagcggagatagttgttgagtcacctaagcattgccgagccatggatggttcgatgnnaaggaatagttagggcaggtggtaccggaagaaagag

SEQ ID NO: 2609 - DNA, 1867 bp, Arabidopsis thaliana landsberg
atacctaaattcctctcaaactgatgaaattttccaccttttcgtgttttggcttcaggaatcgaaaaggaaatcggatctctgcaatcagaagtatgagtgtggctcagttagtaacgttttcatccatctttttaaaagggacatatctaaaaaacgttttctttcatgtttgataggaaaaaaagctcgttctcgagatcaaaagaactgctaaatcaggcaatgaggtatttcaagcattccttatcagtaatagcatctagtttatgtacactacatcttttgtttttatgcagggagcgactaagattcttgctcggcaattgatccgtctaaggcagcaaatagctaacttacaaggtagccgagctcaaatgcgaggcattgctactcatacacaggtttcttaatttaaacaacttctatcctttcattctaaagtatttctgtttataaaccaagaagattgagtattggaagctttctctttggtgtttaggctatgcatgcacacacttcagttgctgctggaatgcaaggtgccactaaggcaatggcagctatgagcaaggtcagattccctatgtaacacaaatctgatttgtccatgtttaattatttgattggattcatcaagttaaattagtagaaataacttaaatccagtaggaattttgaggggctcttttgttaagatcttgttgtttctgtgggttttccagaatatggatccagcaaaacaggctaaggttatgagagaatttcaaaagcagtctgcacaaatggacatgactgtaagttctttcaaatccatcgtttctttaaatccatgaacactcaaatagtcattaatctgactaatgcatgtggaatccagactgagatgatgtcagattccatagatgatgctttagacaatgacgaagctgaagacgaaacagaggatttgacaaaccaggtacatttccgggctctatccatcaattcaatttctaaaaatagactgtttcaaagggttaacaaatgctttttgttttactgattaggttcttgatgaaatcggcattgatatcgcctcgcaggtttgtttataaccatcgattcttgtcattgtttccgtataatcacgtattctccgtgattcatattcgcttgtctctgtatttatccatctgcagttatcatctgctccaaaagggaaaattggtgggaagaaagcagaggatgttggcaggtatggtatccactaaacacaactagaacatatctgtatcgaaaccaaacctctatgtttctgtgcagttctggaatcgatgaactggagaagcggttggcggcgcttagatagaaagaagaagtaccatgagcttgaagatgtttcagacaaaaaatattatacattcaatgtgtcttctacagtttgctttctgggaagatttgtggatatatatataataaacaatatttaatgggcctaataaactaccaaagcccaattttaaatccggtgtacttgaaagaaatggttttttggttttcaaagttaataaaattctgaaaacccaacaattatgggttcgattgatatatcggcaagcaaacataaaggcccaacaaatgttttgaaaaccaaaaaaaatggtggttgtggaggttggggcacatgaaagcgttttttcgaccaaagtacgtaaaagaatcaacttttttacttgcccggtggtttcattttccttttataaaaagacaaatatgaactcagttcctcaaaacttaatcacaccatggtggctcatcttcaacctcctaagatcatcgagacctgtcacatctctcccccaaagggcaccgttccatcaaccac

SEQ ID NO: 2610 - DNA, 509 bp, Arabidopsis thaliana landsberg
aataactaaccatcaaggttatttcgtctttttactttatatatgattcattacagtttttcaaaccgaatatgtgtcatttaagttatttatgtccagagttgagtcaatctgaacaaatcttatctgttaataattatgagaaaaataaaataaaaatccaacctatcagaaaacgacatgtcagagtttcttaacaatccctaaacacctaattttacgatcaatccttaacattaacatgagttttgatttattttttgagctttatttaatacgatacttataatttccttataattttatttcatttttgaaatttttttatataagatatttgtataaatttttttttaaaataaataaacttttgtttaacacgtgttaaaatttacgatcgattaatttgacacgtgatacaactataaaaaaactaactttaaaaattatcatattttatttaataaaatacaaatattatctaaataaaagtttgaaatttttaataa

SEQ ID NO: 2611 - DNA, 523 bp, Arabidopsis thaliana landsberg
  unsure (1)..(523): unsure at all n locations
cctgcagaaacaacttttaactctttattacgtttaatttacgtgtttctatgattggaaacgagaaagctcacaagcaaatgttttgtgttatgtattggatccgtataacaaacacgaatatacaaaacatcgatactcgttggattgaacgatgctaaaacactataattagaggctcaatttaaacacaatttggtaaacatatgtaaacaatctttaaagatttagtacttcgccactccaggaccaggttttgtttggaacctgcagacataacagagaaggagtttggtacttgtcttctccacccatcattggtgtatcttgagtactaacaatcagagacattttttcagacacaagcttggtgaatccgtgatgtatctttagcatttcaccaacccatctcatgggttnnnnnnnnnnnnnnnnnnnnnnnnnnnnnnnnnnnnnnnnnnnnnnnnnnnnngagtcgtgttcttgccccgcaccgtcttcaaatagttcaaaacatgttcaa

SEQ ID NO: 2612 - DNA, 615 bp, Arabidopsis thaliana landsberg
  unsure (1)..(615): unsure at all n locations
tgtcgatatgtccatcccgaaaaagaactatctggcaaagtcggtgttttgcctagaaatcatttatcaaagatgaaattgagaatccaatttcaaaactgagataaaaaaaattgcagaaagatcgaacaataatgaagagtgacgacggaccttcggcaatcttggcgtcttcggaggttggagcttcactgctatcggtagaagcgccgctgccatctcccaactgaaacgaaaacggaaatccccaaaatcgccctaaatatttcaaacgagaagctccagatggtgaagaggaagtaaagtctccgatcagaaacctttgagcgtttagatgaaggagatttgtctccggaaggagacgatggaggagttctcttgccgctgcttccgtcgggaagggttgtattgttctcgccggagatagattcactccgtcccggtgacaccatgacgatttcttgaagtcttgcgttgattctttgagagttagaagaaagaatcaatgcgagagagatgatgaatttcgaaacaaggaaacagaaatgtgctgagagtgtaattngtgtatatatacgtataagcctttctcaataacaccgggtttactcgagc

SEQ ID NO: 2613 - DNA, 579 bp, Arabidopsis thaliana landsberg
  unsure (1)..(579): unsure at all n locations
cggaagagtaaataattcaacaaactttcaatattattttcaaacccaagattttatcacctatgaatgggtttgacaaggtaattaatatctcgtcatatacttattagttattacaaccctcaaaagtataaagatcatatatcatttgtcctaatatttattttctaatcaaataatcataataaaatttatttattatatgaatagtgaatgctaactataactacatccactattcaataaacgaggtgacatccaattttttgaacactaaatctaatatgagaaagttataagaaaatatatatatgaaatattttgttcctttgtggtaacatgagaaagtctaaaaatggattaattatgaacagagagtcaacaagttcatgtcttcacctcactctaaccacaagtcaacaccatttgtcttagtcatgaggagacacacatacacacctcacattaagaaattntaacacatagcttccttatactattgccacttctcttgcactattcngtatcaattgtttttaagtgcccttctgggtactggggaaaaaatgacaccaaaag

SEQ ID NO: 2614 - DNA, 401 bp, Arabidopsis thaliana landsberg
ttcctccacacgctttattttttaaaccgaatgcaccgtttttcggggggggactctgctaatacttctctactaaattccaggacggcgtagcatttatcgcataaacggaatttgtcagaatataacgctacattctttcataataaaccgaaacgagggctggtcaccatgtctccgggcattgactagtctatacatagggaatggaccgtattgtgggacacatacgtacgattgaaaatgctgggcctctgtaaagaatactcgactagattgcggacgggtctactatagtcatttctagggaagcgaccattccaatctctcctgatagaacacccgcacgtatatatatacttgtagagcatgaatataacgtcttgaaacgggagacagag

SEQ ID NO: 2615 - DNA, 433 bp, Arabidopsis thaliana landsberg
  unsure (1)..(433): unsure at all n locations
gatctgggcgccacgcccaataaacctacttggcagcgacgaaaagaacagaggtgccctggggcaaaaaaatgggctagggcactatggggggctcatgcccagctgaagaggcgagaagcgagcgtcatgcccctacctttcttggcggnnnnnnnnnnnnnnnnnnnngtgcagggatgcccagcggctaggagcaatcctggtacacgaccgncctgattggaagcaacctggtcatcttacccgagatctaaagaaacactgcaaacttattggaacggcgatatctctacaccggaagcacttaaatgactgcagagaacacttcaacagaggtacagagaggttttacgtgagactcacacgaaaaaaggaagacgaaggcgggaaaagcaacggccgcaggatgtgattgatggacatcaaactg

SEQ ID NO: 2616 - DNA, 2324 bp, Arabidopsis thaliana landsberg
aggtctgcacaagtctatgtgaatcaattccaatgcttgattttcatgataagtagctttggttggaaatgagggtcgggtttgtttctcggccaaacatgcatctcatgcactcatcttgtgtaaagattgcggcattccgacgaccagagccttcttcagcatgttagtcataacaccaaaacttacataacctaaccgaacatgccatgtccttgtagcttcagtagcaagtccaccagcatgtccctcaaaaagttattcaacacgtccttcatctagtccctcagtttgtagaagacgtgtaggattgcttatgtccattggtgttttgaacgatttgatgatcttataactcttacaagcagccttccacttggatcgttaagtaccaatgactctccttttatgtatgcttcacatcctccttcggttgcttgtccaagatttataatgttgtgtttcaaattcggtgtgtagtagatctctttgagggcttttctctctccaatcttgaccacaaagaacatggatcctttcccgactatgttgacaaatgagtcattaccaaacttcactcttcctttgagttttttgtctagagtcaagaaaactccttctttcccgtcatatggttgcttgctccgttgtcgaggtaccaaacactagcattgttggtattatagttcttccggaacaccttatcctcgttcaaaaacaccacttcatgaacgtaaagtgcttcagcttcttgcatcttgtgcaagtttgtctcttgctgtcccgctattttctctggacaacttgatgcataatgacgcgcgttatcgcatctccatcatatcactttggatagatccttcttctgcctttgattgtgatcaccgatttttcctccttgagatcgccaggcggaccttcctagccccctgcttctaccggaacttccgcggttagagcctcctcggttagaatctcccttgttataacctcctctctaatttccatagcctccacgcttaggatttaaggactatcgttcttggttgtggattctcgcccaccgtcttgcttacgagtcacacaccaccgtccttggatcgagtcttcaacttaagctctgataccaattcacatcaaagctgacttgctctgactttgtctctcaaggatttgagacgtgattcaagaacaaaacaaattaaagaacaacttttctttatttatttagaaactactcaaaactaaatctctctaggtctttagaacaactctctaaagcatctcaatgtctttcttgagacttatggaacaactctccatagtctctctatatagaactgagctacccctaagtctatatctcatgaagtctctctcgactctcatgtttatctcatgaggtctctctcgactctcatgagatctctcttgactcacatcttgagctctctctctttgatcctcttggatgctttagctctcttgtgttatcttcttcttcttcatagagatcatatatatactaggaccaaacacctccttcttcttcttcttcttggctgctttcctccattgaagaatgtcctcctctatgcaagttgacatctctaactttcaacataagcttgctggaacgttcatagtcttcaaggtaccgcgactgacttatttgtcgacccgaccttctcagttgtggtactccttgaactacttcaccaacctcattgtggttttttttagtgatatcctccatgacatcatcttcttcatgtacttctccaacatcttctctgtgaatcaactccaatatgatataaccgagcatgccatgtccttgtagcttcagtagaaagtccatcgacaagtgatgttggataattcctaacttgaagagcaagatatctccttttagtagatggtagaagagatacaagaaaataaaatacaaataacgtcaagttggacataatttgtaactcttccttttcaaatcatgactaaactctaaatttagatgtaatttagcttagtggtaggtcagagcaaatggatttgatttatacgtttgcaattatgtaattccatggatgtagtttgaaagaccaaacttcattacaattatgtgtatcaatttattttgcttactcgtatctattttatcactagaatacaaagattttgctaactccaaatctattattttcagacaagcatatcctgtaaatcttcaatcatccaaaagtgatgttgagtctagatcccactccaaatgtatttatcttattttaagtaaaaactgaagaatgagtttggaatcttta

SEQ ID NO: 2617 - DNA, 464 bp, Arabidopsis thaliana landsberg
  unsure (1)..(464): unsure at all n locations
acgatccgaagaaacctccagtggaaataggacgagacgtgagtggactaatgtgagtgtgttgaccttcgtaggttgtaaccacagtgcttggatctctgaatgatctctccactctcttcttcacgttacatgaagccgttgtgcaacggtagtaactcctgcaaacgaaacaccatttacacaaaatcaactttggttcacaattaagtctttctttggaaactgtaaacagtagtaaatttaattagtaaacactaacacccaaacattaagaaacaatgggacagtgctagatccaacaaattaacatagtgcatgtacccaagagcaaattaaaaaagaagaaacanaccaacacggaaaaagatttgacttttctctttgttgtgcaaactatggcaaaggaatggtttatttgctgatcctggaaaagactgttttgcagcttttgacatatttcg

SEQ ID NO: 2618 - DNA, 3682 bp, Arabidopsis thaliana landsberg
tgtgttatcttcctaatctctgctccaattagatcttcgcagagaaagtttcttcctggtggaacatttgtcgggtgttgtaatctcgctctgtatcgggtacattgtaccggaaaaacctctcgatctcgggaatctcgccgataatcctctctttgttaccggttagtgacgatttcgaaatctctttcctttgtcgttttctatttgggatttctcgattgattctgttgaatgataaagtttaataatccctatgaatgttttctttaatcactccagaaagtaaactcctgttttctcgacaaggtttctgcaaaatctcagatcgaacaatggataataatcttaggacacacacatagagacaaacacaaaccacacactcgtgttcttattctttgtcttgaaaaccataagtaagaattagtcctgtggcttattcccaaatcacgtgttactgttgttgttgttgtgtttatatatatatatatatatatttgccgacaagatttctaaatatggtcccgaaattgttagtgggttttgttagtatctttctagtgagcttgtgttaattgaggttggagattgatttagtttacgttatttgcttttgtagggaaagagagttttgtgtttggtgttaaaaatcgcatgaatgctggaaatggaaagagttgctgagctcaagagacttcctagtaaaggtcctgtctctggtcacttatcaagaagaccatacttagactttgaaactagagatgccccgggtatgcatttggagagtttgagggaacgagctgctcgatacaacacgggaagatctgtgaatccaactacgacattggggagagaactaagccaagttctgaatgtgcatagggaagatatgatgatgactcagtttggtggtaacatgaatgattttcaggagtttgagcctgttgtatcgtctgttagaacgatgaaggccaagtatcctttgttggagattgaagaaattggagctgctgatgatgatgttacttgtaagggaagcaatgatatgtctgaggaagctggttctagctccttccgtggagttagtcatcctccagagcctgacgatatggatctaataacaactgtttatgtgcccatcagcgagaaaaacaaacctgattcggtttgcttgatgaagagcatgtctactactaaaggaccctttatcgaggatatttcgctctgtgtgcctccgaagaagccaagcccgagagtactttcacctgcagaaagcatagttgaggaacctgctacatcgctgtccccgttctctgtggctcgtgcatcgcagaacactgaaaactctctgctaccaccagattcagacaaagaatgtgtttgggatgcttctctgcctcccagtaccaatgtgagcccacatagcagtagtgttgaaagtatgaatttggctcgggctatgagtattgctaatagctcttctgcaacaagtactactcagcggagcgatgttgtgcttagtatggacaagaactactttgacaggagtatcagtatggttttggattcgtttgaaagcaccaagaccagtgcaagcagagcaagtgatagtagcggcctaagcgaagagagcagctggagcaatttcacgggaagccttaataagccacacaaagggaatgatccttggtggaatgctatcttggctatccgaacccgagatgggattttgggaatgagccacttcaagttgctgaaacgattaggttgtggtgatattgggagtgtctatctggctgaattaagcggaactcgatgccattttgctgtgaaagtcatggataaagcgtctcttgaggaccggaagaagttgaatcgagctcagaccgagagggatattctacaactattggatcatccgtttctaccgacattgtacactcattttgagactgacagattctcgtgtttggtcatggaatactgtcctggaggtgatctgcacactctaaggcaacgtcaacccgggaagcatttctcggagtacgctgctcggtatgttttctctctcgcttacaatgttttcaaagctatatttatttgtcgttatctcactttctttggatgtgtttttgacagattttacgctgcagaggtgttgctagcactagagtatctccacatgctcggtgttgtttacagagacttgaagcctgagaatgttctggttcgagatgatggtcacataatgctttcagactttgatctctccttgaggtgcgcggtttcgccaacactgatcaaaacattcgactccgatccatctagacgaggcgcattctgcgttcaacctgcttgtatggagcctacatcagcttgcatcattcaaccctcatgcttcttaccgcgcagcatcttccctaacaaaaacaaaaagaacaagtcccgtaaaacccaggcggatttcttcaaatcacactctggttctctcccagagctagtagctgaacctaacacacggtccatgtcctttgttggaacccacgagtacttagctccagagatcatcaaaggagaaggacatggaagcgcagtggattggtggacttttggtatctttgtgcatgagctcctatatgggaaaaccccgtttaaaggatcaggaaatcgagctactctgttcaatgtagtcggcgaacagttgaaattccctgagtcaccagcaactagctatgcaggcagggacttgatacaggctttactggtgaaagatccaaagaacaggttagggacaaagagaggagcaacggagataaagcagcatccattctttgaaggtgtgaattgggcattgataaggtgtagcactccacctgaagtaccgagacagatggagaccgaaccgccaccaaagtatggaccgattgatccggttgggtttggtagtaatagcaaaaggatgatgggaccaccagcagtatcagcagcagcagcagacacgaaatctggtggtaaatttctagactttgagtttttctaaagcttccaagatttggttccgtagtagccatttttagtcttttatctatgtcgttatatattgtaaccacgcctctagctttaatagatcaagagtgagggtttaattcttatagtaacttaggtcttgtttggtttttgtatcggagattaaaatcttcttccatggaaccaaaacttttgtaaggacatggaaagccccaagtcgaaattatttaagataatctcctttggtactagtactgctaggtttctcggaatcctttttctacacatagcaactaatagatcgtaatgtcaatgtcaatgtcactgccatttttgggtacatctatactatatgaacatttttgtggtcccaaacggtactataatctaaaaccaatcaacgatccaaaatgttatctttcttttttgtatattctaatcccaaaactgaactgattttggcattcgtgtgttttgtttcgtttaaaagagtcggcataactattgcttgatagtctatagtctataccaagaagaaccccatccatgtgcttcagacaaagaagagagaaatgatcacttgtcagatcctaactcttatctctcagggaatccgatgaaaacggaccccatagacttttacataaattct

SEQ ID NO: 2619 - DNA, 550 bp, Arabidopsis thaliana landsberg
aagacaagagggacaaagagttagagatattatttaatgttcctttaaatattcctcacatgaaaaacttgtgcattacccttttgggccaaaatcgagaccacacgtaacgagtttaacatccctctttttgagggcatagtcaatgacggcttcattctgcacaatttgttcatacataaagaacaattaggatgaatcagatgcaaagaagaaaattatgggggaaattatcagttaactaacctcagtaaccataattgaacatgttgaataaactatatatccaccggctttggaattggcatccaccatatcaatagcagcgagtggaagttgcttcatgaacaaaaaacggttaacttagcatgtgtttaagaatgaaaaatggtctcgtcagatctaatagaaggtatctaagaaggtactgtcataccttttgcaagtgagctaatatatttatgtcatacatggttttcggtgctttcactgattcaacttttgatataatctgtattgggtagcagaggatatttagttaacaggatct

SEQ ID NO: 2620 - DNA, 611 bp, Arabidopsis thaliana landsberg
  unsure (1)..(611): unsure at all n locations
tttggcatgccccttacatacattactttgaaaaatctaaacattttttctccaaatcttatatgcatagtcggagttacaaggaattttgcactaaaagtatctactttgaaaaattgagaacatgatatcaattcttaaatgtttttcttttatattattttattttatttgattaagtattttatttattgtagaagctacgaaaatgtatgttaaggtttatggatggatgaatcccaatagaaatagaaatagaaattataacagtctttaagttagttattacatcaacaaaaacttaacttttagatgacataaaaaatagagaatatatcaaacgacatcgtataaaatatttttatacgacgtcgtgtgacatgttttgatcattttttcacttaggttaaaattttcttctattaaagatcaaactcattaactttagtatgtgtatccgctgattctcctaaaaaaaaatattctgaaacatatctagaaaatttggtgaaatttctattgttaacaaaaataattcagaatcgattaaacaatttgtgaaaggtatgttctaatgaacaaacanttgtgtttttactttcattgatttc

SEQ ID NO: 2621 - DNA, 357 bp, Arabidopsis thaliana landsberg
  unsure (1)..(357): unsure at all n locations
gagtgaatccggatatctcgttccggagtcttgcagtcctggagttnnnnnnnnnnnnnnnnnnnnnnnnnnnnnnnnngtcatcccaggtcgtgattgatccttggggtagcttcttttcccacagatgggctttatctccaagtgaaaatggaaacaagcgaagcttgaaaccatcttcactaactccattgattagaacaacaaccggattccgtaagctaaccaatttaagatttaggtttaaaagtttggggtctatggtttagggcttagggtaaagagttttgagtttagtgtttaggttttagtgtttaggatttagggtttagggttcagatgttaacatttaggttt

SEQ ID NO: 2622 - DNA, 581 bp, Arabidopsis thaliana landsberg
  unsure (1)..(581): unsure at all n locations
tgctttggtgnnnnnnnnnnnnnnnnnnnnnnnnnnnnnnnnnnnnnnnnnnnnnnnnnnnnnnnnnnnnnnnntgcagctcagttaaccaatgctctgaaggagagtttcaagcttcgtgaccttggccctttgaagtactttttgggtctggaaattgctaggactgctgcaggcatatccatttgtcaacgtaagtatgctttggaacttcttgctttcactggaatgttggattgcaagccttctactattcccatggttccaaatctgaaactttcaaaggctgatggagaattgttggaggatcgtgagttttatcgcagtctggtggggaagctgatgtatctcactataacaaggcctgatattactttcgctgtgaacaagctttgtcaatactcagctgctccacggacttcacatctgactacagtctacaaagttttacaatatattaagggtacagttggacagggacttttctactcttctgatcctgaccttacccttnaaggctntgcagactctgattggggaacctgtcctgacactcgtcgntcaactacagggttaactat

SEQ ID NO: 2623 - DNA, 2455 bp, Arabidopsis thaliana landsberg
ccgcttattacccgcactatcatagatgggcttaaacatctaaatacggatacgtctggtttagatgcttaggtgaacttatcaaacttgattataatgcatgcttagtgtttaaggattttcatacgagagttgggattcctatttattaagcatatttaatcaatacatatgggagttggttgattataggctagtgatttaagttttagaacggttcgataataatcctaattaactgatatatctattattcatctattttcctgagaacttctctagacccgacgttttaatttttgaatctgaaattaatttatttgctttctttgtcttttaatttacaatcttttcgtttaacttaattcgatagccataagtctattgtgtgatttgaaagctttgtagaattcgatcctaagtgctacaaacgatctcttatttgagagagtagtctatacgctaatttggcctatatcacatatgattgtgtgaaacctaatctaaaatttccgattagaactcgcgacttagattatggatttgaaagagatagaaagaacgcaaacaaagaacaccgagattttacgagttcagattctgatttgcaatcctacgtctcgccggagatttaatttctccggaatccactaaacttcttagctcaaaaccgagctctctctcgctacaattgttctgctctctctctctctaacctctcgattcaacaactctgaatcgtgatgatacggaacagaaattacaaagcaacttaaacagaatgaaaaaactgagaaagataagattcttccgttagagatgaacgactgagattgagccacgtgtcgcgatctcttcagctcgacttgaaaccttctgattctctgagagtctttcacagacttagcatatagatcacttctcttcaccgagacttcccgctttgtggccttgtgtgtcttagctactttgttttctcaaagcgatttctcctctctgagcatatgcttaaggtgctcaaggtcggcggcctacttatcctttctttttaaggttgtgcgcggctacctttcctaccttaatcgtatgatcgatcacgtcctcgtcggccttctcctttgtcaaactcgcctcggttgccttcgctctagccacagctcagacgcgctcagcagcggccaacttttccttggccaacttctggtatgtatctaagcaactccaaatcacggaggcttatgctaggaccattgtgttcattgaggaaaaagcgtatgaaaactaaaacaaaggtatgtcataacagaaattcaccctagtataattcggttcaggaacaagaagaacatgttttaccttcagaaaacatgatgatgtttcgtcgtatcgcacaacctctagaagattctctagaggggaagaagattccccgtaaagaaggcgataaaattcgctgaggcgatcttatcctcgtaaattggcaggccttcctcctaggtcttcttctttttattttttttcttcgcctcaggatctttgctcctttggcgcttcccggaagccttggcctgcgatcagccggcaaggccatcaccatcgacgcattcgttccttcgggggggtgacgattggcaacacacctgcttcaagggcgatagttatagaaacttgacgtttctcattcgtctcggtatgacttggttgagtggccaaggaaggaggattcacaaccttgtttccctctacagaagtcgcctcaggtgcgacttcctgaatttaaattgtcgcctcgtgagcaactgtctacgtcccaacatccgtctcaagaagccgcttcgcctcggcctcctttttcttctgttgggatttcagcccccaatgcgtcaattttgtcttctgcatctcgacaaagaatctggattgatgatcagaggatgctgagttagatgaacaggaaacaccgtgtgataactttatagccctcttaaccctttctcgaaaaaaatgcttctgccaattgcacttccgagcagataattgcttttgagcttgaatgaggtcggcaaggcagtattcaaggaacttgaaggtacgatctgtagaagataagtaaaatagggtaagtattaagagtaggcggctcggtgacaaaccatctaccaagtatcccccatctcgacatgattttcccgagaaggtcctcatgaagagaagagtcgtcgagggccacaaataagaagtggtcagtatatggctcattcttggcaagcgagtcgtagtacctatcaaccggactcggagtttagcgaatctctaattagttcttcaggtgcccgagcataacatctttctctgtttcatagctccgccaccagaatccccatacaatgccttagggcgcgtgtaggaaactgagaaagggaatcttgttgaggtcacgtactcgaggatcacc

SEQ ID NO: 2624 - DNA, 484 bp, Arabidopsis thaliana landsberg
gaagtacgtccggaactagaaagaaaaattatctatatcttgatatattgggatcaattacgaataaagcactttcaagtgtatgtggttgtcgaaataggcacaaaatcgtgtgttgatcaaatttaagcgcttttccacatgagctattctattctataatggagtatttgatatggtaacagtcgatttttgttgatcaaatttaagcgcttttccagtagaaatcttgtaatctcatcttcaaaagagatcatggagaaaatcaccggaggagaagacattgaagacggcgaaggagatgataatgacgtggggttagaagtttaaacatatttatttttgttagaaagagctttctattttttgagttacgtttcacattttgggttttaagtttttttttctttatataaaatcggattttaagatttgatttggtttgatgaaggaatgattttggagattcttttgaaacatgttt

SEQ ID NO: 2625 - DNA, 525 bp, Arabidopsis thaliana landsberg
  unsure (1)..(525): unsure at all n locations
catgacattgaaataagnnaattacattatttnattattttaataaaaaagggttagggtgaataatatctatttagatgacaaaagaataatatttattttaaaaaaaaactttgttttaaaatatggttagcaaatacgtttatgctaattttaagggattgatgtgaagtttgtttggattaaatttgattgataatgttattgacaatttaaattaagaatttaaagtaaaattaattattttggaaaaaagatttaatgctaatggcattgaattgtaaataaattcaagtataagatttatttgctaaaatagctgcaaaaatgtatatgtagatagtacaattgaccccatgtataaatcttataagaaaatgtgaaagggctacacatagtcaatagccacaagaccaacacatagtagggacaagcccaatatcttaaagccgttagaacttatgacttggttngcaagaaaaataaatgatctcaattctatagaacgtaggaaaatgcaaaacc

SEQ ID NO: 2626 - DNA, 234 bp, Arabidopsis thaliana landsberg
attgcttctgcgtattgcattcagattaagaatgtacctctcttcaaagtagcaatattacaggtgaaaatattaaaattaataagccgttaataataaaatctgtcatatatatgtttttgtcgattgatttattgtgttgtaggcagcattgcctcaaggagtagtgccatttgtttttgcaaaagagtataatcttcacccggagatcattagtactgggtaaataaatat

SEQ ID NO: 2627 - DNA, 492 bp, Arabidopsis thaliana landsberg
caccaacgacgacatcatcaaagaatgtcgtccactcatcaaatgtttcgttatgtgtccattcatggtcaattccgggctcggtccacagattttggtctccgataaaaccacagctcgagtcttaaccgtgaaaaccggttcttggtactcaacgaaccaattcttgctctcggttatcttccgagagaggatgaaacactacgagtgtttgaccaacaactcttctctagcctcagcgatttatgtcccatactacgcaggatttgatgtgagccgtcacctctggggatacaacgtgacggttagagacgaattggcgataaagctggcacaatggctgagagagagatctgaatgggggaagatgtacggccgagatcacttctttgtgaccggacggattggttgggatttcaggaggtttcacgatgaagattcagattggggaagcaaactgatgctattacctgaattctcgaatctgacaat

SEQ ID NO: 2628 - DNA, 467 bp, Arabidopsis thaliana landsberg
gaacaatccaaatcttatggatttgattacagagtttgattcaatgcttaagcttcgttgagaagagtcttttagtggaagctacgaagattatagagaagaacaaatcagttaaaagaaaagacgaattgagaaagattgttgttgatgaactctcatctcttggttacgactcttcaatttgtaaatcgaaatgggataaaactcgttctataccggccggtataatctccttaaccagtttttcttcttcttcttctacctttgatttttgtgatttttcgtgtaattgaagtgtttttattgttgatgatttttcaggtgagtatgagtatatagatgtgattgtgaacggagagaggttgataatcgacattgattttagatcggagtttgagatcgcaaggcagacgagtggttacaaggagttgcttcaatctctaccgttgattttcgtcggaaaatct

SEQ ID NO: 2629 - DNA, 2029 bp, Arabidopsis thaliana landsberg
aattcacgcgatggtgattttgaagacaactgcgttgataaaaaaaggcatgatttcaaaaggtgaacccctacagaattgctctcacgctctcaacgcgcactttgtgcgagtggatctgaaatacagccttgtgattggctaaaaaactctaaaaaaatagaaatagtagacatgttgctagcttatgttattatttagcttttctacaaaacgccgtcgttttttatttcgatcgtttcagcttttggcattgatccgaaccaatcggttcaactggctaagtctatccacaggtttgtataaaaaatctcatttggtcatgaaattaagcactaaatttatattaattaatcatttaatgcttatagacaaattctatttcatatttctaacgaatcagacctaattgtacgaaataaattattggttctgaaaatatcaattgggaaattaaaacccggttcaatttgaaaccggaaacaagactagctacgcctggaaactctcacacagagtcacaggagaagctcccgcgtctgcaaggaacggataaagtctctctctttctcactctctctcaatgaagaagaagatgctgacgagtcccagtaacgcacttcacagtagtactccacagttctggccagttcgccggagcagactttgccgttcccggaatttccctcgttttcactccggcgaacgcagcagcggcggaggaggaaaattgtgctcgctctctcttctctccggaagtggcgccagtaaattcagtgtcagagctctagttaggcctgatgataccgatgacgctgactccgtcggcgatgggtctctggcttgttcctaaccacgtatctgtcaaaattccattcggaaatagagaggtaatttcttcataaagctgtacccttttgatttcattggttgtttcatctggtcaaatttgaattcggagatgattggtaggatttgagacctttagctctatagtagagaagcaaagctcgctgctttagatgtatgtgttgaacattgttttagcttcttcttaagtttttcatctttttctttctttttgtctactgtgtagattttagttgagactggtctcatggggagacaagcaagttctgcagtcacggtgacagatggagaaactgtaagtgtgctgtttcattcaatttccaaaactttcaactttttttcttagttcctcgagtttgtattcttcagtttagcttctgttacttgcttatctcttcatcggtttgttagatgcggaagctttgtttcattatctaatctgtctacttgtcattgtagattgtctacacatccgtgtttgtctagctgatgttccaagttagccatcagattttcttcccctttatgttcactatcaggagcgattctcagctgtaagtcgaacttggcaagtgtttttcgaccctttgctattttggagtctcttgatgtaagaagaccatatcattgcctaaatgatgatctgaattctgaatggaccttcttatggtacagtggtggatttttaagcgacaagggagaaccaaagatcacgaggaggtatgtactaatgatggttttggtttctacaatgaaactcagattttgtcctgggtatgcttcttctccgtggatatctttatgttcctagaggcctttttttttgtctgttttgcctctctttgttgctctttcttttgaataggtttacatggttttgaaattgaaattgatttcggtttggtttactttggttttgaaattaaaattgaatttcgttcggttaacaattggttttgagaaagaaaaaaaaaactaaaagagtcacgcgatggagaatttggagagatgtgcgtcgataaaaattggcatgaattagaaaggggtttacccacagaatcgccctcactcgctcaacgcgctctttctgcgagtgggtacgaaatagagccttctgattggcttaaaaactcaagaaaaagtgcaaaagtatacttgt

SEQ ID NO: 2630 - DNA, 522 bp, Arabidopsis thaliana landsberg
  unsure (1)..(522): unsure at all n locations
aaaccatctagttttctgatcaatttcggtctctaagaatgaatatatttcgactcatctcatcataatttggatgtactggttgctggcttgtgtgttactaaagacttaccaaggcactgatagtgtgatcatcatttgtgcaggagccatttgtagatatcctagatcagaaaatccgtgaagcactaaaagtccttctcggtaaaaatcatagaagccctaaaagaaacttaagagaaaatcatatgttttgattatatatacaagtcttctaatcttgtcttcttttttaatcctcagatgagaagaaccatccacttttgattcattgcaaacgaggcaaggtatgtaaaattgtaaatatcaaaaagctataaatctccttagttgattttcattttctttgtattgactcaacacaatggtttatatatgatcattgcagcacagaaccgggtgnnnnnnnnnnnnnnnnnnnnnnnnnnnnaaatggtgcataacatcgatacttgatgagta

SEQ ID NO: 2631 - DNA, 519 bp, Arabidopsis thaliana landsberg
  unsure (1)..(519): unsure at all n locations
gcgttatcgaatgggaagccgactgttgttgagttctatgcatattggtgtgaagtttgtcgagaactagctcctgatgtttataaaatcgagcagcaatacaagtaatgaatcgtcttttatgtgatttttgatcaaaatcaatctcctttcaaaatgaagcctttatatatagatgaaagacaagctagagctttctagttgcagaacggnnnnnnnnnnnnnnnnnnnnnnnnnnnnnnnnnnnnnnnnnnnnnnnnnnnnnnnggattaaggaatcttgtcttggaatggatttagctaatgaactagctagagctttaaagattctagttgcagaagagttcttattttgtgttggtttaatggattagggaactatctttaggattggattgttggctatgtagatagacgctaatgaaaaaggtagagctttgagattttnnnnnnnnnnnnnnnnnnnnnnnnnnnnnnnnnnnnnnnnnnnnnnnnnnnnnnnnngacactaacttgacg

SEQ ID NO: 2632 - DNA, 553 bp, Arabidopsis thaliana landsberg
tttgagatcgagcaaaaaatgggtaagtctgattaattcactttttttgattaagccagttgtagctctatttaaggggggtaaaagctaaaggcaatcgtaatatgttgaggaaattgcttttcatcttcaactaaaacgcaaatcgtttagaacgttttccataaacctcatgctcaaaaaacaagccggaaaagatgcagtcttaagtggtaaaccaccacaaacgccatcaccaacacatccgatgagttttgaactgaaaagaaaaacgacaccaaaagcaaccgtgatagatcctaatatacaaaccggacagcgccggaggtaaaacgaatactagtcatcgtcactataaaagttgatcgatgctagacataactctcaccaaatactgctgcataagccggtgtatgtcggacgggaagttggatttataccggacgacaaataacatgttttgatgctttctttcctttgaagatataaaaagagaaagagaaggaagcggtccttctttggctttatgacttcctatcaaaagtttttttat

SEQ ID NO: 2633 - DNA, 360 bp, Arabidopsis thaliana landsberg
gagaggatgaggaagaaagtgagaaaataacgaggaagatgaagatgaagactttaacgtttaagtaaacgagaaagcaatgatgacaacggctaaaagaaaattaataatcaagatgacaagaatgaatatgaaaagtcagaaacatcgaatgtgaagagaaatacaaagacatatgtgttgacattcaattgaatatgaaaaaataaaactgattcatgatactttcaaataaattcgattcttaaacactactgatttatataattctaatatagtgtatctgaaataaaaatgaacttttacttcgatttaaaaaatataacttaatcgtatgtatttccctaaccgaactatatc

SEQ ID NO: 2634 - DNA, 629 bp, Arabidopsis thaliana landsberg
  unsure (1)..(629): unsure at all n locations
catcctttcgaagttggactggtacatttgccaaaaccacatcccgagtgtactctgtatgtactttgtttttgtaatgatgaggaattaccgtgcatcttttaaaaccgcatcaaaagactcagcgagattgctttgttaaacatattttttgatatgaaccctaagatatgggacatctatatcaatcacataatagaatcataaagaggatttagagttacctccattcattgtacaaatgatgctacnnnnnnnnnnnnnnnnnnnnnnnnnnnnnnnnnnnnnnnnnnnnnnnnnnnnnnnnnnnnnnnnnnnnnnnnnnnnnnntttctcttcccttacctctaatctttctctttaagtgttgtttttattaatatgatacatttgtgatggagcaaagcatctacttatagatagggagatgaccttattatcattaggtaagacacataatcttagttaaaacaatgggcggaaattttttaaatacactaaactataaaatttaggaaaatatacttcatttgagaagaaaagaaaaactacatattttttagttgtatgagtacttaaatacctaaattataattaactatttatttctaanaaaaaaaaaaaatcaa

SEQ ID NO: 2635 - DNA, 354 bp, Arabidopsis thaliana landsberg
acttctacaatactcaggctatgtcaatgttaaccagtctcatggtcgtgccctcttctattttcttactgagtcatcttctccttctccccactccaagccccttcttctttggctcaatggaggtcagtttcttcactccaaattactttttatacatggttaatttttgcatatgcttgttatatatttttcttgtgtttataattctaagaactatatttttagtttattccggctatgagttatatagttaatttgtatatgcattgcactcacacgaaaactactccaaattagactaaactaaaagcagcgtaaattttctaaagatgtaaaataaaaaacaaaacc

SEQ ID NO: 2636 - DNA, 559 bp, Arabidopsis thaliana landsberg
  unsure (1)..(559): unsure at all n locations
aaattacccctaaaacatagataaactaattaacataagattttttttcaactagtatccactagtccaataaatgagaatgtatactaaagctcaaaaagacgcgtgaacttacagataacttttgtcagatccttgaagttgaaatcaatggtgaaccaatcctgagtagggactccattaagcaagtaagaagttttccgtttagggtaaacatcttgaatattggaagcattcatcatcttcacatcagggaagcaaagtccaattgcatctttcgttagttgcacatcacaccaaagaacagcaccaggaacactagtctgcgatacaaaactgtaagcatcgagacttgaatctggcaacaacccagaaaacccaccacgagcaatgacaaggggagcatctcctacaaaaatggaaacaaaatccgatgaaacctataagaaagcttcgatttttctttggatgaaactcagaaaacccccaaatttttctctttgatttctatgaaaggattcaaaaggaagcaacttttctactgatttatngattaaca

SEQ ID NO: 2637 - DNA, 344 bp, Arabidopsis thaliana landsberg
tcacgttcctttggggcctgttgctttttgagtatgggtggatcgttgtgaccagaaaagatgatgcactttggaggcaatctactgaaatcgagtatatggaaaatgcacttggaacttctattgcctggccagaagataaaactgcaatggtttgtgtatactttaaatttacatgtatgaaaaatatgatgacaacaactgatttcatttttttttctttcaggaatgacgagaacgtgctgttgcagatggggcgagttttttaactatggtggtttttaagtttacagacataatcactttggtgttttttaagtttgacacataggtaattatcactt

SEQ ID NO: 2638 - DNA, 1215 bp, Arabidopsis thaliana landsberg
agggggcagaagctacaaactgtgaaaaggggaggctctgttttcggatagcaaaacagaggggatgaaacatgataggggaagagagggaatgagagatggtagtgataatggatgatgaatgtgaatcagagagtcgagctcgtcacgtagggtgcaaatcctccttgcaaggccttttacaaagctcttaaacactcgtttttgttaaatcaatataaaaactgagttacaaagactctatttaaagaactgagaagataacgactaaaacgtgataacaccaaatcaaagaagactaatcctaataacgatttaaagttatcaaaactgaaaaagaataaagataaaccaacacttgcaatcgatgaagtcgcaaacgtgaggccaacataatgaagatttgatgcccaaatatcaaatgatgcgctgcatcaagtctccccgggtgagagaggattcgaccccgaatccaacggctcattgttgccacggaaagaagacaaatacttgacgttgaagacgtccgatgtacgcatatggtccggaagtcgcagacgataagcattggcattgatgcgttctagcacttcaacaagacctatctttcgagacttgagcttgttgtactctcgtactggcaatctatccttggtgatgactacccaaactaaatctccaggttgaaaaatcaactccctttgcttatgatatgcagttgtcttatactttaacgttgctatctcccaattaagtttggcttgacgatgaacctcctgcaactctgtaacaaaatcaatcgcctgtccatgaaagtgtagtaagatccaaggggcagcgaggaatcagtccataaaccacacgaaatggtgaaaaccccaaattttgattagaggcatgattgtgggcgaattccgcttgacaaagcttcacatcccaactcttgatattgtcacccaccaagcaccttaacaaaccaccaagggtgcgattagtaacttcggtttgtctatcactcttccggtgatacgcggagctcatgtcaagattcgttcgcagcaacttctaaagtgatcgccaaaagtgactcagaaaacgtgtgtcacggtccgacacaattgaaagcggtaaaacatgtagacgatagatttcatgaaagaaaagagtagccacactacttgcatctgtcgtcttcttccaggggataaaatgttc

SEQ ID NO: 2639 - DNA, 450 bp, Arabidopsis thaliana landsberg
cgtataaattgggatcgatgaggggttcatttgcgttaatgtcattaacaaaatgacagcacgtgagattcaaccgcagaggagagagaagcattggttgcactttgtttaaacaaacaatatttctatgttagacactcttttgaggataacacaacactgaatgacatgattttgcatttgatgaggaacttgcgattacacgcaacaatcccaaaacaagtgatcgatatataaaacgatacaatcagagtgtgctatgttccatggcataactatttaacaaaaagaacctatgattcgccttacttgaattggctataaatcaggtgataaaagaaaatgtttgcttgaaaagactgctttatatgctagagacgaagatggcgaggaacatgaatttcaaattatttcaattttaaaaccagagattccatatagagttaagtg

SEQ ID NO: 2640 - DNA, 384 bp, Arabidopsis thaliana landsberg
tggaggctctgtgccaatagagtttgttcgagctatattctcattcacacaaatggatgggattaccaaatagcatcaaacccatgggttggttcaactcactggacatttctcatcgagccatgtatccccgagatcgtcatattgtactcctcaccatttctaagttttggttaccagatgatcactgtggcactgagcggatagggctggatcttgaagatattgctttctttggattcgattagcggccggagcccactggttgattacgagtactggattgtgggcataaatgattgctgccgcgattcatcagcatcagtaatctaagttcttacgggttcgggcttgagcttgctctgctccatgagggacgcaacg

SEQ ID NO: 2641 - DNA, 527 bp, Arabidopsis thaliana landsberg
ccaagattacttatatcagtaatcatttgtgagaagtgatgttggatttagctgcttaatgtgtttttctgctactttttgagaggtattgtggtgtgtgcaatttttaactagtccggattttttgccacacagcgttttacctttgactttcagtccctacttatattggatgcggccttatatgcccccatatagtgaactgctcggttcttctcggtgcgatcatttcttgggggattctatggccatttgtatcacagcatgctggggattggtatcctgctgaccttgggtccaacgatttcaaaggtctctacgggtataaggtacagtaagcagcttaataagaaaccttttcataacaccacatattcatgtcaaaagggagaaaaacaaatgattccaagtactgatgcttttatgttatgcctgacttcttaaggtctttatcgccattgccattatccttggtgatggtctttacaatcttgtcaagatcatcgctgtcactgtgaaggaattat

SEQ ID NO: 2642 - DNA, 507 bp, Arabidopsis thaliana landsberg
aagggacaaacctttagtaagttgtaccatgcataatgcattagacatatatcatcctataccacaccataggtattttacgtgtcctaggtaattattgtctctcttttgtcttttttttacccatattattacgtgataaatagaaaaatagtcacttttttaaacataattgaaaaattaatcactttactatttacaatttgtaaagtagtcaatttaaacagtttgattatacttagattgaacaatatttttagtgtacatatgtaaatatacgctgtgtatattggtacactaaaaagtataattaaatagtaaagtgactactttctccaaaaaaaacaaggacgttctttcaaccattattatgggaacattaattaatcatataggaatatcaatgtggaaccccaacaagaccaattctacctagcacaaatgcaacaaggaaagtacttccaacagaagtcattattacaaggtcaagctagaggggttcaacac

SEQ ID NO: 2643 - DNA, 572 bp, Arabidopsis thaliana landsberg
  unsure (1)..(572): unsure at all n locations
ttcttgtggttcatgaatcatgtcgcttgcaacagggttttggcttcatcagatgcaagtccagcatattggttgttataaccttgtcgtggaagcagaagattaaattcataatctctcaatcaccgagccaacaaacaagcactagaagcaccagcaacagcgtgtgaaacactgatacgtactgaaggctatgatcttnnnnnnnnnnnnnnnnnnnnnnnnnnnnnnnnnnnnnnnnnnnnnnnnnnnnnnnnnnnnnnnnnnnnnnnnnnnnnnnnnnnnnnnnnnnnnnnnnnnnnnnnnnnnnnnnnnnnnnnnnnnnnnnnnnnnnnnnnnnnnnnnnnnnnnnnnnnnnnnnnnnnnnnnnnnnnnnnnnnnnnnnnnnnnnnnnnnnnnnnnnnnnnnnnnnnnnnnnnnnnnnnnnnnnnnnnnnnnnnnnnnnnnnnnnnnnnnnnnnnnnnnnnnnnnnnnnnnnnnnnnnnnnnnnnnnnnnnnnnnnnnnnnnnnnnnnnnnnnnnnnnnnnnnnnnnnnnnnnnnnnnnnnnnnnnnnnnnnnnnnnnnnnnnnnn

SEQ ID NO: 2644 - DNA, 1642 bp, Arabidopsis thaliana landsberg
aaacactgtggggggacatatacacgtaaattttaatttaaatgggtaacaaactgtattcaaaatttaatcaatgtgaatataatgtgcattggtagaaaatacataccgagaccaatggcatccgatcctttcatgagacgtaaacgcttgcatgtatcgacgaacattctaataaataaaaagattaaaacaaatggttatttattagaaacaaataaatgacataaacaaaaataaagctcgaattttaaccgaaacaataaagctctaattaaatggtaattaataagggagaagaagaagacgtacggccaaggaacgtcgccgacgagcatccaatcaccgtctttgtcttcataagagggaacatagtcccagctattcaccaaatccatcaatttcctctcattcatgaagtctatcattccttcttctcctccatgtttgcctaaaataatcttaggtataagaacttgatatcctgaatttaaacttggtggttttcttttatggtgcaacaaatgaaatatacatttttcgcaattggattttatcacatagttttcttttcacagtttctaaactactattaacgggttactcaattatgaaatatttgtatactcgataacggtaattcatttgggactgatctatcatcatgatgattaatttttctttctatagtaacaattaattagtaactaaatgtgcatggaaggatctacatatatatataaggaatatacttataaaacgtacccatggtaaaagagctgaacatgttggacaaagcattagaaagctcatcgtagcttttatacatcctcaaatcgattttcctcaagtacggtgctccgtccattgataccttcacgaacgccgccgcctccgggccaccgcttgatttttggcaggaaaccatcacgttcttccggtatgatctcaccggtggccatcccacaacttgtgccctatattttttttaaaacggaaaaacggttatgttatacaagatatagactgtagttagctttgacgtgatgtcacataaattttacttgcatgagactatgggttaaacataattaaatatattaagacattggacgatttaagaagagaaaaaaaccgtagaccatatgataaaatggttttggcgaagaaaaatatatatctttaatgaaatttctgtttttttttgcagtcacctttacaaaaatgttaatattaagagcagtagagaagagtggaaaataaatcataaaggacaaaatagtaaaattacttggccggaggtttggctggatctttaggacaagcactcttctccttggaatcaaaagtcacgacgtcatgagtcgtagatccttccttgtttgcaggctcattattaagatttagcttcagatcaaccgtctctgagaaccctctcttgattccggataccggagccactgtatctccaccgggaagaccaagacacagctcagtctccctcagaaacagctcgacactggccatcattattaacctttcttcttctttggggttcttcttcttgggaaggtgaggaggaagatggaaaaaaggttttataaaaacactcaaataatacaaagtgagatgaggctgtatt

SEQ ID NO: 2645 - DNA, 731 bp, Arabidopsis thaliana landsberg
agataatttgggatataaccaaaaccttaaatccgtgcagccttgacacttttgatataaataccatgtatcgataatctatggttaactttacattttactttatatatgtgtagacctttgatccacaagaatttgcaaaattcaccaacgattaaacaatatactcttttaactttaatgcttcgagaatccattggattgtcggctcaccggaactcttaattctttccagtacatggcaaaagtatcatcaacatatggcttttgttgttcctttaaagcaagttgctataaaaaatcgacaaaagaatgtgaagatatcttaaacttattgataatttgcaagagaatctcatatattcatcccctcctgaacgatcactacttttcaaacaagcaacttagcacgtcttcaaaattatttgtaagtgccacacacgaacccaaatggagaagataatttaattattacacaaaacgatcttatataaagggttacattgttgaactatatcataattaacaaacagaaaagcaacaacaaaaggagattaaaagaggagctacgggtaagatgatatccttaagaatgaaagggcttggtcattgcctagtttatgtcgtggtctttagtgtcattgcggctatagtgacagcatacgactcaccctcttcaacaccacaatacacttccccttatccacctaaaaactattctccttatctct

SEQ ID NO: 2646 - DNA, 498 bp, Arabidopsis thaliana landsberg
aataagaaagacgcagatgattactggggtgcagtagcttcaggtctgatctgcggagatggaatttggaccatcccatccgcaattctttctatattaagaatcaatccacccatttgtatgtactttagaccatcctagacattgttatcatgttaaaaatttgttgcattatggcagataatagagtttttatatctcactctagaacacaaagtgccaatagcagcaagtatgtggcataaagtcaaacagacaaggttgaccaacgaaactttatttgggcttatcctgtgagcccatagacttttgctaagaagcccatacgaatctctttactcgtgtttgcgaccgaaattattaaaacctctaattcctactcaagaaccctaaaatgccagttgagaaaatttagacgctcaaggatgtgtttacatcttgtccggtggctcgaagcaaattcaacttctgcgtactgtttctttggtgaatcatgga

SEQ ID NO: 2647 - DNA, 1413 bp, Arabidopsis thaliana landsberg
aaacaaccttcctttgctacctcctaaaccctccgagcctgattttagtcttcgtaacctttaaaatatctcttacacatgtccacttaccacttgtataatattgtgtcaacgacattaaagcttaaactaattacaaaaatttagaaattttgttatcttacaagaagaaaacatggcttatatggattagataactttaggtaacctaatttttttttttttatcttaaatagctttggagtaaatattacaaatttatttaaaaattgtttttcatgtttaaccaataacatacaatttatcatgttattttatctaagagtaatttttccatatatatatatatttattataagattcaattgtagataatttttacttaataatacatcatttaccatatcatatatagatattagtttggtcaaattgtacaaaaaaaatcgatttctcctgaccgacatagattcagacaatataaagcccagtcataaacccaaaagtgtggataagataataatcttagcccaacaagcagcgagagagagagagacttattattagggctccgtcaaatttccccaatttctctctgattcctctctagaaatcgaacttcttcttcttcgtccaagcttttgaatcgaaaatcgatggcggatcagagttctaagccgttgcagtttttcgtgagactactcgacggaaaatcattaaccctaagtttctcctctccgttagcttatggcgagcagatcaagcagcggatcttcgagcaaacgaagatcccgacgcatctacagagattgataagcggaggataccaaatctccgacggatccgcgatttctcagcctgacgcaaccgtgaatctggtcctttccctccgtggtggtaaaggaggattcggatcgttacttcgtggtgggggtatgaaagctgggcagaagaagacgaacaacttcgatgcttgtagggatatgagtggacggagattaaggcatgtaaacgccgagaataggcttcaggagtggaaggatggtgaagaagggaggaaccttgagaaaaaggctcttgagtacctgaagaagcaatccaataaagttaaacaaggtgttggaaatggagctacgcagaagtatgttagtaagtataaggaagaatctgataagtgtattttggctgttgatttggctttgaatgaatctttcaagaatgggaagagaaaagcgaagattggtgctgaatctgaaaagaagaaacggctcaaaatatggtacgaattctctttacttgattgattgttaaagttgctattgcctctgagattgtgatctaattttgtacgtgagttctcatatgtatgtgcttgacgttgatgatgtgttggttttataggaagggaagaga

SEQ ID NO: 2648 - DNA, 534 bp, Arabidopsis thaliana landsberg
tggttctgtagggagggatactgcttggaccttctgttttagggtgaagcaaggcctatcttgacaccatctgcccaaggaagagcttgaccgttttagacacactcgccaacattggtcttctgtttttcttgttcctagttgggcttgagcttgactttgcagcaataaaaaaaactggaaagaaatcactattgatagccatagctgggatctcacttccttttatagtgggtgtaggcacatcttttgttctctgtgccaccataagcaaaggagtcgatcagcttccttttattgtcttcatgggtgttgccttatcaatcactgccttccctgtgcttgctcgtatactagctgagctaaagcttctaacaactgacattggacgtatggcaatgtctgcagcgggagtaaacgatgttgcagcttggatactccttgcgcttgctattgctctctcaggagatgggacttctcctcttgcatctggttgggttcttctctgaggaactggattcgtgatctttgcag

SEQ ID NO: 2649 - DNA, 655 bp, Arabidopsis thaliana landsberg
tggttccgatataatcaaccaggggggttttttttttggtatcatgccgtttctccaatgttaagagttcattgttaggtaaatcacgtcacatatggaagaacatttaattaccaaaaccatgatatcttaagaaatgattcaaatatatgatcctataatgtcttctcttcttgctcatgtggttagattattttgtttgaacctgtgatcttttctaacatataaaacaatgtttttgtttatgccagtcggtgtcaacgagcattgaaggaggaacaaaatggttggtcaacaaaatcaaaggtttgcttttttttattcttcttcttgactgcatctttcaattttttgtttttttgaaattccccatttgtcatcatgttgacagggaaaatgcagaagccgttgcctgagttactaaaagaatatgatttgccgattggaatcttcccgggagatgctaccaactacgagttcgatgaagagacaaagaaactaaccgttttgatcccatcgatatgcgaagttggatacaaggattcatcagtgttgaagttcacaacaccagtaacaggacatcttgagaaaggaaagctaacagatgtggaaggaatcaagacaaaagtaatgatatgggtaaaagtggcaagca

SEQ ID NO: 2650 - DNA, 374 bp, Arabidopsis thaliana landsberg
  unsure (1)..(374): unsure at all n locations
nnnnnnnnnnnnnnnnnnnnnnnnnnnnnnnnnnnnnnnnnnnnnnnnnnnnnnnnnnnnnnnnnnnnnnnnnnnnnnnnnnnnnnnnnnnnnnnnnnnnnnnnnnnnnnnnnnnnnnnnnnnnnnnnnnnnnnnnnnnnnnnnnnnnnnnnnnnnnnnnnnnnnnnnnnnnnnnnnnnnnnnnnnnnnnnnnnnnnnngctcaggtcccataagctcgatcctatggaatctgacccatggtctcattgagcgaaggggtgacgagaaaaatacagtcagatttatctttgatcatagaaaactgaaacaatgactatgtgagatgttcgtttttttttatctatttctgtatcgctcgaccataagtgcagc

SEQ ID NO: 2651 - DNA, 2390 bp, Arabidopsis thaliana landsberg
gtctattgcactgtatcaaaaacagagcataaacacataaacgcacaaaaataaaaatcaaacacacataactattttaaagtcaccaaaacacaaacgaaattcacacaaataaaaaacatagcacacaacgtccaaacgcaacttaaagaaacagaaaacagaacataaatccacgaaaaaccacactcgaacatacacacaacaaaatcacacacacaaaacgaaattcaaacgcacaaacaaaaaacatagcacacaacgtccagacgcaacttctaaaaacagaaaaaaaacttttcacaggattttttttaacaaaaaaatgtgaataatcacatttgatggcaagaaattgcgttgtgagtgttcccttatttcttactttcttatctacttgctttattatagcttgtactaacttatatatttgaaaagtacacgagcattgtttgcagtttaaaacaggttttatgaagaaagagcaaaagtttcagatgagctttaatatactcatgactgacaaggtaatcttgttaaatctttttcatcgttttaaactcttttctattagaaccaatgggagtttatgtaaaaccactttaatatatattttaaaagtattcacgagtttcagttataatctcagaagatagctccgaccgggtatcaaaatttgagaaaaaggttagtgctttatagcattgtgtgttttctcatatttaagttgtgtggttctgtctgtttgatgtagatattgttccttaattgatgtgtttcttgctggaatattttgtgtgagtgtgcgaatgtaggagttgataaagagacttgaataaggtaagctttcgtgacgaattggtaaatcattttctagtttcgtaaccttgatttatactgaaattcacagttatccatatcaatgcagttctcgccatataaagcacaaattcaacgtataaagggaataaggtttgaactaatgatccttgaataatggctggtggacttgcactgagaggtacactttcttgtcaaaacccctgaaccgtagtcatctttttaagacaatgtgtgtctctaccaatttctgaggctttttaatgtcctctctgattccagagtcgatgaccaagacatttgtcacattagtgatcgttctcattgtgccttagttgtgatatgcataattcgaaaggaaacaaaaataagtaagcacatttgtctccgttttttgctaatttttattggttgtgatatgcatcatgcgtaaataactaactatatcagtgtgtggttggtttctaatatttaggttctcatggctgatctgatttcttgcagatggcactctactggaactttcgattgtcaatcaaggactggaggtccattcggaacaatgaggtttgacgctgagcaagctcatggagccaacagtggtatccacattgctcttaggttgttggaccccatcagggagcaattccctaccatctcttttgctgatttccatcaggtacatggttttaaattttaaaaagcactatttggttaacggtgataactgtaaggtttggattctaactctagatatccttgtggtgtgaaattgatcattcagcttgctggtgttgtggccgttgaagttactggtggccctgacattcctttccaccctggaagagaggttagtcattgctgtagatttgtttgccgtctctaaggttatcatatactcaatttggtcgagagaacgtgttctgctttctttgtagagatggctgattgataattgtgggacttgattttctgtttctaaaatgcatatcttgatttcaggacaaaccccaaccacctccagagggtcgtcttcctgatgctaccaagggttgtgaccatttgagagatgtctttgctaagcagatgggcttatctgacaaagacattgtcgctttatctggtgcccacactctggttcgtttctctccaactgcttaaaactttaaaatttgtttgctccaagcttacaaattctgatgagtgctagcaaaatatgatatcgcagggacgatgccacaaggataggtctggcttcgaaggtgcatggacatcaaaccctctaatcttcgacaactcttacttcaagtgagtatcccaagttcccttgtaggaggattcagtggcttatatggttactaatcaaattatatatgggcagggaactcttgagcggagagaaggaaggccttcttcagcttgtctctgacaaagcactattggacgaccctgttttccgtcctttggtcgagaaatacgctgctgtatgtctttcattcccttttttctgtttttcacttggtagagagagagagaagagaactcatggt

SEQ ID NO: 2652 - DNA, 522 bp, Arabidopsis thaliana landsberg
gaaacccttatgttgataaaatggtccggacgctgctgtagtacatgcttggtatatagttccaaaatcaagatcttcttcgtattggtccttcaagtgttcagatcccaacacttttgcttccatgattgagatgaaggcataacgtcgtgaaagagcatcagctactatgttgcccttgccctttttgtatttgatgatgtaagagaacgtttctacaaactccaaccatcttgcgtgtcgccgtttgagtgttgtttggccccgtagatgttttagcatctcatgatccgtgtgtatgacaaattctttagccagtagatagtgttgccatgtctccaatgatcttaccaatgcatataactccttgtcgtaagtcggatagtttaaagtggctccactcaacttctcactaaagtaggctacgggttttcctctatgagttagaaccgctccaatgccaagactctgagcatcacattcaacttcaaaagtgtatcgaattaggaagtactaataccg

SEQ ID NO: 2653 - DNA, 565 bp, Arabidopsis thaliana landsberg
gagattggagagattatctctttagactttcatgatgctacttcaactcagattgcttatattagagtccgggttcagattggtatcaccgagcgtctaaggttatttcaacgcatcacttttgagtcaggagaataagttgtaattcggtttcagtatgaacgattaagacgtatctgtagtagctgtttcaagttcaatcataacaggaactattgtccttatcttcaacgtctgcagagcattgaccgggaaagagcggcctttcgagatagtgttttaaggtccagtttaaactctcagtctcagatgactgctagtttcttgcctgctccttgaactccacctccaagggtcccagctcctccattgaatccagaagaattagcaggtgctagtccttattttccaagttcaagaaatgcagctttccaaccttacatggttccttctactcaagtaggtgtaggtcgtcatcatgtcttcccagactctaacattaatccttcctctggagctgcgattacttcaggagttcgacgtgtttatgaggtaggagaatcat

SEQ ID NO: 2654 - DNA, 2066 bp, Arabidopsis thaliana landsberg
  unsure (1)..(2066): unsure at all n locations
gtggagctgcagcgaggacaaggaagaggctcagccagatttggcggtgggtaagccgccgttgagggctgaactctggtgggtcgggtttggtttggttccgacggcatattaagttgagagtatgagaaaacgagagagaagttaatgggagagaagagggaagagagaaagcgaaagagaaggggatgttgtgagagtggtgacgtggtttttatatagaggctttagaccatgtatatgggtgatacctatatagtatcataaaaagttttttagtattatttataatatttgtttattgtttgagattttttatgatattcttagtaaatatgtttgcattggtgataccacatgtttaagtattttcgagaaaagggaagagattcagaaggaattgaaacagaagaaaattgatcggcaaaatcgccccgaaagagaatatttttgagagaaacaaaaggaattttttttttcttctttcgacaaaaacaaatgggcgacaaatcacgtcctgccacgtaatatgagactgagtatcagaagtctcaatggactgatacggctcatcccaattttatgtatttcggtacattaaaaaatattaaatgggctactgatactctaaaaagtttagctattttagctatgtacatgctctaaaacacaatacataaaagaggaaatcaatttgaaggaaaagaaaaacngtaacataaatgtgatgtgcgttagtgatcaactgttagtgatcacaattatgtttgacatctaacctctccagaagaggtgtcctatataaacgatataaattatggtttgcatgggcatggcaaatataatcatggaaaattttgtggctataggatgaaaaagctacggtaaacacacaggaaaatatcattttatataaatgtcccaaatttttcggtggttttttcgtgtcagtatagccacgttttgacattcgtgcattgtggctaatttttgccaaatatccacgaacttgtaagtggctaattagcctttgttcatgtttattatgtgactataatagatagccatgaaatacgagtgtcaaaatagtggccaaatataaatttcccgaaaaaaaggtgttgacatgtagatattattttgagtaaagtgagtgaagtttaaattcgagagatacgcaaaagagattatttcatttattgtaacttataacgcctcgaccatcaccgttatgggctcaaatttgtccgacctttggcacattactttggacactcgaaatacttgtgtactgatcatacaaatcatcaaaaaatcttttcatgtgttttgccctcattcacatagtattagaaatttattttacgtaagtcaccaatattttaatcgctcatgcttacacgctttaactttggaattttgatatagccaaatcattttatataagctctcattttatagatttcgaaaagtgttacaaccgcccatattggaacttgcatgtatgtatgtttagaaaattaagctgattttttggaatatatttgttatttcatctccataattctttgggagaaattgggtaatcctgatcttacaagatacatttcatcttacgggacacatttgagtcaggattttattagttaaaaaacttattaatagtacggtggatttgacaaatatatttgaaaatcagtatacaatcaattctctttaatattttacataacattttggtataactaataacttgtagtttttggtcaacgaatctatttaaatggacaaatcatttcaatttattactgggtattgaataagtttctctttaaaaaaaagttacactcaataatatatactgagtatttatgcttttggttaagaaatcaaataaatggatctttaaccatacttggaatcaattaggtaaataaatgtacattcatttaaagtagacgtatttccttaagtagttaaaattccattgtaattacaatgagggaagacaatcttcaaaaaaacaaaacgttcaaaagcatcattcttgaaacttttgcacaagt

SEQ ID NO: 2655 - DNA, 595 bp, Arabidopsis thaliana landsberg
tagcaagagtgttgtaagcttaggatgagagaatgcgtttggggacaatcggagtatattgacacccttactgttaccaggaatgtttgaaagtgcgagagctctaatttgtttctgaagagtaagtaagtgaatccaagtttctagttcaccatctttaaattagtatgcaaaatgatggattgtgcagcccatcatatcaccattgtgatttttaataacctttaagagaacaaacataattattttaataagacacatatacaatataagttgtcaataaaagccaatttgtttgtctcttgtgcttcagtttcgctaataaagatttgtatgtgaagctatatataatatcatgtaactaagtgaattaggcaagagatttttttattagattttcaataactaactattataataatatatttacaatctatatatgctcaccttcgaatatattgataaacaatcatttaaaatttgcgtgcgaaataccgttagtattatgttttattattgcgaaaaattaaagataaaaactctttagaaacacctaacaaacaaagataacgtggtgatatttataattagtttt

SEQ ID NO: 2656 - DNA, 592 bp, Arabidopsis thaliana landsberg
  unsure (1)..(592): unsure at all n locations
tgctctttaatttttactcttgaatttaaaatgtcatctttgtggaagtcgctaagatttgattcattttttcttctttcagatggctgatgtatggtcttgtggtgtgactctttatgtcatgctggttggagcatacccatttgaagaccaggaagaccccaagaacttcaggaaaacaatacaagtaggtttcttttttgaagccatgtatctgcatatctcgctttcgccacatcctattcgtcaatgtgtgatcttgttatacagaaaataatggctgtccagtacaagatcccggactacgtccatatctcacaggattgtaaaaatctcctttcccgtatatttgtcgccaattcactcaaggtatacatcaatcaactgaactaaatgttttcaaagatgccttttgatttttctgaacaattgagctacttgttgtttcgtagaggatcaccattgcagaaatcaagaaacattcatggttcctaaagaatttgccaagggaactcacagagacagctcaagctgcatatntcaagaaagagaacncaccttctcccttcagaccgttgaaagatcatgaaga

SEQ ID NO: 2657 - DNA, 434 bp, Arabidopsis thaliana landsberg
aatctgttcgttgtggtttttagttttgtctgtttaagttttaagaataagtttttccatgaggggatttgggaactttacatgtataagactatatttctgtctatgatgaattatagattatcagaaatacccttacttcatcaaatctataactcatatttctgttgaagttatcaaatgggattgaaaaaaaacttattctttttgctcactcaaacaaagataagaaccacaactattgaaagagactctatggtagactggtcttgcaaggcaacttaccctcctccatcactgcagatcttcttatttgcaacatccgaaaataatctaacaaacattcatgatgtgcataatctcaagacttagaaaaaaatagagaaaagagacatggagaagatttattttggtgactatgataatgaatgaga

SEQ ID NO: 2658 - DNA, 577 bp, Arabidopsis thaliana landsberg
  unsure (1)..(577): unsure at all n locations
ccgttgccatcctgaaacatcgtcggcgtcgcagcgcccggctttttctcgtgaaaatcgagaaagacatctttgccggcggcgagatggatcagcatgaaaccgccaccgccgatattgccgcagcacggatgcaccaccgccagcgcatagccgacggcgacggcggcatcgatcgcattgccgccctgcttgagcacgcgcacaccgacctcggtcgccagatgctgggctgcgacgaccatcgcatgcgatgcgaccacgggttttgcatcggccagcgccgccaatgtcgtcggcggcgcggtggcgtcgagcgcgcgcgcggagatcgattcctgcgcggtacttggcgccgcanaaactgcgcacagcagcaaggcaaatgcgcagaaggcagcgcggatgattgataggttcattcgaagcagcagtagcgagcgggagaattccgaccttaacactgcgatgtncgagcccggattcctgagcatncggcgnnnnnnnnnnnnnnnnnnnntcngtataaccatagtaaaacttcgatcgagcaacagcaatgcaactgaagatcatc

SEQ ID NO: 2659 - DNA, 319 bp, Arabidopsis thaliana landsberg
gattgcctcatgggtttttgactttcaagctagggcttgtgtaaaagatacggctaactctgcaatcaattgaaacagtctacaaaccctccgacatagctttattaaaagaaaaataccaactgattatgaatcatctatcttggcgaccaagatagctctatccttcaaatatctaaatgggtataaaccatccttctttttcgaaaatgttgctcttttacttgaagtatacccttggtaatcatagacattactgtgatccatttgcatcctgctatattaaaaaaactgtatgccaacatgtattaaaaactaa

SEQ ID NO: 2660 - DNA, 552 bp, Arabidopsis thaliana landsberg
  unsure (1)..(552): unsure at all n locations
ccacttttcaccttgatgcgatagagagccattatttcaccctccttggtatacttagaactagtggagtatgggggagtttcagcttccaataacttctctctaaactcagcttcttctttgcttagttcttcatcataagcatcattgtcattctgaatttgctgctcttctccaccactgaaaaatgcagtcctaatcaagtcataagcatcattctctgaagattcaacactagccatgttatgttcccttctctctccatggttattccaacatgccttaatcttatatttctcatctatccctctaatcaccagatgctctaacacgatttctaatagatgatggcaaacattccgacagtcaatgcatggacacaataattcttcaggattacccaatttttgtgctgattcattcacaaaaacggtagcacctttctcatattcaatgctagcccttcatgtaaataaacaaggcaaaatatcaataagaagaaacaaagtttgaatanaacactagctaattgataaccagaaaattcatacc

SEQ ID NO: 2661 - DNA, 2915 bp, Arabidopsis thaliana landsberg
ataccctaacaatacaatgcaagaaccgcgtcagaaatcaagcatgttacaattggttgttgtttccaatgtggatgtactctacttcaaaatccaaagtaatttcagggtttcaagagcacattggtgattcaaccacggcacacaaataccaagtaaggttcctaataagaagaccgaagaacccatacatcgagaagagaaaattactgtagaaggctaggaaacggaagaaaaattaagtgaaaattgactaccttgaggacgaattcaaagagcaatgtcgaaggagtgatcaatctcctggtactgcgagatagttcaccgatcggagatagattcaagaacagaagagtcaacttcaatttctaaacgcaaactcgaatttgagcgattgagctgaaatcagtagaagaattacgcgacattttgtgacaaggatcaaggaagaggagcaggtggacagctgctaaccgccacgaaataaaccgggtcgggttatcaaataatcgggtcaatatctgaaacgggtaaaccgaatatttctagatgctccaccggttaagtcagacatatccgtctgaattatacgttgtgtgaatgcgaatctcaaataacttgttcaatcattcagttagtatcttactttattactcggttaattattaaccataaataaaaataatgggagatagtgataatgacacaacgttaaaagatctaagtagttaagtagtttagatttgataatataatgggaagttagagataaccggtaaattagctatagtcggtcggttagcattccggttaacccatcaatggctcgtattcacactagtcgcgcgactaactaatagagaaaaagcttttgcgtgtttgttgttgtctccatcgctcgtttgtttcttcttcagccatatcggaaaaaacgatatccgacgagccattcggtgtttgttccgagaagctccgatcgatctgtgttagggtttttctttttccgccttatgaatctctctatcgcggtttcattagattcagtttaactcgagtgatgaaaccaatctccgtgctagaggtaaaattctgttaggttttctcttttttgtttttatgcttcgtaccgatcgatatgattcctggttcgttttgtttccaaatctgcagctctttgatcccgtggctggtaggatattacggcgtttgtagctctggtatggcttttgttgttcgtttggttctgattttgaaaattttcgaatttttaatcggaatctgatactagttcatcgttttattgttacagtcgtcgtggatagagttagaacgacgaaatcagccttggtttcctaactggtatttgttctttagcctatgttttcaatttttctcttccggttttttggtggtttgtgaaactacttaatcttcttgattacctaattaatcatatcattgtttacatcatttattttgatatttgtagttatttggcatttcagtatctgaatttttgcaacaatgtctgagctaaaagagcgcctgcttcctccaagacctgcttcagctatgaacctcagagatgcttctgtgactcggccttctgcttctggaagacctccccttcttggagttgatgtcttgggtctgaagaagcgtggacaaggcctacgctcttggattcgtgttgatacttctggtaatactcaggtcatggaggttgacaagttcactatgatgcgtaggtgtgacttacccgcccgtgatttaaggctgcttgatcccttattcgtgtatccctctactatcctaggccgagagaaggctattgttgtcaacttagagcagatccgttgtattattactgcagacgaagttctgcttctgaattcccttgacaactacgtgctgcgctatgttgttgagttgcagcagagactaaagactagtagtgtaggtgagatgtggcagcaggaaaattcccagttgagtaggaggaggagcaggagttttgacaatgcttttgagaattcatcccctgattatttacctttcgagtttagagctcttgaaatagcccttgaagctgcttgtacgtttctcgattcccaggttagtaacactttagcttcgattttgtttccccctcagaaaatatagactaatattgggcttggatttgactactacacgctaagttgatttaattttatccttctctataggcttcagagttggagattgaggcatacccgttattagatgagcttacctcaaagatcagtacactaaacttggagcgtgtgcgtagattaaagagcaggcttgtagcactgacaagaagagttcagaaggttcgggatgagatcgagcagctaatggatgatgatggagatatggcagaaatgtatctaacagagaagaagaggagaatggaaggatctatgtacggtgaccagtccttattgggttacaggtcaaatgatggtctatctgtttctgcaccggtgtctcctgtttcttctccacctgattcccgaagacttgataaaagcttgagcattgcgaggagtcggcatgacagtgcaaggagttctgaaggtgcagagaatatagaagagctagagatgttgctggaagcttactttgtcgtcattgatagtactctaaacaagttgacatcggtactttaatggctcctctcatttttacttttgatctttcttcgctagacagctttaatcatctgtgttcctctctttactttacagttaaaggagtacattgatgacactgaagatttcattaacattcaactggtaatacctcaaaattccatcatccacagctgatattaatccagattgagaatgcataagagtcatgctgaaaacctcttcaatatctgcagg

SEQ ID NO: 2662 - DNA, 547 bp, Arabidopsis thaliana landsberg
actccaatactcaaatctacataacgatataaaaacaaattgaaaattttaaatttctaacgactaatgcggatacaaaatgcggttaatttcatatctttcttaaaatccgtaatattaaaaaaaaaaacttcaaaacccaaatttgattttaagtataatatttgaaaatctgctaaatttttttgaatgaaaataaaataaaatgggataggattaacagttcgtatgggctgaaaactctgttccttttgttgggctttgttgtgcaaaagggctttgatgatgtcatcaatccaacgccgccaggcgccacctctctgtaaatgcaaaagccacactcttcaccggaaacgcaaaagccacctcctctctctctctctctctctctctctctctctctctctctctctctctctctctctctctctctctctctgtgagtctctgggtctgtcaccccctctggcgcacggagcctgattgcggggatccctgacttgatccctctctacccctctgtctctctctctctctctctctctct

SEQ ID NO: 2663 - DNA, 1922 bp, Arabidopsis thaliana landsberg
  unsure (1)..(1922): unsure at all n locations
tgctgtttgtgatagaagctgcaagatagtgattgattcctatatagtcagatgagcctttcacgtgttctgattcttcctccgagaaaatgggcattcttgatccgacgattcttttcattgtatccggatagtctccatatataagaggcccaagcatcctgagtttgaaagagtgtatttggtatttcttctcattttatgaggatatcttttggaacagtttgtgcttgactcaccagccgttgaagaaatcgttggctctttgagttgcaatggcatcatctttggagcttgtggaaggactaaaccctatcgtcaatatgctaaagcctatggaacctccctgcttatcctgcacattgtatgtactatttagtatgttattgttctcttgtcatcaactcacacattcaagaatggtgttatgcaaactatatgtaccttgtaattttgcttatacagtcttgaagcagaggcgtgcgcaagaagcaagttatggcctacgatatatggttcagttgaagagttccctgatgagcagtttctacccggtgaggagcaacgaccaggcggtgtgatcccatcattgtatcctccaatagtgaatatattagcctcgttgatcgtggtccagaatttgacgtgatgcccaaactctctgaagcaaacatttgcataagctgtaaagtcttggctgcaatgacaagaattatatcaaccattctttttttacattgcgaagcatgaaaagaaaactaagttactaaaatgaggttatttagcctnnnnnnnnnnnnnnnnnnnnnnnnnctccatattcatcttcaagatactgaggatgatcgtagtggaacagtgtcacatgtggttcgattcctgtaaaagtttactttaagtccaaactcaacacaacagaagtttttggtatccatgagtagtctcaccatggcttacaagttcttgaatgaagttcttatagaactgtagacccttgggattaacaggacctcttccatctaaatgagataagtgctcatcaagtaaagttccggcgtgaaaacattaagcgtgtttaagaagacttcttactcggtataagcctagaccaagaaatggagaatctgaaggcatctaagccagtttccaccatgagcttcacatcctcctgcacatgcaaaagcagaatctctgatgtgcaataacaaagccaatgtttctgtaattaactattcaagagtttgcttggtgaataagctaaccttgtacttatggtacccatcacttgttatgtctccgttacttaggttacctgtcaaattaagacagcatattggttaaacaccaattttactaagactagacgcttaattatcatttaactaaaaatcataacacaaaagaaaagcttgtaattacgagtgtgaaggaaagtatcccagacgctaggttttcttccatcttcatcaaaagctccttcccactatttccacaaattcccccaaaaaactcaaattgtagacaaaacaattaaaaatggaaaaccccgattgccattgatgtggtcagactcgaacctgataagcagaagtaccggctccgaagaggaaatcctctggaaaatcgtttctggtgaaggcatcaatgtagcttgtcgccaaaacgataaccagaataatggataacagattgaaatgtttcatttttgattttcctcctccggtttgagtccaaatgaacaaataattgaagagtccggttctgtcgttttcttggaccatttaaaaaagaaatacatatattgagtgaagtgtattttggtgaattgtgaggactatagcctatatcttttctattatcttccactcgtaaaacgcgaaaaataaacatctgaaaacgactatagaaatatcttgtttttg

SEQ ID NO: 2664 - DNA, 387 bp, Arabidopsis thaliana landsberg
attaagacagttggttctgcaaccccaaggatcaacaatggctgcccttccaataacgattttatttttccacaaaacgctgttgatgctaacgaaagcactgtgcttaacgatccttctataccccaaccccaaaataaaaaacagagtacgcctaagtaaaaacaagaccaaaacgtacatgaaggaaacaaatatgagagaaagacccgagtcgaggctaagttgctcgccaaaggcaaataacaggaagcgcagaggcgaagaaaacatacgctgccggtgctaaaaacctgcaaaacccctcaaaaaaaacatataattacaaacagcctctctatctcaagaagaatccaattataagtacccgaaaccagaacgcagacc

SEQ ID NO: 2665 - DNA, 5655 bp, Arabidopsis thaliana landsberg
  unsure (1)..(5655): unsure at all n locations
gatacgatggtaaaatttatgttaagccgcacatttgcaactaagcaatgctgccaagttgatatgaactggattaaatcctcttgatttttcttggaattggaaaactgatacaggggtttctagtcataacagatagatagatgatagatcccattgcggataagaaccacaccttacctgtaaattctgcccatgatttgcgtttttctttaatcagtggaagaagttacacttgaatttttatttattctcttgtgctttgttgcaaaccctaatattccgtttcattgttactatgtaagaaaaaagagctggaggctgagcttgccaatgttacagcgggtgccaagcctactcgaaagataaggttactaccacatacgataataattgttgaattttcctaattattcattggcacatacatctaatatattttgacatttattggtaaggtaaaaccagatccagtttcaccgtaattcagcctatgctttgtgaatactcaatgtgcctctgtcaaatttctgaataattgaattgatatgcatgagtatttctttttggtttcaagacctttttctagcctgtgtgaattttaaagttgaaaaagtaaagctgcaatgagattatttctgtatttggctttcaagatctgagcaagacaaggaaccacaggcagaagctaattctgatgttgagggtgatgggcccagtgaagaagctgttgctgacagtaagtaccttgtacctcaatgaattgctcttcatcaagtaataatgttttgtttgcttacatggtcttttcttttatctacccgtactatcagcgcctcaagaaatagatgagtatgatcttatggatcctgtggacattttgacacctttggagaagtctgggttctgggacggagtggtgagttttgatgcttaatgcacattttactatgttttatttcttgtggttgtctttcactgaaagaacttttttatactataccacttacttctcatgttgattgcatgtggcacattacactaactaacgatgtatcccttatagaaagctacaaagtggtccgaacgtaaagaagctgttgcagagctaacaaagcttgcttcgactaaaaagatagctcctggtgatttttcagaaatttgtcggactttaaagaaggtagttaactttccatgataagaagtttaggcagcattgattatatgtatatgttataatccttgttatgttttattccgtaagtagaatattatctaattggtgatcatgcagcctgcaaacatctgtgcttattgattaatctgaagttcgaagttcatgcgtttcaaaatgttttctggtcgcaatcatagtttgtggatgctgctattgttcaggattcaatactgcataactaattttgctttcgttttgataatatttgtaaatatttccaattgcagcttatcacggatgtgaacttggccgttgcagttgaagctattcaagccattggaaatcttgcatgtggtttaagaacacatttctctgctagttcacggtttatgctgcctgttttacttgtgagtcatgtagcatctttgatcgaaaagtataattggaggaagacgcttccagtcttatgagtgttaatactatttcttagatattaatgggcttaagtagctgacttggttttagtccaggaattgatacaaaattgctgtctgtttgttccttgaacaggaaaaattgaaagagaaaaagcaatcagtcacagacccacttacacaaacgctacaaacaatgtacaaagccgggtgtttgaatcttgttgacgttatagaaggcaagagtcagtttatcttggattttattttatgaagctctactgatttgcttatgattatcttttttagatggcgaccaattttgcttaagcatctgtctttcatcagtttccaatcaactttactctcttttgcagatgtgaagacagcagtgaaaaacaaagttccacttgtgcgttcttcaactttgacctggttgacattctgccttgaaacaagtaacaaagctcttattctaaaggcnnnnnnnnnnnnnnnnnnnnnnnnnnnnnnngttagttttcttgcgccaaatggctcctaattatactttgactgaactttaaagcatggcactgttagattagctatatgcaacaagttagtgctaaaaagacagacaacgtatgtcatgttgcagtattatgattagttggtgtagcgaaagcctggagttttgattgcagttaccccttctaagtttgaaattaatcaatggtttgaacttataacttaattggatgcctgaaatttgtaatgatgtagtgtctcaacgatggaactcctgatgtgagggatgcagcattttcggctttggctgcaatagctaaggtattaattttatattgtgctttgtaacagcaacctttttgcgttgttgtctgtggtacattaatgttgtacacatgttagaatatgtggataaatgagtatcgtttacttcatgttttactattcccgtttgtttattatcttttggttattttagtctgtaggtatgagacctttggaaaggtcgttggaaaaacttgatgatgttagaaaaaagaaactttcagaaatgattgcaggctctggtggtggtgaccaagctggtacaagctcaggtttgtggactttttgtactcgttagctaaacatcaagttttgtttgcgggggttttcccattctaattggatgctcttttcatattaaagtgacagttcagtcttcagttgggagcacagccacaggggtacgcttctatctatatcttcagggtcaaataatatttagttctataaaacgttttctcttccccttttgatgggataagggtagggcatctgggatgtggagatgtagctggtattagatgccttgtcttttcccatcgtgttgtctaagagtttgaatgggttttatgtcttgtatctatttgcctagtcgctcttataacattagtgtctccacaatcgttataccacttcaaaatttatgcagaactcatacgcttcctttgtaaggaaatcagctgcaagcatgttgagcggcaaaagacccgctccttcggctgtgagttttttcatactttttcttttgtggctgttgaatcctgcaatcatttggggtttcatgacacttgcacgccttttccttttctcttttgttctcaattccactatgacttggacgtcacattgtatgttaacattttatagcaggcgagcaagaaggttgggactggcaaaccgggtggaggcaaaaaagatggatctgtaaggaatgaaggttcaaaatctgttgaaccacctgaagatgtcgaggtacatagaaatataattataaatggttatgtgatttactatgtccttcttcagactttgatggtattaatatcttattcttctttgcaatttagcctgccgagatgggtcttgaagagattgaaaacagattaggttctcttgtgaaaccagaaactgtatctcagttaaagagctctgtttggaaagaaagacttgaaggtttgttaaaggccttgaggactcttttattctcaaatactgttatcttcatcattagttcttacttccttctttgttcatttctttttgcgttttgcttgggtggttaatctcattttaagtggttcatcatcaaattttaccacacataggataaatttgttgcgcaaggttcctgaattgatattaaagctcgatttcatgttgcctcttattgcttcagatcaaagctgcattagcacatgtcacagaatctctttgctagctctttaaaaaaaaaagtatttatcagtttggtgattttttgcattatattgccgtgcagcaactttggctttgaaagaagagatagaaggtctacaagaactagacaagtcggtggaaatcttggtccggttgctgtgtgctgttcctggttggaatgagaaaaatgtgcaggtatgctctaattctatctaaaatcttcttatttgtagttttaagaattgatttcccccaaaatatttaaagaagtacatgagcatattacttgaaaatgcaggttcagcaacaggtcattgaaatcatcacttatatatcttcgactgcagcgaagtttcctaagaaatgtgtcgtactttgtattaccggttagtatcatatgaagaaatacctagtttcagttgatgaatgctattttctgacctcagttgttctcttttgagaattatttcttttctaatttgcctgatttttatattgattcattaggcactagtgaacgagttgcagatataaaaacaagagcctctgctatgaagtgccttactgctttctgtgaagcagttggtcctggatttgttttcgagagggtatgtgctggttcggtcaactttctttgactttcattttattctgatcataatgacatatggcttttgtttgtagcttttcaaaatcatgaaagagcacaagaatcccaaggttcttagtgaaggcttgttatggatggttgcggcagttgatgactttggtgtctcacttttgaaacttaaggttttgaagatttttctacttggaaattcccatatcctgatttccctgtttatgtaactgcagggtctaggttattaatattatgacccaggagacttttgtgttcatttggcaggatttgatagatttttgtaaggatgttgggctgcaatctagtacagctgccaccagaaatgctacaattaaactcttgggtgctttacacaagtttgttggtccaggtggctacgaattcctttaagctggttcagctttgtctaaattctgtttggtagaataacttatcttaacactgaatcaaacttatgtttttctgttttcagacattaaagggtttcttaatgatgtcaaacctgcactactaagtgcacttgacaccgaatatgagaaaaaccctttcgaggtacagttgtgtggattgccttgatttgtctagttcttgtttttcttgctgtacttatattatgttcatcaggggactgcggctccaaagagagttgttaagacgtcagtttcaacatcaacatcttctggagggttggatagcttacctagagaagatatcagtaccaagattacacctaatctccttaagggctttgagagtcctgattggaaggtgctcttgaaattggaagtcttcttttgttgtctacacctatcaatttctttgcggaaatttatttgaaactgtagagttaaaattgagtcttttaaacttttgtagatgcgtttggattcaattgaagctgtaaataaaattctggaagagctaaaataaacgtatccaaccaaccagaattggtatgaagtcaggatttttttttatttataattctctgttattttagctttttcattccaaaattattcatgaatccttattgttatctgttatattcttgtcacgtttggtaggagaattatttggtgatccacgagcacgacgtttagtcttgtgatgcaaacataaactcgccttggaggtgttgtagcagccat

SEQ ID NO: 2666 - DNA, 565 bp, Arabidopsis thaliana landsberg
  unsure (1)..(565): unsure at all n locations
ggaaacccatattgccatcaaccattcaccattctcaaagtcgtagtggcaatatgacacctttaagcaaccaataccataattgttttagcactcacataggccagagatccgacgtgtcaccgtctccctagacttctttgtcaaccctttcacaaggaccaccattgacatgttttctagtctcgtcaccgcatttcagccttagaccacaggggactacttagtcgtagcatatcttctccaactttcccaaataattccttcatcatctttgttccataatccattggggtcggtgagctctactcaaccatcaagattcatttctgcaatctaaccacacagaccacaatcgatgactcgaccgtcgcatgtcttctcttctattctgttggtgagctcatatatggtgttagtctgtcctaattctatctggtagacgtacacttctccatcaactgatgtggagaatgaaagactcttctttaggtttaaccaaaactgttctgcaatgcctgcttgggttctgggcactaagtctnaaaccatcattaacactcta

SEQ ID NO: 2667 - DNA, 504 bp, Arabidopsis thaliana landsberg
  unsure (1)..(504): unsure at all n locations
ggatgtcctgccggtccccgatgcccgtctggacggagaagagacattccagtcttgtctaatagcctgatgttggaacctaagccaaaacctttcccaaatttctgaaacacctcaagctcaacatcacgcatcacatcatctacagttttcatatttgcttggccttctttaaacggcatcgttctgttgcaatacccaccagtgttccactctccgttttcgaaatggtcaggcgttgttgttcgaaacagaaccagcggtttgtggtttgagtttaggacgaagtcacggagaaggtttagggttttgcggtaggagtaatnnnnnnnnnnnnnnnnnnnnnnnnnnnnnnnnnnnnnnnnnnnnnnnnnnnnnnnnnnnnnnnnnnnnnnnnnnnnnnnnnnnnnnnnnnnnnnnnnnnnnncagagataacaacgtagtcgaatttcgggtactggacggtccatttgtggtcaagctggtcgaggtaaagctgaata

SEQ ID NO: 2668 - DNA, 582 bp, Arabidopsis thaliana landsberg
accttaaatccgtcatctatgggaagtataaactctgtggctgaagttaaaatttaggaagatccttcgacaaatcagggagaggtggaagaagaatcacctagaaccctaattgaagatcagagagacgtggaggaatctaaaaccatccctgaagatcaaaaagatggtgaggagtcaaaaaccctaagtgaagatcaagtagatgtgaaggaatccaaaaccctaattgaagatcaaggagatgaggaagaatctaaaaccctagatgaagatttggatgaaacagaggaagagagtggagagtgccctttatgccagttcataaagggaggtgagtgtaaagaagcattcacagaattggagaattgttgcgacgaagcaaagaagaacaatgaagatcacgtaagtaaatgtaaggaggcaagactcatctttaagacttgcatgtatgataaccctgtttactatgagccccttcttgctggtgaggctagagcgatggccaagatgttgagcgagttgttgaacgcggaaaaggaagctattatggctggtgagcctgcagtcattgcgagggcg

SEQ ID NO: 2669 - DNA, 325 bp, Arabidopsis thaliana landsberg
aacgaattcatgaatcaggatcagactttttcattttttcgcaaaaataatgagtaagggtaacagggtgcattaagtgggtcttaccacttttctacgagatgtcttacgtggtctatacgagaagtatttggtgagacattttttacaaatcatttaccaaatgctgaataatgcgggatattttctacagaacagggtgcgatggaaacgcttatttgctacacagagctatttagaaaatattgatctactaaagttaaagaaaattgatcgtgtccactccatacgatatataggctgacgagttggtaatgctgaacat

SEQ ID NO: 2670 - DNA, 529 bp, Arabidopsis thaliana landsberg
aatctgaggaatttaattggaggaatttgagttaactcatacatttaattggaggaatttgagttaatttatacatttaattggaggaatttgaatgttcatatttgtcatgagagtaaattcaaatattgaaagcctcctttgatactgttttctttaacgttaataaattattttaactaaaataagtttgttttttctcttgcgggttcaatcataatgaatttgataaggtaaaacttggaagatagtttggtcgcaactatcttcttcatttcgaatgttctaagcgaattttgggaagctctcaaaagcttgtagaagctctcaaagaatttgaaagctatagacaacttctgacaaaaattctttagtttttagtgaaaatctttacaaggaagtggtatgaagaacaaattgtggtgatgaatttaggttaaaaaaaagattttgattacctgaacaaaatttgcgtaacttggaaagctagcattgaaagaatcttacaattaattatacatttagatga

SEQ ID NO: 2671 - DNA, 2297 bp, Arabidopsis thaliana landsberg
  unsure (1)..(2297): unsure at all n locations
taaacggtatcgttcgaataagaggggcaaatatttttagagataaaacactgacaaatacactatgtaagttgtaaggaagtttaactcaaaactaattgatatgaatatatttgatgattcatgtctattgcattagagtacattttattttagatgtgagatttctaaaacgtattttcgatatggtggttcttctagtcatcatgagatgacactttttatatcaagaacacactctatttggattaacaatctagggttatgatatcgtgatcaatgaatgcacttaaaatatatatatatatatatatatatatatagagagagaggttttgatatcatgttaagttatatgagtttctaaattaaaactaattagtatgagtagacaactagaaatatatccaaagaaatatggaaaaaaaaaagaaggaatttattaagtacgtaccggtggaagaagagagtagtccttggagatgaggggtaaaggaggaattggatgggtaaacgaggaaagaaggagaagaaaatcgttggtgatgatgttgttgaggattatatggttgaggaagatgatgaggatgttggtatggtactctaggagcttgaagagaatagccataatagtatggagaaggcatgatggttgctcctgatgatgatggtgatgttgctcctcctccatgaagctgttgctgctgctgatagtattgtgcttgttgcaactgtgtgttgtacaatgcctgtggcaagtatatgatcatcatcatcatcatcatagtcgatgtctatgtttgcaacaaacatgcatgtgctagtgtttctcatgcattatgtaagtggtcgacatgtgcaagatatgttgtacgtaaaatctattatttatttcacattgcactcatgattaaattcaactttgctttatgttcatctttcgtataatgttatgtcagtgatagaaagagggacttacttggtggtacccaaattgatcagggttatagctgtacctgaaaaaaacgaaaaattgagtgattctctattatatatataaaaaagtttataattttacaaattccgcttctacttattaaatttaaaacatgttattaaaaaagaataaaaataagaactaccttctattacattcttgcacgttaatggtttctcaacttccttatcggactataatgcattgcatgattttttatctacatgactacatattaatgttatcatatttacagcctgacagcaagtggctcgattgacgcattaaattgtctcctannnnnnnnnnnnnnnnnnaccatctccatatgagaaacatttataaggattttagatttttattttctaaaattcgatatataagattttacccgtaggacggatacatgagctgcggagctgcagccggtgggagtggtgcagccattccggtatagcttgattgtcctccgccttgatactgactagggcttcctccttgtcctcgtcctatgccatcaaaaagtaaataaaaagtttttctattgaatttaaacgattacataaaattattacattgctatataacattcttgaacaatgtagcatttttccttgtatatgtatcgtagaaattcattaaaaattatgacgatagaaaaattggcgtataatatctccaattaaagacaaaaggttatcttttgataacattacgttttgaaaacaaaaataaaaatgttcttcatcatcgtattagtttttcatcattttctcaaaacaatgtatggattagtcccatcaaacaattcagccaagaaaagtaagtagatcaatgatatcattaaagttcacatttcaaagaaatatggattgagttaacgaacctcgaggcgtcgatggtcggggccgtccaaaagacgcaatattgcaatttgcctttcgtccatcgatcaccggattcggatcagcgacggctctcgtcgctgaatccgagtctcgaaacgtgacctggaccacggagatgatgacgtgtcaaaccttgagaatccttaaaatggtggggaagataaaagaacttacaaaaccgtagcctttagattttccggtagccttatcggtaatgatgacggcttcaagaatctctccgaactgatcaaagtaacggcgcatttcatcggtgggagtctcccatgctaaacctcctacaaacactttggtgtgagtcgtgtctccgaacggtgatcggtaatagcttgtattagacatatattataaactgtttgttgatttgttgatcg

SEQ ID NO: 2672 - DNA, 405 bp, Arabidopsis thaliana landsberg
  unsure (1)..(405): unsure at all n locations
ccatgatcaatggagtctaataagcatttgtaaccagcttttattattcaattgttttaaggggcggtcgatcctatttatcctatacatcctttcctttaacnnnnnnnnnnnnnnnnnnnnnnnnnnnnnnnnnnnnnnnnnnnnnnnnnnnnnnnnnnnnnnnnnnnnnnnnnnnnnnnnnnnnnnnnnnnnnnnnnnnnnnnnnnnnnnnnnnnnnnnnnnnnnnnnnnnnnnnnnnnnnnnnnnnnnnnnnnnnnnnnnnnnnnnnnnnnnnnnnnnnnnnnnnnnnnnnnnnnnnnnnnnnnnnnnnnnnnnnnnnnnnnnnnnnnnnnnnnnnnnnnnnnnnnnnnnnnnnnnnnnnnnnnnnnnnnnnnnnnnnnnnnnnnnnnnnnnnnnnnnnnc

SEQ ID NO: 2673 - DNA, 4464 bp, Arabidopsis thaliana landsberg
  unsure (1)..(4464): unsure at all n locations
ctggtaataccacattatcccgatgtaccaacgatgaaattaatcttaggcatctagtaatgatattaatgagagaaactgttaagtgatattcttaacattttttttaggtttattatgttttatcaactctttattcggaaacaagtcgttttggatgttttatcaactataagccaaacnnnnnnnnnnnnnnnnnnnnnnnnnnnnnnnnnnnnnggagtaagccgagcccagcatctcgctccccaaataatatggtgaatctgcctcacttattttttacatagcccgtaactccctcttcaaattatacataggtctactaggcataagccgagaaacgtctcgcgcctagtacacaccgaatacttttatcataaaagccaagcttagtctcgcacttaacatctaactcggacttcgacagaaaaaattgagtatgacttctggtgaaaaccaatctactcaaaagccgatctcgaggattcgcaggaaacttataagtcatctaacaaacttaaatgtgaaagtcataaaattgatattaataaatcaaacaaagtttgctgccattacaaaggcatttattcagaaaaagtaaaaaacgatcaaacaattgatctaatcttattaaatttcaaaaagcagaaaacatcagatcgcccgattcgaaacagaatggttatccctcagaaggcgatctggcataggccataccaactgcaggtcgactttctcccaatcctctgacagaatctccaacgctttgaccatctgtttgaattcatccagacgagcagtaactttcttctgcttaactcttattttggcgacttcggcttcaagttcctctggacgggaatccaccttgcgcttcttatttcggaaatactgaagttcacgaaactgatcctggtgcataaatccgacctggatcgagaatgaaaggcgaagataataaacatcaagataaagcaagaagaataaaatagatggttcatacctagttgacaagttttgagattcggtaacttcagcatcagaagttgacggcctgagataaaatagtgaaggcgttctgggaataaaatcttaatctgcaataatactaggattcctctctttcaaggtgacaataacatcttgaacatatcagtatggcaggttaatgtctggcatgggagccaacctttgaaaaccattcttaatccagtttcgtggatgagattctaacatatccagtttatgaagtaattcggctttacgatcttcatagtagctgagtaattcacgatactctttgtgccttcgttcaacacatgataggaatccttccgcctcatgcctctcctctgaactcgctcaaaactgaagagtcgacgagactcagatattgttgaaaagggcatttcccgttcgattgcttcagcattagaaaaggtcgggacatttttgctaacaaagaaagaagatctggaactctccattatgcggtaaaaggaagaagatttagattcgatggaagaaacgatggcgcttggagaagtatttataaaatcaaaatagaagtgtgaaggaactttccctattctaaaaaggaattttcacctttttccttttctagagaaagtggaaattgagataatttccttttagttttgaatgaagcaaaagtaagtcgataataatcttaaaactagagaataaatttaaaaccgccccgcgtgtttcgatatccttgacaaataccatatgaagctgaatcctaccaagtatacgttcagagtaacatctagcttattcttgggatacatagtcactagcaaggaatcgaagcaaacccaaatcagataagtgcaataatcaaactaccgacattctagaataaaagagaagtccataggctgacgggtcgcattgcagctctgaatcgctttatcgcccgatcaacggacaaatgccttctgttctacaagcttctatgcggcaataaggacttctattgggatgagaagtgtgagaccccttccaagaacctaaagcctatctcatgagaggggcgatcttggccaaacccaaggtcgaagagacattgtatctctatgtcccggtgtcaagttcggccatgagtggggtattagtaaggaacgatcaaggtaatgaaaaaccaatcttctacaccagcaaagccctgaatgacgccgagacaagatatccaacgctggagaagctagcattggcagttatgacggcagcacgaaagctccagccttacttccagtcgcattccatagtggtttttaccgatcaaccactttggacagtgctgcacagcccaaaccagtccaggcgaattgcgaagtgggcaatcgaactgagcgagtacaatgtggagtatcgctccaggtcgagtctcaaatcacatgtcttagcgatttcatgattgaattgtccctagatgtaatcgatgaggtccttgaagaaaattggatactctatgcaaatggcttctcgtcgctgcagggttctggtctcggaattctactccagtccccaactagagaagtgctcgagcaatcgctccgacttcagttcaaagcatccaacaatgagggagagtacgaggctctcttagcagtacttcgcctcgccaagggaatcagagccaaacggataaaagctttcagcgactcgcaacacatagtaagccaatttagcagggaatttgaagcttaaagtggacaaatgcgagcttaccttttgttggtcgaagacctgtccaagcaattcgacaagatcgaattgataaaaataccctggagtgacaactcgtcagcggatgccttagccgcttttgcttcaaacacaaatcttgatctaagacgcacgatccttgtcgagagcataagcaaaccgagcatcaacctcccagttcgacctgcatcattgtcaaacccataacaactatggacatagatgccgagacatccgacaagccggatattaaagtagacccgcagcctactaattggagagatcccatcaaactctacattgctgatggcgaaattccggcagatcggtgggaagctcgtcgcctaaaggcaaaggcgcgaccaaggcgttcctcacatgcgtaaacaaagaggaagccgccataatcatgaaggaaacgcacgaaggggacggagggaatcattctggtggacgagctctagcgctcaaaatcaagaaggatggtcactactataacgtccctgaatcatcatatggtcagacaagccataggcgacccagttacgctataatgaagatgatcgaccacaacttattagagattccagatgaatttggttccttaaccaaattataatggaccctcttctcactaggaacatcacttaggcttgctgaccctcgtgatattctagtgttgagtgacctagactaggtcttatatcatttaacactcggctgcttttaagaaaacactttatacatagtatatagcttatactttgcaaagagttagcaaaaaatatatctttatgtcggatccttgttaaaatttacataataacaagtaatttttgcagaggcaacgcaaatatcctatttctgacaattcctagtgttcgtctccctgctaaggtcatccctctatggttacctgtaagacaagtagaatcatgagtaatctaacattactcagtgagctgggtctatgcacaaataaatctctagggtttaatcaacttaataggtaaagttatccatcagagatcacagagtacgtaataaacgtattatcatatacttataataataccagaatatgcagccaaactagacacatgaatgaaccttgggcccagcatactaccaaccttaccaaaaaggtgcaccacaacatcaacacaaactcctgcatacgtgtatatgtgttctccacacgtatgctaccacacacacgtacgtgcacacccacaccacacgtacgtacacaattgtgaacacccgagctatagccacaaaggcttataaccagaacatcactttaatgcatcgtcatgcattactcggcatacgctccgagtcttgtgccatcatgtaagtgaccactcaggatcaagacttactatcacaatcacaacacaaaaagggagacagaagcttactctaaacatgatggtatcgggtaaaccttgaataccacttagacacaataacctcatgcagtactatatataagtagtttaccatgccccaaactagtatagacaatcaagcatcaaatcatgtatcaatatatattcataatatagcaaggatttattcacaacctcatagcatatctcatttaagtataacaatctcacaaggtaagtaagccctcgaatcatatctcaattcatcaagtaaacttatttaagtccatattcatttaatctagtcatgtag

SEQ ID NO: 2674 - DNA, 602 bp, Arabidopsis thaliana landsberg
  unsure (1)..(602): unsure at all n locations
acaactaatttcctttgacgttttaactctcacctccatttggtttctctatttaaatatcccatttagacaaatgggtaaaaaaatcctgatcttttccggaacatgaataaaaccctcaatttttgtgatattttaaacctcaccttttaataaatagtaatagaacatctaatattattaaaccaaataaatatcaattaaataccaaataaactattatgttaagacataaatatagctacttagtttgccgtataaaaaagtaacttagtttgtaatctattttttccaaattcgagtttacgatttgttttctagaattgagttgttgttttttttctttgcgatataaagaaataagtttcatcgccattagaaattgttatgtatggctctgttcatttccttttcgctagcgactcatgtcaacgactcaaaaacagctttacttttaattaaatttgaaacgagctacaagtgacaagttaaagacggtattattgatcgccggaaatttcagcgaccatcatcaccttcagcgacatannaattagaaaagaaattctcttttaccacaacccatcgacataattaaagaa

SEQ ID NO: 2675 - DNA, 383 bp, Arabidopsis thaliana landsberg
  unsure (1)..(383): unsure at all n locations
annnnnnnnnnnnnnnnnnnnnnnnnnnnnnnnnnnnnnnnnnnnnnnnnnnnnnnnnnnnnnnnnnnnnnnnnnnnnnnnnnnnnnnnnnnnnnnnnnnnnnnnnnnnngtgctctgatttttttcccttgcataattcttaaggccgataagtttcatcctgtggatggtgacccactttgtcattgagcgaaggggaacgaaacagattcaatcagacttatctttgatcaaaaaacaagaagaaatcactatgggaaatcgcaggtcgtttatctatctaactgtatagctgacccctaactgcagcactggtcgaacggatagaaaacctttttgatctgtatcgatatgaatcccgggggacgatatgatacagtgc

SEQ ID NO: 2676 - DNA, 489 bp, Arabidopsis thaliana landsberg
aatgctcttctcttgtttctgcctaattttgttctgaaaacgtgtgttatttaggctttgtcctttttggctcataatattgactgcatctgtagtttgtttcagttcgtcttttgtgtaaactgatcttttaaatgtttgttttagttcgcctgttggtgtaagctgatcttataagagtaaaattggtaggagttattcatcatatactcaaagagtcaagatatgttgcaacttagaatcactcattgtgaaatctctcagagacgaattctgttcttagaatttcactatcttaataggagatcggcacttacttttaatgttcaaggtggaacacatactccgtcaagcgttgtagcttcgatgaatccaccttttgctctcttttaacagcgtggtttcttcacactcgccatttgagaagctgcatccactgtccatccattctctacacatctgtgtatatatccagcaataaagaaaaca

SEQ ID NO: 2677 - DNA, 470 bp, Arabidopsis thaliana landsberg
  unsure (1)..(470): unsure at all n locations
atattctggatatagacctacctttttagagagatcgccattgtaacaatcactgatggttttctcacgttcagaattttgaacacatgattcccactcattcgtattcttttcaacgcagcgtatgaacttgtactgcaatttctgagttccaaaaccataccatttttcatattaagcttataacaaacccgcacatacaaaattagttaaatatagaagatagttgaattttttctataccggatcgggcaaagctcttattaccctagcttcaagagcgttgagctggcattactattcaccatgctttacaaaattacaaaacttagttcacttaaggcaaagtgatttattaattaaaagggagaaaattttaaactannnnnnnnnnnnnnnnnnnnngtattggagacatgagcgttaccgaaaggaacgagcttgagatcggtgattttgatgagatcgga

SEQ ID NO: 2678 - DNA, 377 bp, Arabidopsis thaliana landsberg
gtacatcaggaaagggtgattggtctggactcgtggataaactacaagagttggtatctaaagatctacagaatgaacttggagaaaatctctctcagggtaactttacgttgagaagtatgtacgaccagttccagtgctctctgcggattccacttaatcaggtcagaatctctagttcaatagtagtctgtaccatgtggggatgattaaacaaaatcatgcggtggttgtgtagcttttctcgatgctgcctggaattagtgctgaaatgacgccgaaaggacatggtgaagaaagccgagtgaagatgaagcgatacatgacaatgatggattctatgacaaataaaggtgagaacaatttcggattttgag

SEQ ID NO: 2679 - DNA, 544 bp, Arabidopsis thaliana landsberg
  unsure (1)..(544): unsure at all n locations
atcatacttgctttacatcatttctcttgtatttaaccgttgaagtctccttttctagcaagaaaataatggggtctgtgatcaccatcatcttttgccttggtttcaactcatactaacactataaaccatctcattttatggtttccaagtgtgtttatgctttataatgcatttgtgtagcctttagtaacgtaaagaaaaatgtgttagaaacgtgaatgattatccatctttgaataagtcttgctcaccaaaacactagctcaccaaatttctcccctctatatatagttatttgttttattgtaaataacgagaaaataagaataacaaaaatctatttcgctcttcatttctcttacggctctttccttcatattcacatcaaatataatattattattcattttagcgttatattttataacaaaatgatcattgntcttgtcttttatttcatttttggcccattcaatatttaatatggaccgaagacacaaaactaccacggtttaaccaaataaagcatgcaatattgcaa

SEQ ID NO: 2680 - DNA, 406 bp, Arabidopsis thaliana landsberg
ttcttttgccaggcgagcagagatgtattaccttctacgttttgagcttatgaaactagttgaagaggtctatggtgcgtatcgtgcattagctgagaggtataatcatgcaacgggcgtaatccacaaggctgatgagactatagcacaagcgctaacataccaagttcctttgatatttggtgatgagccacctggtggtgctttgacaaatgacgttgatccacaaacaccgaacatgcctccttctttccaaactaggagtgacccatatgagtcgcaacaagatgctgactggttctctttatctcatgttcatgatgcagagaggaatatacatcttactgaacaacctctggtcgtgagtaatgcaacagcaagatagggactgaattctaatgatcat

SEQ ID NO: 2681 - DNA, 388 bp, Arabidopsis thaliana landsberg
atcactgcctacctcattccctcctatatgagcacagccaccaccagcgccaccattgctgtgctttacaatcttaaacccagctttccccagccgtctaaattttggtcttgatctctttgagatcatccacagaggaagcgctccatacatctgccacaccatcttcaacctccttggatattacacttgcgatcttctctctgaattcaccaagactcttctctatgctgaaaatagatgagtcatatgtgttcctgctgtctaacaatacttttctttatctttatgagcatgcaactctgcttttcttaccatcttaggccacaccgacatgttacctcatcccccctaatcactgaaagtaacatatatcttttaatggacc

SEQ ID NO: 2682 - DNA, 324 bp, Arabidopsis thaliana landsberg
  unsure (1)..(324): unsure at all n locations
caacaacagagcaggagggatgacggggaaatttataattaacccatcatatcattatacaaacactacttctggtactggagtgttgttccccactagttatgaaaatctctgtaacggtgatatcagagtggtaaannnnnnnnnnnnnnnnnnnnnnnnnnnnnacgacacactttcccttgctgtgagagtgcatatcgatattcgctgcatcattctctgtataatcctctggactcatatcaagaatctatagcgcactggtattagatcaaacgctaagttcataattacacagaaaaaaattcgatggttgaatgt

SEQ ID NO: 2683 - DNA, 409 bp, Arabidopsis thaliana landsberg
  unsure (1)..(409): unsure at all n locations
ggagcctgttttgcagggatcacaaatttgttgtaagcttttgcacacttgtattagttcattacttccatgggtatgggtggtttgtaataaaatttatggattaccgttccttcagattgtcaaacgtgatcttattgagctctgcttacgaaggggtcgcctttcttctggccagctgtgaaaatttattactttagcttactgggttgcagattctttctgttctatcgattgagttaaccgcctatggatgaaaagaagagccttttttatatctttgaaatcttgtctaagtgcnnnnnnnnnnnnnnnnnnnnnnnnnnnnnnnnnnnnnnnnnnnnnnnnnnnacatgttctattggttcaatgagtgctccgagtggacacaaatctgataataaaccta

SEQ ID NO: 2684 - DNA, 2127 bp, Arabidopsis thaliana landsberg
agtagtgtttggtatagacgcgatgtttttaggattcaaacatatccatctccatgcgataactattaatatgtgtttctctgtcatgtgagacatctgaacttctcaaacgcattcgcgttttaattcatttgatatggtagctaagttaagtagtgatctgatacctttagtagttgagaaataataacataattgccgactgtgaatcatagagtccaaaataaatggtactctacaaaaggaaattgaatattatcattcacgatgatatagggctaattggttacatagtttgagtctaattttttatattttcattcaagtaaattaaatgaaaaaatccaaaaacatagcaagtttagatattttgctcacctagaaaatattatattaactaacaaacagatcttctaaaacttggtatggtctctattccatttaattttaacagttctataaaatcttgatgcatcatcttaaatcacttactactcatatcagtctaaagttacgaaatgggaaaaagaaaaacagccctcttttagatctaaatttacctccaccatcagagaagagaccacgtttagttacacagaccaatttctcaaagaaaaattactcagcttaatggatctaatgctaatgattctgtgcctattagatcagctttcaatacagttttcagagatatcactaatttgccactcagttttgatgttaataatcaaccatcttcttctacacaaccatttgattcagcaacttctatacaacattcacatggtactgtcattactatacaatatccaactttcagattctatccgctttagaagattttaaaaatggttgtcacagttattaagaatgtgtttgaactactcgcaggttcagttgaaagatcaggacttaactcgattggcagagaaaattttcatcggcataagacagcttctactagaccatttagtgatctcaccaagccaaatcttcaaccatcacctcaaaatttatatgcaatgatgacaccagctactgcatatacattgaacacatattagttgttatatatgtatcttttagttctccaaactactctgtctattatgtaatttttaacttttaaatatttgaatcattaatctaaatcttattttatgtattacaaggacaagacctgagtaatccatattcatgtataagcaaccaaacacaaacaccagtaatgtcaacagagtattctcatgtacgaaatttacaagcagaatttgagaaagcatcaacatttgctaccaatccgagtaagaatatataggtttcttttcatttatattaaagtatcattttatataaggtgtgttaatcttatagatattatatttgatcataggagcagaagctaaaatcaattcagatactagcagtgatgatgaaaacatggccaatatgatgtttgatggtgcagtatatgaaagtgatactgatgtggatcaaaattactctcttagtagcactgacgatgaaagtgcagacacaaccacaatccaaatagaatctgaatcaatggctaatgtatctactcatgaagtagaagacattgtgtcacagttaagtgaaaatgacatagaacttgatacattcagctcacaaatggatatatttatgattccaacagaatctactcaaacagcaaatgtcccagaatctgctcctaaaaaaagaggtcgtccaagattggctgtaaccaaacgaatgagaatgaaacaaattagacaacagaataagccaggtattgtttgttatctaaattcttcattgtcatacatttatctcagatattgtaatgcaaacccaaattatagttgttttaggttatcttgatcacggtgatcctacattcaagtgtaagtattgtggtgctatgatgtggtatgatgagcggattagaaaaaaagagacaaaaaaagaatctggtttcactctttgttgtggagaaggaagtgtcaaactgccatatctgaaggagtccccagatcttctcaagaacctcctctcaggagaccatcacactcctctaaacattatagagacaatgctaaaacttcaatagtggtttcccagatc

SEQ ID NO: 2685 - DNA, 526 bp, Arabidopsis thaliana landsberg
tggtaagtgacaaagattcaagctttaatgttctttgattggaatcctttcaggttttgctcaatgtaaagaagttaaagattcaaacttttttttcacaatgggagagaatctgcatttgtctccacgacaccgatcttctctaaagaagccattgttgattgttttgttagtctgtatcacaagtgtgcttttggtgatcacttacatgtatccacaacacaacaacagtaagagctctgcttgtgcgggtttgtctagtagaggctgtcaagctgcgctctctggatggcttcctgttcatgtcaggaaattcactgatgaagaagtagcagctcgagttgtgatcaaagatatactgagactacctcctgctctaaccgctaaatcgaaaatcgcttttatgtttttgactcctggtactttgccatttgagaagctttgggataagtttttccaggttggaacaagttccgagacatttcttgatttatttgaatgctgtgtatggtatttgacggttttg

SEQ ID NO: 2686 - DNA, 3799 bp, Arabidopsis thaliana landsberg
attcgagtaggaggttgagaactattcgggtattctaaaaattcggttcggtttcggttcgggttcgggtcggttcggttattttagtaaaaatataaaaataatcaaaaatacccaaaatatttttgggttcgggttggattcgggtattttactcatatatactcaaatctacccgaaatacccaattacccataaatatattggttactttttatacaaatataaccaaatgtaaccaaaatacttaaattacctaaaagaaaactataacatttgttacttttatcccaaatatatccaaatttatatgaattactaaaaaaatctagtataatcggatttataattttaattttgggtgtttgaggtatttcaaatatatatataactaatatatataggttacatttgtattcgggtacccacgggtattagattcggttcggattcggttcgggtagtgaggtcgaggacccattcgggtaattctaaaaatcggattcgtgttcggttcggttatttttcgagtttttcggttcggatattcggttccgggtattatgcccagaactatgtatgaacctttacgtatgtatggaccgttttattccaacaaatatactctaaaatattctggataacaataagataagcggtacactagttatttaaattatcaattgtccacactatgggtattaaaccaatctagattactaagagcacctccattattttttttacaaaatgtctaatataataaaatatagttgataagtttaaaatataaaaagatgtaaaatttaatataatttttttattaaactattaatattatgtggatgagatactcataggttaatcagaaggttgtttgaacttaaaaaatcaatgttgggtggcttaccaagaagtactttagagcatttctagtggatcgagcctttcaatggattctttcggttttttaagtataaatttctgaaaaatgttggatgagagtttcaggtttttttttttttttttttataatccaagggtagtcttttttagtaagaattttagaaaaaaacttattcctttaaaattattttatttcataaaacttaacaaatattgcaaattataaaataaaacacataagttattttcaaacattttataatagatgtgcaaaaaaaaactgaaataacgaagttctaaaaatatggttgtgaatttttttcatgctcaaccaaatggtttttaattataaatgcatatctcgatcacgaactcgattttaaatgctcatcaaaaactacgataacacacgaaaacagcaacgactccaaagagagccagcttttttctttttagttagttttgatttatttttttcaatttaatcaagagaacttcataaaaatgtttccatttatcaccaccaaaaatgctcttatatgataaagtacaaaacacggaaaatgatctcgtgatgatacgtagggttagtaatcaatttttttaaacctctcggaacaatatatcacctgttgggcaagggtgggatccatcgcggaaagcggacgaggtagcttgctagcgatgatgatggcggaacattacgagtggctcacaacgtcaagtgtgatggttcatggtttgcaaaagaacattacattttgtgagtgagagactgaaggtgattgttaaatagtggtatttgaagagttttttaattaaagtaactactttttttggctacttatgtaacgtaaccaaacattaatatattttctataactctcctgacaaatttcatagttaagcttacgtgagtaacgtgatgtaatagtttcattatgcattacctactaaaaagtaactttcagatatgtatgagtgaagactacttatagagaaagatctcgtgatgctttgcatgatgatataagtaaacaagtatttccagcttcctaaaattatataacaaaaccgtcagacagaactaaataccatgcgtcgagatgggaagtgaagaccacaaacggttgcagtggacgcgttattctatactgtatagtgtataacatatgtaagaatccaaaccctcctttgcgtcatatgtgctccaaatctagttcaaagatcgatgaatcacttgatagtagtataactcatttgattgaacaaatatatcttgattcactcttttgttttgttacctgaaacacgcttacgaagaggattcatgtcatcgctttatctatcattgatttgaagcgtctttattagaccatacattttatctttctagattgttaatcaaatgtcctgtgtccatgttcaagtgataatgtgatatccctaagtgtatcggtttaattggacaagaatgggcttaaaccaaataagggtataatagtcttttcatataatcagtaatttcgatagccaaaatgagctatataagccgaacaaaaaaaaacctagctcacgctgttgaatcactgaagagagaaagcttgaagacggcgagagctccatcttttctcaggcatctcttatcttcaaatcacaatggtaattagggtttacgctttcgtttctctcgtcttagtctcttccccaacaactactatatgttacttcgctttcctgattccgatcgatctagaacagtagcttagcctcttcctttcaaatccatattgcatagaaagattagggtttgtgttttcatgaatcagagaaccaagtatcgaacagaaagtttaggttatgtgttgattagggaatttttgatgtttggctgtaattgtgtgatttttgttactgcgtgtagtctctggttgcaaatgaggagtttcagcacattttgcgtgtgctcaacactaacgttgatggtaagcaaaagattatgtttgcccttacctctatcaaaggtattggaaggagattggccaacattgtctgcaagaaagccgatgtcgacatgaacaagaggtattgatttcaatcaaacttcaacctttggaaagttagaattgaaattagcagtctctgtttgcatttgatttgatttgtgtatgtgttttgagtcttgttttgtaacatttaggtcctatagtgtacactttgaagccaattcgagttacttttccatcttctagtttccatgttgaaccttgctcttcttttgactttgtgacctatctttgttagcagtctctgtttgcattgattagctagtgtgttgttgaggttcagcaaatagttgtgttagcatattgtataattcttgtgaatcccaaattgcactttctctggattgttgtctaatattggtctcaacttttcaggtctggtgagttatctgcagctgagattgacaacctcatgactattgttgcaaacccaagacagttcaagattccagactggtttttgaacagacagaaagattacaaggatgggaagtactctcaagttgtctccaatgcccttgacatgaagctcagggatgatcttgagcgtctcaagaaaatcaggtaaacccattagtcatttctgatcctaatcatataacatgataaatatgtcctctaggggctttaataatggtggttttgcattttcttacaatgaacagaaaccatcgtggtctgagacattactggggtctccgtgttcgtggacaacacaccaagacaactggtcgcagaggaaagactgttgtgtgtgtctaagaagcgttaagccaatgttgctagttgcagctggattggatctttgataggactgattttaaatt

SEQ ID NO: 2687 - DNA, 584 bp, Arabidopsis thaliana landsberg
taaagtgatacttgccacatagtccatacaaatactgttagatattgatgactagctaggacaataagtcaataaccatttttaaaattttgtgataactctaaaccctagctaatgttgaaacattaagcaaccaagaaaaagatgcatctatgaactacttccggttttaagtgaaggaatcgtagattgataggttcctcataattatacctgctagagaagatgaccagggcaacttttgactctttgatccttaaaaggagacttgtcaagtcatttccacgttgctcgtctttatctatgatgaacatgatcccatatctctctaaagcatcagcgaggtggctgataaacccatgacgaatctcttctcctcggaaactaaggaacactttcgggacaggaacatttctgtaccgaggagacacgctcgtcatatataagagattgaggacgactttgtactttagtgattcttgattaagagagtagagaggctaatgaattgtggaaaaaaagtagaacgtacttggctatttatagggatgacagagaaaaaaaaaagagaagaaaattaatct

SEQ ID NO: 2688 - DNA, 608 bp, Arabidopsis thaliana landsberg
tttggcatacctgcatatagcataatataaatatctaataagcttaagtactcatgggtaatttcaattatattaccaatttacgagataccatagaaattttgagaagacgtacatattctcctaccatatggtgagaaatataaattataagacaggaactgtacatatgtttttgtttcacttgaagagtattgagttattatactagaggcgagcatgtatatatattttattcacatgagcttatgaaatacctttagaccatcctcaatggaagtctctaaacatgggtttcttaactaacttaaaagtataagtatagataaataatatattttaatgatgtgtctcttaaatttgaagaaaattagatcaattgtctttttaaattttaagacaattgatctaattttctaattttcttcaaatttaagagactcatctaatatttaaatcatataaaatatttattatttggttagagttttactaagagtccaccattgtggatgctcttaatccttacacattaaaatccctacattaaaataataattatttatttaattttgaagataataaaaaattaaactaattaataaaat

SEQ ID NO: 2689 - DNA, 521 bp, Arabidopsis thaliana landsberg
  unsure (1)..(521): unsure at all n locations
nnnnnnnnnnnnnnnnnnnnnnnnnnnnnnnnnnnnnnnnnnnnnnnnnnnnnnnnnnnnnnnnnnnnnnnnnnnnnnnnnnnnnnnnnnnnnnnnnnnnnnnnnnnnnnnnnnnnnnnnnnnnnnnnnnnnnnnnnnnnnnnnnnnnnnnnnnnnnnnnnnnnnnnnnnnnnnnnnnnnnnnnnnnnnnnnnnnnnnnnnnnnnnnnnnnnnnnnnnnnnnnnnnnnnnnnnnnnnnnnnnnnnnnnnnnnnnnnnnnnnnataagtttgtttgaatgtatcagagtttatgtgtaattcaaataataggagctagtaatattgcagctacgctcatattggngatgttatgggtgctgtaattttgaattcgggtctattcgattcgggttattctttttgtattgagttcaaggtttgcttttgtcaaagacaagattttgatacctantaatcactctttatctcanaatcgtagtatttaattggaggtgaaaaaaaaaaaaaanaaaaaaaatcg

SEQ ID NO: 2690 - DNA, 168 bp, Arabidopsis thaliana landsberg
taccgaggacggattcttcgaaatcgacttatttactaagggtttctattagggttcgaacggggtttttattgcgaacagaccaatactttcgttgttgatacagtgtagaaattactcactgcgcactgataaagaccgaacgctttaatatgcgctaaccctcgc

SEQ ID NO: 2691 - DNA, 5354 bp, Arabidopsis thaliana landsberg
ctgccttaagagtattaagttaagctgcttggttttcactaacatcctctcttttttatttgtagaaaacacaccattgggatcctttgataacaggtacagttcaatggtattttgaagaaatctttaaacgaaggatgaaagacatggttagcatgataaggactagtcgagagtcccctaaatggatcatcgattctcatatctggaaagcgacgtgtgagtattgggatactgaagaagcaatagcgaggagtcagatatattccaaggctcgcttgtctgaccgtaatgggctcggtcctcacatccatttgtcagggccaaagtcatatcaaaacatcaaacatgaactggttattaacttctatctcttttttttttttttaatgtgtttgtgtcttaagttcatatgttgtattaagccttgttcatttttatcatcatagtaaaaagagttaggaaggacggtgagtgttggtgaggttttcatcaagactcataccaaaccggatggtacttatgtcaataaaaaggcagagcagattgttaaaaggtatgagaatgaactgcaaagaaaagttgtcggaaatggaggcagagacttcaagtatttcagacggggaatctcgggagctcacaatagaggaccatattgtcatctttctggaggtaaagattacattttcacttgcatattgtctgcattttctcaagctctttattaatggtttggctatttttttttcataggccacagagacagattcaagagggaactattatggagttggaagcctcaaagataatcttccggatctagtcactggaaaggacaaacatgcagcatactctacctcctttgtgtcattgcaagagcaactaaaagaagctcaacagaagatcgaagagcaggctgctcataatgctcgacgtgaggcagagcaagcccgagctgtggctgaacggaaagacaagctggagcacttagccttgctggaaaagtatttgcgccaaactgatccaacctttctcaactttatggctactcattcatctgaagcaaccacaaccgatcctatctaatcttcaccatcttagtcttaagttccctacttcataactctcatgaattcctcaaaccttttagttttatgtcaaattactagaatcttgtatttggtatgttttggatattgagtttggtgtttttgaatcttttcaggtttttagtttgttttgaatcatggttttgtcttgttttttatgtgttttggaatggatttggatacaaacaaaatcagacaaactattttttttttttttgctgaaatggttgtcgcttaactgtcgttaattggtcactatttagtcgctaaattgtcgcaaagtagtctatacacgagtcgatatacatgtgattcaattgtaacttagtcgtaactcagtcgtcatattatacgactatgttacgacaaatcttacgacatcgggaattagtcgtatcgtagtcgttatttagcgactaatgttacgactatttgggttagcgactatggatttccgacatcgagaattagtcgtaacatagtcgtaactactcttttaacggctactttgcgactaatattgcagtcgtaaaaaccgtgttttcttgtagtatacactctgaagttgagtattttatcctttcatcatttcatcaattcaattcatttcatcatctcgtttcattttctcatctgtccgtttatctttgctgtcacattattttaatttttataaataattggcttgtgataaaattgcgaaatcaattggatctgaatcgaggacgagactagtattttataaaattgtttctggaatttttgagcatgattggttgatttattttgttcgatctagtgtgcctgttattaggaaaacgtttgatattctccttgaactagtgactcgtttagtgttgtttgttggtaggaaatggtgacaaccgaatcaagctcgaagaagagtgttaataaccaaaccatcatcgatgctatcactttacgattggagaatataatagatgtcaagcttaagccaatcaacgatcaacttaaagcaaaagggaaagcacccgatgaacaagttgtaatctcggaaggagagcaatctcaaagggagatgaaaagtcaaaccaaggacccaaagaaggacctagttgacccaagagctcaagaatattacagcagccacggtcactcatctcaccggagtaaccggagaccaagacgtgcgagagaagaaagatatcttatggttttgaatcttggtggctatcagatgaagcttccacctttccatgggaagaatgatctggatgcctatttggaattggaaaagaaaatggaactcgtattcaattgtcaaaactatgccgacgttaaccgcatgaaggttgctgccactgaattctacgactatgctattagttggtgggatcaaatcgtcactacaagaaggcgtaatggagagtatcctattgatacatggcaagggttgaagcttctcatgaggcgtaggtttgtgccaagccactatcatcgtgaacttcattccaaacttcaaaagctcgtccaaggtactcgatcggtggaagactattaccaagagatggaaactttgctgttgcgcagcaatagaggggaggatcgtgaagcgactatgtcaaggttcttgggaggattgaatcgagaaattcaggaccgtgtcgagatgcaacattacgaagagttagaggcgatgctacataaagctatcttagtggagcatcaagtcaagagaatgggttcctctcgggcaaattatgattcaaaccgaccaagctatccaagagatgtcaagccagccttcattcccaagagcgagcctaaaataatgccgactatccaagagcgagacaagaccaagcccgatagcgccaccactactaggacccgtgatattcgacgcttcaagtgccatgggcgtgggcactatgctaatgaatgtaccaacaagagagtaatggtcataagggagaatggcgagttgtagtccgaaggcgagttcgtgccaaaacctgattcgtcaccgaggagtgtattgctaagccagctaatggaaagctcttgatgtcaaggaaagtttctaaagatttggaagaggaacaagacatgacctcatccccggatgaggatgaagaacagttcggagaactttacgtggcaaggaggactttaagccttcaaacccgaaccaaagaagaagagcaaagagataacctatttcattcccggtgcatcgtcaatgagaaagtttatagcttgatcatcgatggaggaagctatacaaatgtggcgagtgaaacaatggtccgaaagctcaatttgaagcagtaaaagcatcataagtcgtacaagttacaatggcttaacgatgatggagaaatgagtgtgaagaatcaagtggttgtacccttagcaatcggaagctaccatgatcaaattctttgtgatgtgttgctgattgacgccagacatatccttctaggctgaccatggcaatcagatcagatagtgatccatgatggcttcacaattcggtactcattcatgttcaaaggcaagaaaacgaccctcattccattgacaccacaagaggtatatgacgatcaaatacaactctcggccaaggaaacaaaagtccgtaagcaacccaatttctttattaaggctaataaggttaagcaagctatgcactccaaacgacccatcttattgtttatttttaaagaagcactaacatctttggctaaccttgcacaggccgatccgagtgagttaacttttcttttacaggattataaggatgtgtttcccgaagacagccccaacggttaccacctttccgggaatcaaacatcaaatagactttgtcccaggagcaacacttcccaaacgtctagcttatcgtaccaatccagtggaaactaaggagttgcaacgacaactcgacgaactcatggctaaagggcatgagtccatgtgtcgttccggtcctacttgtgccaaagaaagacgggagttggcgtatcgttgattgtcgggcaatcaataatattacattgaagtatcaccaccctattcctagacttgatgatatgcttgatgagttgcatggttcatgcattttctctaaaatagatttgaaaagtggttatcatcagattaggatgaaagaaggagatgagtagaaagctacattttaaaacgaaacatgggttgtacgaatggttagttatgccattcgggttgacaaatgcacctactatattcatgcgcttaatgaaccacatccttagaacattcataggtcatttcgttgtggtttatttcgatgacattttggtttatagcaagagcatggctgaacatcttgatcatctagaatcgggcatgaatgtccttagaaaggaaaaactctatgccagcctaaagaaatgcaccttttgcacggataatcttgtgtttttaggctttgttgtgagtgtagagggagttaaggttgacgaagagaaagttaaggctagtagagattggccgagtccaaagactgtggtagaagtaaggagtttccatggccttgctggaatttataggcgatttgtcaaggactttagtaccattgtcgcaccactcaccgagattatcaagaaggatgtacgattcaagtgggaggaagcacaataagaagcgtttcagtctctcaaggataaactaactaatgcacctgttttgatattaccttactttcttaaaacgttttagattgagtgtgatgcatcaggtataggtattggagctgttctaatgcaagatcaaaagcctattgcctttttcaattagaaacttggaggagctatgctaaattacccaacctatgacaaggagttgtacgccttggtccgagctcttcaaacgtggcaacactacttatggcctaaggagttcgtcatttacactaaacatgaaacgctaaaacacttgaagggcctacagaaacttaacaagagacatgcgaggtgggttgagtttattgagacattttcctacgtcatcaagtacaaaaaaggtaaggataatgtagtcatcgatgcattatctctgaggtacaccctactctctactcttaatgttaagcttatggattttgaacaaataaaagaactttatgaaactgaccatgattttcaagaggtttataaagcttgtgagaagtttgcttcaggtcactattttagataagatgggtttctcttctatgagaac

SEQ ID NO: 2692 - DNA, 594 bp, Arabidopsis thaliana landsberg
gagaatctgaagaagatcgctcgaccggatcatttcttgcctgtgactgtgatcttggtttttgtgtttttggctttctttggaagatctgtagcgattatgtgtacttgtatcgcttggtacttggttccaacgattcaagaacagagtggaaacagaggatcatcaccgtcttacgcgatgaagaagaaagatttcgctaggaaattgagtattgaaaacagaacatcgtttaatccaagaactgttcgtgatcattctcctcgcaagtagaagaagtttcttattttggctgctcgtgaaaaaaaccgcgtgaccgagcgaaaactttttttctttgtcaaaagttttttggtctcttatttcttcgttactttttgttttattctctgtttcgttcatagttgttaaatttagagacagctgaattagcagaaaattgtgtagcttttttatattgttagtttttttttaatgtttatagatgtatataatgcaattggagatgttcttgattacatatgatctattgcaaccatataaaatttgagcagaatcaacttatattacaaaatcccaacttttactttttat

SEQ ID NO: 2693 - DNA, 568 bp, Arabidopsis thaliana landsberg
aataaatataatagatacatcaaaatacaactttcaatttggacagacttgaagccttttatattttggcctggatcaatactccttttaagactaaggtgtatcagcccagtcttttgatttttgattattttttttgtaaaccgaggcaagatttttgataggcaataatcctactttataatacattcggagtgtgtattcaattaaacattttaaatgatttgtgttaaaataacaaattcagcctcacaatttaatgttaaggatacaatcatatcatcctttcattacctcttatgcaatttaccacaaatgattgaaacctcttattcaactagaggttttgaaatatagatatatatatttggattttgtaaataattaaggtttttaaattatgtcatttaattatttgaaaaatgagggtaaataagattttgtacatgactttttttaaggagttttaagtttggcaattgtgatactacaaatgatagtagtgtgacagtgtcaccttggattccattaaatttctatgttcccttttcatgaaattcatcaaata

SEQ ID NO: 2694 - DNA, 600 bp, Arabidopsis thaliana landsberg
  unsure (1)..(600): unsure at all n locations
gattatttatactaatacgatccacaaggtaaaaaaaacgcgtagatcctacgtaaacactttttttaacggcaccgatcgttcgtgggggagggagcgtacnnnnnnnnnnnnnnnnnnnnnngcacactagttcccgtccatgttagcttactatgattaaattacaaggattttatggcttcgtatttacactaattaactcgttctactaactcggtcaccgagttaactcactaccaacactgatcggtttcccagttccgtccgacgtagcttcccaacccggaggttccgacggtcaaaggacggctccgtcgcaacatcctccgatcataaannnnnnnnnnnnnnnnnnnnnnnnnnnnacagtaagcggcatggatcttcatgaattcatccgccgatgaagaagaagtccgatcagttcccgccacgtctggatggcagatcctggctaatctccggtaagccgatttgatatcctgactcgtcgcgcctaacggaacctcaagaacatcgtaaagcgaagctggcaccgtcgtcaatcgccgcgggatctgatgcagtctccgcgaatcttccgtgtaggtgtatgag

SEQ ID NO: 2695 - DNA, 517 bp, Arabidopsis thaliana landsberg
tacaatcgccggccctatctgattacagcaagcaagttctttttttgagccgatgtaatcttgagccatggatgggcgaaatacgtgtttttagatgctcccaaagatccttagccactcatcgatgagacatcgaggatcggagattcggatcaatggtcattgtgatctatgatacaagcagcgcttgactcgatttccagacttcaaaatcaggagagctttcatctggctttgggatggagccatcgagaaagccatacttctttcgtgacatcaacgcggtttgaaaaccacaagcccactcatcatagaagcttcctttcaagagaggatgagagatgaccgctccaggattgtcagcagacgtcaaatcgtaaggaaagattgttctcctcatttcagttgcagcagacgaggttgttccagtcgacattgttgcagagaaaaaatttcaggactttaagaattgactttgaagctctgataccataaaggatctcagagagcaagagat

SEQ ID NO: 2696 - DNA, 559 bp, Arabidopsis thaliana landsberg
  unsure (1)..(559): unsure at all n locations
gatttgattatcagacaaaaaaaggatatcttacttttgttttttgtttgttttccagacctataatggttcaggattcgaaaaaggaaataaagattaaaaaatttattcataaaggcaattagatctcacatgccaaaactaaatttttgtaggaatccaaacaacattcgagattttctcttataaatagagatttagttgatggcctcctcacacaaactctttcatagactttagatcatcaccatcatattactcaaagcaagaatgtctgttgcagagatcttcgagagagtcgacaaaaacaaagatgggaaaatctcatgggacgaatttgctgaagcgattcgcgccttttctccttcaataacatctgaagaaatcgataacatgttcagagagattgatgtcgacggtgataaccaaatcgacgttgcggaatatgcttcttgcttgatgcttggtggtgaaggaaataaagaggacgaagacattgntatgaaagaagcttttgatttgtatgacattgatggtgatggaaaaaatatcgcgagtg

SEQ ID NO: 2697 - DNA, 557 bp, Arabidopsis thaliana landsberg
tatacgcgtttgcctgccgcacgaagccacagcgtgtgcggcacgattacacctcagtcgtccgttccgatttccttgccggtatccgggtcgatggtgagcttcacgtccttgccggcgctgttctcggccttggcctgccacgcgccgtcgtcgaactccacgtcgtgcacgtcggtatagccggcactggccagggaggcgcgcacgtcgtccttgcccaggcgcgacaccttctgttcgtccgcgtacgccttgccgctgaccgggtcgatgcgcaggtccacgtgctcgccgttgccgctgcgggcatcggcgcgccacatgccgtgcttgaacttcaggtcgtcgatgtggctgtagccctgatcctgcaggtgggcgcgcacctgcgcctcagtgagggcgtggtgattgtcggactgcgccagcgcggcgccgctgctgcccagggccagcgcgagcgtgagagcgatcgttttcatcgcaggcatctccagtgggagggagtggcgagtctttgcccgcattgatcaacgcgcggtgaaagccgcgtc

SEQ ID NO: 2698 - DNA, 569 bp, Arabidopsis thaliana landsberg
  unsure (1)..(569): unsure at all n locations
aaaccaaccccgatttataaaatccgttatgaattaaccgaaggattttggtttctaaaatgacgaaaatgcctatttattccttgtctattgtcagaggaagccacccgccagaacagcgaacagaggaaacggtttttctttggcgccactttgacaggtgtttgatcaaatacggaacagagttcggtttcttcaagtggtcaatttttaaaaacctaacccgattcaaccgattcatattctccctcacaaaaccacatatcattaacaaacacaagtagtttcaagaagtactaaatggtgtaaaattactaaaaatcgtatcgtagtaaaaactgtacccaatccttttctatcaactatgtactctgtcaattgacaaccaagtaaaacctaatgtcacttgagtttgnnnnnnnnnnnnnnnnnnnnnnnnnnnnnnnnnnnnnnnnnnnnnntctttacatcaaaatctaatatcagattatgtgggatcttaacgagtaaaaccaaactggaattccggatgagaacaaccatcaccaccttctctttctcttaactaa

SEQ ID NO: 2699 - DNA, 1463 bp, Arabidopsis thaliana landsberg
agagaaaataattttaatttcgtcttaggttccttatctctgaaaaagttcatagttgtaggattccaaagtgtgaaatccatcttgtcttgaagtagaaaagataagaataatcagagtagaacggtagaaggtgagacaggatcaagataagtatagagagaatcagattaaggtaagtatagaatgaatcagaagaaggtaagtagggaagggttttgtccatttctatctaggtttcgtcctacagtcaacatttcctctgataccacttctgtcacacccggctttaaggaacaaagccaggtgcatctcatacatgcgccaagaagacaacatatataataacagagtgtatagagataaatgtcataaaacatcagagtatttattacatagcggaagacttattacaaaataaaataataaagataaaacgaactaaggatcgtcggcgccaatgtcaactgagaaacgccacctagatcagatcatactctctcgccttgtggctcctcctgatccacctgctcttctcctgtgggggggggggggtgtgagacagcaagagtgagctcacacatgttcatcgctcaacaagttgtggggaataatgtggcatgaactcaccaaaggtgggagttcatgaagtgtaaggctgatcaatgaaataaaggctgaagctgagcattgcttttataagttggtcaaaagtttattagcaattactaagtataagtaaataccaaaccttagaaataataaataaaactaataatgaaataatcccagatgcaatgatatgacaaattaagtttaagttccatagattattcatgtgagtgtccgagccgctcatgaccgtgagcacggctagtataccagttttacactctgcagaggttgcacatctttacccacaagtcatgttacccatttgccacggagttgatcagaccccatacacctctaccaaggaagcgaggcaggtaacactacgaggcctttacaaagttccactagcttccgaaaacccgctacagtttctgggaagagcaattgcttctggagatcggcgagccaaagcattttctctctcttcttttggacctgttgatggatggcttcgagattcctgatttcttggtccagttcctcctcctgaggtgttgggctggtagccttcctcttctggctcctagcttcacgtagcgtctcctgattaacgtccaatggctgcagtgcagcccccggcgctgctatcttcttcgacggcatgacgaaggtcaatgcttgccgaaggtagtcgaatgagttcaccggaggtgggtgccaatgttggtccttgttctcggatgctatacatcaagaacaaagcaacataattgttaacgattagagaccttcgtccttcgaagcattattttcccttggggtataatgatcttcagacgaaaagaaca

SEQ ID NO: 2700 - DNA, 567 bp, Arabidopsis thaliana landsberg
tagctagtttgaatataccacatcatgatacaaaatatttttatgttcattgttgtttggaataggatatgtgttgatcatcttcgaggagtctttatcatttaataaaagcggaatagcacttttgatggccgttagtttgtgggttgtgcgaagcatcgaggtataaaaatgatttgtatacgtttggattttcacctctattgttaatgctctgatcaagtatagcttataacaaaactagatataaagttatatgtgattagtaatgttgtgtaatctcttgtttacagacttctgtagaaattgttactttagagcttcaacacgcaacaagtgaagttagccaaatagtgttctacatgctcggagcaatgaccattgtggaaataattgatgctcatcaaggatttaagctggttacagattgtataacatctaggaaaccgaagatacttttatgggtggtatttttggtccatttcttatttgttttcgcttaccaagcttttgggttgaggatatgagttttcttctttgtcttgctctcgcatatcttcacttaaa

SEQ ID NO: 2701 - DNA, 268 bp, Arabidopsis thaliana landsberg
aacctttattttctaacctaactatagaggctggggttagccactttgatgcatgcacacccagcgccgcaaacagatagttggcatttaaaacataaaacgactgacaaaagactaatacctgcttcatcttttaggtagatcatattggatgcatgaggatccatacgcacggattggggcataaatacgtggggaaggagcctagaactgacctactggaacattaaggacaccatactggttggaatgatggtttgctaacgac

SEQ ID NO: 2702 - DNA, 2989 bp, Arabidopsis thaliana landsberg
tcccccccccaaaaaaagacggtttacacatatatagaaatactctgaaaaaatgagaagaactggaataacaaatagtggaaaaagaattgaaaaaaaaaatgattaaattaaaaagttatagtcgaagatcactttagctgcgtgttccaaaccaagtcaataagagagaatcatatatacaatttgaatttcctaaggagattagtaatgattagctaattaaaaaaaatcttcatatataactaatgcaatttttttggtgagaatataactaatgcgattatcatcatcataatgattttgtatatcatcagattcctatactcatgaatcatgattttaattcaccgtttcatattgacgtcaagtattaaatattaatcatatacaaccatatttgttaccgttaaataaccgaagacttagcaattaaaaaaggagctacttattatacaaattaaacactaattatttattttacattgtaaaatacattactgatagggactagcattgaccaaaacaaaaccacgtgataccatgtggcaaccaagactcggaaactatataatacaagatacccaaaagggtaaaacgacacgcagtttataagtaacatactataaacggtaagcgttcctaggcaccacgtgccatgcacctgacacgctccaaaagatgctcgctctcgtcggcgattcttgacaacgattcatgcgccactccaccgtcgcaactcagcgattcggcagcggtctctttcagcttctttatcttctttctcatctcagcaccttcctcctccaccatgatctttctcaccaacgcctcgatctccgccctcgtaatcactccctccgacggtagtttcttagagcggacggcaacgccaagctcttcgttgaggagtgtcgcgttcatcatctgctccgcaaaaagtggccacgcgatcatcggaacgccaccaacgacgctctcgagaatcgaattccaaccgcagtgagttagaaacccacctacggcttggtgggccaagatctccgcttggggagcccaagaagagaccataaagcctctctcatgagtccggctaacaaaacctcccgggagataatcaggtgtaccgtctcgtattttaccactgttagcggataaatatgcactgcaagctgaaccgtccaccgggggtcgaaccacccaaacgaaccgttgctgactcatctcaagtccccaagccaattcggttagttgtttagccgagagagagccaccgcttccaaatgaaatgtaaagtaccgactcgtccggctgtttgtttaaccaatccaaaaccggatgattagttttagatggatcaaccggtctagacaaaggaccaattggataaaccggtacaccagcaattcgacccaagagctttgggtcttgaagagatttcaaagttttgggctccatatcatcccatgtattcacaataataccatcacacgttgggaaaaccgaaccgaaaggaacaaattcccggtagagttggctgtttgggtcaaggaatgtttcaagtgtatcttcaaaccgaaccggttcacatccaggcataaccataggttgcttcttgattatgtgctcttcttccatgtctttgtccaacgttgggaaaaacaaagccaccgcgagaaaacgtgcgtttgaagcgatgaagatataagtcaacatgttgaactcaccaccgagcggtatcgcgtccaaaccaaacaagtctacgatcagagccgttggtttgtgttgcatctcctctatctttgaccggatggtaggaatggtctcacgcatcatgaccaagagcttgatcccaaaaaaggctgatgggtcgactaaaccggagatatcgggcgttgggaggccaacgatatcaacaagggccgcgtcgcagcctgcgtgagttaaggaattgagattgagctgaggctgcgtcggtttcaaggacgaaaatggtgacatggaagccgtgggaccagctaagcgttttccgagctcgatcaccgggatgatgtggcccattccggggctagcgaacatggccacatgtggttttgtaatcttcatagcctagatcactgaacgttggccttttttttttttttttgttgttgttgttgttgttgttattgtgtcggtttactctctcatagttgcaagtgagttgaatatatagaaccaaaagactttataactcatttgtaagtatctttaaagtcttatctatatatcactttcattgtttttgttttatttttgatatcatataccagctttaatcgttttacaagaaaagtaaatataaacatggaagtgtaaatgtatctaagttaattgcatccatatcgtgtatttatttatatagaaaagaattgaccacataagttgtcgcgtgaatgataaaaatgttgaatgcgtcgaccagaagataataatggtaagcttccgacttgtatatgtatatatgtgaattactagctcataggccataatgcatcatatatagtatgtcatgtcatgtatacataaagattcttagatgagtttcttgtacttattaaactgacaaacacatcgctaaacaaattcgaaacaggccatcatcgatacgagttatgagataaaaatgttagataaatactgaagtactgtacaagaagctaaatctttgtattattatcttttaaaaaaaaaaatatgcacttgatgtaaaaacgttggtttttggggttgaataaattgtatattcagttcagaaaaagaaaaaaaaaaaaagagaaagagagttttctacatgcttgatcacattctcaaataaacgtctctttatgaatttcataaatgatgtaatagttatatctttattaagtatagaattcaaaaaaaaaaggttgagttttataaatttcgtgaattatgtcagcaaagatgtattactatatacttagat

SEQ ID NO: 2703 - DNA, 614 bp, Arabidopsis thaliana landsberg
  unsure (1)..(614): unsure at all n locations
aggaccgcttactgagaagggcagtggtaagtgcatagaggacccataacaaaccacatgaagttttccattggacaaaactggctacataaggaaaatcatatattttgcatcagttcacagagaagttgcataccaataggtgagagagattatatgataaagagataataagtaccggttaagccaagtaagacgaataccaaacgtggttggccacaaacgtagactgtctttctagttgcagatcgcccacgaatgacaggcctgcaaggtgttcactcaagtagtaaataacaaaaaccatctgtaactcttccatgggaataaaaaattactcacatgtggggaggcctcatctttgcagctaaatgtggcgagaaatgcctaatggtccggatcatcttctcattaaaagtagctgcaaaactgcaaaagacaagaaaaaccttagcgccatcaaatcaatgagtaaagtaaaaaccaaccatgcaaatcactgaaaatagagaaacttaaaacactcaagttttaagaaacaacaccattacatattgaatttcatactangcacagacacatccaaggttttacactgacaatactcatgatag

SEQ ID NO: 2704 - DNA, 479 bp, Arabidopsis thaliana landsberg
gatctttccacaattccatcaatgggtctttcccggtttctcttctcaacgcgacggagcttcgatttcttgatctgtccgataatcacatctccggtgcactaccggcgagttttggcgcgctttcgaacctccaagtgttgaatctctccgataattccttcgtcggcgaattaccgaacacattaggatggaaccggaacttaacggagatttcacttcagaaaaactatttatccggcgggattccgggaggttttaagtcgacggagtatcttgatctctcgtcaaatttgatcaaaggctcgttgccgtcacatttcagagggaatcgtctacgctatttcaacgcttcgtacaacagaatctccggcgagattccgtcaggtttcgccgacgaaatcccggaagacgccaccgttgatctctcattcaaccaacttacaggtcaaatcccgggttgtcgggttctcgataac

SEQ ID NO: 2705 - DNA, 560 bp, Arabidopsis thaliana landsberg
  unsure (1)..(560): unsure at all n locations
acttcattaagagactaaaaccattcttgtctctctatggtttatcttcttttgtccataaaaggacgatttgagaaagatataaaagatatctttgtaaacattacaaagagaaaaaaaattaaagaaagaaaacgttttaaagagagagaatttagagagatcaataggaagtcaaagtgaccttgagcggtggtttgggattaattttcgttcgtgctcttaactgatgtttacatcacttcccatataatttcatatcaaagttatcactaaaccggccaaaatatatgttccgtttgaacgcttccgcataaaaaaaaataacatatgataattttaccattgtttataatttttttaattacaaatgtttgattttttttttatatagaaaaaaagtgtaataaaatttagggtgaattgcaaaaatgacgtttttaggagatgaaataaagaatatagcactacaaatctataatgtagtgaataacatttaggtgtggtaaaaagatcacaaacttcttctacgaaagagatagntagcgcgtggaataggc

SEQ ID NO: 2706 - DNA, 502 bp, Arabidopsis thaliana landsberg
cctcgacgatgccgggcatcccattccgctgattgccgagattggcggccagaatgccatggtcgtcgattggtcggcgctggccgaacaggtcgtgggcgacgtgctcacgtctgccttcgattccgccggccagcgctgttcggccctgcgcgtgctgtgcgtgcaggaagactgcgccgatcacgtcctgggcatgttgcgcggcgcgatgcaggaactcggcgtggggaaccccgacatgctttccaccgacgtcggcccggtcatcgatacccaggcccagtccgtcatcgagaagcatatcgccgccatgcgcgaagcgggccaccgcgtggaccagctcggcctggacgccatgtgccagcacggctcgttcgtggcgcccaccatcatcgagctcgacaacatatcggccctgaagcgcgaagtgttcggaccggtcctgcatgtggtccgctacaagcgcgaccatctcgatgcgctggtcgacgcggtcaat

SEQ ID NO: 2707 - DNA, 4395 bp, Arabidopsis thaliana landsberg
catacattcctagtggattttgcaattttaaatccgcagtcaaagatggtgtgggatacgctccttgcccttcatgcccagttcttcccaaacacaagataaataagtcaaaacggcccaccagaagaacggcccatcagaaaaccgacccattagatcgaccggctcggcccagatgtaagttgctcggtccaacaacatcaattcggcccagccagacaaacctaagagggtaaaaatggaaagtcacaggggagaccctaggtcatctcctaacctataaatagcagaagacactattgggaactgggtccagaccaagagttattacctagaaaatttaagagagaataattgcctagctctatcatctcttactttctcgttttctattctgtattttctggttttccgacttgtactttcggttttccgttatgtaatttcggttctccgttctgtacttacggttttccgttctgttaagttaccatcttttctgttcgtcattaataaagaagctactccgttctccccgaacgccttagttattattgttacaacctcggtacaaatagatgggtaaatatattgagcaaagaaattggaaacttagaactttgaaattagaaaaatgacctttgcttaactttgcttttagtacctcaattcccattttcatcatcgagagattcttctgatactccctaattaaggacgacagattcaatttcatgagtatgaacaattattagctaatactcatcgattaaggattcttgggaaatcaaaaccaaaacgtgcttctgttgtaggagaagggaaatagtctaatacctggagatctatatttcatcaccgccacaaagaatgcactaattaggaagatgcaattgaatcgatgctttaagaagtggtaggtgtaattggatgcaaatttctgaatcaattctttgggttcaacgagatgaacttattctattaaagaattgattcaatagtttttgaaagaacaaattcagaatttgaagaattgctagaatagaaggtctgaattttgaatgaacaatactagaagagagagacgatagttgctccttttttccttttaaaaacaattataaaaaggatgaaaacactctgcttttctattaaacaatagacttaattttttttaaaaacaaaaccattgtaaccaaaaaaaacaaaaaaaaatacaaattactatgagacaatattttttaaggtgttaatacaatttttaattaaaattttgtttacttaataatctatatattattataacaaacaagatacttatctttagcaatgatagttgaaatacagtccaaagtataatagtttatgtgttatcattaagttttaattagttagactaaagcttttaaattgattaggcctatatgtattttaaataaaagtgatatttaattatcaagggacggtgttatatgatggaacagagttggatcgattttaatataggataatatatcatgagaaaaatcataaaattaccaatatatattaatttttgaagtatattttaaagaatctaattgagtccgcttttatttgattttgagccggaattgagtgattggatctggcctaatttctacaaaacagaagatacttaccataattaatgatagttgcaaaatagctcaaagagtaagattaatttttctttcactaaattttaattagttagatttaaaatttaatttgactctaattatggcggaatgagtttggattggacgggtttggatgatactgttgaagtcattagtatcgatttatagcgacttataaaactaattacaaattcaattgccaggaactatgtaaacaaagaattccctctggatcaaaaggaaaaaatatacctggatattctgcagcggaaagatgaaccatattgtttcaaggttgttttagcaccccaagtgttgtgcctctacaggatccacacgcacacgaattggattaaatctggaatgctagttcctttgagatctaatctcaaaactcagacaaacaatttgtctctctattttatggttttatgatcaaaagtgtatctcacaaacgttgctaatatatcatatatatagccaaacgtttaaccctaaccaattagggttaataatgggccaaagcccaataactctttttattgatccagtttgcttaggtgtgtgaccctgtaggtttgtataatattagtaatgagttataactcatagattataagtggtctctagcaaaacattataaccacctaatattatacaaatgtcaaacctcgacattacaactttaactagagtaaagtacaactgatttcaggacattcccaacaatctcccacttgtactggaatcatctattcccataatccctttgtctctatatctcgatctcagcataaggcaagaaattgtcatccttattcagctagaccatgtttatcgaactccgatttatactgataaaacaaacgactgacattcacctcgtttgagcgaggccacgcatttctcagtatcaaatcttcgataggcccaaagatatttatctcccgttatatgggagggacaaatcccatcttgttccatccctgatccttaaacaattcataacgcgcccaatcactgtctttataatcaccttttacggctgacgtttgacagaatcaaagcaaactaatccatgaataagaaatcatgacgagctcaggtcaaaggactatactctatagttgtgatgaaaaactcttatgacactcatataacaatcttgtagagttctcataacgggtcagtccaatactgtgttctctaacacatatctatgtgatagacttaataccacatattaatgactccatgaaacttagtcatcagtcacctcacatactagtcattcttagttattaatgtcccattttaataaccttgattagggacttcaataatctatgtcattttccacttatagggtttcatgatcaagtcacgtacttgatgacctataagaatgatataaattatttgggactattatttaattatcaaagaaataaataatactgaagcaaatttcattaatttgaaaataaatccaaatgtattttaatatgaacatcatatcataaaagaaaaacctcccactagaaataagatcacatctttataaatctaatgtcaatcgcaacagtatgactattatgcttcggctgcggaagaggttttgttaacgaatcaacaacatttgcatccgctgaaagtctgctaatcttcacatcacctctatcaatggtatcacgaataaggtgatatcgcctttgtatgtgtttgaatttctggtgtgatctaggttcttttgcttgcgcgatggcaccattgttatcacagtaaagatcaatgaggccagaaatactaggaaccacatcaagttcagtaatgaacttcctaatccaaacagcctccttagctgcttctgaagcagcagcttcagttgtagagtctgccacagtgctctgtttggaactcttccaactcagtgctcctccgttgagacaaaagacaaatcctgattgagatcggaaatcatctttgtctgtctgaaagctggcatcagtataaccactcacaacaagttcctcacttcctccatagaccaaaaacttatccttagttcttctcaagtacttaaggatgttcttgactactatccagtgactttcacctggatcagattggtatctgctcgtcatgctcaaagcacatgcaacatctgggcgagtgcagagcatagcatacatgatagatcctatagcagaagcatatggaatcttactcatccgctatcgctcatcatgcgtcaaaggacgctgagtcttgctaagagttatgccatgagacattggtataaaacctttcttagaatcatgcatattgaacctgtgcaagaccttatctatataagtatcctgacttagtgtaaatattgtatgttattctgtgtaaggttatcaacgattttcgtcataactgtgagctctacaaattcttcgtcggtaacaatattttcgaatgatttgttttagtctttaatttgtatgatttgtagaggtttcgacctacactttggtcagctctggttatatcacactttgaaataaaagaggatggagacaagacagcctaaacaattacaagatttgtcatgacaaagaattgagtactggatcccaatcataaagacacactcttcaaaaacgtaattcgatataattatcaagcatcaaagtcaaagacaaagttatattccagcaaaagttatattaggaaatcatgtgtgaca

SEQ ID NO: 2708 - DNA, 552 bp, Arabidopsis thaliana landsberg
ggttagcacgatcactattgatcagaacgttgatgagttcttgaggattgtggctgaattatgtctgcttacagattcaagtggatgaggaagtgggagcgatattgatcttgaattcgttaccagcgagtcatattcagcttaaacacacgctgaaatatggaaacaagactcttacggttcaagatgttacatccttggctaagtatctggaaagagagctggcagaagcagttgacttagacaaaggacaagcagctgtgttgtttactacagagaggggaagacctcttgtgagaaacaatcataaaggaggtcaaggtaaagggcgtttttcctctaactcaaaaacaaaggtgacttgctggtattgctagaaagaaggacatgtgaaaaaagactgtttctctcgcaagataaagatgtattcaaaaagtcaaggtgaggctggtgttattacataaaaactgttggtttttaatcattgtgtgtcaatgaacagatggtataagatttgtggatacttgtacttggatgcattgcacatatgac

SEQ ID NO: 2709 - DNA, 532 bp, Arabidopsis thaliana landsberg
  unsure (1)..(532): unsure at all n locations
nnnnnnnnnnnnnnnnnnnnnnnnnnnnnnnnnnnnnnnnnnnnnnnnnnnnnnnnnnnnnnnnnnnnnnnnnnnnnnnnnnnnnnnnnnnnnnnnnnnnnnnnnnnnnnnnnnnnnnnnnnnnnnnnnnnnnnnnnnnnnnnnnnnnnnnnnnnnnnnnnnnnnnnnnnnnnnnnnnnnnnnnnnnnnnnnnnnnnnnnnnnnnnnnnnnnnnnnnnnnnnnnnnnnnnnnnnnnnnnnnnnnnnnnnnnnnnnnnnnnnnnnnnnnnnnnnnnnnnnnnnnnnnnnnnnnacccgctcttggaaaaaattattacctgcgtcagaacatagcaaacacggcgctcaaattatttctaccacccccacactgtcccgctggggattaaaccttcccacacttacttgagcataccttcttttggaataattagctcagtcattatctagaaaagatagtatttgcccagacatttcaccaaataacggtttttcttctcggtggaaaaaccatacagaaatctcctaacca

SEQ ID NO: 2710 - DNA, 3238 bp, Arabidopsis thaliana landsberg
gataaattattgattaacttgagggttatttagtcgttggaggtaattagtcgttaaaatttatgactatgttgtcactatatttaagactgatttgcgactgaaatatcctttagtcggaaattttagtgactgaattgttatcaaaaaacaactgcttggttacatttttgatgactaaatttgcgactgttgttgttattagaacatctaaatgattgttataaagatggaaaccttcctgagaaaacaaaacattataagaagcataaacacaatacaagaagcatgaaaacaaatttattgtcatttcagaaaagtacaaaacccaaattacagaaacatgtcgattccctacaacttagaactttgttcagcataagtacaagcaacacaagtacacatatataaaaactttgagccgtgatattgagtcttgaggaaggagttaagattcaaacctatgaagcagatgaagagggagagacagctggagagggtgagataggatctgtggttgtctccttagctgaatgagattcgaggaaattgaggaactgaggaacattttcgcgcaaaaacttctccactaaggacaagtgctcaagcttcttcttctgctcatctgcagctcgggaattctcagcttcacgcaaagcaatcttagattcacgcctctaattgtaagagacctgctcttctatcttgcgttgagcttcaagtaattgttcttgcaaagccacaaaagaagttgagtcacctgcttgcttccgcttgccattgacaagagactctttgaggcttcctactccataaggaacgcctctcgaatccctctcagtggactgcatagtatgataaaagctgagattagagactgaaaaagacaactcaaaaacactaaattgggaaacataaaacgttacctgaagaaatatggttgtacattcctcagctgtgagctcccgtacccgcgaagtgccatctgaaacagcagaagcttcagcctcgagctcagactgcctcagctgcaaattcttctgatataactctgcaatcttctctgcctttcgatcaacatacgtcccatcaggttttgtatgtgttttgatgaaaacgtcaccaatactgacagttttgcccaattggtcttcctgtaatgaaaaaaaaaataagtcatagaaaagtacattgaaacatcgagttaaagttgcaaaggagtaaacagagagaagacttaccaattcgtcccggatttgatgatatgacttagaccctgagaagtgtatgtgaggacctagaccgttacggtcagacatacgggcatttgaatagatttgacttctttcctgagcttcttcagtgtcccagtacgcagtcatttccttccatagagttttcccaatccatttaggtttctttcgactagttcttacagtgctaaccatgcctttcattcaccttaaacagatctcgttgaagtaaaactgaacagtccctgtgatcaaaggatcccaatggtgtgttttctacaaatagaaaaggtaatgtcagtaaaaaaaagaagtgtaatcaactatataaaagaagggctgaaagaacacttaacagcaaactcgaggaagtatttctcttgcctctcttgaggcacacatgtccagctgtagaagagaccatcaaacttgtttgtaaacactctagtgatattcctaacaagtcatgagtttgtgtcccgagtaaacctccatacacaagaaaaacaagttgttattatatgggagaaaatatctaaatatcagaccaaagactagcaaaacataaattatggctgcaaagtatcatacaaacagatcatatagagcagaacatagattgtggctgcaaagtatcatctagaactaaacttacacaatgacagacacgatactttgcagccacaagcaattgttctcgcaaacaacaagtagagtagagacctagacaacaagactcttcaaacacattgcaatagattgtggctgcaaagaacatcaaaataccaaagaccaacacaacacgagactaaaacgagaaacaattcagacattttctcaatctaatcaatctcacaaagctcattacccaactaaaccctaagatcaaaacacaacttaaactacttgttctcgcaaacaacaaaataagaccaacacaacaagactctttaaacaacaaaatagattgtggctgcaaagtaacaactataatatcaaagactttcagacttttagaccaacacaacacgaaacacaacaaataaacaattcagacattttctcaatctaatcaatctcacaaagctcattactcaactaaaccgacattgaacacaacatgggatcacaaacaagagaagaagaagatcataccatgtcgtatttggtcgaggaatgggagagaggacggtgacgaacttatccctctccgacaacataagcagatcatttagggattgaagtgtgtcctcctggagatctggtgtcagaggtggatattctttgaagttgttgccttgagaggatggatgactatgagcccgagactcttgaactggagaaggcggagggtcttgctgagaaggcggagggtcttgttgaggagtcagaggaacctgctgagtagttgcggcttgagtcgctggtttgttctgcacttctacggaggcagtcctttgcacttcaggttgtcgactgccagagtgctggaacaactgtagaggcggcggatagttccaaacatgagctgctgttgactgtaaaggaggaacagcggcttctgttgcaggcgtctgtagctgaggagaccgttctgctgccggcgtaaaattgtaatgagacggaagagaacgaggtcgtcgaccagccgtggatgtggaggctctctgagcaaggttaggactggttcgcttcttttttcctcgcccaaacatagtgtgaaggagagatctagatgagacagaggttcaaatcgaagaaatcgaagaagaagaagagatttaggaggaaaacgaagaggaatcttcgatttggtagggtttcgaagaggaaatcgaagaggaaatcgaagagagaaattgaagaagaagactgcggatgtttcgaagagagaaagagatttttgttagggttttcgcagaacaagtgaatggtttggggctaaaaggtttgggcctaaaaggttcagtttgtttaaacattag

SEQ ID NO: 2711 - DNA, 547 bp, Arabidopsis thaliana landsberg
ataacagagacatctacatgtacaggtaacatctaagatctttaacatttgatctgttttttttttgttttctgtcaatttctctcatttttagtcgaaattattacgaagggattgatttttttcgaatacccatttcttcaatcttctgattaatcaattaaacgattcatgggtctgatttcaaattcctctgtttttggtacaaattctagaacagaacatatttttaattttgttgtttcatgggtctgatttgaagtttttgattttgtgaattttttgcagaggagatacaccgttttgcagtgaagagtgtagacaagaacagatagagagagatgaagcaaaagagaagaaacagaatctgtctcattcggtgaaatcagctatgcggaggaaagaacaatcttcaccaactagatctcgtgattatgcttttcacaatggaactgttgctgctgcttaattaaaaatagctgggaactttgagaattattataattaattaggttaagaaaaaaataagctatattgtatctaacgc

SEQ ID NO: 2712 - DNA, 141 bp, Arabidopsis thaliana landsberg
cactatcgaaaggatttcatgaacttggtttacatctaattttattggaatccttttctaaatgatgactcagtcctcaccggaggcagagactctacatgggagctgcttgtagtcaatgtcctgtcttggaagtgtttc

SEQ ID NO: 2713 - DNA, 607 bp, Arabidopsis thaliana landsberg
gatgatattaaataagattcaaagttacaacaaaagatcgaaggacgaagactaaaagtctttaatacataattaaaagcttgtcatcaaataaaataaattttttcaaagtaaaacatttatatcagtttaccaacaatagaacgtgctttgcacatggctcttaatggtatagctttgggcaatgtggctcctttgtcttcggtcatgtccacaaaatcctcaccaactctttcccactcaaaacattgaaccaaacttccaagagcctggtttattagcctatgagccagcccggctccaggacaagctcttcgtcccatcccaaatgagattagcttctcagcctctccttctttttcaaatctttctggcttgaatatctccggatcttcccatacctctggatctctatgcatggcccatgcgttggtcaataccattgttccacttggtatatcgtagcctccaactttacaatcttctgatgacaaatgaggtagtagtagtgggactgccgggtacatacgtagtgtttccaatacaatgctttggagataagagagattaacatgtccgattcgtctactaatcggtctaaaccgac

SEQ ID NO: 2714 - DNA, 444 bp, Arabidopsis thaliana landsberg
tactaaggtccagggttggactaggaaggccacaacaaccgtctggttcctttctcttcctcggtccaactggtgttggtaaaaccgagctggctaaggctctggctgagcaactctttgacagtgaaaacctactcgttaggcttgatatgtcggagtatattgacaaattctctgttaataaacttataggggcaccacctggatacgtgcttaaactcaagccacttctttatgtgttttttgattaatggtataatggaaactcacatgatactactttgtttttcttaggtacattggtcatgaagaaggtggacaactaactgaacctgtgaggagacgaccttactgtgttgtactatttgttgaagttgaaaagacccatgtaactgtattcaacacgctacttcaagtgctagaagacgggagattaaccgatta

SEQ ID NO: 2715 - DNA, 472 bp, Arabidopsis thaliana landsberg
  unsure (1)..(472): unsure at all n locations
taaaagaaattctgtgctattttagcgaagagatgacgcaaatggacgaatcaagtaaagagagcatccaagaagaagcaagaagaacgaaagcagttgctgtggagaagtataatgcgggtgatcttgttggagccaaagaatttgctgtcaaggcacacaatcttgatacagaacttggtggtcttcgctgtctcaatacaattcttgatgtgcatatggcttatgagaagaaaatcaatggtgaaggtaattggtatactgttttatcggcagacccaactgaggatcttggaaccatctcggtacgttataaaaacttagttaggaacatgatctatgaccgtgacgactctgttggtgnggttgatgaaacacaaaagatattggttgatgcatggcgctacttgagcaaagaaaagttggagcaggccaaggcacgcaaacttccaccttcacaagaagtgttagc

SEQ ID NO: 2716 - DNA, 1085 bp, Arabidopsis thaliana landsberg
gtatgctaagtctgtgcattaattttataaataaatattgagagatacaatgataaaataaagtgtgatggattttgcagatgcgagttgctcgacgaaggaatacttggacacagttatagattggatgccgtcaatgaacaatgtaaaactaaaagacattcctagttttatacgtaccactaatcctaacgacataatgctcaacttcgttgtccgtgaggcatgtcgaaccaaacgtgcctctgctatcattctgaacacgtttgatgaccttgaacatgacataatccagtctatgcaatccattttaccaccggtttatccaatcggaccgcttcatctcttagtaaaccgggaggttgaagaagatagtgagattggaaggatgggatcaaatctatggaaagaggagactgagtgcttggaatggcttaacactaagtctcgaaacagcgttgtttatgttaactttgggagcataacaataatgaccacggcacagcttttggagtttgcttggggtttggcggcaacgggaaaggagtttctatgggtgatgcggccggattcagtagccggagaggaggcagtgattccaaaagagtttttagcggagacagctgatcgaagaatgctgacaagttggtgtcctcaggagaaagttctttctcatccggcggtcggagggttcttgacccattgcgggtggaattcgacgttagaaagtctttcatgcggagttccaatggtatgttggccattttttgccgagcaacaaacaaattgtaagttttcttgtgatgaatgggaggttgggattgagatcggtggagatgtcaagaggggagaggttgaggcggtggttagagagctcatggatggagagaaaggaaagaaaatgagagagaaggctgtagagtggcggcgcttggccgagaaagctacaaagcttccgtgtgggtcgtcggtgataaattttgagacgattgtcaacaaggttctcttgggaaagatccctaacacgtaagattaattgaaaacgtaagattgtcataaaagtgtggtatacatataataatcaa

SEQ ID NO: 2717 - DNA, 494 bp, Arabidopsis thaliana landsberg
ggaatacctgttcagctccatttggtcttatttgctacacagaagccaaaggaagggtggggtttggttataggatttgccagattgcgttggggtcaggttttaagtgtaatagttcagattgggtggctcttcgcaacggcaagccttctactaataattcttgggaacactgtctacacaaatatccaggtgagatcgatatagatttaaaagagtgagtgattctatttgacgatataagctatgatacgaattaagaagatagagacgtatagactggttttatatatcgactatcgtactttaatttggtcggaccaaatatgtacaactaatctatctgatctctatgtattgttctattttaagattattttggttgcttttctttttcttttatttggctgttgtgacgctttaattctctcgtcaactgtataaatgttaaacttggcttcatgtagcaaagaaaaagattttcttaatttgat

SEQ ID NO: 2718 - DNA, 392 bp, Arabidopsis thaliana landsberg
  unsure (1)..(392): unsure at all n locations
tgggtgnnnnnnnnnnnnnnnnnnnnnnnnnnnnnnnnnnnnnnnnnnnnnnnnnnnnnnnnnnnnnnnnnnnnntttatttgatgtcacctctatgagtgctgagtctttttctatatggttgttgattgttgtttataagttaaatcttgtatcatatttctagggggtgaaaataatcctctcactgaaaaattctttactcacccgttttttttttttttttttttctccaggtcacgatgatcatgagtactcgcgcaagttcttctcgcttattggttatttcggaatctttaggttatttggctttatcgttactttttaaggatatttttaaactctttttagttacgtttgagaaaacgttttcaactatttatgaaatcatt

SEQ ID NO: 2719 - DNA, 592 bp, Arabidopsis thaliana landsberg
  unsure (1)..(592): unsure at all n locations
tgccccaatcggatttcttgccattaggtgcacgtcctttgttgaactcaagtgttttcctcataccaattaggtttgttttgtcgtaaacagctttgtctcttcccgtggctttccaaaatccagccatggtcgctctattagttcttgtccccgttggatatttcttgtccttgtgactaaaaaaataccattcattttgttcctcataaccgattcgacattgttctgtaacatttaaaatttaaggtgataatcaataaaaccttaaccaaagtaaaatatctcacggtgttcggtaagtaaccttgtagatcccatggatctattctgtagagatcgatgtctctgatgacatcgagatcaatcttttgcgatgcgattttcttccttagatagtacccgacaagctcttcgtccgtcggatggaacctaaatcctggaggaacgctacaagattccattggctccattatttctacaccaacaaaatgaaacaccaaaatgaacaataatataaatatacatgtacggaaatattctcttattatcgnctatacttatatatannatttgagatcacaacatatga

SEQ ID NO: 2720 - DNA, 476 bp, Arabidopsis thaliana landsberg
tttcacggtgtttgatataaatactcatcttagtgcaaaattgaacttatccattagagttcccgaaaaccttgctggttcctatatatgtctacaaggagactttcaagcttctttactttacaagaatattaccattgctacttcacccccaagaaggttcaaatatctattttaattatttaacttaactttattcatatatattatattattataacgaaaaatctattttttttgcttgatcagttacaacaatcttctgtttcattggcctcaactgctcaaggtttcaggggatgtctctgaagaggatatcaatggcgcgattggaaaaaacattgtgaacgacattaaagagagaagcgaagtgcgcttggggttgcggttgtttcttccggattgcagagaaaataaggcagggaccatgaaatttgcttgtgatgaggtcaaaatgaaatttgagtcgagttatg

SEQ ID NO: 2721 - DNA, 570 bp, Arabidopsis thaliana landsberg
aaatcctcaattccttttgcagccaaaattcgtttccttagatcttaaaaacttttggttatgcgggtggttagagtggaattatatatcctacacttttgagttgtttatatctatacttcacttttcaaagcatctaattagtgaaagttcaaatttgttatgtttagacaaaccaaatttttagttggcttttcatgtgtattggtttgatacggcaatgtttgggtgcttgaacctaaaaataaaggattagagttcgaatatttcctatatacaccatacctttgagatttgtatttgattagataaacaagagtgtagctatagttataaatgataaataaaatcaagcttataagatcatacagatgaatagattattaccctgaaattttaacttattcccaaaacaaaagctgttgattttaagatcattaggatttaatttaccactgatcccaaacatgtccgatgtagaaaattgtcaacttccttggaaatgtaagtggaaaattaggaactcagtaaaacaccaagcttttgtgtacaaactttcttcgagatctg

SEQ ID NO: 2722 - DNA, 526 bp, Arabidopsis thaliana landsberg
  unsure (1)..(526): unsure at all n locations
aagtctttcctggtctaatagttggtactttcttcaagtggattgatgagatacatagcacacaataactttcacttttgctataggaaatttattcaattaaacttcccggagatcctaaacttggtgaagggaagcctgagaatcaaaatcatgctatcgtgtttacgcggggagaagctatccagaccatagatatgaatcaggtttttcctcacttctttgtcatgtttcggcacatttctgtattgacattaagagagtcgtactgtggataagctaaacccgtcatgcatgtggccgatagtgattgtcttatattcctaaggtccgcttttggccatcatcaggttcccaaacttttcttcccctcattcaaaaaggattgataaccgggagattaatgaacaaattatgtagcaggagtttggtggccccttcttaccaactgtttttcttgatccactatattcttcatgttcttcaggacaattatctggaggaaagcatcaanatgagaaatcta

SEQ ID NO: 2723 - DNA, 548 bp, Arabidopsis thaliana landsberg
  unsure (1)..(548): unsure at all n locations
aaccaaaagaaatcaattgagctatattattaaagaccatatgttttattcattgtgataactacaacacatgagtgtgatgagagtgtgaggtgtccaagtccaaccaaactaaaatatccctataaccttatagacatctattgaactacgctaaaacgacaccgttctaaagaagcaggtttgttgcttaagacagaagaaacccggaaacaacactgagtatttatggttttacttgtgcgaagaagttgctttgtctttccgaccagcgagaatcatagagatttgaaggcctctgctaaaagcttgattgaaaagcagacgagcttgaaactcggagacaatgggaaaccaagacagaacagcgattggtgcaaagattacaagtcccatgatattctcatacgctcttcctagctctttcaccgagtcccaaacccctaaagctntgatcggtgacctcagtacttgcccaatctgagagaaatttccattagttntttctaagaacatgatgcanattccgatactatgattcttgaagg

SEQ ID NO: 2724 - DNA, 560 bp, Arabidopsis thaliana landsberg
cctcggtcgcctgggtatccaccgtgccgcgatcgccgcgtttcggtttaggtcagctgcccggcacgcacgtgcggcatgagatgaacgccgcccgcgtcggcgacgcgcttttcacagggtgctgatcccggcgcgccaagactcgctgcacctttccacggagattcatccgatgaaaacccttgccctcacgctggcccttgccctcggcaccaccggcgcggacgtcgcccaagcgcagtccaattcgcacgacgccctgaccgaggcgcaggtccgcacccacctgcagcagcagggctatagcgatatcgacgacctgaagttcaaggacggcatgtggcgcgcggaagtccacagcggcaatggcgagcacctggacgtgcgcatcgaccccacctccggcaaggcctatccggacgagcagaagacctcgccgctgagcgaggacgacgtccgcgcctcgctggcaagcggcggctacacccacgtgcacgatgtgaagttcgacgacggcatgtgggaggccaaggccgaggaccgtgccggcaggacgt

SEQ ID NO: 2725 - DNA, 1127 bp, Arabidopsis thaliana landsberg
  unsure (1)..(1127): unsure at all n locations
tgcaggtcgactctagaggatcccctaaaaatgaaaaattcttcaaaacaatagttgtattgtatgtttatatagtttttgtgtgtttaattaaaagaaataaaactactttacaaattttgtgtgtattacctatttaaacacttttataagaaaactaaagggtgttttagtcaatttatcatttagatctcaacgaggaggatataatggtcaaatcaagacacagctcgaaagctacaaacccactcgcccctttacctcacgcgcccctttgttttgatttcctctctcactctgcacacgaaggcgagagagagagagaaagaaaaaagcgaagaatacgcagaatccatccaatttagggttagggctgcccctaatctggaaacctttgcctcgtttctgatctgttttccggatccgacttgaaggaaagaagacgacgacgcactaccaaaaacatgggcgcgaattcgcttccaacggatgcaaccctcgatctagatgagcagatctcgcagctcatgcagtgcaagcctctctccgagcaacaggtgcctgtgattgtgttagaatatagctttcctcgcaccttttcgttttcttcgtttaaaattggatctgtaatttagtttttcgagtgaactttgggccatttcggtgattagatctcagattttgtttcaaatcaagggtggattatttctgtgagtatatgatgatctgattcttcgagaaggatcttctagtataggtgtagagctcatttcacgtcagttttacgggttgatagaaatggatttcatttttttttgtttcttaatgatttctggctgtattggattctgaataggcgattagctcgcatttcaatatgctttgtattgtggatttgtctcacccacagccaaaattgtatccttttgattaggtgattggctagttaaaatctcatcagttagatgcattactggattttccaattgggggaatgtatcttaaatgataatagatttagctgaagttgagagagaggttgcaattcgataaaagttcttataagctaatatcgagggaaaaactgatcagtagctgtaaaaaagtcttattggcngtagatgatc

SEQ ID NO: 2726 - DNA, 578 bp, Arabidopsis thaliana landsberg
  unsure (1)..(578): unsure at all n locations
gtgccgggcgtggtcgagtccatcaagatcatttttgagattgcgtccacgcgcattgcggaatttggctttacgtatgctcgcaaacagcatcgcaagaggattcatgctgtgcacaaggccaacattatgaagatgtctgatggcctgtttcttaagtgcgcgcgcaatgtcgcgaagaactatcctgacgtaatctacggcgagcacctggtggataacacatgcatgcagctggtgacgaatccctaccagtacgacatgctgttgctggaaaatctgtatggagatatcatcagcgatttgtgcgctgcgtttgtggggggacttggcctggttccaggagcgaatctgggtaaggactgcgctatcttcgaagccgtccacggttcggccccagacatcgcaggcaagaacatcgccaatccgactgcgctgctgcaatcggccgtgctgatgctgcgtcacattggcgaggcggacgctgcaaaccgtgttcatcgcgcgatcgaaaggtgtatgaggcaaacaatcgctgagcgcgatgtgngtggcacactgaacaatgaattgcgatg

SEQ ID NO: 2727 - DNA, 604 bp, Arabidopsis thaliana landsberg
  unsure (1)..(604): unsure at all n locations
tattcatacaaggtggaaagaggttctcttaaagtccttttgtatttctttgcttgtgtatgctatgacttgtttcaagatgccaaaaaatatttgtcagaaccttacttctgttatgatggacttctggtggaatactatgacaacagcaaagaagattcattgtgttggttggcagagattgactctacctaagtcacttggaggtattggattcagagatttgcaatgcttcaatcaagctttgttagctaaacaggcttggagacttttgaatgtgcaggataatcttttctttaagatctttaagagcaggtatttcttgaattcagaattcttgaatgctccgaaaggcacatgaccttcttatgcttggcgaagtatcctttttggaagggaatcacttactcaaggtttaaggattggtcttggtaatgaggagaaaatanatgtctggattgatagatggatatttgatgagcatattcgaagaccaatganataatcattccctaatggacattacactaaaggtgaatcagctttttgatcgtacgaaaaggaattggaatgtaaatcttttgaagaaaattgtccctgataa

SEQ ID NO: 2728 - DNA, 591 bp, Arabidopsis thaliana landsberg
gacgaccaaagctattgaaagttccagcacaatccacaagctgttgctcttacattgatattccttttccaaatgcttgatggtgaggtgcttcaagagctccagttgtgctgaagttagaattggatcatacatatcagtgaatcttgcttacatggagaaatctcactgaaagaatcttatcatagactttacctaaatgtccaacaagatccacaatgtccctgttctttcacaggactaacaataccatcttctctccaatctttctgcagtttacaaagtataaggacttaaaccaaggatccaaaatttctatcttaagaagagctaaagatcaaagaacatgaaaggaatggttactgtgtctggaactgtagcttcagtgatcttgtggctaccctttaaagtagcagaacagttttgagcagctccaagcttgtatctttgaaactcttgccatgtcaagtcagcaaactctatagaacagaacaaattcaacttaaagttaaaacatctctctcactttcttgaactatgtgaattgagacaaagctcaaataaaacgttcttggagtatgtgattaagac

SEQ ID NO: 2729 - DNA, 506 bp, Arabidopsis thaliana landsberg
atggaatggtggttcttgagatgattggagcaaggtttattttaagagctcaaaatgctggatccagggatagcttcaatgtacttcccagattggatttataaagatcttgagaaaggagaaatcatgagttttttggcagatcaaattaccgaagaagaagatgagaagatagtaaagaaaatggcattggtgggtctgtggtgtattcagaccaatccatatgatcgtccaccaatgagcaaagttgttgaaatgttagagggaagtttagaggctctccagattccacctaagcctcttttatgtttacccgcagtaacagctccaataactgttgatgaagacattcaagagacttcaagcttcttgaaaacaagtcaagatacttcatattattccgaacaaatagttcaagatactgtagaagagaatcaagatagctcaagatcttcctaaaccaaggtcagcaaggcagcaagagacgagtgttattcttacaagct

SEQ ID NO: 2730 - DNA, 545 bp, Arabidopsis thaliana landsberg
  unsure (1)..(545): unsure at all n locations
cagaaaatatggattcttgcacatatgatttccagcaagtttaagataatagtagaaaaaggtggtagaactacagatctcaatgaatagcataagtggaggagttaagttaagttagataaattaatgaaataaaaatgattaggattgatagggaatggtggtttcctcgtgtgcgtggctgcattctctcgtggtacaccaccataaataattattgctattctaatatagataattttaagctttctattagtaaaaagagaaaatgtaatattttttttaaagatataaaagataaattacaggtgatggttgtcggcgaaaccgctgaccaccggttcgaaatgtccgacaagtgaacaactggttaatgggactttcacactctgttccatatgccaacgccattcttcttctctttgttaaaaaaaaaggattaaagcttaaaagccttgcatttttttnnnnnnnnnnnnnnnnnnnnnnnnnnntaaacttatttaaaaaattacaaaaacatgtagacttatgtctatgttttt

SEQ ID NO: 2731 - DNA, 2681 bp, Arabidopsis thaliana landsberg
ccactactatctagagtccacctctaattctaactgcgtatccgtctctcccacgcaatacagagcccgtaataagccccccataactccgcaagtggagctgaacataccccgatgttcagcgcgaagccctgaatccagcgtccctctctatctctcaggactccccaccgctgctgctaaccctgggttgcctcgtgaagcaccgtccgtgttgagcttaacccaatctgcaggtggcggttcccaagcaatcagtctctctactctggtaattgcttcagtacctcccaacaccggagcatgtgcttgatagacctcccttgcaatatccttcacaaaacgcacccggtctctacacttccctgtcaccccaaaaacattcccacatctccacttccatccccaccacgctgccatcccaaacaccgttaaccaaggcacgtcgtccttcagcttcccgtcactcacattggcgtaaatccattcgagtagggattggctaaaaaattgtgctctgttattccgcgcaaccaaactgttccagatccccgacatagcaggacaatcccgtaaaacatggagaatagtcttctctccacctttacatacctgacaggcattagaatcacacaagtgtcgccggaatctctctgaatttgtcataatcacttgactcactattagccacataaatactctgacccgctctgggactacacacttccaaatcttcccaaacaaagactctacatttggtctcggggaatgattccactgtaaaaactacgcggccgacttcacactgaatctcccatcctggcttggaccccatgaggctctatcggacgctcccgtcactgtatctactaccatggagaggagtcgcagtctgtcccgtgttgatagaaatggttcaatacggctcatatcccacccggctccctcaaccgacaggtcccgaaccttcaaatctgccatctcttctggaatagtagtcacatcatcgtcaatcaacagcccattgctcaaccatttatctttccaaaacttgatggttctgccatcttctagaacccaactcaaccccggtatcaccacttctctcagtcccgaacccacactcctccaagttgatgaccagttaccttttacagccgtccatgacatatcatttgtgtctcttactttatatttggcccggagaacttgtgtccaaagactagtgcgatccttcagaattctccacctgaccttagccaacaaagctttattcattagagctgcaggcctcatacctagaccaccttcccgcttaggcagacaaattctttttcacgctatcaagtgttgcttcttcttctcacttgtacttccccaaatgaaagagcgagtaatcttatccaacctatttaacgtggacgtagggagagaaatagtactcatcgagtgaactggaatagaagagaggaccgatttggacaaggtgacccttcctgctaaactcaacatacaccccttccagccggataatctagaagagactctctcaacaacttcaccaaaagtatccttattaattctcttgtgcaagataggcattccaagatactttcccaaatcacaggttgctttaataccgctttcgtcgctaatctccttagccaaatcacggtcaacattacccgaaaagaagatcttagacttctctaagtttaccttctgaccggaggcaacacagaatttctccaacactcttctcataatccttatctgactaattgaagcctccgcaaacaaaataagatcatcagcaaaacatatgtgagagagtttcggtcctcctctcgaaatactaatcggtttccactctttgtgtcttgttgataactcaattaagtgacaaagtctctcaagacaaagcacaaacagatatggagacaagggatccccttgacgaaggcctctagagggctgaaatgcctctgtttgttctccattccataacacagtcatcgaaggaccggtcacgcatttcatgatccactctatccacttaaccggcagtcgagctgctctaagagtatcttctagaaaatcccaccgaattctgtcataggctttctctagatccaatttgagcagcatccaacctttgactcccttcttcctcctcatggaatgaactacctcttgaacaatcaaaatattatccgtactcaacctccccggtataaaacttgattgagctggtccaataagcagaggcattactcccttcaatcttataaccaaagctttagtaatagtcttgaaaaggacattacataggcttattggtctaaattgagttactagctccggcttcgctaccttggcgataaggactaccaaagcatcattcatactctccggtaggattcccgtctcaaagaagtctaaagcgaaccttatcactgacgactccacagtctctcaattctgctggtagaaaacgggttgatagccgtcggggcctggggccttaaatttccctatacttcgtactgattcttcaatctcagcaggcgtgaaaggtcgattcagctccgtgagagcactttgtgatagaatagtgaacccctcaggcggtaaaggagttaaaactggattcacatcctccagagagtacaaccttttat

SEQ ID NO: 2732 - DNA, 561 bp, Arabidopsis thaliana landsberg
  unsure (1)..(561): unsure at all n locations
ttgattggttccttttttggaaattaataatgaatttcgtttttctaattaaattaattaaaatttagatatcaaatcttatatgttgattttgattggttactttttgaaatcaataatgtattttgtttttctaattaaattaaattaattaaattagtatttgattttttaatccttaaagagatgaattaatttaatctttaatattttacttctaatggcatacgtatgtaattacttacagaaaataaggttaatttttattatgtacttcccaaataatagtataggatgattttataaacttttcaccaagattaagaaaataataaatgacttataggattaacttttatttttttgttaagaaattcaactttagagctaaagttatcttcctcaaaactaaaattttagaatggagccaaaactagttcaagtaagttccattgatcttctatatatattgacatagatttataccatttacttaaaatcatttatggcttcttttagntttaatctaaatttaccatcttaaaataatgaaagaaaagt

SEQ ID NO: 2733 - DNA, 548 bp, Arabidopsis thaliana landsberg
  unsure (1)..(548): unsure at all n locations
aaccaaaacgatgaaggatacagcgcaccagaaacttcaatgtcaggtcaatactctttaaagagcgatgtttacaggggtggagtagtgatgctcgagcttttaaccggaagaaaaccattcgacaggtacttttacaatccatatccctcgccttcctaaaaaaacttaagagtgatgcaaatgtgtnnnnnnnnnnnnnnnnnnnnnnnnnnngttgtgtgtgacagcacaaggtcaagatcggaacaatcattggtaagatgggcaacacctcagcttcacgacattgatgctttgggcaaaatggttgatccagctctcaaagggctatacccggttaaatccctctcccgatttgcagatgttatcgccctttgcgtccaggtaatcatctatatattataatgtgatgatctgaacaaatgaaatctgaatgtatattgttcttttaatctggtacagcccgagccagagtttagaccacccatgtctgaagtggtgcaagcattggtttgattggggcanagagctaacatgagcaagag

SEQ ID NO: 2734 - DNA, 276 bp, Arabidopsis thaliana landsberg
cgatcaccgtaagctcatgttttcattttcggattcacagtcttatcaagagagttgttgtttaaatttagaggacgaggtcgccttaatgtaagaggaataggacaacgtcggcctggttactctcaacgagacaggagcaaagtcatttgttatacatgtgacaaacccggtctttacgcagcaaaatgtgcctataggatactcatacttaaagaagctcatgaggactatgaaaccaacacctattcttatgaggtttacattcttatgatt

SEQ ID NO: 2735 - DNA, 1859 bp, Arabidopsis thaliana landsberg
  unsure (1)..(1859): unsure at all n locations
gcaatattgaaacatcttaatcctaagccaaattaaattatacattgaaaattattggagttacgtcatctatcaccagcactatgcacacaaatattcctaccagatcaagattctacaatagaatacttacatatgaatgatcctaccaaattttcaggtgataaacacacatttgagtatccagtgaatcggtacaaaaacaagttttcagaaggcacataccatatctggtttgaacatggcttcacaggcaccatatagagattctgaagcagttcccgagacaacaaaatctttagctaactccctgcatttagagagaacaagcgtcaaggcatgctcaccattgcaactatcatgttcggtaaaatctcaactatattaagaatcatatttaaatcagctcaacacatgtaaaataagttcactcatatgacatgcatacactgcattggatgacaaaagaccaaaattagattccaactaaaaccaaaatatcaatccacgatcattttctagctgacctagcaagtttcacgattacagtcactgactaagtaaattaaatggcattacagacgaaaaatgagatataacgtcttaagtaatgaagaaagcgagcatacttggctccaatagaatccatagtgcaaatgaagggtttgttatcatcttccaatccagcaatcacaggttggcacaagaatgggccaaatctgaaataaagaatttggtacttagtagtggcaatgccacattaatcataagaaatcagattgttaagaggaaactagaaactaataacaaattgagagaagaagacatttcaccaaccttttctcataaagaatagccgatcaagactagcgaaagtttcagcttcatgtttttttcctagctgatataacttatgaacgnaaaaaaatacgnaagatcgccttgtaccttcagtaccaaagacaaaacaaaaaaaaacggagccctaaattttgtaattcacctaaaattctctgaggaaaggagtaaacatatacgagagcttacaatgtctggacatcggtggcgagaccggaaagtccgatgaagagatgatcgtggatcttagatattctctgaaaatcggtagcaatggtttgtaattgcacaccaagcctccgatcactagctatagcgaagcaattcttccctaccatagctacgacggcacttccattgtactcgaagatctgaatcaccacaatgtccaccgattttatcgttcaattcatactatcaatctttgcgcagaacaaacaaaagttagaaattgaaaaaaagaattcggcaaggaacacttaccgacatcggaaaattagggtttactgagtgaagcttcgggagttttcctatcggagaagaaatctgagcaagagaagaacaattattaaagtcgacgatggcttggacgaaactctagacaattttttattttttttggttcttattgatgggcctcgatattattgggctttcagatgacttttatgtctttattttttcttgctctgcttttacttttttactacgagataaattttgctttggtcataaaagttggggaaacgtttttgtgcaggcatgtcctcaaactctacttatttggtcactgtcgccgacattatgcactgcgacctgctcatggtattagaagtgatggttcggtacatggttcaccaagggactcgttcacacgcccctattcgctgcaatgttagctgagtgcattgtcgcgcaatgcataccggtcttgttttcacccaaaaacatgagaacatttggtatcttcggaagtaattacttggtgttcacagagtttg

SEQ ID NO: 2736 - DNA, 583 bp, Arabidopsis thaliana landsberg
  unsure (1)..(583): unsure at all n locations
tcattgttaagatttgtacaaagaaaaattggattaaccctcatgttatcgtcgtaaataaaacggacacaagatcttgggggaaaataaattaaaaagtcaagagaaaaataattttttaacatatttgaatatacaaacaacaaaacataagaaaaactaaattaaaaaatatttttaagagaatttagtattgtattttacgtaaatatttctataaattaatatttattattttatcctataaattattttttattaatttataggataaattaatattactataaattaataaaatctcatggtcccaacatntattaatttatagtgtttttactgtatatatataaacattatatgatctttagtnttttctgtataattttccttcttaatatatattttaaataatagtaattggtattcttttattttattntactgggtttaagaaaataattgtaatctttttacttttttggatttgtaatctattggataatattctatttatttatatanaatttttcntacaaaacgttaaaatttgaccactanacttgttacataacgtgattga

SEQ ID NO: 2737 - DNA, 605 bp, Arabidopsis thaliana landsberg
  unsure (1)..(605): unsure at all n locations
aaatctcctggtcactgttacaaaaaaacaattgttgacatcaacctttttttcaggctcttctctttttgttggatctggaggaatgcttatcattgcctctctttttggctgatttatcaaaaccacttggcttctctttcttgttatcagttttggtggactctatactgataagaccacttgaagagatcttagacttttgcaaagcctcagcttctttgtccccaatagcaaattggtcaagtagctcagggtccaacaattcttctatccttgccctcatttgttcctttaaacccaagcattgagagtgtgagtggtgtttcgattttacatggaaaccaaaacaaaatatacgcatgcacggaaacagaagcgattacctcaacttcttttgctccctccctgagatcttcgtctactgatactttgtgaggttcaagcactctctgcaaccaaaagcaaccatgaatcatttcagtcagctcgatattcgtgtatgtatttagggcttanggctgttaattttcacaaacgagggaatattatgactgagcaaaagaccatgaaatngtatgtaagttttccatctgacttacatc

SEQ ID NO: 2738 - DNA, 7410 bp, Arabidopsis thaliana landsberg
gggacacgtcggaaatcacaagccaaacatggaaagttgtaaaattgattagagtttgtccccttgactcatctaagggctagaaatgaagatgctaatccaatggcctacatcaaactcgaaattctctctttaaaagggctaagcttcttccttttctctctcacacttcattctcaacaattttaagcttcattttactctgctttgctttcatttcgattttgctctaagttttcaagctatcatctttaaaacaacaaaacaaagctctcattcggttttaaagtttgatattcattctgcttttgaatcaaaccctctttaaactctttgttgttctttgattatgtttccgagatcacccatggcggatgaagaaaggaaacgcaaggcaaagatttgtgcaaaaggctttgcgttagcttaccaaaactcattccaaaacgagcccgtgcccatggaagttgaagaacagcaacactcggccgagtatcaccaccactcgcccgagttgactcagcagacctccgaagatcccccacctctcattcgccgctcgagtaggcaaagagcagaacgcgcagctcatactcgaccagcacgccgagtaccggagccgagcatggaggaacaacaccaaaacgaagcgcgtgagcggagaagaggtgagatagcttatgggaaacgtgctgtggtagaagaagaagaggttcaagcggatgaacctatgtatgaggagccggttgaagaagaacaagttgtcgaggaggagatgatggaagaagaggatgttccaatcctgaaagctgtctctaagaaggggaagaagactccatctaccaagaagttcatctagtacctcaaggcactaagcttcgaaagaactaagcatcctcatgacgagactatggaggctttgggtatccgagaagatgtggagttcctatttgatatgtgcggcttatcaagatacatgacctacactttcgagagctaccaagactacacatgcgagcttctagcaaccttggaggttcacttcttttcgactcaaagagaagaaaaagcgggtaggggcttcggttacgccactttcgctgtgggaggacgagactactctctcaccatcaaggagctagacaacctctacggtttcccatccaaggacggtcttgaaccaaattttgacaagctcgaacttacgcagttcgggaacacaatagcggcaccgggcgagtttaactcatcacggtgcaagagctcatcgattcgcagcccggtgctaaggtatttccaccaatgcatagctcacactttttacgcaaagaaggtgacgggtcctatcaacgatagcgagcttcaaatgatggatgaagctctcaagttggttctaaggaataccaagaacgggagagttatggaagtggatcgggctggcacatctcttacggtgttatttttggattacttgatgggattaaaggactatgcggctcaactacacaaagatgaaacgcaaggggtcaatcgggattggaggtatgattacacttatgctagtagctgcgggcattgatctacgaggactggacaaatcaccggaatggattgacattgcctatttgaagaagaagaacattttagacaagacaaccccctccggtgtgcatatctacttgttcaaccacctcgatgagggaagctctaggctgctcctaccttgcaccaactacaccaccattaggcacggtgagaacattgacttctaccctcctattcatgctctctacgatgctcctgagaatataccaccacctcgctatgagcctccacacctgatagtaggatttttgtcaattaatcctaaaacactatcctgtcgttgtagtattttaggtgtcaatccaaatgggtgtgatgcagacagatgagatatgatcagaagttgctaagtcaagccagacagaatttggttggttttctaacagtcctagtgttgatgcataaaacagtaaaaagtcaaaaaaatgactgatatactcgatcgcagggtcgactgccagaagggaccttgtgatcgactataacaggatgacagagagtgaaaatgcagaaatggaccagtttactttatcacgcagtctcactgttagtagactggtgtgatcgagtagaatggttgaaaacataaaaatactaaaattcaatagcaagtgaatgaagcaggtaagtaaacagagaaatcaattggatgagaagttcctaaggatggggtaatcgaatagtgtggtctccctaatcaatttagttggttaacaaatctcaattaagctatccctagacaagaggttcaacaacagattaattcactctcgtgatagaaatccttaagcatagctagacactgacctaattcccattagcgatctctaactaagaaggcaataagaaccgactgttaaagccaataactgctctaaacggccaatcccttgggatagagacgattatccctggaattagtagatccaacgttccattaaacgccttctgggcgctggaacgtctgggatcggattccagttgatcagaaaggaataagcagtaaacacaactaatccagaagggattcaataaatctacacttaaccaacagattcgaccaggggttccacaactactctatcccatcctcagaaatcctaatcactactaagacaacatgcttaaagacaataacatagaaacgaaagatgaacaagcaaatgaaagcaaaatttgaataacttagaagaaaaatcgaaatacaaagttgcaagaatgaaaaacggctgctgaataatagtgcgaaattcgtgtctctgaaagtgcatgtctcagggcgaaacccttagccacttatttatactaagatatgaaagcgggcttcaagcccacttaacggcccatggacgatgtgatcaagagtgttggctcaaagtgggcttcctgatgggtttcgaatgggcttcgaatgggccttctgttctcttctcttctctttccgttgctcacgttatctggttcagtgcggattgatcaaagggtcgaggtggtggtcgagtaggttggttgaaagaatggtctaggctgcttcttggcctctgtgatcgagtatgttggtcagctgtcaggatggactggttcttctcctctacgatcgagtatactggtggactgccaaagtggactgcctggttgcctctacgatcgagtataattgtcaggatggactccttcatctttgtgattgagtagaactgcagaatggactgcctcatctcctctacgatcgagtatatctggcagaatggactgcctagtctcctctgcgatcgagtagaagtgtctggatggactgctgagctgagtgcttctccctctgctactggtgatcgagtatgttggtggaaatgtgactttctgttctgtttttcctctttctaagcaccaatagctccaaagtacctgaaacgactccagaatgcagaatgtatgcaagactagacctacactcgactgaagatgcaaaatgtacaaaaatgatgatgaatgctatgaaagatggatgaaactagactcaaaatggtgataaaaggatgtgtaaaacatgcaaattatagacatatcaatgtgaatgcttgaatatattaaggcaggttgttaggttgcattgtgacgagcatggctaaagtttttaagtaagggtctatcatcttgcaacatagaattagctacctagatattgagcttccccgttctatatgcatgctttggtttttgaatcctcaccttcaaacttttccttcaacttaagattttttgtttgcttgagggcaagcaacaaataagcttgggggagttgataacagtgtattttactcattttaggcatttatttatcatcatttagcttagtgatcactcattgtatcatatcattttgcatcacatttaacttattttgcatacatattgcatgttttggtgtgttttcatgtgtagaaggagcttacaaggatttctacttgaccctctactctatcaaaccaggagagaagcagcagaacaatctactcgaccagttcactcgatccaggcagccatagaggaggcatcaattcactcgacccacttactcgatccaagtagccacagaggaagtagcagatcggtctactcgcccctcttactcgatcctctactcgaccaagggcgaccaaatctactagactttttgatctatcaaagcgtcttcggatcctcctcattctccactcaaccagacatctgagcatacagataggagaggaagaaacatctactcgaccaattgatcactcggagcatggacacaaaggcgcagactttgcagcaccctctttactcgatccccaagatcgagcactcgcccaaactgcctcacgtctcttgtcttctagtgaatctagggttttcaagatttcactttgggatttgtccaaaagatctagcttttatcctttagtttttctttgtgttcttgaatcttcaaaacttaattactcttaatctatttcgtttttgcacttagttcttttagtaaagttgtttagcttgtttagatctacattttgatatgatttcagtaatttctgggtttgtgttcttgagaatgttgcttgagtagtgattagggttcttgaggatgaattagattagggtaatctctaggttagccaggcggttaagattaggttagatcccttctggattcgctggctaatgtggagattcgatcatagacgtccagcgtccaaaagacgttcacatgaatgtctgatctacgaattccagagatttgtagacttgaccaagacattgtcttgtcttcttattggctttggtagattgtttcttaaaccctgctctgctatgtttcatcatcgacagttgagattaggaagtggtagagttatgggggtctctgtcaccagagtggattgacccggttttgattctatcgtctagggtttctgcctttcacctgttagccacctgatgaaccctagagttgcccttatcaatgaatccatccttaggacttctattcttgttagatttatttgtattcaccccctgattgcacttttatttacctgttatttgtatcccctgttgattgtattttagttcttaattttgtcacatgttggttctactcgacccaatgatcgagtagggctcttaagttcacatttttacctgtttgaattctgacctatgattgttactagaaacccaccatctctataatctggcttgacttagttgcttatgtacacatcttgattgctagcaataacagtggactggattgacaccccctatagctgcatcgacatgttagtgtttaaggggaattgaactgaacctcacttcagcaaataagtaggcctaaaaaaaaactacttatcaatttggcgccgttgccaattcattgttgcattgttacattcaagatcacagaaaaagttaagatcaagttcttttacatttatcaagttactaactcatcatttcgtctgcttgtttttgtggtataggtactaatgtttgtgcatgcaaactcgatccaaaggttttgcacacctactaccattcaaagacagaatagacagaatagctcgtgagttacaagaagccaaagcaaaggcagcctgtgatcagcaaagatcaactgctatggatcaacagaacaaactagttgatgttcaagacccacctaatgttgatcaaccaagaaacatttgtgctggtgaagccccaagaaatcatcaccaaagacaaggaatagtgcctccaccagttcagaacaacaactttgagatcaagattggactcatctccatgatccaaggaaacaagtttcatggtctacctatggaagatcccctggaccatcttgacagctttgataggctctgtggcctaactaagatcaatggtgtcactgaagatatgtttaagctcagactattttccttctctttgggagacaaggcacaccactgggaaaagactctacccccagactccatcacctcctgggatgattgtaagaaagcttttcttgccaagatcttctctaatgctcgcacatctagattgaggaacgagatctcaggcttcacacagaaaaacaatgaaactttatgtgaagcttgggaaaagtttaaaagctacaccactcagtgcccccatcacggtttcaagaaggcttcattattgagcacactctgtagaggagctttatcaaacattagaatgcttctggacgctgcctcaaatggaaactttctgagcaaggatgtagcagacggatgggagttggtcgaaaatgtagcacaatctgatgggtgctacaatgaagactatgatcgctcagtaagaggaactggaggaacagaggataaacagagcaaggatatcaaggctctgaatgaaaagctagacaagctattgctcgctcagaagaagcagatacactacatcactgatgaagagcacttccaaatgcaagaaagggggaatgatcaaactgaagagctgtgctacatccagaaccaaggagggttcaacaagggctacaacaactacaagcccaacccaaacctttcctacacaagcactaatgtagctaacccccaagatcaagtgtatccaccacaacagaactagtctaagccttttgttcagtacaaccaaggttatgtccctaaacaacagtttaatggaggctaccaacagcagaatccaccaccagggttcactcaacaaccacaacaagcccccgcaactcaagatcctgaaattaagcaactcattcaatagatcattcaaggacaagctactagagctatggcttttgacaagaagataactgaattacacaagaagatcgattgttcgtacaacgatctaaatatcaagtttgaagctctgaattctacaatcaagtatgtggagagtcaatttgcatcaacctctgcgccgaagcatccgttgcaatttccagggaaatcagttcagaatcgtaaggactatgctactgctaatgttatcaccatccgccaagaagatgagtctccaccaagtcattagactcacaatactgaggacattatgattcaagaagggggggattcaactcaaattgctgaacctgccacccaacaattcatcaggactatagagcacacacctttgctgaatactcaccactttgaaaaaaattcaaaagagaaaaactcaacaaggatcagaatcaagaaatgattagtagagtgatgactcaataaacatacaacaagaaactcatctaagaaa

SEQ ID NO: 2739 - DNA, 558 bp, Arabidopsis thaliana landsberg
  unsure (1)..(558): unsure at all n locations
gcaactccaaccccacgttccttcaatcccaagtcttttcagctttctcgtttatagctgattcacctaatggcagggtttacgtgcttcctgattgggttcctcactggaatcctccatctcctctctagttgttgtgtttattgcttttcaaaagcttaatgagaggccttttattttaatatcaacaaggatcgaacataaatgctcataaaaaaatatctgataacttaagctagtcattacatcaaaagacacgaacactatatgactatttgatccttagacttggttcatctgtgcaaaaaaatctttttactagacgaagagttttgcacttcctctcttccaagcaccacgaagtggcaatccaccgggagagttctggctccttttggagttatcgttcttaggnnnnnnnnnnnnnnnnnnnnnnnnnnnnnnnnnnnnnnnnnnnncagccattgatttctctcctagacgtgttctgagaaactttgaagttttcttaggttgcttgcctgtgtcacctaatcccactccagccgatgaagaatc

SEQ ID NO: 2740 - DNA, 546 bp, Arabidopsis thaliana landsberg
  unsure (1)..(546): unsure at all n locations
tttcctctttctctcttggcttctctttagaaagtgactcaccttaaattaaaaaaaaagggtttttgcttttcgggtttaggtaagaaaaatctttcaatcttccttaaatctttcaaaaccccaaaatgggacctcgttgctctaagctctctctctgttggtggccgacccatctcaaatcaactcacaacgaagcttctgatctaggtgataacaacttcttcttcacttaaagtctctacctttcacactctctctgctaacaaagtttgagttttttgtttcttgttctgatagataacggnnnnnnnnnnnnnnnnnnnnnnnnnnnnnnnnnnnnnnnnnnnnnnnnnnnnnnnnnttgtggattctctacagacagtattgtctccgaacatggtgttaaagctcctaatgttgtgtataaaggcagacttgaagatgaccgatggatcgctgttaaacgattcaatagatccgcttggcctgatactcgtcaatttcttgtacgaactctcataaatttgattcctttactcattt

SEQ ID NO: 2741 - DNA, 594 bp, Arabidopsis thaliana landsberg
aatttaaacgaaaccgccccgtcctttggtcttctactatctcttttcattagtttcttttttcaatatgtattataggaatttgaatcaagcggattagacaacgatcgaccgcattagcatgcagatacatattttattcacggtataccgcgggacgatttatttttttaaagtaataaaacttacaaattttatttttataaaatatttatattttactgtttataattgttattaagttttttatataccacgaatccatgagtcaattgttaaaagacagaagttttaatccctattaaaacagcatattaataatattttaaaattttctaaatattgattcaaatacatccaccatataactcaattccaaaataaaacctgttatgtaatttctttacccgtcccgtaatttattttttaaagtagtaatttttaaaatttaagaattatttattatatataaaagttttacaaattggatcattctctaatacatttatattgtatagtttaattttatatatggtagcattatacataccacattatatttttggtttatataatattttctagataggatga

SEQ ID NO: 2742 - DNA, 375 bp, Arabidopsis thaliana landsberg
catccgactgtgtgaagctctctaccagctcccagcgcttcctcaacatctttgtggaggaagttccctttaggtgcgatattatgatcgatactgttcttgagaaggacatctatgcaaagcgtgctgacaagtgaatctttggacaaaccatgatgaggacattgtgtctggctacgtcagaagcgctgccatgcttcccagcaagaacaactacttgggtgcgccgaatcagaaatctcatttcttattctctgagaccttcaattaatgatagtcttatccaagaagggatttttgcagtcattataagaggtgagaaatcgttaagggcgtgatttttctcactgctaggctctgtctctcccagggaat

SEQ ID NO: 2743 - DNA, 321 bp, Arabidopsis thaliana landsberg
tttcttcaagattgggagctgctgtaatgacaatctaaacaatctcagtgagtccttcaatagaacaatcagagaagcatggaggaagccattacttgacatgttggaagacattaggaggcagtgtatggtgcgtaatgagaagaggtatgtgattgctgatagattgaggactcgattcacaaaaagggcacatgctgagatagagaagatgattgctgggtcacaggtttgtcaaagatggatggctaggcacaataaacatgagaatcaaggtgggtccagtggattcgctcactgttgatatgaataataacactt

SEQ ID NO: 2744 - DNA, 287 bp, Arabidopsis thaliana landsberg
aacaaacacatttcacccatttaaattggatttgaaattttgccattagcagaccttgcataccaccgtcgacactcacgacattatctgtcacgcatgattttcctttacggcgagaccctcacacggcaatttcttcgattcggtaagtttcttggcttaaatattctatcaacacgcctttcggtcttctcgctaaaaatgaaaatggcgaaagataagactttatagttcgctagttggcccatgcacaccgactaccgccatgttggacactgccgcacaca

SEQ ID NO: 2745 - DNA, 446 bp, Arabidopsis thaliana landsberg
  unsure (1)..(446): unsure at all n locations
cgaacctataaacggatggggccgtaatcactgagaggcttggtgcgagagaactcgcctggattttaggcaggggggatcgttgtcttttannnnnnnnnnnnnnnnnnnnnnnnnnnnnnnnnnnnnnnnnnnnnnnnnnnnnnnnnnnnnnnnnnnnnnnnnnnnnnnnnnnnnnnnnnnnnnnnnnnnnnnnnnnnnnnnnnnnnnnnnnnnnnnnnnnnnnnnnnnnnnnnnnnnnnnnnnnnnnnnnnnnnnnnnnnnnnnnnnnnnnnnnnnnnnnnnnnnnnnnnnnnnnnnnnnnnnnnnnnnnnnnnnnnnnnnnnnnnnnnnnnnnnnnnnnnnnnnnnnnnnnnnnnnnnnnnnnnnnnnnnnnnnnnnnnnnnnnnnnnnnnnnnnnnnnnnnnnnnnnnnnnnnnnnnnnnnnnnnnnnnnnnnnnnnnnnn

SEQ ID NO: 2746 - DNA, 2776 bp, Arabidopsis thaliana landsberg
  unsure (1)..(2776): unsure at all n locations
tttttcataaaaaaaatacccccataatcaaattaatcttaaaaattttaagggagtctaaaaaattttaaatttagttatttttggaaaataggtacccctttttttttaatctcaatcggccggtgtcccgcatagtgtaaaaaatggtgtccaaatagtagtgtacgacgataatgtaaaaagtaatgtataatattaatgtgagaagtgatataccatataagatagtgtacgtcaccgtacaaacgaaaatatatagttgtgtacaactacctaatatgatggtgtacaaagatgtgtaaaatatagtgtatataggtatacataaaacgactagataataggtcgcaccatacaccgcctcgtgcgccgtctacaatattgtacaccttcctatttgtacaccacatacataaagagagaacaatttctgttaagtgatgatgtccaaaacgatgtttataaaatagtgtacgaatttggtatataaagaagtgtacaaacattagtgtacactacgtagaaatgtataaatattacttcaaatttaatggtatgtatcatcatatttcaatttaatggtgtacatgatggtgtacacaatcatatttagtattacctatagtttacattactatcatgtttgtattaatcttatgaacaataattacttcaatttataaatatgagacaaatcgatgtacttaatgatttatgagatattataataatttttttgtatatgataatctggtgtacaaatgttagtgtacaaaactatgtttaaaatactgagtgtacgaatacatgagatttatgatatataaatataaaagtcactataatattaaaaaaaaaaaattatttttaaaagtatatttaaaaaaaataaaataaaaataaaaataaagagaaaatgttttaaagaaaagtggtcccatatattttttctcttatctcttaatacaaatggcattttagtatttgatatatattttgtcttgtagtttattacacaaatcctctatctcacaaaaagtaaaaaaggtgtctatttctctaatttaaaaaaaactacctactttgtaaattactttagaaaaagtacctactttcctaataaacccttttctatataatgtatgttgcaagctgcaacagccttcagataaatattccaagtcatgagattaccgatctattgatgtccagaaaaagaaatattttctaatttatttacccttttgagggcagaagatgacaaagataagaacggaccgcaaagggccaaaggccatgcttggaccagtaaaatttaatatgatcggggaagagtgggtaaccatcatatcattatcattattttcatcatcattatcaggattatcattaacagcataccatgacctcttcatcaacatcatgagcatcatcatcatcatcatcaatgaacagttgaacaccatcatcagcagcttgtacagcaaacaaaactttcttcttttgcttggttttttcttcttctatatggtttgaactttgaacaatgtattccgatgtgtgccagttgaccaattaatcctaagttggctcttataaaagaaatttacgacaaaaacaacaattatttagtagtacaattgcatnnnnnnnnnnnnnnnnnnnnnnnnnnnnnnnnnnnnnnnnntctttcaagatacattcatttcctatattcacacggcattgagagagaaaatgttcagcttcgttggtcttgaatcaaagccgtcgctgttcatttctccaccgcaaaaggagaggaataggagcactgtccatgaagactctccgaccgtctcttgttgtatattcatacttccactgtggtccaagaagccatgtaattgcggctccaccaagtaagccaccaatgtaaattcaccagaggaaacatcggaccactgatccgagaaaaatcagactcgttaatacagttgaaggtatgatcgggtcacttacatgtccccagttatctatacgtctggacattagacccattgcctgcatagtgatcaaagcttgttagaacttgagaaatgtaatacaaatttataatttcttttgtaatgcagttttttttttctgtttattacttaccatataatacaaatgaagttgtaaatgggggaagattggactttattttcactgtttgtaagtaggcacgtagcatatcacatcatatgatgagtagccacatgcgaccgacgaactcacactaaatataaaattcccagtaatatttatacatttgataattacacatggaaacttaacaaaaagggagctgcttataagctttgtggagcataaactcacttatttctccctacgacacctcaaatgtaaaacgtatgacaattattatatagcatgcatgaaaatcccctttggcacggtaagagagcgacgaccgcatcagaaaattttatcaacaaatgggccggcggtaaaaacagcgatatttttggcattcgtttggatgattcggagcagtgtaaatgtggcagtgagggcaccgtccggtacgtaaatactgcaattcccccctggaagattagctaatagatagcaggaactagggctaatcaaaaccgtttgtccggcgctgagcaataccctaaacgtaccgtccggctttgtcactgcgtcagcgatggtagtgtttgagccatcacattntaagtaaacggnggcttccgacactggaggggcgtagggtctccgctat

SEQ ID NO: 2747 - DNA, 547 bp, Arabidopsis thaliana landsberg
gagcggaccgaccttttcgctgccttcattataaatatagggtggaacttgttagggtgtatttgggaaatgtagagcaaatttgctggcggtttgtggaagagaaaagaagcaagcttggtaggttgatagaggacaaggcaaaatggaaaaggtattccacatttttatactcaactcctccaaattccagaaatgaaatcaaaaatagctgtagagactgggttgatcccaatctagtgtagtactgcacttttttttttttttttacttcttgctaatcttccttcaaagtttgagatgtttgcatgataaggaagtgattgttatttcttggtgcagcttctgtgctttctggatggggttggaccaaaattcaaggcgtcgaatgtcccgagagaaaatggatgtgattctaaaaatagttgtaaaacacttctttgtcgagaaggaagttacatctactttggtgatggattccttgtatagtggattgaggctcttgaagccaaataagacaggagagtggccgagactaatgatactg

SEQ ID NO: 2748 - DNA, 313 bp, Arabidopsis thaliana landsberg
agaaatcagggatcttctacctcattttgatttactgatgtcatctttattttctctctaccagccttatttgatgacttttttcattttatccccttccatcattcttacatcccataactcaagatcctattgaatctgacccatttcttcatggagcgaatgggtacgaaatagattcaatcacatttatttttgatcaacaaaaaaacgaaaagtcactatgtgacatcgtcgtcacttcagttctcagagaacatagctttcccatagatacatcacttggcgagacgatgaagaacctgcacttctg

SEQ ID NO: 2749 - DNA, 2137 bp, Arabidopsis thaliana landsberg
tacctctgtttctgcattgactttgattaaacttactctgagctttgagacacagatggagttttataaatggacgaaaatatagtctctctcttccatcagacttcaggaactcctcttgtacttctgatctcctttacatttcgtaagtctctccttcctcttcttggtatcgttgacatttggttagggaacttaaaactgtgtttgtctgatgatttcaggattgaggatggacagttctgaagcaggtcttgataggattgaggcacagaggtcaacgggtgtgtatcatgaccaatcgaaacaaagttacgcccccattaatctaatagagcgcggaatcgtacgcgtattccgtgcactaggtttccttcaagtggaaggagaagcagctacgcccgctacgggagacaccgaaaatgtgccagagttctttaccaatatcagattctctgatctgtttgacctcgccagtgaatatgtgcctatgagtcctgagattgttagcgcagtaagcgcgggggagaaagaatggctggaggtattgagaagttacggtaagccaatggaatgtctaaagagcgatggaggatattctgttcttcaccttgctgctgtttggggtcgagttgaaacagtgaagaggatagtctctgaatgcccatgtcttcttctggagaaagactcgagggaccagcttccccttcacgtggcggcccatgccggtcatatagctgttgttgaggctcttgatgcgacattaacatttgtctcagctacactttctgaagaagagaaggagagagtgaatgtatatgttagcaagaacatagatggagatactcctctgcacttggccttgaaaggcgacaatgtgaagacagctacttttctggtgaacacagaccaacgggcttcatttcttgcgaataaagatggaatatctcccttgtatatggccgtagaagctggaaaggtatcacttgtgaaagcaatgttgaaaactacaaaaaatgatggacttgaaggaagggattctaacttaatttcacacttggaagggagaaaatatcttgtccacgccgctttgaaggcccggaagaaaggttttgccttgcctctaactctaaacccatgaacagctgcatttttatttttgtttttcaaagtttttctgagacagattttcgtaggtatggtactatttcatatattcccacttgtttgagcagatatgcttagtgttattcttgaagaatgtccaactctggatgacgagctagatgaagaaggaaggactagtctttcgtttgtagcatccatagggtttcttaatggagtacgctacctgttacaccgatcaacaaaaaatgtttatgtctgcaatattgatggatcctttccgatccacattgccgcagagaaacgtcatattgaagttgttaatgagattcacaggcgttgtccaaattcaatatatttgctgaacaaacaaggtcaaaacattcttcacatcgcatcaaagagggggaaagttgaatattcctttttcaatcatttcgccaaaactgagctgatggagaagcaagatgtggatgggaatacacctctgcatctggctgccataaactggcgccctcgtacgattattttccttctaaatgatcgcaagcaaaaatgcaaatttacaaggaacaatagtggtttaacagctctggatattgccgagtcaaatcagcaacccaactacatcttcatggaggtatctccaatttcccacattaactatgaattttaagtaccttcctgactagtataggccttttgctcttgtttggattacagagggtgacactgatggtgttattattatacttcccaacaaaagattcttccccaaattatgtctcgccttacctccatcctattttggagatcctgctccagaagaagataacaagacgatcagatccaccagctggtgacaaaaacaaagactacgtcagcactcttctagtggtggcagctcttgtagcaaccgtgacgtttgctgctggttttacaataccaggtggctttaatagctctggttcgtacctgggcagggcaactctagccagtgaccaaaaactcg

SEQ ID NO: 2750 - DNA, 432 bp, Arabidopsis thaliana landsberg
tcctttttaagctttaatccttattaatatgaaagaaagtgggcagtgttttatttattgtgcatattccttatgctggacaaataggctaaactaatggagtaaagatctaacagattaaatctaaccggatcaaaaacagcaggttgttgttgagtaaataaattgtggctccattaattcccctaagaaaactcagattcgcgaagtccattaatgggatgaaagggaagagagagagagagggagagagagagagagagagagagagagagagagagagagagagagagagagagagagagagagagagatagatagagagagagtgacagagatacagagagagaggatagagagagaagacaatttgtttctgactaggaatcctctgtgcacatgacatattcgggtttgggcggctcatgcgcc

SEQ ID NO: 2751 - DNA, 493 bp, Arabidopsis thaliana landsberg
acgctatgctccatggcattggcttaaccgacgaggatatgaagttggcccaggttggcgtggcaagtatgggctatgatggcaacacctgcaacatgcaccttaacgatctggctaagctggttaagcaaggtatctgggccgaggacctggtgggacttatatttcacaccatcggtgttagcgatggcatgagcaacggtaccgaagggatgcgctattcgctggtaagccgtgatattattgccgattctattgaagccgtaaccggcgcgcaatattatgatggtttaattaccctgcccggctgcgataaaaatatgccgggttccattatggccatgggcaggttaaaccgtccgtctatcatggtatacggcggtacaataaaacccggtcactggaaaggcgaggatctgaacattgtttcggcatttgaagctttaggtcaaaaaatggctggtactattgacgatgttgactttatgggcgt

SEQ ID NO: 2752 - DNA, 443 bp, Arabidopsis thaliana landsberg
atacactcaactccaaaacaataaaaatcttaaaattaattttagatttttagaaatttatttaatcagggaaacatttggaaatgtgcaaatatctgtgtttgctaaatatacttataatttataattgatgtacatttgaatcacgcaactcagattagcatatatacaatttgcaaatacatgtaattttttggtcgagagtagttacggaatacggagtattagatccatttgcattagattgatcattatcggttcatattagacatatgtgttcatcatcaaaaagtcatatgatacaatatgatatatgacttgatgatgatagccaactcgattatattccacatgcgatctggttcacgaatgattttaaagcgaacatacaacacttcagatgcaggttcgatatttttatgttcaacatcatcaaacaatag

SEQ ID NO: 2753 - DNA, 1588 bp, Arabidopsis thaliana landsberg
atgttttgtatatgagatatacgtttatgtgtattataatttatagaatgaacgtgttcggttatgtgtcataattggattatgagaactagaacatgaatacatgattatattggatatacgttcatgttaagcataattgagggtacaatatatagagatttacatacgtacatacttgtttatgaaacttgattatagatgttgtttaccttgttcactttgatcacgtgaaattgtttccattaatcatcaaacatagatatttaatatgttaaatataatattacaagattcgatgtatatatagatatacatgtgtttatatgtttaatctagtaaaagtaattagcattaaaatataatgtagtttacacggcaattatgagatttttttgatttggaattattccttatgcaaaataaatcggtaattataaagatgattacatcaatatatttgatttataatttatctttttagaaagaaaaagtcaatattcgatagatcctaatttgattaggataagtttaattgtaatatattctaatttgattagaactactaaagtttaattaagattaaattttaaataactaataattttaattcgattaaaattaattagatggtttataatttaattaaatatatattggatacgtattacttatattatatttatattagatataaatttaaatataaaattaagttataaaattaattcctcctctaatatcaaataagttgatgtttctctaattttattaattgttaaaatttgagttgttgtatggcgggtctgccaaaacagcggtctgcaattgcttaacagtgaaacagatggtaacggttaccatatgaaataaaattggtttacttgactaagctatcaaaacggttttgggcttagagacatagggttggataagacattagatgtcatccacaaccaagaattatataggatataattagcaaggtgtttcttacctaaataactagatattcaggggtggagctaaagctcactttgattctagtaaaatatggatcttggatcattgtactcattagaggaaatttgttttgagtatagtgttacttttcttaattgttgagaattctaaaatttatgaacatcatattaatttctgctttcctttttcgacagttatgtcaaaccctcaaagttcctattcagttcgaaatgttcttgagaaggacaaattgaatagatcaaaccctcctgaacacttggaagatctggagaagaagaaaacattcaagatttcttcttcgggtatctatgttatagaagtaaatgttactacttctggttctactccttgggtattggataccggttgtggtgctcacatttgtgtaaatgtgcatggcctgaacaacagtagaactttggaggaaggacaagtggacctacgtgtggctaatggagcaaaagtctctgcattggccgtaggaacatattcgttgtctttgccttcatgcatgggtttggagttgaagaactgctactatgttcctgcaataacaagaatatcatctccgtttcatgtttga

SEQ ID NO: 2754 - DNA, 4569 bp, Arabidopsis thaliana landsberg
  unsure (1)..(4569): unsure at all n locations
cgcatctgaattttaacagacaaatcaacataggaatacacacaaaacagataaacaaacaaatccatcctaggttacattaatcactaagatattcacagctaatcattatagcctcaacgaaaacgttgtcgatgatttaaaccttttttcacgaggtctcacccaaaatatagagcaatccaaggaaggatctttatgtgtccattaacttgtctctttgttacgagatcagctgctgcaatcagatgatggattaaacatttctatcatctcttagctattccacaaatccacaccaactaaaccaaacaaacacacgagagagaaacaaaccaaaaaatactattttttggggggctgatctacgaacaacgctaaacgagcaaacaaagacaatcacaaaagaccacagatcccaaaaaacgaaaacaacccataaatcaaaaaccgaaaaagagatgaaatttaccgcagatcttgataggagcttcgagctcaagaaggttaggctgttgaagaaaaatctctctagagacgatgcaaagctgacggatctcagactcgttgagcatagcctgtttggtaccaggcttagggtttctgtaatccaacaaacgacgaatgatatcatcgagagcggcagggtccatgcttccctgcccttgttgcgccattccaaagaagacccacctccacgatccaaccacacaacacaattatcttaccaaaaagtttcaatctttcgcacaaaaaatcgatcgcttaagacgaaactttataaaacaaaaaaatttcaaaatcttctcttctctctcgatctttggacctaaaaagtttttccctaaaaatttatcttttttccaacgaatttctgtgatggctgagtttatcgaaggttagtgggtttttttcttttttttttcttcctttggtttttttctttttttttttgtatatttgtatttattttatttttgaaaataaaatagtggaataataataggttaatgcaactactctctttgcataatgttataatgatctctgtccgtgttcttgcatttcggatggatttgcttgtccccactattagcacatcattatcacttatgatctttaaatatttttttccatatatatatagtaatgttcttttgtttgattcattatgacctaattttctttgccaattcattgtcagtttcttattatatattcaataaaatgaattttatgagtttacatattagccaatttcagtttgatttttactcatttatattttgtaagaggttgaaattatattggagagtttacatatgtgtgattcataacatggataccaaaacaaataagaggtgcatacattttgatgacaatacaaaagaaatgcagtagctacacaacatatacattaatatttgaataagagtatcaaaagaaaccaacacacgtttagctaaaactaggtttgaatcttatatcctgtcttaaaagatcatatagccttttccatacgaactaagaagtcaggctttggttaaaacaacacacgtttacctaaaactagaccaacatttttctctttacctccaacaagtcagcaacgtaatcaattactagagattttggggtaaaaatagaaagagttattccccttcataaaactgtgagtattcgttaagacttaagaggcacatcaacttaaatcggagttgaaaaagagaaagaacagttgtaaacgagaactaaacggaacataccaattcaagagagatacaccaataagagaagtttaataacaaactttttcttcatttttctttctttctgaacacaaacccatcaaagatggtacgacaagagtaaatgaagagatatatatattctacatggtcttgcatcgttgttacatttcatcacccaaaacttgaagagaaaaaaagacagtgaataagcaatagaaaacgaaagtttaaactttcaattaagtagagcagcaacctcttttgccagctccagatgtgtcttcaacgttaatcgttgttccttgccccggaatggcagaattagcagccgctgcttcttgagcagccaaagcttttttgctgatgatgtggtaaatctctgctaacacggtttgaaatgctttctccacattggtggcttcaagagcagatgtctccaagaaagagagaccttctgtctcagctagagtctgtccatcttcctccgcaactgatctcaagtggtttagatcagctttgttcccagccatcatgatcacaatgttggaatccgcatggtctcttagttcacgtagccacctcagaacattgtcaaaggtttgtcttttagtgatgtcatagacaagaagtgcacctaccgctcctctgtaataagcacttgtgatagctctgtaccgctcttgacctgcagtgtcccatatctgggccttaacagtctttccttcaacctgtataaacataaaacacacaaaaagtaatagttaagccatcaacatttttcaatacatcatctgattatgttaatgttttgatgcgttgacttctccagggatggagagttgactttaatgataaggaaaaaaaatcataattagggacaagttgtgggaagctttttgtccattgggtttctccaccatctatacaaaagcaattcctcatgactcatggccagcacattctaagattctctcttgatattaaaatctctaagcaataaaaaaccaaattcaaaaagatgagagaacaatgcacggaatagtttaaaaagttaaaactattcaatgcgcaagacaccacaggatcatttcacttacatggtacctaacataagcatgttccttagactgaccaaaaaggatatgtaaaggatgcaactttacaagtaagaagagtaaaaataagaacacaaatgaactattattgacctaaatatgagatcatgaagcagctagcaaaccaaaaggcacaaatcttagatcctaagatagagatcacgttaaaaatgaaggaatagcttgaaattgacacatgtcacgatcacagacgcattcagaaaacatgatacctgatcaaatttctctgaatactaccacttgtgaatttaagactatcctttctgctcattctcccaaagtaaaggaaaaaaaaagctacaacaattagaaatcacctgaagagttctggtggcgaattcaacaccaatagtggacttagattccaaacaaaactcattccttgtgaatctagacaagatgtttgttttcccgacaccagaatcaccaatcaacacgatcttgaacaaataatcataatcctgttctaccctatgcgccattttctccttctctcttagatctcgcaataaaacctacaaattcgaaagaaaaaaaagacagaaactttattacttttctccaaaatcaaacccagatccaacgaaattaagacgaacccacaagtaattcagaagacgaaaaacgattcgtgtaccttaatggcggatgaatcgagaaaaatatcgaattttttgagatctataaagaaagaaactttgagtaagaagctttaaatgtttgttctcactcacaatcaatggaggaaaatggaatttttcttgtttaatttgatgggcttcgtcttcttcttcgtgagaaagaggagaggagcaataaagtgaatatacggtgtatctatacgtatctctgtgtcagggaatagaaacgacgtcgcgtttgagaaaaagacaaagacttcagttatcgtgctgatgtggcaactaatgattcgttagcaggctggcaaaaagtaagagcatgttccagggggtattattggaaatgtagttntgagctttataattgcgttaaagagcaatgattgtatttgtgagtgtggtaatgataataagcaacgtcaatttgaaaatgtcgaattaacaactttaatagaagaagaaaataatgaaatgaggatgtgatgaattgaccactacattcccaacttcccataatatttgtaagaatatagttctgatccatataatataattaaacaatgtggtggttctggtggcgatggccgatgggcaaatgaagatggtagtggatcatgtggcggctttagaaggcaacatgctacaagtctagtggaaaatacgtcggagattgcgatggtaataggctaatagctatagaggacgagactagtcttttggtgcgacacatatagaatgttacattctaatctgatgaagatgaggaccattaagtcattaacgctaaattattaatccctgaaacgtcatactttttttcaacctaacgtaataacttcatttttgttataaatttgattttgtgccctctaataaaccaagttttttttttgttttttttttatcgcaaaaacatcaaataattaaatttgtttgaaaaagttagtttcgtgggccaactactccgaaacgagagggcttatatgggaaaaaagtacacctcgtactcttgcactctatgcgaggcagacaacacggaca

SEQ ID NO: 2755 - DNA, 508 bp, Arabidopsis thaliana landsberg
atcattttaatcgcgattaatttaaattagaatcgtagttttttttttatatatcatggtccagtgaaaaacgtagttggcttgagatagatatgcttatgaggaatattttagccggtaagaacatctccaacaataggatccaaaaatgagaattcaaataagttttataattttaataatgaaaaataaataatttagacacttgaattagatttatagtattgcccaataataaaatccaaatatagagtctaaaaatttatatgtttgaaaaaatgtgtcaaaatgttttacatcacttgacacacaaactacataatttcatacacacaaatacacaaactataaaatttcaggaaactacataaagcaatgcttcgaaagcaagatataaagccaacacgtccagtctattgtctacgcgtatatattattgcccgcaaaaataaatattgggccatacgttcgaaatgagctatttcagagacatgaaccagtggttcag

SEQ ID NO: 2756 - DNA, 401 bp, Arabidopsis thaliana landsberg
  unsure (1)..(401): unsure at all n locations
gcttnnnnnnnnnnnnnnnnnnnnnnnnnnnnnactagctcagtgctttctgtatttctgggctcgagttcctctggaagagacctgaaagaacaattcaggacgacgattagttgtgttcgtgctcgaccctaagccctaaaggggatgtgtgatcatgccagactctaactaacgatctgggttggtgaatacatatacgtatgctggggggttcatgttacatgatggaccagatggagctatgacttatgagtaggtaacttatcacggcttggctccaaggggtgatgacaaaatcgcctaacagttgcagcgggtcaagtctgaatatagccaatgaattctgatcttggatctatatccgtgaggccacgattcattgtgtatgtcatgactca

SEQ ID NO: 2757 - DNA, 565 bp, Arabidopsis thaliana landsberg
  unsure (1)..(565): unsure at all n locations
tttttaaactcacgacaatatccaatcaatttcaggaagttttttgtgaccactcatcattgatgaaactgctatgtcgcggaaacaggtggctttgtagtagccggtctgggaaaaagctttcctgacaagtatcatgtcatggttctcgttcttgcccctgaataccattcgtcgtcagaatcatgagataattcggaaacaagattagagtcgctgaaattattggtggctttgcggatctcatcagtagaaaagaatttgatnnnnnnnnnnnnnnnnnngcagcattcgatcagatcttttaacagcttcgctcctctttcggaagctatctctgatttaggcttcttcttcttcctccaccaacccatctcaaaacgtaaattagaaaaaggaaaaaaactttctcttgaaaccaaatgaagaaagacctcacactgagttgatgataacgaaatgtatttagctaaattctttgttgaatattcaataccgcgtaaagatagcaatacaagtgtactactactanctttcttattttattttttagagtgtcaaccgg

SEQ ID NO: 2758 - DNA, 495 bp, Arabidopsis thaliana landsberg
  unsure (1)..(495): unsure at all n locations
acaccactgtaggttcggcgttagtcgatttttggttctttgacttttccaaggttcattcaatcctacattggagttgggctaattagttatgatctctgaaatactactataattattatggtatcaattcttttgtatcactaatacttatttggtgttttttcacgaacaacttgaatgaacttttcgctctgatgcattttcttgatgcggacaaggttagccaaaagataacgcatataaaataagtttagtttattctctaaaatagtcattataagcatacaagcttgctttaatcattttattttnnnnnnnnnnnnnnnnnnagtttggagaagtgttacgatataaataaagaggagcagatttcaagactccaccagatgttggctccgcatctgctcagaagtattaaccaacagatcttattgagaacatttcgtttgaagtctcgcaccaagggataactataaccatcggtgataatct

SEQ ID NO: 2759 - DNA, 570 bp, Arabidopsis thaliana landsberg
  unsure (1)..(570): unsure at all n locations
tggactacccgtacggccaaatgagtaagtcctaaaataactcaaaatcggtgtgattaaatgtgcataatattggtgaatatcagagtaggacgaggaaatgtgattttcggtcgatgatcttgtagttggcttgatccgcatgggtcttcttggcactctagttgtttggttcggtagttatatattgtttccgtctcgctcattcttcataaaatgtgcataatattggtaaatatcaaagataggttgagaaaatgtgactttgggtcgatgatcttgtagttgacttgatccggatgggtcttctcggctctctagttgattggttcagaagttattgtttatgtatcgccatgtcttgaaatatgtaactttctggtgaatattcaatttaggtctggaaaactcttcattgagttggtgtatttgagtattgtgtgctttgggtgggtcatcgcggaccaaattcagttcgacatggtgatttatgattacagctgaatcattactcttcttatgatnggattatttgtaaatatccaatcctaggtcagttgcttgatcgga

SEQ ID NO: 2760 - DNA, 632 bp, Arabidopsis thaliana landsberg
  unsure (1)..(632): unsure at all n locations
tattattggtgttctttctccaagtcgacatcactaatcttctttctctattgattgtttattctatttattaaagaggttatgtatatcatatcaacttattgaaccagttgagatatacttgtaacgctttgcccagaagagatagtgcaagaagttaacaacacttaggacacacatgagccaataaaacaaatctagtctgttacggttaagtttttctccaagccatgggctttgtccagcactcttagttactctgttcactatcggcaccattaccgagcttagataataccccaatgccaaagaagcccatgagagggatgtagccaatgatctcatagaagaaggtgcttctgtgaagaaaaactctagcaatccagctagtgtgaacagatcagctgatcctagaaacagatactgaagagcaatccatagaaaagtgattggtaaagtttcttcagagtcaagcaatccagcttctctagccacttgcttccgctntaactcgactaaagcagccactgccattgctacaatcgaaaggactaagcctacaccgattctttgcaaatgagtgataccaatttcggatctggttacttttcttgcgatggggatatcagatg

SEQ ID NO: 2761 - DNA, 461 bp, Arabidopsis thaliana landsberg
tgcgggtgggaaggtgaatccaacacctgatgtggctgaatcggtacatgtgcttgatgttccataccacggacaacaaagggttgctttctgtatccatcgcaaaaggtaatagttcctcaaacaagcacacatttgcactcttttgcagccgttagagtatctcacagttactatatgaaatcatatattatactttggggcggggggagattcagacctacaactgaccggcagctatgacactgggccaaaactgaagacgcatcaaaaattggcgctatctcgctgctcaaccaaggatgggtgtgagatagtggaaaatacgagtactggaattactcacgctagagaatctcagttgctccggcggcatcttgcttatatagatggtctcgtccatgtggggaataccgctggatacttggttcgctcatgacatgtggctcaacgaccaatga

SEQ ID NO: 2762 - DNA, 526 bp, Arabidopsis thaliana landsberg
  unsure (1)..(526): unsure at all n locations
ttctgagttggaaattttccaaggtctccaagtttactagatttcccaattccaactttgtcttcttatccttatacaccggtaatgcaaggtatctcaatttttgcattcccatcaaaacatttggcacgaacaaaggttgccgagatgcagatacatttaaattcagatagatcagcaactttagattctttagatcagcaggtagatgagatacctgagtgtactctaagctcaagtatcttaaatggataacctttccaatgtcagaaggtaacttcccttcaccaaaatatgaatcatagagatctaacactctaagtagctggaaactcgagaaagtaaagcttgaacctgatcgccttgtcatgtctatagtcgtaccataacctttagtcttgacaatcacaaaagatcgaagttttggattacttaaatctctctcaacagaaacggtttttgtagagtgtgnnnnnnnnnnnnnnnnnnnccgagaagattgatcatctgcggtcgaggagcacga

SEQ ID NO: 2763 - DNA, 558 bp, Arabidopsis thaliana landsberg
  unsure (1)..(558): unsure at all n locations
atatgggatgaatattccattgaccataaggaatcttactttcatcgtgcactgccacgcggaggagcttcacttgttttcttgtcacggtcctaacctgaaattttattaaaggaattaaacattgctattaattaggtaattaagaccaaaatgaagtgaaaatagataaataaatacctttctaacgacgctccaagtaacgttttgagtgcaaggaggagtggtaagtgaaccagtgtatctgtaatattttctgcttccgatcttaattttgnnnnnnnnnnnnnnnnnnnnnnnnnnntcagcctcctccatttcagcaatgccctctaattctttctccaactaaaaccaacccaaattttcaaaaacaaattaatcaacaattactgttggttccaatattacatatcgatgcagttaataatagatattaagtttttggtatttgtaccgatctgataaaagtatctgctcttccgatcttgtacaacacagtcacaacagccattcttctattcctgccttcgtgaaccatatgcagctcaagtgcaa

SEQ ID NO: 2764 - DNA, 581 bp, Arabidopsis thaliana landsberg
  unsure (1)..(581): unsure at all n locations
tgttaattaagaatcttatatatatgtaaaaaaatttgtagtaaaataaataaggaataaacttttgattgtttattgattagtgtttaattacgtttataatttgttttggtttctcttatgaaactagtttctagtgactttatcaagaatcattcgtaaaggtaaaagccaaacgcaataatatttgataacaaaaacactttacaaagtatattttaatgttaaaaaacaaatttatatgtaaatataaacacaagtctgtgtttaaataattaacacctgaatcattttattatctctcaatgaaattttattgaattggtgtattattttgaatacctgaacttgaagttgaagggtccgcatatatttgatagcctcatccaacaatgaagccttatcatcctatcatcaacaattacagatattcagaaatctccacaaagagaaaattaattaactctctaagactaagtaaacaatgtaatgtgatttaagttaatctcaaaccttgtaacaatttggtagtaggtcctgcanagcacgcattttcttgttgattcatctcttcgttctgt

SEQ ID NO: 2765 - DNA, 482 bp, Arabidopsis thaliana landsberg
taactttttcaccatagttctgtttcacagcactcatgaattcattcaagagtttactatattcctgcaataatgtttaaacctactgaggcgtggaagttcatatgatcatgttttaagttcttaatagagtagactatacaagaacaaacctgtcccgttgctctcttttgcctgagtcctatgtagaactcatcattcaacagtttctcattgtttggtcccacatcaatggggacaggtaaacactgccaaaagcaatatagtctcaagttcctgactcagaaatattgcttaaaaccgtaggacaactaaaccattaccgctgaaggacgaacacctccaagtgctgaatataacgccaacttaccaaccggtatacccatcccctaaagagagacaaactcaggcaaacaaacaatcaaagtcatattgtgatcacatcaaatctgacatgaagcgatatccgaggaatacctgac

SEQ ID NO: 2766 - DNA, 1280 bp, Arabidopsis thaliana landsberg
cttcttcttcttcgattgaaaaagggcaatggttagggttttagacttttttagtgaattaaagatcagtcaaagatgcctcatgatgagagattagattttattgattttgttttgatttgtttgataatttaaacaaaaacgtcaccgtttaaattcgtacaaattgaaaaggaaattaataacctttttgaccaaaaataaaatgaaaaaaaattctgaagcaaaaatagaaataaagaattaaaaagagcatatcgcatttttgttataaatataaaaaaaattaaacgatcaattcattttcatcaaagtaataataaccaattcatttggcattttcagttcaatattgtacgttcacaatttaacaaaagttataatccctgatttttttccacgattaataatcatcacaaccggattttaaaaatcagaatttgatctcatttgtgttgtagttttctacattgttataatttttatacataaaattagacaaaggtctagtaaataaactgaacacaaggaatgtggtgaactttgtagtgatcttgtcctctttcagacaatttccacacccattcactattccttcctccaattgtccgttgttttaaggatgttatgtatatgacctcatccggaagctccttcaactttctgcattcatttatagtcaaagtatggagacatggtatggagccttcttctactatccactcttccaaatcataaatttagctcatacaattgaggaaacccaccttttgaacacaccatcttcttcccagtgaaagcaccatatgataattcaaccaatttcaagtggagcaacttctctagaatcggcattggatcatcttccatgcaacaataccgaagacatatgttcgtaaggtttggagggaatcgatgttgatcaggcaacctaggcatatgcatgcccaccgttaaaaatttgagttgaatcaaatcaagaactaattttccttcattatgcctatcatgcatgacctcgtacaatgaaagctgcccgagttctctcgattcacagagagatgcagacagagtttctaacgtacaaccatcaagggaatggaccgtgagagttctgagcttagtcataccaagaaggtcttccacactactgctctctattgagtaacccctcaaggtccatgatgaatgatccatactatcatgattcaaaagtataagatatccatgatgaatgatccatacaaccagagaaaaaaaaaaaaaaaaatttgaattac

SEQ ID NO: 2767 - DNA, 526 bp, Arabidopsis thaliana landsberg
taaaacaatttctcaagtgtacttttataaaatttgctattatcaccttttttttttctttatcagacagctgatatcactttttgaaactagttttaacaaatacggaatataactctatgaaacaaagaaatgagaaatgtcatgtttccttatgaaattgggttccatttaagagtacaaacagaaacataatctgaagacaaattaagaaaaagaaaaaacttccaagatgatggggaatggtggattaatagaagtaggagcaggaacccaattattcaaatgctcaagaactgtcttccggtttctaatgtggtgaacctccaagatgatgcagaagatgatctcttcttgtggaaggttggaggaattgagcttcatgtgtgtttccctcagctgcgacgtggtttcacttaaatcttttagaggatagagtggattggtccaggctatttggttaaaggaagggttcccagacctgcattcattttttgggtgaatatgaggcacatgctgcatacta

SEQ ID NO: 2768 - DNA, 2747 bp, Arabidopsis thaliana landsberg
atgaccataattgtctccaccaacatgactgataccccctatatttatctctaacatgacaagatatttacaaaaagaaaaacatggaaaaccttgacctcaacattgctctcgacatcgcagcacgtggtggtcgtgattcagttgctgatcttgctagcatgctatcatcctctacgtattatcgcttcctctctgcccactctgatgtgctgaaaactgtttctctgcaaccttttatcgaaaatgctgcccgttggaatcttctctccaccgctcggcctatctttgcccgatgcctcgaagattcttatccttcaggtgtgtaccttgagagcctccgtctggctgcaagcaagggtcgagcagaggaaggatttcacatgttacgctttttgcaagcagcacagccaaccagcttcccacatgcagccatgttcacgttgtctctatttgagaatgttttaggtatttatgatgatggcatatcatcttcccacggttttgttgacttcgttggatctgatgctgcagctgatactgtagcaacctctgtttaccgccaaatactctaaattagccctcttaagattcgctccagtagtgacacctggaggtttggtgatatccctccatgtattgctgacgcatgcgctatcgacaatcgttgtaagacttgttttctttactagtatcagtcatgtaccttatcctttgctagaatcgtaatgtatctattgttctcttttttcattttaatgtatttgtaaagccttaatctttatttccctgtctcactagttgcttatgacttttatctttcaatgtttaatatctgtacttgtttcattttgtcttccacgcggctgcaacttctgtcagtccatgtcccacaatttaagtcaagctcctgacagatgggctgctgtctttactagcttgctcctactacacgcctttaccgcaccctcacttacccatttactatgccacctacaccattcaatttgtcactaatccttattctttctcaaactgtctgaactacatcatttattgctccacgcttttgtgttcaaaactgcattcctaattattcctccattttccttttcactctttataaggattgaagaacacaaaaatattcactctggctttcgtttgctcggacctttcattgctgctgggccattttggcatgccactgctctctcacccgaagtcttgtctgatattgatattgatgagtttgttttcaacagtcgcctggctaatgaaggttcaccatttcggcccttcctgctttaatgtttgcagctaggtcaccatactgcacaatatgttgaaggcctccatcttttggtttagtaaacccccacgcaagcttcactagacatgctgggattgtaggaccacatatcatgtacgttcggtttgcttttgcaatcttcctcctctgctgcggttctatggatcatggctttttggtaatagatacttttctcaataaggtatcaagtttcactaaagcacttgagattgtaaacctcgttgaagatcagattcgttggatgggaagccgtgggactcggcagtaccggagactaatgcacttcagtaaaatgacgtactgctgcgttgaccactttaccgagattgacgtctgtagacactgctttggctttaactatgcatgcaactttgagatgctctattgagttcttgttattactctttctttgtatgtttctattggtatttctgttttcagtttcatgtctgcaatgtaacatcgtttcatcgcttcactatatgaaaaatgttttcaacggtgtcactatgtttggtcaaccgataatacaagcaagcttttttattcatacacctaatcgtagggaaggtacattacatagaaaatatagattttgcatgcaacatagtgtttgctgctatcaatttacaaacttagtgttttaggaaatatcataaaacaagagttgaggattaacccatctgtcaatcatgtttcccacaagcagctagtagacataaacaaaagtggctgcattccatcaccaaagagccgttgccgaagcaggaaaataaacttcagatctgtcagatcggaagtaccaaaagctgccttatgcaaattgctgatgctacaaatgctagagaacttagctgcacaacatcaattatattgcctttcatagtcccagtcctgcacttatacgaccattcttaacgaaaatatatcggctactatattctactgctgcagcataaaccaaaaacttatgcaccgcatacccgagcttgctttccatcccaaaaaacattcaccctcttccatagcctatataaagacacagtgaaaatcaacaataaaggacaatagcacatgtattagcattcagaataataaacatttatcagctaatcgaaagcataccttatcctgttacagaatcacatgtggctctgtatggccaacttgttgacacattaagaacttattccggctagttttccttcgcttcgcaccttgcaaaacaaagtttagttacacataatagtcccatcaccattcaagttccaaggttcaaacattgtttacaacaaagttttctctatcagatggaattcttctttttcttcggcgttctggcccacttttaacctcagaaggcacgaactgcgtctcttctacagccgcatggacttcttcatccgcccaattt

SEQ ID NO: 2769 - DNA, 334 bp, Arabidopsis thaliana landsberg
gcctacatacaaagttgtaaaccttttaggacaaacatttgatggaaggctctttatgaaaaggatgcagaagtacgtactgcttgatgggtatgtaattagcaagatccttggagatggcatacatctgtcctgtagcatgtcgaaagtatttgttaccatcctctccaaatttccaatactcatgttcatggtactttactgtcctgaaacaatttaatattctaactcaacaataatctatcctgtataaccatagaaaccttaagcttgacttatgcatatgtaattacttattgttctttaacttgtccttgacttcatacaacctatt

SEQ ID NO: 2770 - DNA, 434 bp, Arabidopsis thaliana landsberg
ccaaacagataaatgtatatgtgagtgattggagagaggactgaaggttgcgatttaatacagatccggggctcccgaccgcattgcggatcggacctcagggctgatgccagttagagaaccaaggccttgcatcccaccgttctggtccactacccaaactctgtgtccacgttttgcggtgaccatatggatcatctgtgtcagggctgacggcacgtgtcactttaagagctctctctctgttgtcgaggtaaccgcggtgatctcgatggctctttggatacattggacgaactatactgcattaagtggcatccacgatcgcaatgtgcttaactgacgttgccttagagcactagccagaaatgtgctcacgactcttcgattttttctctgcaccatctaacgaccaaatagtcaacatttgctct

SEQ ID NO: 2771 - DNA, 419 bp, Arabidopsis thaliana landsberg
  unsure (1)..(419): unsure at all n locations
gaccgaggctacgagttatgcctctaggatctctggataatcactttcattttatgttatattggtattgcatcacagggcttgattgattatgttaacttgttttcgtgtattctgtttggttttagatcttccttctggtaaaaacccgcttgcttggaacactcgaatgaaaatagcggctggtgcagcaagaggactagagtatctccacgatacaatgaaacctcctgtgatataccgtgatcttaagcgttcgaatatcttgatcgatgaaggatatcacgcagaactctcagactntggattagctaaagtatgaccaagaggaagtgaaactcatgttttcacaagagttatgggaacatacggttactgtgctcctgattacgcattaactggacaactcacattcaaat

SEQ ID NO: 2772 - DNA, 535 bp, Arabidopsis thaliana landsberg
  unsure (1)..(535): unsure at all n locations
agcagcgtattggcatggcgcctccaccagggcattacatcatctttgagatcaagagcggcctcagggcgggggttcatagcaacaagattcacnnnnnnnnnnnnnnnnnnnnnnnnnnnnnnnnnnnnnnnnnnnnnnnnnnnnnnnnnnnnnnnnnnnnnnnnnnnnnnnnnnnnnnnnnnnnnnnnnnnnnnnnnnnnnnnnnnnnnnnnnnnnnnnnnnnnnnnnnnnnnnnnnnnnnnnnnnnnnnnnnnnnnnnnnnnncctggaatgactccaagaaagccttcttggctcaactaatactacacggcaacgctgctgggactttgaacagacactaatggtaaaacacggaacatgactagaactttctgcgatgcatgggaatgctccacaggttattacaggtaggatgcaatgcaaaccatggtgagggaaaatgtttgagatagtcgatgatgcgagtgctttcgagcataaaggtggaaatgttatcctgattgaacattacattaactggcatagacct

SEQ ID NO: 2773 - DNA, 507 bp, Arabidopsis thaliana landsberg
  unsure (1)..(507): unsure at all n locations
aactttacaaagctttttaaaactttacaaggttttcttaatagtttttaaagggttcttaaaaattttacaaggatttttaaatacttgtttttgtagggaaacaattttgacgagaatatttgttttggcagggaaaaagtttacaaggatttttgacgagaatatctttttggcggggaaaagaaattttggtgcaaaatatttttggcgaaaaaatttcagtttctaattatatgttctaattagatgaggataatttgttcattttgttcaaaaaaaaagatatttttaaaaatggacgacagaaaaaggcattgttctaaaagggtagtagaaaaatagtattattgcaaatccccaatataaaaatttcatgatctttnataaaattgaagtaattaaaatgaatttgaaattagtaaaactccttatgagattttggaatataacaaaaatacatcttaaacaatgttttttttcaaaaagtttgggaatttttttttg

SEQ ID NO: 2774 - DNA, 597 bp, Arabidopsis thaliana landsberg
  unsure (1)..(597): unsure at all n locations
ttattttaaaacatttgtacncgttcttaaataatttaggatatgactaatttttctttttggttaaaatgttaatatctatatttaatttattaagaaaaatgtacttacaccctggagaacgccacgagtggcactgagcctgacatactccaagatgggcaaggtatagctgttgacgctggtcacgcgacctaggctgggcttgtacacgtcagcacgagcagggtcgtcaatgttctcgtgggacctcatgctgcagatagtctcctcaaggccgttgccctgtgggctacgtgggtgtctccactcctcgctctcgtagggctgtcttagaggtggcctcacgacctggaaaggtcccttaacacgaacgatgtttcctctgctgtcttgttggttctgaagctgctgagccaactgaacgtcaattttcaatgcttgagctatgacctgtgcgtcgaacccgctccacaagtttttctgttcttgttggtgctgtgaaccgccaaagcnnnnnnnnnnnnnnnnnnnnnnnnnnnnnnnnnnnnnnnnnaaagaatcaacaaatgcaatacataaatgaaaatagtaact

SEQ ID NO: 2775 - DNA, 1853 bp, Arabidopsis thaliana landsberg
  unsure (1)..(1853): unsure at all n locations
cctggatccccacatgtagatttgttagtagacccaaatataatatcatcaacataaatttggcatacaaacaaatcattgtcaagagttttagtgaataaagtaggatcggccttgccgactttgaagccattagctataaggaaatctcttaggcattcataccatgctcttggggcttgcttgagcccataaagcgccttagagagcctataaacatggttagggtactcactgtcttcaaagccgggaggttgctcaacatagacttcttccttgattggtccattgaggaaggcacttttcacgtccatttgataaagcttaaagccatggtaagtagcataggccaataatatgcgaattgactcaagcctagctacgggtgcataggtttcccgaaatccaaaccttcgacttgggagtatccttggccacaagccgagctttgtttcttgtcacacaccatgctcgtcttgcttgttgcggaagacccacttggttcctacaacattttggttaggacgtggaactaagtgccatacctcgttccttgtgaaattgttgagctcctcttgcatcgccatcacccaatccgaatcttgtagtgcttcctctaccctgtgtggctcaatagaggaaacaaaagagtaatgctcacaaaaatgtgcaacacgagatcgagtggttacccccttatgaatgtcgccgaggatggtgtcgacggggtgatctcgttgtattgcttggtggactcttgggtgtggcggccttggttgttcatcctccttgtcttcatcatttgcgtctcccccttgatcattgccgtcgtcttgaggtggctcatcattgtcttcttcatctttatcaacttgagcctcgtcctcattttggattggtggagatgcttgcgtggaggaggatggttgatcttgtgcatttggaggctcttcggattccttaggacacacatccccaatggacaggttccttaacgcgatgcacggagcctcttcatcacctatctcatccagatcaacttgctctacttgagagccgttagtttcatcaaacacaacgtcacaagaaacttcaacttgtccagaggacttgttaaagactctatatgcccttgtgtttgaatcatatcctagtaaaaagccttctactgtcttaggagcaaatttagattttctacctcttttgacaagaataaagcatttgctaccaaagactctaaaatatgaaatattggggtttttacaggttaggagttcgtatgatgtcttgttgaggattcagtgtagatacaaccggttgatggcgtacaggcgggtgttgacccgctcggcccaaaaccgatccaaagtcttgaactcatcaagcatggnnnnnnnnnnnnnnnnnnnnnntctattcttcctctccactacaccattttgttgtggcgtgtagggagaagagaactcatacttgatgccctcatcctcaaggaagccttctatttgtgagttcttgaactccgtcccgttgtcgcttttaatcttcttgatccttaagccgaactcattttgagcttgtctcaagaatccctttaaggtctcttggtgttggactgaggaacgaaggtctcgagaaagataaaatattacactcattgataaataaaataaaggaagacgaagctgcttttaaaggtcaagctgaagctcataaacgcgaacttgaagatcttcggaaacaactggccagagccaaggaagaacgtatacttgaagaaacaaagcgagaactcagcgaccaatgggcagatcacttagaaggaactgttgaagagcttcggtcgtccaaga

SEQ ID NO: 2776 - DNA, 2424 bp, Arabidopsis thaliana landsberg
ctgcagtctctttcaagctgtatgatctgaatcagcaaggttatataaagagacaggaggtgaagcaaatggttgtgcggactctagctgaatctggcatgaacctttctgatcatgtgattgagagcatcatagacaaggtgggtttggttgatctcctccattgacactaactaggattctcatatttaatctttgacaagagatgtaaaaactgattggtgtgtgtagacatttgaagaagctgatactaaactggacgggaagattgataaggaagagtggaggagtcttgtgttgcgccacccctctctgttacagaacatgagccttcaacatctcaagtaagctagccatgttatttgccttattatcttcttcgtgcgggactaacatgtttttgtatgttgtgttttgtgtagagacgtaacaaagacgtttccaaattttgtatttcacactatagtgacagacactcctagtgagctggatggatgatcagggatgtgaagaaagaccaaaaccctttacaagatcattcatacttgattcttatcttcttctccattactctattacaaccctcctctttatttttaataaatacgttctgaaagcagcattacctcacatgtttgtgtatccgcaaacttgttcggtttatcttatctgttggagtgtgcaaattgattcttttactcggcattagttttattttgttgcttcttctttctttctatctaaatttgttagttggagtaaaatccggacaaccatattttacagggaacccaaatggcgagatagttttaacatgagaaaggaaaaattcatgtgaatgagaaactggttaacttgaatctcatagatcattgtatacttggacattttcccaagattagaacaaacaatactagatctctcgaaaatatcttcatcacagttgcaaagagctatggagaacccaactcttgagctcaaaattgtatcagctagtgacgtcaaccatatcgaatatgtcacggacaaaatggacgtctacgcagtcgtttcaatcaacggcgacacaacacaacaaaaacaagcggccaaaactcccattgattacgatggtggttctaatccgacgtggaatcacaccgttaagttctccgtcaacgagagaaaagccaacgaaggcctattaactataacggtcaagctatttagctactggctagaaggtgataatgacctgtatttgggagaagtcaacgtctcggttcaggatcttcttgcctcaaatccgattccaccgtttactaacggtaacatcaacaaaatgaagtcaatgacttgccctatcaaggccaccgaaaaaagtaccaacacaacggtgagcctttcataccggtttaaacctgtaccggttgaggaattttaccctccatcaccggattctttgccatcgattggtaaacccgtttaccgagacctggatccagcaaaactaagtcagcctcttgtattttctcctcggtttcaagccaccacgacgaaactgatcctagagctcgtgatcaaattcgccaagaacatcgaagatgtcaacgccttctcgtccatggacgtatacgcttcggttgcgattcttaaggacagaaaagttaagaataggatcaacacaccggtggcttttgccgcttatacaaatccaaagtggaatcaaatgatgaaattttctattgatgagaagtcagctcaagaagggcgtttgatgctccttgtggagttgatgagccaccggcctttccttggtgataaggagattggatttgttagacttccgatgcaacagttattggtctcaaatccgccttatccgttgaccgacaatggtgatgctaacggtatgaagttggagacacatgctttgacgggtccttatggaaaaaaaggtgtcgtgagcttcacgtataggtttcttgcagaacaagttacagcaccatctacaccaggccagccatatattatgtatgtaccggtatcgcctcagccatacgcgtcacctgatcagcttcaggtgacctcgagttacgtgactgttcaaccaggggctaattctgggccaagcaacggtctagtaccaatatttatgccacctacatatcaatcacatggataccaacaatattcaccaaggaagtcgaaatcgcaactacaaccgtcacacgacagttgcagcttcaacccctgcgtctgcagccgctctcgcagtaattaccggatacacaatcacatggataccaacacgcaattacaatccttagcataatgtgtcgcaccgttatttatttatatgacttggcttatcatttcattttattttgttcgttgtttttaattagcttgaaactcaacataaacttaatttaatttgctttt

SEQ ID NO: 2777 - DNA, 368 bp, Arabidopsis thaliana landsberg
attagttgagtagttgttaatttactaaattttcattcttaaattcattattaatttaagctaccttgacaatgttttagttcacacaatgcttcccaattaataatatagattctggaaattgacttagtggtaaaatcatgaacaaatattttctcatgtttttaattatgtaaaataaaataacatgttattttaaaacacatatcaaaaatgtctatttacaaaaacaaaatgaaaaaacaaaactgatttatttattagtttgtcaccatatcaacccttaagtgcaaaattagtaggctggtgtatttttttgtttggcatttattatcatcatatatatatctggctcttattcttttaca

SEQ ID NO: 2778 - DNA, 589 bp, Arabidopsis thaliana landsberg
agaacgatttgcaagaggagaatggtggagctggagtttattctgctattctaattaagaactacatcttgcaacatgatgaatggaaggaagacattatgcctgagattctcgatggtcacaatgtggctgacttcattgatccagacattttgcagaggcttgcagagttggaacgtgaagaagggataagggaggctggggttgaagaagctgatatggagatggatattgaaaagctttcggatgagcagctgaagcagctttctgagattagaaagaagaaagctatactcattaaaaaccacaggctcaagaagaccgttgcacagaaccgatcaactgttccaagaaagtttgataaggacaagaagtacacaacaaagagaatgggtagggagttatcagctatgggacttgatccgtcttctgcaatggaccgtgcaagaagcaagtctagagggaggaagagggatcgatcagaagtgcgggtaatgatgctatggacgttgatgatgagcaacagtcgaacaagaagcagcgtgtgagatcaaagtctagagctatgtcgatatcaagatctcagtcg

SEQ ID NO: 2779 - DNA, 3046 bp, Arabidopsis thaliana landsberg
  unsure (1)..(3046): unsure at all n locations
gcttgtaatacgatattatttattgacaggaaagtgaatgttgaattggaatgtggaagcaaatttcttgtatgtgttttgtcaacatgttcgaaaaacttatgtgcatatggtgactacagaaaggggaggacgtgtttctctgcacatggttaacggtgacgaagctcatgccttagctgaagtggtggctccaaagctttgagatgtaggtcgtgatcatatgaaaataaatcgtgaaaaatgtattattgtgatgtaagattcttaaattcattttttgtttcttttttgtcatcagattttatttagacctcaaaagagtcaattctgaggaaaattgtttacataagtgatatgaagcggttcaatacgaatttttcgtgttaatttgtgcccttacatttgcagttcgagaaattaaagataaagaaaatcttatgaattcttccttatcggtcttgaattcctccaaataagttgaaaacgctggccattcggttggggaaaacaccatcttcaccaggtctgaacagtctgtgaaaaatgctacttcttggttgtcggcaccaatcatacacttcatcgcccagagtagagtttcgacttctgtatgtagtggagaaagacttctacgaagattagcagctctcatggttggcgagtctccatttgatgatgtgcaaaaccaccctaatccagaaaacttatcgcttcctttccaagatccgtccacaaaacaacgaaaacctgaataaatattatcgtgtgatatattctggacccgaatttgtttttccgatcccatggaaccgttattttcggtattgagcttaaattgagctaactgccatgattgtgcctctttttctgctaaacataatacgtctaacggatctttatccatattttcaaatattttttcgttccttactttccaaatataccagattatctatggaaatgaagatgaatctaattctgaagagattcttgagaataagtgatccaaatttgcataaatagaatatgtgggaaaaatccctcggacaatagggatctttgaaagagcccatatttgtctcgccggatgacactagagaagagtatggtttattgtttcctctatagaaccacatctgaacatcctgaatcacaatttatacctcttttctgcaaattctctatatcgacacgtagcttgataatatttgccataaaaaatgccgtaactttggcggacattgcactttccacacatgtgcttctagagctttgatctctggacaaatgaaagatgaattaagatccttgttaactattcgtgatgaatggtagccggatttaactgaatagtattccgattttgggaaatgccaacataggatatcctcccttgttgacgcacccaagagcagtgcacttatcagctcgacatcatccggctcaaaaagctccttcaagagatcaatgttccaaaaatttgaccggctatctataagattttggacttttaaagatagatcaaaagttgaaccattactttttgctagactcgggaattgagcagggatccacgggtcctcccaaacagagatggaagcccctgaaccgtctcttttaataagtcctttgcaaacaagagatctagcagaacaaatacttctccagccataagatggagactgtgactttatattttccaaatgattggatttcgtaaaatgtctccctttaaaaacgtttgcaaaaagagagtccgagaatgaaattagacaccataactgtttttctaataaagccaaattaaaatcatctacatccctaaaacctaagacaccttccgatttactactacacagtttattccaagccatccagtgcatacctctagattccccatttaaactccaccaaaatcttgcgacctcacttgttagtttggaagtaattgttttcggaagcctaaagcaagacatcacataagttggtaatgcaaaggctaccaatttaatcatcacttctttccctccttttgataagaatttaaccgaccacccatttaatctagtctataatccatctctaacaaaggaaacaatctttgtcttagagccccactaaactctaaggtagcccaaaataggatcccatacctccgatattatgtatagccaaggttgattttatttttgttctttatagcttcgtctactttatgcctgaactgaatcgatgatttcgcaaaatttatcatttgtctcgaaaccacttcatattgttttaggatacccaatattatcccgcattggtctttatccgctttacaaaagaaaagactatcatccgtaaataacaagtgagaaactgaaggaatcgatgctgctactttgatacttgtgatcaattttccttgttttgccttccggatgttcgctattagcacctttgtgcagagtatgaataagtaaggagaacgtagatatccttgtcttaattcccgttatggtattattagtcctttaggttgtccattaagaaggactctatactgaactgaagtaatacaccacattatccatgatatccactttaagcaaaatccctattttcttaataattccttaacgaaattccattcaaccctatcatacactttaatcatgtctgttttaattgtcatgtattttcctttacatgatgtgttagatcttaactcatgaaacatctcttgtgcaataaggatgctcttgtgcaataaggatgttatccgaaattagacgtccttctacaaatgttgattgcgtttccaaaataagatttggtaaaaccgtcttaattctttggcataaaatttttgaaataattttatacctaacattacacatatatataggacgtaactccgtcatccgattcggtccctccattttaggaatcaaaaatatattagttgtatttatccgnttctcaaaaactccattttgaaaaaaggagtttacaagaagtaataagtccgcttttatggtattccaggctttttgaa

SEQ ID NO: 2780 - DNA, 514 bp, Arabidopsis thaliana landsberg
ggcccttctatgtctttgtcgtaaatgcagacatggcccatttttctttgtttcacactatgttttttcagatgtttctgtgaaccataattattttgtttgtcgttgtatttaggtttcaagtaaaaaagaagcagtttttccgaaattttgtaactattatggcttttggcgccattgggaccgtagtttcttgcaccataatatctctaggtatcttactcccctctccctgtaattgattctgttgaaagcttactcctgattagtaattgtggatcattaatattcttgtgatgtttgaaacaggtgcaattcagttctttaagaaattagacattgggacctttgacttgtgcgattatcttggtaatgtgttaaggagttttttttatcgattctttgttctagaagacttgatttttcttttgcttacttaatcagcaatcggagccatatttgctgcaaccgactctgtatgcacactacacgtaatgtgattcggcaattagca

SEQ ID NO: 2781 - DNA, 1816 bp, Arabidopsis thaliana landsberg
tattaagagctcgcgaatcaagtaatggagcggattagaaattacaataattcataattatgtatatggaaagaaattatatttaaaaatcaatattcgatatatcaaaatctggtaaaatcacacattttccggatattatttaaactaacaatcttaactgtccattaagactttccaaatcaaaattatttccaaatcaatcatttgatggaagatttcttggtcaaaattaaaacaaataccgacctgcaaaagcgggttagaatttgtatttatttaatagagaatgagtaaaatggaattgttaatgacctttgacatatctaaaattataattacaatactaaattggacgcaacacgggttaaactaaattatataattcaaatactattttgacaactgtataaataaaaaatctcccgcggtaaaccgcgggtttaatcctagtgttattgtaaaagatacgtacatttgtagctctattgctacaggtttcacgaacctaatgataagagcacatgtgggaaagaaagaggaaatcctgcgtgatcaatttttacgtgtaacaacaaacctgcgagttcgttagagttagagctgcgtgtctgtcatggtatagttaggaattagagttcttgtattcaccattgttgatcaatagagaagtacagagagttaaaggatagggtttatagttctaaattctatcaatggtgcgctcgtgattaaggatcgaagcaatcgcaatgtgtcttgagggatttcccaccttcaatgccgttgatggtgaactgcgatcatggatctcatggctagctagaagatttctttgttcaggaagtgtgtgaaaagatgaatcttggacagtcttctcgaaggagaagctgagtcttggttctatagaagacaaaagatgtttctattccgatcttggaacatttgaaggatcgtttgttgttgataggaacttcctgtctaccggctttgccattgtggattatgtcgaaaacacgagtatataccggctctccatggagtctctgattcccaatcacgccataaatcattgaggattgcttgggtcactagcttacagagcgtcgaggctagacaatgtacatataagctcattaaaggtagatgagagccccgaatcttgtaaaggtagtgagctgtcatagttgtagtcgaagtccaagtgaaagatacatggctccaatcctctgtaatatgcaagagttaggctcatcatcaattcctcggttttaaattcgtttaaagctaaaatgcctactcacaacacaaacaaaaaggaataaaataatgcttcagattataaccatgaaaagaaaacagccagaaccattgtacttttgggtgaaccactcggatcagattccaaatcgctgttatagagaaagagatcccaaactgaccgttactctactccacagagactccataaaatcgaactgattggacctagaatatcgagatatccactagcttctcatcgtcagaggccaagcttactcagtgcgcatcatatagagctctaaaggggaggagaggaccaacactattttctcctggtattcctctagtcttgatttacccgtagtacacaagtgtcaaaggaacccagaggtgaccagttatcatactcttaaataatccttcacacaaatgtgaggcatctaataaagctaacagaataatgagaaaaagtatagtgaagaaaagtttcacgcgataggcttaacgaccaaattttcgtcaagattcaacgacttccacaacaatgttttgc

SEQ ID NO: 2782 - DNA, 502 bp, Arabidopsis thaliana landsberg
  unsure (1)..(502): unsure at all n locations
aagcgtattaatgaaataagcgtactcaaaaaagagaatgcggaacattctgacgacgttttatctgcgtatgcgtgcggaaagtcactaatcaaaggcgtcacactgatttatccgttgactacacagcaagcagaggggcatatcctccggcttcgtcagagggtaggccagccaagctaacgaaattttagatgccaatctcgtttaagatgaaagtctgggcttaacctataacgattctcagttcatactggcggcctctttttactctatgcccgtctatttggggttagaagaatctttctatctctctctgcatagccacttcgctaatgaaaatacttgacccgcacannnnnnnnnnnnnnnnnnnnnnnnnnnnnatctttcttttgagttttatttcagagttaaacccaggcagaccagaataaaacaacgtgactctccatgcctgagaactcttggcaacattgagctgttgagaggcttgcatttg

SEQ ID NO: 2783 - DNA, 542 bp, Arabidopsis thaliana landsberg
gcacatatccctgattgtctgaatgctttatcaggtttacctttgtatgcgttttttttttttggttagcaccgtttaatttggggggattgtaaaaatctatatgttaaatagaccatgcaacctgtatcgtagatcataatactttagcatcgtttggacaatattttacatgcatccaatatctagagtttggctgaattttcagccatatactagttgcaatctcaacatttcaccacaatttttttgtttcttaaataactacaaaaaaaaaattaatctcgataaaattacatatatttttggatttatttttaaaattacgtctccaattgaagtgatcagttaaccgataatatgaaaaacattcatgtgacgttttatagtgaattagttgaaagatatatatggttttgtatattacgagtgtgatcgatacgtaagaaacaattcctagtaatatatatgagagactaatactggagaatttcctagaaaccttacaactttttttcttatagataattgcgaaatgatga

SEQ ID NO: 2784 - DNA, 578 bp, Arabidopsis thaliana landsberg
  unsure (1)..(578): unsure at all n locations
gtatagntcttatatgaaattattcatcctaaaaccaaaagtagataaaatcatgacagcatatgtttttaacaggttctgaaattttatgtcagcataagttttatcctcctcatgagaaactcactctaccttgagattaatttacttagcaagatacattccggaaactatggctgttccaacgactacaaccaccatatatttcagaatattctttacagtaaaaatggattcatttgtcggtaactccatcagttcctttatctgcaataccattagcacagtgatggtgacaaaattagctctgtttattgtgttgttttcaaccaaatgtgtattaatgaggttactaacgtttatagtttggttccaattcttcttgatcccttgaagatgtcctctacccacaactgccacgactgaactatgctcatttgcaattctcaacaattgatatgccatgtacctgaaatataatgcaagttttgcaaatagatcagacaaaaatttggataccaaactgttgactnttcgatgttttaagattagctaattaagagctcaaggaaacaaga

SEQ ID NO: 2785 - DNA, 572 bp, Arabidopsis thaliana landsberg
  unsure (1)..(572): unsure at all n locations
agaattatcactattatatataaagttatgatcaaacttccacgaaactgtatttatataaataccaagtcctaacctcaagctttggtagtcttacaagagagataagacaacctaatcagagagagatggggaggtcgccttgttgcgacgagaatggtctaaagaaagggccatggactcctgaagaagatcaaaagcttattgattacattcataaacatggtcatggaagctggagagctctccccaagctcgcaggttttttcctttccctagtctcttaactcaatccatgatcattttatataaacttgtatacgtatatatggatattatttgaattgtatagttttgaaacttcttgtttttcttttcagatttgaataggtgtggaaagagttgtagactgaggtggacaaattatttgagaccagacatcaaaagaggcaagttttcagccgaagaagagcaaacaatcctccatctccactccattctcggaatangtaagtgataaacatatattcattttttttttgtataaaactntgaatgactaaaaacttttt

SEQ ID NO: 2786 - DNA, 329 bp, Arabidopsis thaliana landsberg
aaccatttttatttcttgacagccgagccaccgaagagacgcggggtgagcttaggaatcagactttccactcatcattttcgtgtgttatggaccaaaggctctgactagctcagaggctatggatccaacctccacatcgtcttctgcttctggcgcccaatctctgaaattgatcaaaggtggaggaattttagcagagaaaagctcctagaagttctctaagatcccctaacggcaagggatctccatctggaagcaaaggaaacgaaaatccttacaaggtggatggagcacatggcaagagaatcgaaccaacaggcaaagcg

SEQ ID NO: 2787 - DNA, 472 bp, Arabidopsis thaliana landsberg
  unsure (1)..(472): unsure at all n locations
ttattgcatgtttgaactgcgaaacatctgtcntttttgtcaggtcatatttacttaattggggatgcttacgtgtctgtcactgggtacaagctccctttggtcaatatctaatgagactagaagcttcaatatataagcatctgctatcagcagatatcttttgactgccaatccgcttttgctcctaggaatggagacggtggtttctcgcattaaatttcaccataggcatgcttagcttccttgactgagtgaatcctttgcaggtatcacactcctcttcaatgagcccccagaggctagaaaacccagcgaacgatggagactgtatgtttttaaggatggtgaaccactgaatggtgagtctttgacgtcttccacatctctatccatctgtctaagtagtgggtcatgtgtcttctatgtatttcacttaactatataactgtggagaaacgtaattttttgt

SEQ ID NO: 2788 - DNA, 541 bp, Arabidopsis thaliana landsberg
  unsure (1)..(541): unsure at all n locations
ttggccatcatgcgaagttttttcacattttcgatttttctttactgcagcggcatgggcaagaagagtgtggtgtgaaacaatgtaaggctcggcactcccatctccagcctgacacttttcgnnnnnnnnnnnnnnnnnnnnnnnnnnnnnnnnnnnnnnnnnnnnnnnnnnnnnnnnnnnnnnnnnnnnnnnnnnnnnnnnnnnnnnnnnnnnnnnnnnnnnnnnnnnnnnnnnnnnnnnnnnnnnnnnnnnnnnnnnnnnnnnnnnnnnnnnnnnnnnnnnnnnnnnnnnnnnnnnnnnnnnnnnnnnnnnnnnnnnnnnnnnnnnnnnnnnnnnnnnnnnnnnnnnnnnnnnnnnnnnnnnnnnnnnnnnnnnnnnnnnnnnnnnnnnnnnnnnnnnnnnnnnnnnnnnnnnnnnnnnnnnnnnnnnnnnnnnnnnnnnnnnnnnnnnnnnnnnnnnnnnnnnnnnnnnnnnnnnnnnnnnnnnnnnnnnnnnnnnnnnnnnnnnnnnnnnnnnnnnnnnnnnnnnnnnnnnnctc

SEQ ID NO: 2789 - DNA, 172 bp, Arabidopsis thaliana landsberg
  unsure (1)..(172): unsure at all n locations
ctgaacaccctngctcgacagaaactgcangaagactgcgacaatcagatcacctactagaacaggtttttggggcgattcagcaccaggcatcggaaggagagacctcacgcccctctctggcttccctactccggaatccacccaagctactactgaaactcccagatga

SEQ ID NO: 2790 - DNA, 2986 bp, Arabidopsis thaliana landsberg
tattgttacaagatcattactttgtcgttgtagcaggacgaagaaaaaaacatataaacttgaaatctcacccttttgaacaccagaacgacattgcaaaagatgtgctgcccggcccatataagcagttgtgccaacaggaacctttccagatcccagctgggcgactgtcttcatgaggaatcgagcaacctaaacaatagcgtgaattgaattgtcggaaaggggaaacaacaatgaaccaaacacttcaaaagcggttaaatgtggtttgcatatcaaccataaaaaaaaaattgcaggtgacaaaagccaaaaaaaaaatatgaaacaggacaaattgacaaaaacctgcaaataaccatatctgagaaagtacaaaactcacaattcgaaagcaatttgagctgacagaagtccagagagacataagataacgagccacatgctaagaaatctatttgagctgacagaattattctagtaagcgagaatagcttgcagttgatgataaatacctgaaattgcagcacaacattgtctccttcgtatgtgcaggcaggaacatatacagcaaacagctcggggagcccactgcaccacaagtatccatgtccaccacataacttacgacattcttcaatcccatccttttaaccaacaaaaaaaaaaacacagtttagctgataatattcaacttattttaataagttaagatttgaaagcatacagaggtggctgaggtagtcatagacttcaatccagcagtgcatgcatgagcttcaggcaatgttgcgaaatcactggcctctagtctttttgttacatcagtgtagagccacttcagccattcccctacaaaccgaaatgcatatgcagatgccagcagaggaaacaacctgttctgctgagttttataatcaatcacctgccaattataacaacatcaataactggtctctatgtttgtggtcatgactgatgaccatattctatctagagattggattcttacttaactaagttacagaaaacatttttgccccatagttatgaatagtgagatttgttgaatacctgtgtctcaatgccaccatcatgtgagccaaactgccttcgaacagcactgtacctagtagcaatgcaaactgcccgagccagcgcggtggaagcatttgacacaatagactgtctcacatacaccatagtaccatacaccaattgccttggaacatctgatgctacatattttccttctcttgtaacttttgacagtctataagaagaaaaatgcacaaccatgaatctgtttctcttagggatattaaatgataaaatgcttttattcatagaaagggccaaagagagaggacctcatgagcatttgatctctaggaatgcgaaaatgatcaaacatagaaaacccgttgtccattgagttatatgctccagtttacaaacttcattacgatatcaccaacggttatacccggaagaggagaatgatcttctaagctacgcagttgcacgatgaatcctggaagaggaaatttaagcaatcaatacccaaacaagtaatagttaacaaaaaaaatactggaatctttttctcggtacctaccatggataccgtagtcttttccgttagttatgagacgagcgtaaacaacagcatgggtagaaacttttcccaaaccaccaggccaccactattcaacaatcaagacagatgaaaatcttaaacaactaagagagactgtgcataatactcaatcaaaggattcttggtatactcactttggatgcagtctgagttggagtgtgaattacaaactcatcagtcttgggatcaaatgtggcagttgtctcaagtccttgaacatttgagccatgaccaagctcagtctgtgcataacacccaataatctgcatcttattcgccagcgacaaccacttcttctgctgctcctctgtaccctgccccttaatagcaggcacaaacattccctacagacagagatacaaaaaaacatgaatcaaagaatcaaaatcctgtctctagaagataaatgagacgtaggtagtacccagtgcagatccacataggcaggctgatcgataaagtgcctcaatcttcctgcttcttcctctgtaacaaacaaaaaatgaaagagcacaaaaataagacgccatcacaaaaccttgataacaatacgtgtgtgagaacaatccataccattgagacgaagctcgataatcctcttaaacgcatgagcacattttctcaacgtactcttaaacagctccttcctattcaaccgagctctattgcttttctcaaatacctatataaacaagattgagaaattcacaaatctaagacagacctaatcatattccctcgcagcaaaaacagaaccaaaatcaacgagaatcgagaagaaattcaccggatcgctggcgacaaggcgggcaattcgatcggaaacctcaaaagcgtggcgggaaccagcccagacgatcttcatatcctcaacgtcgaactctgctttgtttctctcatcggcgaggtgatcaattccttccatgattcgtaattcagaatctagtagctaaacactcaaaactttctcgagaaaactctcagagatgataggaaaaaaaaaaaaaaaaaaacagagggagaaaaagaaggacaatgcctcactctaccgatttaattgcagagtagttggaagaacaattaagctttttatttcggagataaaagaagagaaagacaaattgatttaaatatatagactcttttttttcttctttctataattaatatattttgggtttatctttttctcagatccactctccgacatagataaaacccacgtggaaaataataaattttggatataaatattcctaatataagctaattagtcaacgaatgttaaaacaaattacgttgtttgcaaaataaaacctcgca

SEQ ID NO: 2791 - DNA, 559 bp, Arabidopsis thaliana landsberg
  unsure (1)..(559): unsure at all n locations
gagtggacgtagaattgttttaaaaatgtgtcagttataataggactcgattcgaagatgggcgagatcataactggtgcttctgatactgcaagtgttgttttagagatatnnnnnnnnnnnnnnnnnnnnnnnnnnngtatctaagatatcaactgagcttaagagatggttgaaaagcttgagtaattcctttcttttatttctttttgttcaaatattcgtatatatgtggtatgtggtatgtggtatgtatgagtttttaggatggataactgcaactagaacccaatttgatatgttcaggtataaaaatgtggattacttatatgaaaacgcaagatttttataactagagctatatttaatgatagctttctaaggaaaacctttaaaaaagtttgatttctgcttcagaatccagtgccgacgttgaggaggagcttatggaacaaatgttccacgtctaatctttttgagcaaatttaaaggttcaaatgcttttttcgcaattatgttgttaaaaaatcccaaatactcttcttatttttgtaattat

SEQ ID NO: 2792 - DNA, 2562 bp, Arabidopsis thaliana landsberg
ctctcagtgaatccaatcttttacttagttaaagttttggatgaaattatgaatattaacagtaatttctaatttgcagtgagattatgcatgctatgtggaaaccacagaagtttaagtacatttacttgatggcgacgttatacgtgttcacgctaacgattccgtcagctgccgccgtttactgggctttcggagacgcacttctcgaccactccaacgctttctctcttatgcccaagaacgcgtggcgtgacgccgctgttatcctcatgctcattcatcaggtatacacatataacatttttgttctttcttttttaataaattttgatcatgagagattaatgcaacgtgttcttgttcgtgcagtttataacgttcgggttcgcttgtacacctttgtactttgtgtgggagaaagtgattgggatgcatgacacaaagagcatttgcttaagggctttggctagattgcctgtggtcatacctatttggttcttagctattatcttcccctttttcggtccaatcaattccgctgtcggtgctcttcttgttagcttcaccgtctatatcatcccatccctcgctcacatgctcacttaccgatctgcctccgctcgtcaggtataacatctttactagctcactctcttttagcgtttcaaaactcgaacttaacctaaaatacattgagttaccaataattttttagaaatgaaatgaagagtcggtggaggaatattatagttggggggtagggttgtgaaattggagggcaaaaacgtcttttgtggaagatagatggggttcagtgttccgtatcttacggaagataggatcatcacccacattccttactggcgtcccctccaaataatatattattgagttggtttcagccatttctttatttggttacatttagaagaaaaatacaatatccggttaggttagtattagtaattgaccatgatttctttttctttctctctttcaaaacagtgtatattaaatttacgtaagataaaagtagaggaaaataggggagaggaataggtaagagtcataatcagaaatgaaaaggagctgtacaatagggactctatgcctaacattaatctaaagtgagagtctgagtatgacaaatcacaatcatatctctctctctctctctctatctcatgggtcaacaaagctttggattttgtccattactatacgaccaaaactctaaaacacttacacactctctatttctttaatggttctctgattatttttgtgttttggatctttcttgtagaatgcggcggagaagccaccgttctttatgccgagctggacggcgatgtacgtgttgaatgctttcgtggtggtttgggttcttatagtcggatttgggttcggtggatgggctagtgtaaccaactttgttcgtcaagtcgacacttttggtctctttgccaagtgttaccaatgtaaaccagctgcagccgccgcacatgccccggtctccgctttacaccaccgtctttgagagatcgagtcagggttcttctaatgcgtttgtggagggttcttaaaattatttgttcttcttttgtgttttgtgttcgtatacgtgaagggagtaaaagtcacgaaaatagtgtactttttacacacccctttaaatgcgtgctaagctcttaattatttttttctcttttggggttttgtatttttgttttcactccttagttttttttttaaaattgaatagtcgataatatgtagtgtgtgatttcttaatttggtattgttaaaacaataggctaagaaaatgtatcgtcttctctccttttacttgtctttagtaacaaaaaacaattcttatcttatacatttatcctaattagacttatataaactattttaccatgaacaatatcttccgatactagataattctttaggatcctattagatcttttaattatacagttttgatcatagcacagcgacaatactactaagtttacattaaaattttgaaataacactttaatttatttggaaaatttgatttaacggcagggtgtgtttaaaaattaaataggggaacatggacaagttggaccgacggagccggtcatatatcctatgggccacatgggtgtggggagaggacgcacgtggatacttcgtccgagtcacgtgccattatttacttgacactcttcatcttctctctgatcaaaagaatggatcagaggaccgttcctgtccctcatattaaatatggcatgtgttcgttccattcgtactcaatcgtttaccccttatcatatgctctgctttcacatgtactttgcccccaaaaattataactatatatgtaaactattaactaatattctcgtttgaatccagagtccgattcttgtactttccatctgactttttttttgttgggggtcaaaataaaaaagaactttgcaaaaatgtttcttctaatagcataaaatcgttaaagagaaaagaagaaatgaatgtgagtcatattatgcgatatgg

SEQ ID NO: 2793 - DNA, 392 bp, Arabidopsis thaliana landsberg
  unsure (1)..(392): unsure at all n locations
ttttatttgcacaaaccccgcccccacgaataagtaaggtattttcggaaaaaacgaagtaacttttattagctagagaacggaaaataacaggtcgatcggatagaggtgagtaatttctaccgatcagcaacgttatataaaacgaatcaagaacaaaatgaaccgaaagacagtgtgttttaatacgaatattactctaattctttgggtattaacttgagtccttctattttgcaaatagtgctttattttatagggcaaannnnnnnnnnnnnnnnnnnnnnnnnnnnnnncaaactattgatttgcctttcaaaattaatgggctgatttagtggagacatcatgcccatttaacacttaaaattgggtttggaccaaatgatata

SEQ ID NO: 2794 - DNA, 317 bp, Arabidopsis thaliana landsberg
aaagcgaaactaaacaggtggctgtagagatcacacagccaattttcatatctatctgtgggattggatcggagaagaggaaagggacaaccttatgtaagtattccatttgctacaccacaaacatgataatgggagacattaaactaccatctatcagatcccgcggatctgttctctaggccaggaagacacgaccgaatccgatgatgaacaagacaagcgggaaacatatcatcatcatccgaccctttgttgcacgtgtccgaagaaccattcccactttacgatgaatggacgccgaaaatctattgggt

SEQ ID NO: 2795 - DNA, 2107 bp, Arabidopsis thaliana landsberg
ggcaataagggaagaggggaaataccaaagctttctgctttggagacacacgacagcaaatgactgaggcacaatcgaccgccaaagcaagaaactgatacttcatctcatcctccaatgcatacgttagggttttcccgtcaatgatcaaagcaaatgccgcgtgtggatctttctccagcttcaccatttgcacagcttttgtgatttgattcaaaatattgtccttcacagcctgattacatcaacagatatatcaatttgaaacttcacaatgtaggtccttgtgattaagaaagggaaatgattttagctttatattacttttgcatcttgagatgctccttctgagttcaccacagttatgcatatctgtttcatgccttgccgaagtaaactacacgagtatctgcagttcaaaaaaaaaagctaagttggtcaaagaactttcaagataaatctgcttcaaggtattgtagtcgttctaacccgatgttgattgctgtttccatcttatccccagttaaaacccataatttgaggccagcttgggcaagtttatcaatgcattggggcacctaagtcaaataaaaaagaaatctcaatttcacaaaaccaagatggaggagatggaaactaaggtgacttgtctgatatatatacccctttctggagtttgtcctccacagcagttgcacctacaagaataaggtctttttcgatcatatccgatatcctctcaagcaactcatctctatccgaacctatagaagttttggccttgtgaaactcagcgttccaagctgaatattcttcctcgtcaagctttctgtatgaaagtgcaagagtacggagtcctgcttctccatattcatttaaatgcttagtggtaggtcccaagtatactttcccatttttagccagtcgctcaaaaatgatactgcaaaaaaaaaaaaattaacaaggactgcttcaaacttacatgaaggttgaaaatcaaatggattatatcttcctagcttttcttctaacctgtcagctcctttgcatagcagaagaatctgcccttcctcgtcacgtacaactactgacattcgctttcgtttgctagtgaagtccaacaaattcagaactttatactccctgtattgtttctggtacacattcaggatgtgtacttaaaaccaataatcaaagaatcaagaatagatctctaagaagtctcacctttcaatagtttgccctgaatgagatagcctttcatgaacataaacgcttgattgggttctcttgaagaacacaaaaccaaactcactagcagcagtaagaaaagaagcttcatctggtgactctgcttcataagtgtacttgccagtctcctcgttcagctcgggaatagctgtgtgacatatagctaatatgcgaaagaacagcaaaatgtcatttggttgtgattccctcaaccaattaccattcataagtctgttatcctcaaaaccaatccctttataggagctctaggagtattatagttattatccctttccacctcgatttcttgcgtacggctactgtcccatgtaccatacactttagtctgagactgaggagtactcgatatctcaccgtgctcttcaagatccacagccatctgctttgcagcagcaacttctacttcgctggaacgcacaccataagaagtaccagcaatggagcatttcaagaaatccatctgattacatgtcaaagttcctgttttgtcagagaggatagtatgaacctgaccaagctcttcgtttagattcgatgtgcgcgcatttgcagggactccactctcatcatcatacatgtgtaagtcttgattgatgaaacttgcttgccagactttgacaacctcgatcgaaacataaagagagattggaatcaaatatccataaagcaatagagcagtgatcagatgaacaaccccagcatagattggattgatcggatttgtgaagtctataggctcgcccggtcgtaagtaccacatttttggcatgagaaacaatgtctcccaagcaaatcctgatgagctgatgcaagagagttaaaagaagtagtacaa

SEQ ID NO: 2796 - DNA, 433 bp, Arabidopsis thaliana landsberg
agcatcagtgtcagataatcacctcgtgaattccctgtataggttggttagatttgctagtcattgtagctttctggcttgtgaaccctgatcagtatctctttactgctctaatttggaaccagtatgacaatttttttaatcttgaaatttgtcttagctcttataattcaatactttgtctctagagtagttgtgaattgaagatcatttcagacagcattgaaaattatagatttgggttgtatatatgaaactctaagaaaatggaatctgtatatatacatgtttgatagtgaaacataattgggtgatatggttcttgtaataaacaataataggtatacttatctgtggtcgcaatttggaaacggacacgggtcacataagaactattatattattgctggtgggtcagtactatttctatgac

SEQ ID NO: 2797 - DNA, 406 bp, Arabidopsis thaliana landsberg
tgaacaagactgtagggtttaagataacaatctccatatgaggagataggaggatgtccaagctcgaatcctatggaaaaaacgaaaaattgcatatgaggtacaacccaccggggctcggaggcgggaaagccatgaacataaaggatcatcaggaggtgcatacttatgtgacatccaggcaaaaaaacgcaagaactgccctcgaaggggaggagatcaataaaccgccggagcaactgcccgaacaatcgtgtagagcaaacgagcagtataatactgcaagactgagatacgttaaaataatgcggtacctatagaggcaaagctagatctcggctaaaggaagagagctacactatcagaaaaagggaaggcatgcaccactccgactcaactctttttc

SEQ ID NO: 2798 - DNA, 537 bp, Arabidopsis thaliana landsberg
  unsure (1)..(537): unsure at all n locations
aaaatcaaataattatgagaaaagatacatgcaattttttattagaaaatatttaaaagtgaaatggtatgaaaatagtgtttcatgcatgtatttctttcctacggtcttgcttatgtttgtaacatggagccatgagggaataaaacaagaagtcttcctttatgatttatcataaaaaaagatagtcagctacaccaagtatgacgaaatacatgaccacacataccaagtttagaaatgtacaactaattacacaaactagatgtattgtatgcccacatataccaactatatgacgatatgtnnnnnnnnnnnnnnnnnnnnnnnnnnnnnnnnnnnnnnnnnnnnnnnnnncatgtcgtgatgttgatgttgaccacatatcgtcatatagttgatatatgtgggtatgcaatatatttagttcgtgtagttggctgtacatttctaaacttagcatgtgtgacccatgtattcccttctacttggtgtagctgagtatcttttttccaaaaaataaagcataatccatga

SEQ ID NO: 2799 - DNA, 1307 bp, Arabidopsis thaliana landsberg
  unsure (1)..(1307): unsure at all n locations
ccacgcccttggaaacaggagtcacccaggtcatccaataattgctcccaatgctcagaagctgaaagagaacctgtaccaccaatattaaaggaataactgctcctccgtatgctagtgccatgtattttttgtacacagtgaacccaacttttcccttctccctttcctcttcttgaactagttgaccgcttggcttgttatccgaaccatcctcttgtatttctttatgatggagtacttcgttttctttgtccgtagttgatttttcagaagcatgggctgtttcacatgaatcaattgttgctaaggcttcagtgtgagctcctacaagttccatgaaatctgttcctgaatcgagaatctcatggtatttccccgcttgtgttatcttgccatctttcatgacctacaaaaattaattctaaatatataaacatgtgattagaagatgcatcggaaagatagtaagggataagtcacaaaccaatataagatcagcttcaggcaagaattcaacttgatgagtgacatatatgactgtcttgtgtctcagaagccccagcagaacttcctattttaaaagaacaatgagagatcatatcaaatatcagaagccagtacaaagtatattgtacgattttttatgtacatgaagataatcagaaagaaagggagcattataccttgaagagatgtgatccagtatgagcgtctactgcactaaagggtcatcaaacagatagatatctgcgtcttggtaaagagcacgtgcaatctgtatccgttgcttctgtccaccgctaagattgatacccctttctccaataactgtctgatcacggaacggaaatacctccaagtccttattcaaagaacacgcttcaagcaccctttggtaccattctctttgcatgggcttaccaaacagaatgttctcttcgactttgccactctggatccaaggcgactgtgcaatgtatgcctttcttccacaaaccttaagatttccagatattttgggaacttcacctagtatggacgagagtaagcttgatttccctgaaccaacagtaccacatatagcgatgttcatcccatgagggattgtnnnnnnnnnnnnnnnnnnnnnnnnnntgggtgaagagtcatcccaagagaaagcaccattgctgacttccacatccatttttgaacttccactaggaagtctctccataccatcttgctgcaaatcatcaaggcaaagaaaagttgcaatcctatcaagagatacctttgtctgaacaatcatggagatcgtatca

SEQ ID NO: 2800 - DNA, 582 bp, Arabidopsis thaliana landsberg
  unsure (1)..(582): unsure at all n locations
ccttaatgcccatgaacttattcactcgcttcacactaagaagcttgttcaaccttttgtagctacaaaactggatatcacaaaggcttttgacaagatcgaatggggttttattgaagcagtgatgaaacaaatggggttttcagagaagtggtgtaattggattatgacatgcatcacaactaccacgtactctattctcatcaatgggcaaccagtgagacgaattattccaaagcgaggcattagacaaggtgatcctatttcgccttatttatatttattatgcacagagggtctatcagctttaattcaagcatctattaaagcaaaacaactacatggttttaaagctagtagaaatggaccagcaatctctcatttactttttgcacacgattctctggtgttctgcaaagctactctggaagagtgtatgaccttggttaatgtgcttaagctttacgagaaagcatcaggtcaggcagnnnnnnnnnnnnnnnnnnnnnnnnnnnnnnnnnnnnnnnnnnnnnnnnnnnnnnnnnnnnnnnnnnnnnnactttctgggaatctataaaacag

SEQ ID NO: 2801 - DNA, 639 bp, Arabidopsis thaliana landsberg
  unsure (1)..(639): unsure at all n locations
atgaaacaccgcatgcacttgtgagttagccggcaattgaagcttataatcaacctctccgcaacggtcaatgaccttataaggaccaaagtgtttaggagacaacttctgggtacttcgcatcaccacagattgttgcctatagggctgaagcttcacaaacacataatctccaacttcaaattctctctcagttatgtgttgatcagccaattgtttcattctgtgttgagctctcatcaaatgaaacttaagaaacaagatcatgctctccctctcctgcattgaacgggcaaccactgcaacttttgattcacccggcaaataaggcaaatgcagtggaggaggttgaccataaacagcttcataaggtgtcatagtactgcgtgataattggtgttgtaccaatactcggcgagagctaaccacctactccatagctcaggtcatgcatggcacatacatcttaaataggtctctagacagcggttgnnnnnnnnnnnnnnnnnnnnnnnnnnnnnnnggtaagccattgtcattttgagttcaacaccttgaagtgtaaaaaattccctccaaaaagcactcgtgaatacagcatctctgtcacttacaatcgaactaggacaaccatggagc

SEQ ID NO: 2802 - DNA, 525 bp, Arabidopsis thaliana landsberg
atagtgctccaagtgtttaggcgtttgagtcttttggggacctattatgctctttatctaaactaaggtttctatctttggtttattgtatcagctagttcgtgctcttcattttgtagtctgatttagagcagaatagaggaagatatctaatgttaacctatcagaatgatagtaattgttctacttgtgttttgttttgttaccagtctacggaagggatgagatcttctaagttttgtctgcatccagctggagacactccatcttcatgccggttatttgatgccattgtcagtcactgcattccggtcatcataagcgacaaaatcgagctgccctttgaagatgaaatagactactcggaattctcactgtttttctcaataaaagagtcgcttgaaccgggctacatcctcaacaacctccgacaatttcccaaggagaaatggctggaaatgtggaaacgactgatgaacgtatctcatcactttgagttccagtacccgccaaagagagaagatg

SEQ ID NO: 2803 - DNA, 539 bp, Arabidopsis thaliana landsberg
  unsure (1)..(539): unsure at all n locations
tccaggtactcgtacagcaccacgcccagatggcccatcagcttctcctcgccgcacgtcttcatcaccaccgcgatgcgcgagatcaggtcggcggcctgctggcgcaccttggccgacttgttgttgaggcgccacttgatggtgcccgagatcagcggcaggtacagcttgaccccggttgttgagcgcggtgaccatggtgccgaagccgttcaggatggcggcgttnnnnnnnnnnnnnnnnnnctggaaggcgtacagcnnnnnnnnnnnnnnnnnngcctcgagccgctggtcaatgtcggccgcgcccatcgtggccacaatgcggtcgatggtctcgagcaccatcttgcggtagggctccgactcgtccttcaggtcctccacaatgcggctgatgatgagcgccgagccgaccttgctggccagctcgaccgtggtctcaaccagctgcttgtagttgcgcttgtcgagggccatgcggcgcacccagtagttctagaagaactcgggcatgatctcgctcttgacgt

SEQ ID NO: 2804 - DNA, 1414 bp, Arabidopsis thaliana landsberg
caaattcttcttcggaaaatcaacgaatggcaaaactttgtagcgtaggtttgatttacgcttctcgtatcctatagcacagatataccagtccattctatggtcaggactactgggtttgagctacaaagtttggctcctatacggattccaaaccacgaccctagtgtagtctttcgagatacataacagtaaaccgtcgcagtgatatacttcagatatatcgatcagatctgtaccgtttaggctaacaagtttagcttgacggtttatagacgggtcaaagccgttgtgaattccacggaggttgatgctcgttagataaaccttacaatgcaagaccatgacaaccttaaactcactttcccttgatgttgcttcctgagcaaggtgcttctttgtaaagctccgctttttggataatgttttccaatttttgcaggtaaatcgcgcttctctcaatgatttcaccggaaccctagagagtctctcctccaacaaatctcttggaagatcggacatcatcttcaaatctttcaaatttgaacaaggatcgatgtaacacaaattagttaggtttgaaacttcagtaaaaagctctcatgtttccccacaggaaccctaactcaagctgggccgaaacacaactctgccctctaaaaatttcccggaattattcatctttttgaactcttatttatatgactgtgatgtcgtttcatttatgggctttattattgggcttttagcccaactgtagttaaaaacttttagtgattctcatttgtatatagcgggggagatgatcgacggtcgcttcttgcggtggagatggaggaggaagactctcctctccgactgcggcgattgaaccgagagagccaccgaagattcgaaacctacaaaatatagagggtgatgtaatccagcgtctgagctcgctgagaacagcctcgacgccgattccaattcagtacggtggcttaaagctccttcaattctcagaccatggccaaggctctgtatcttttgctcactggttctaccattgtgagttcttcactaccacctgctttgaattcaactacaatctatctacaaaattctctagccgaaacctttcaagttttagcatgagacccttagcttcaattgtttttctcttggacactgtctaactttgattcttcttggaattgattaggaaatggctaagaaagttggagaagttatagaaaaatcctgcgtagagaatgggatcacaaaggtggcctttgaccgtgcaatttacacttaccatggctttagctgcttcagcaaatagaacacggtctcccattctaagtctttttttgttttgtccttaacagaaatttgcttgtatagaacccatgattgaaatttagattagtcg

SEQ ID NO: 2805 - DNA, 566 bp, Arabidopsis thaliana landsberg
  unsure (1)..(566): unsure at all n locations
ccgacacgtgtaaggtttcttcatcgttaatttagtgactcgttataatattactcaagagtttagtgctcactggtgaaaatttagaatagtacttgtttcggttcaatgcggtgagatgaagatatactattttgactgtgtatcacaggcctgggcattcgggtattcgggtcagattcggattgggtttttcgagttcagatatttcggatttggaaatctaagatccgttcggatattttaagactttgagttcgatttgggttcgatcgggtttttcgggttcggattcagatttacccggaatattcaaaactcaagattttgtattaaaatatattcaaattagttgaaaatacacaaaatctttttttgaaaacttgaatattttctatccgaatctatctaaaagtaggtaaagtacccaaaaatatacaaaataacttaaaatctaaatatttttgacacttaacttgtcgtaaatataattatttctaataaattacttgatatgttcgagttcaagtttggatcgggtttcgngtcagattttcggattttga

SEQ ID NO: 2806 - DNA, 561 bp, Arabidopsis thaliana landsberg
ctaacactaaatcctaaaccctaaacattaaatactataactttaaacattaaaccttaactcctataggtaaaggctaaaccctaaactttaacccatagacactaagccctaaaccatatacatataccctatatcatatacaacaaaccctaaacctaaaaccttaacccaaaaccctataacattaccttaaacataatcctaaacctagactctaagccatataccataaacactataccctaaacactatgcactaaaccctaatggtaaaccctaaaccctaaccccaaaatcctataacattaccctaaaccctaaaccactaatttcctaaactataaactctaaaatccatacaataataattataccctaaacaccaacacctaaaccctaaaccctaaaccctaaaccttaaaatataattccgaaacagaatttccttaaaccctaaacccaaataaactattaatacttatcactaaaccaattacacataattagcaaccatatatcctaaaaaattaacattaacaattaaaccttacacctagc

SEQ ID NO: 2807 - DNA, 734 bp, Arabidopsis thaliana landsberg
gtggactattagcgattttccagcatatggcatgttgtctgtatggattacacatggaagaatatcgtgtccaattggggtggaggatacaaaagcattttggttaccagatggtaggaagtcatgttggtttgattgtcatagaagatttcttcctgtaaaccattcgttacggaaggataaaaacactttttgaagggtaaaataacaaaagacattccgccgcaatctttgactggtgaacaagtattatatgagcgtattaggactgtcgagccacctaagacatctgatgtgggaggaaatggacatgaaaagaaaatggatggctatggaaattggcataattggcacaaagaaagtataagttgggagttatcgttttggaccgatctaacgctacgacacaatcttgatgttatgcatattgagaagaatgttcttgataacatcatgtacactgtgatgaatgtgaaagataaatcaaaagataacatgaggtcaagaatagatgtttcaagattttgtggtcgaccagaattgcatgttgatgatcaagggcgagttccatttcctatttggagattacctctgaaagagaagaagaaactcctataatgggtcaaatcagaggtcaaatttccagacggctatgtagcggatttagctagttttgcagatatcaatgccggtaagttttcgggaatgaaaagccacgactgtcatgtctttat

SEQ ID NO: 2808 - DNA, 567 bp, Arabidopsis thaliana landsberg
  unsure (1)..(567): unsure at all n locations
atctctacgattcttgcctnnnnnnnnnnnnnnnnnnnnnnnnntgttgaaaaagcttccttgagcttagtccgcatctctggccttgcttctctcacggctctcacgtttgcttacttgtattttcacctttggtttaacactctacgctcagtctatatttctatgtttctcttccttggacgtaaaagaggtatccgtatcttcgtctaaagatatagagtcctcaacgctctgaattgtactatagatatttgtatcttgtgtatttgttttctattcactgaacctcatttttgtgtaaattttaaatatacatgtttctttgtttctatctgataatttggtttgttgacaatcacaatggaacacttttatctacttaagatttctttttaaacgtcaatgtatccttcacctagaagagatcgactagtttggaaggaaatcctactattcgaatgattaacggtaaaaatttggagtttcgtcttttaaaatttcaagagttaccgccacgaacaggtgaaaacagtatcccgggcaaattttaagaaaacgacatcg

SEQ ID NO: 2809 - DNA, 609 bp, Arabidopsis thaliana landsberg
gaaaaaccttaaatggaataccttcacatgatataaaagataaacatgaattgttaagtaagaaatttgataacccacatgcagggggtcattatttgacaacaaaaagcagacccaattttaatagtatatctttagatcgaatcagcataatgacgtatctttctgacgtatagcttttgtcttagttgttctttacgcatctataataactaaacctgtgtgaacaagacctaaaacagagagaaattcacaacaaaaatggagactagggaaacaaaaccagtgatctttctcttccctttccctttacaaggtcacttaaacccaatgtttcagctcgccaacatcttcttcaacagaggcttctccatcactgtgatccacactaagttcaactctccaaactcttccaatttccctcacttcagtttcgtatccattcccgatggcttgtctgaacctgaatcctatcccgatgtcattgagattctccatgacctcaattccaagtgtgttgctccttttggtgattgcttaaagaagcttatatctgaagaaccaacagcagcttgtgtgattgttgacgctctttgtacttcactcacg

SEQ ID NO: 2810 - DNA, 552 bp, Arabidopsis thaliana landsberg
tgaccaagcaagacaatgtggacaaggatgatggaggtgtttcaaaaatgtcacttgttgattcttctcttgttagtaagggtggtaagggtgggaaaacatcacgatctgatactaaaagaagaggtcgtcgcagatcttcaggtgataatttgtgatcagcttggttgtgaagtcagtgtgggtatttgctgctcatcattcatttgttgttcatatctttcaggttcatgtgaaatgaagctattgaattctagtcaaccaatagtggagcccctgaatactcgaaaatctgctagattttctttacagtacatagagaaggaagataagcctgatgaagaagaacagtgggagcctagatttgcaggtcatcagagtttacaggagcgagaagattccttcgtggctcaagacaagaaaattcattgcggctttgtcaaaggtcccaaaggatcttcaagcactgcgtttgacctgacagaagatgatactaattatatcagtagatgccacatcgctgttagctcatgcatctttggcaattctgat

SEQ ID NO: 2811 - DNA, 1294 bp, Arabidopsis thaliana landsberg
gaagtctcggatacacatgttcgttagatactagaggacagttcatgcagaaggcaacatcaaaagttattgcatccttctttaaggctaagtacagtgatcctacgtccggtcctgtcccgatggatctacaacaactagttctagaagatttgagagtctctaagtcatacagcaagtgttggagagctagggaatcagctttaactagtgttgcgggtagtgatgaataatcatactgctatctggctgaatacttgcatttactgaagctaactaatcctggaacaataacacatatagaaaccgaaagagatgttgaagatgagagcaaagagatgtttttgtatatgttgttagcttttggggcctcgatagcaggatttaagcatctgagaaggatattggttgttgatggaatacatttgaaaggaaagtacaaaggggtcttactaacagcgagttttcaggatgcaaacttccaagtctatccacttggattgcttttgtggacagtgagaatgacaattcttggacttgattctttatgaagttgaaccggatcattgcagacatcaaagctctgactatattatcagatagacactcgtcaatctttgttgctgttaagagagtttttccgcaagcaaatcatgggacttgtattattcacctttgtaggaatatcctagctaagtacaagaacaaagctatgacgcagttagtaaaaaacgcaggatatgcgtttaccggtacagagtttaaagagctttatggtcagattgaatccacgaaccaaaattgcggtaagtatctacatgatatagggatggctaattggacaaggctatatttcaggggacagcgtttcaatctgatgactagcaatatagccgagacgttaagcaagactttcacccaaggtcgatcgtcacatattgtggagttgataagatttatcaggtctatgttaactagatggtttaatgcgcgtcggaagaagtctctcgaacgtaaaggtcccgttcctctggaagttgacaagcaaataacaaaaaccatgttaacaactaatggtaccaaggttgggaggatcaccagctggagctacgagataaatggcatgttaggtggaagaaatgtggttgatcttgagaagaagcaatgtacttgcaagaggaatgatcaactcaagatcccttgcagtcatgctttggtggttgcgaatagttttaaaatttcctacaaggctttagttgatgactgtttcaagccccacacatgtgtttcgagt

SEQ ID NO: 2812 - DNA, 596 bp, Arabidopsis thaliana landsberg
  unsure (1)..(596): unsure at all n locations
gctcttctctcttagccttcactaaaccatcatgtctctttttctcattttctacatcttcttgagnnnnnnnnnnnnnnnnnngaacagaacgtagccaagctacttcaatgttcacagactccaagtctttgagaaccgcaagcatctctttgaccttgactttgctcaactgccctaccggggttgacctannnnnnnnnnnnnnnnnnnnnnnnnnnnnnnnnnnnnnnnatcgcattgaatccgattccagcttacagttttgagcaatgtctccgtgcttttcgatgacagcacttagtatagtggatgaacccgatctgactcggtatttcccgacagagacaaaagtgtcagacattactgattcgagatcgagctctacaccaatctcattgttgttttcgtcatcatcatcagaaaaatcatcattgctctcttttccaggcgatcttggaaggcttaggaaactaaagagtctagtttcaccgccttctccaatctttccattgtgttcttgtattcccggtttaggtgataccactttgcttttgtcaacctttataagatacaagaatcttgattgttacaaa

SEQ ID NO: 2813 - DNA, 586 bp, Arabidopsis thaliana landsberg
  unsure (1)..(586): unsure at all n locations
tttttcgntttcatcaccagggatatgcaagaatcatgttttttgggagacaaggcgagtccttccagaccctagcgtgcaacttaagcaactcctttgccttctctttggtcttacctccacagcttacttgaagcacaagacaaagcttcgctacaacccccaactgtaacatctcgtgcaacaaagcaggcgttgcgcagaaccttcccaccgacaacaaaaccctaaccgctctatcgcttgctgtctgtgaaaccctaagtatcttcttgcacaccaccgctatggctgctccgtggttcaagaactcggctcgtccctccgcacactgacacaacagatcaagaaccaccatcgccatctctggacctctcctctctgatgtgaagctctcgtccatgagaagctcgatgatcacagagattactccagcttccacggncttgtgtctgttccttccccatggcatatgttcaccaatatatgcatggcagctttggtcgccttctgcgagatccggtcgtncaagatctggacgacctcagtgaanacctctggcttgagagtcatactctgcattgat

SEQ ID NO: 2814 - DNA, 364 bp, Arabidopsis thaliana landsberg
atactggatgatataaaaggatgtcagcgtgctcattgacctttacgcctatacggttagaatatcgagtactagtggcatatgggctatgtcgagacttgtgctccgtttggaaatgttaatttgaattgaggttactctgcttgagagtgttggtcggtgatcatattgatttctagggctcagatgtataagtgaagagaaaaaaatgtttggtaggttgttttactctatacacgcgatgggatcaaggatgcagaaccttcgttgccaggatcaatggggtggctacgtgctgggaatgacacttgttctatctctaatatttgatttttacattcagagagcaatccttcctgtccat

SEQ ID NO: 2815 - DNA, 1304 bp, Arabidopsis thaliana landsberg
tgggtgatggcatgatcgatattccttctgaatttctgtttaccaaagcaaattatccgatagcagccatatgcacagagatgggtggagatattacaaagatacattagcaaaaggatccaatgtcttttcaagaaagagcaatattatgtctcaccaatgacatctatgtcccaccaatgaagatgtcacccaaataaatgagaccatgcttgataacctcgaaggttattactaatttagaagcattgattttaactttatttacttattcgaatagtctttatatttattattctttctttaactgtaactaactaaaattttaattttcaggagaggagttaacatttctcagttgagacagtatagacccaactgacataggtggaacaaataatcctgcattgactcctgactttttaaatagtattaaagtttaaaccataagtttcgtctaaagattggttgttcagtgatgttgctcagaaatcttgatcatataggaggtctaatgaatggcacaaggttacggatcatgcaaatggtccatttattttggaagcaatgatcctaaccggtgatagagttggtaatttagtattgattccaagattgaagcttacaccatcagacacaaagttgccatttaaaatgcaaagaagacaactacctttagttgtttgctttgcaatgattatcaacaaaagccttgaatatgtaggaatttttttacctaggctttgcttttcacacgaccaactttatgttgctatatctagcgttacattaaagaaaggattcaaaattctgattgttgatgatgaaggtaaaccacaaaagcaaacaaaaaaagttttaagaatctttaatttccatttttattttcttctgttggatttattttaaagtagttttatatctacaatattcggttgaacgtatgtttctgcaatctaagagttttacactatcaaatgcagattctacaatcatgttacttgtattatagatatatcaaccatattacacgaatgcagacattccggatctatagattaacaagaatatacctttttcaggattgttgttgtgtgacatattggtgaagaatcaaatccattctatgactgcaagcaccatcgatatagaggtcttcgaatgacccaagaacaaaaatattgaaagatttacttagatcgtatattgaaaacttgaatcacaccttctaatttaaatgaattaaacttagttatatgtatttaaattaactgtagaactgatcaagaactcacatatatacc

SEQ ID NO: 2816 - DNA, 4339 bp, Arabidopsis thaliana landsberg
cccgaaactgtaaacatcgctctcgtcagtatattggcttgataaaaagtaatccggatccatatacccaaaagtgcctgcaactaacgttgttagatgagtttgagcaatggttatggatcttgaagttccgaaatcagatactttggctctatatttttcatctaatagtatattggtagtcttgatatctctgtggtatattggaatcgatgcagctgagtgcatgtatgaaagagctcccgctatctctatagctatacgaagacgtacttcccaagtcatcgtgtaatcattggattcagatttttcatgaagacgcttgaacagatctccattaggaatatattcgtaaaccaagacaggaacttcagtctctagacaacatcccaagagtttcacaatgttcctatggttaatttgtgagagaagtacgacttcattgatgaactcttccatcttgccttcacccacaactttcgatcttttaaccgcaacgattctcccttccgccaacattcccttgtacacagttccttgacccccttgcccaagcaccctgttcatgctgaagttatcagtagctttcttcaactcttttgagctaaatatccttgacatctcaacatttccgttctttgtaattagttgttgtttcaacagcaagccaccattacgtttgaaaaagtttttgttgcggatgatcctcgttcgcttcttaatgaatttgtacaaccccaagattccaaggacgaaaagcagcactcctagacttataagaacacctacacaaacgaaggtaaacttcttttatgttctctgtcttagagtctcgtaaatgcaagatgctactttaactcaccttgaagcacagaggctttttccggtttcgttatcttgggctcgcagctatgtgttccaggcatgttcacacaagtcccttctccacaattgtggtgtccttcacattcgtctatgtctacacatttttgaaccatagttattcattgatggtttgaacaatgaaaagcagcaacgaaagaagaagaaaacaatcacttacctatgcagccatgtcgaaggtatgggttccctgtgtagccatagttgcaatagcaaatcctataactcatcccagaaaagtaatcatactcacaactacatttatcaaaggagctgtaagaactgtaccgcgtcatgtttctacaacctaaggggttcctatagcgtgaatccgatgtatcaaagtaccaacctagctctaccaccacgtagccaccagcatggaattgttctggtatagtaacattcatcggcgcataccttttgctagacaagaaggcaaccttgcatccatctcctcctgagctctctatattgacacctactgcttgtggacgttccaccggtatcctcgcctggcaacatttgtaaccgtcacataacaagtttgttacttcttgactactcttgctatctttgcagctagattcacaacccaagatctctgattctatatccgtcatcaacgccttagtaccgcaacccacagccacgaggcggttctcgtcggtgatgaaatatgggctgcccttgcccgtgacgtttaaatccggtagcgacttttggggtacttgactagtattacttgaacaacctaacgaagtcacaggacctttgatgtgaaccactccgtattgttcattattaccttctggaagagagatgttcaccacttccctgttgattctcgacaggaatggaacagttgtgccggacgacccggaagtggtggcgttgcagacaacctcgtaccaaccgttgagataacaatccttcccaccgattccaaatgggaacggaatcgagattcctccacaggttctgttacacgaagttgaagaattcttactgtttggaggtggcggtggtgttgctgctgatgagccattcatgagctgcagagttaagacagaagctacaagacatacaaaccggtaagttttagtcttcataattcttgtatttttactttggtccttgatctgatcaatctcaatcagcttttctacatgttaaggacctgcccgatctgatgttaaggtaaaagtcaatagaggtttagaaagaagcgtgaagcaagttacaaagcacctaaaaattagtaaacactactaacactatggtcaatgtcaatgcctgagggattataatttaagttaatgattgaacgttggatatacaaatccaatattctgctcatgaccatgtgaaagtagaccaatgacattatactcatttgaccatcgtcagttcgtcaccatgttggcataaggaattataaatcaaattaagcttggtcaatgtcaatgcctgagggattataatttaagttaatgattgaacgttggatatacaaatccaatattttgctcatgaccatgtgaaagtagaccaatgacattatactcatttgaccatcgtcagttcgtcaccatgttggcataaggaattataaaacaaattaagtttggtcaatgtcaatgcctgaaggattctaatttaagtttaatgagttcacgttggattataaaaatttaaccttttttctgatgaccatatgaaagtagaccaccacattatactcatttgaccatcgtcaccatgttggcatgttcgttcaggattcaggatacaaaacagaagttgacctaaacaacgaatctctgaccagtcaaataaaatgtaatccaaggtagtggcaatcagccgatcacatggataatggatagatgatgttgacattcttggttttgactttttattctgttaaacattgaacaaatcttgcccactgaagtggtagcgtaggaaagaaggttttcaagcagaggatatcggagtttaaagccgtccaagtttgctggcgttgaatctccaaagagaaaggcaatgtgtcaattagaacacatgtccaaggtacctcctaagggaaactgaaatccttggagagtgttatcggtgaaagcttaaacctgatactgtttatgactaaaacattctttcttttgaacgtcgaatacatagagatgactgtgggtacagacttatgaaacacatataatcacatgtacagactagaaacgttacttattattgttacatggtgaaaagctagaaattcataatcgaaacataacattttttcatcagatgagggtatactaccatgttcgtagaggaaccagaggctcaacatcagacgcaggggatccgttattaaacatagaggctggagcagtcataccaacatcccaagtctcttcaatgttgagttccatggcttgatcatcctcatcatcatcatcatcatcatcatcattatgaatctctgacttataagatgatgaacgaatcctctccagctcaactgaaacttctctcatgtttggcctcttcttcccttttcggtttaaacatcttttagcgagttttgccactgccatcacttggtccaggttgcattcatctttgatccgttcatcaactatgtcaagaaatctgttctctttcacggctgcaacaaaatgagctgcaaatcccctgttttcttcagactcgacacgggaggacgggttttttccggtaatgagctccacgaggacaactccaaaactgtacacatcacttttttccgtaaacttgcttgattgaaagtactctggatccacatatccaaaagtgcctgcaacttgagttgtcaagtgagtttgatctatagttactgatcttgaagttccgaaatccgacaccttagctcggtttctctcatctaagagtatattagtagtcttgatatctctatgatatatggggaaagatgcagcagaatgcaaataagaaagtgctcctgcaatctctatagcaatgtgaagacgcacctcccatgtcattgtgtaatcatcagattcatcatgaagacgcttgcataagtctccatttggaacaaactcataaactaagactggaacttccgtttcaagacaacaccccaaaagtttaacaatatttctatgattgatctgcgcaagaacaacaacttcattgatgaactcttctaccctatcttcatccacagctttcgacctttttactgcgacgattctaccatcaacgagcattcccttatacactgtaccttgacctccttgcccaagaaccctattcttgttgaagttatcagtagctttctccaactcatgtgccctgaatattcttgacatctctacattgcatacttttctaactaactgttgttttaacaacatacctccattac

SEQ ID NO: 2817 - DNA, 601 bp, Arabidopsis thaliana landsberg
  unsure (1)..(601): unsure at all n locations
gagctgagggcaaaggctactcacacatcatataagtttttgctgcacgagacaagggagatgaaagtgtggaatattaaactgtacggactggtgcaatgtaaacgggatttatggtttacggcttgttagacgtgtttggataagattataggggagctttctaaatgttgtgatggtaaagaaggagggagagttttgagtgggagttgtaactttagatatgagatttacccttttcttgacactgttcgatgagatctccaaannnnnnnnnnnnnnnnnnnnnnnnnnnnnnnnnnnnnnnnnnnnnnnnnnnnnnnnnnnnnnnnnntatatataattaacagcaggaagttcaagaaatgaacatttatagctgtaaacgggcacataaatttgaagacttgtacatttatggacaacggtttaagatttacgcacatgtatttttgtttaataaatcaaatttcactttcttaaacattgaattccattaaattataaatgcatattaattcggctatgtttgattttgtgtataaacttatatcttatgtatactcactttgtatacagttttttggggatggttgattac

SEQ ID NO: 2818 - DNA, 582 bp, Arabidopsis thaliana landsberg
gggggatcgagtatatgataaaaataagagagaaggtatatgtttttattcttaggagaaggaagttgcgaggcgcgggtgtctagtaatggactttagggaactaaaaaaaaaatatataggctctgtaacaaaagaagaagaaagcctagaaaagtcttgttcacaagtgccatagttgtcaaagaaaaccaaagtccactacatccatcaaagtaaaagaaactcctccataaaataagagttaaaaaaaaagaatggtttgatccaagataagaatgagaaaaaatgtcttgagtgcaaagggtagaactaggatcatattttgggcttaagggtagtacaatctgctggtgtatacactgtctatattattgggtagatgagatactattcttgcatgcaaaagttggctcttacctttaccattctcctaaagctcagtccatttcttgtgagactcccctgttactaaacttgaaccacaagaaagggaccatctttgtctcctgaccttcaccttagccaaatgagttcattgttgaagcataccttgtttcacgttcctaaactaatgaatgt

SEQ ID NO: 2819 - DNA, 490 bp, Arabidopsis thaliana landsberg
agctcagtaccagaggcaataaggttgtttttcttgcagatgaaacttagagaccgaccgggatatgctcctacaagagtgttccccaaggcctttgaccacctgaaaccaaaacacaacagtcaggtgaagttggaagaagcagaggttcatacggggttaggaacaaggatcttttacctcggcataaatctctgatgaatctccagaagatggattagttgtgtgaatgacgaatgcgtaatccgcattgatgacttcttggaccaaaacagccatgcagagatagtcatgatccagttttactttcctcgtgctgaagtatgctctctcgttccatttcgaagcccagacctgagatttacatagccggttagtgagatttgacatcttcatgttaagcagcagtttcccttacttcaagattttacctttttaatggctgaccaagcttgctcccatctctgttcaccttcatcacccggccatg

SEQ ID NO: 2820 - DNA, 541 bp, Arabidopsis thaliana landsberg
  unsure (1)..(541): unsure at all n locations
cacacacaaatacactcacagacataattatcgaatttttgattcagaagcttaaccatgaataggaaaagaagaactaaaaaaactatcaagaagtggagaggaaagaagaaaccagatctactccacctagttgcatcttttctcatctaacaatggcgttactctaagctttttgtaaggtccgagaagacacgccatgtagcaatctgacaaaccctaagaaactaagtttgccatcagaatgtcttatccaatcctgaagaacaacgtgcaccggcactgatggccctagtccgagttcctgcaatttaaaacatacagatgcttaagatcaagcatgaccaggttttttgctcttcacgagtcttctctagcccctaggtgaattaaaaagggtaaaacttnnnnnnnnnnnnnnnnnnnaatcatgatgggcctattcccgtctttctcaaacaactcgtaagcacgccgtgcatgttgctcccatgtctccattgcttcgagctgataaacgcttaatgctgaaacacaaaac

SEQ ID NO: 2821 - DNA, 440 bp, Arabidopsis thaliana landsberg
cccaaccagcccatgcatacgaaaaaagaaaaagaccctatcgtaaaccaaccgagaggtatattgaaaccccgggatttattgatatatgataccacttcactatatcggtgtacctgcgcagaaacgcaaaggccctggcttatgtcaatgtgcaacacccacgcttgtactaaaaccatctatccgggaggatggctggtgaagctcgtgaatggatccaacaatcatggtaactctactaggagattcgtacatgcatggaaccaataggcttgatagctttctcattgcaagacactggctaataccccaggcgtgtggcaccgtgtatatcacattggcaccccagagactcactacttatacgctaactactcgggctcacgagaccggactcggcccttcgctctctgcccttactctcttcaaggctctaa

SEQ ID NO: 2822 - DNA, 549 bp, Arabidopsis thaliana landsberg
tgaagtccatcaccggatactttttgtgcggatcaaagttggacggcttgtagagaaagccgtacaggtcggtcttgccgtcgcgcgccttgaccgtgaacggcaccggcggcacccagccggaagcgaccaggtgcgagatgtcggccttggcgacggtggcgatgacgtggccgtcggaagcgctgcgcagtgtggtcaccggcggcgtggtcgcggtggacgcggcatcgacgaagtacttgccgtcgggcgacagggtgacgttgttgtcatggttcccgggcgtgagcagcgtggtcttgccggtgtcgatgttcaccttgaacaattgccggtaatacgggttgatgcccggtgtgcggcccacgcccacgtaccacagcgtgtgcgtttgcttgtccacgtgcagcacctggatgacgtcgccggcgccggtggtgatcgggtgcagctgcttgcctgtatgcgtgtcatacaggtacaggttcatccagttgttttgtttcgtcgggaagatggcttggccgcgctcgccgaggtagtgcc

SEQ ID NO: 2823 - DNA, 359 bp, Arabidopsis thaliana landsberg
ggcggtgtagtaacaggcggctttgatattggaggatttgttatattaggagctgctactggaggagttgctataggtggcgtgtgatgataggtgggtttgcgatgggaggtgttgtgataggaggtgttgcaacaggtggaattgtaatgggcggtgttgcagtacgtggggttgcaataggcggcgttgcgacgggcgatttggcgatgggaggtgttgcgataggaggcatttgagtgggaggagttgccattggtggtgaggcaacgggtggtgttggtgtgcacggtggaggctttgcggtagggggttggggagtagacggaggaagcttggtcgtatgaggtttaggagtt

SEQ ID NO: 2824 - DNA, 1233 bp, Arabidopsis thaliana landsberg
ttgacagaaagagtaatttttggttttttgagaaacggtttaaaaacagtcatttctaccctaattattttcatcgtgattattatggaaccatgtgttacaaagtgtatataaatcttctaataaattattttcatgattgcttatatttttggtttggttgagttcaactaatatcacaattccaattttttttttggtgcaaagaataaatcaaaacaagtattaagaaaaagtgattcaaagatcataaagtttataacagaattaaaataggcattctccaaaaccaaaacatgatggataaagtaagacgacatataagctatgagagctttaaaacacaagctaagaagctttattgcatatgcgagatcacggttagtcacacaatttttcacgagtgaatcgatggataaaaaattggtcattgtcaagagacgaggtgatgtatcggaaaggagatgagtagtgacgggtcgagaatcggatggggttgggatagaaagctgagaaagcttcggtaaccctcgctccatggagacggttcataatgccgtttttcctcgagctttcaaaatcatgactaacaatcttaatgttgttgaatcgcaatgaattgatttcagtaatcggataaaaggataaggagagattgaagagacttcggtaaccaccgctccttcgagacgagatcataatgtcattcttcttcaatcttttactagcgcgagatgactatttagagatattatcaaaaagttagaaaacttctttgaaatcctgagaaatatgatataggaaatgagcatcaaaagagagggctacttggaggacaaagattggtcgaagctggtgagacgcgtggcagaataacattggttgaagctggagaaagttgttatgaagattcttttaaacgcagtctctgctgctattcatcattatgctaaaatttgagtttgttatcttcttcttcttcaattctctctataaactctttagggtttgatatttcattgttgatagagctgtttctacttctaagctctaccacatgagatttggattctcgttttatgaacgatgattcaattgctgtaacttgtacgattgaatttgagtgagatatagttttacagtatcaaatgtatcagagccatctctttcctcagaatcgatgggcaaggaaacacgtgcaccggtctctacggcggacgatacagtcagaac

SEQ ID NO: 2825 - DNA, 472 bp, Arabidopsis thaliana landsberg
tggagacaaagcagacgagaggtgactttcctcggaaagacagatcacacacgcggacagtaccagcactaaacagaagatcaaatgaccatggcacagaggcgcaaaagccgagaattgcaagaaattgctatagtgcaattggcacatgtctgcattgaactatgacttttacttgcttcaatgctcatcgctaactagtatgacgagaggaatactcgagcccacgacaaacatctacgattacaaagagaaagagagctagctgacgattgcatagaactagcccttcctgcacatatagaaggaaaaacaaaccttaacatcaaccatagatgagagacaccgtgccaaagagtcatagccaatgaccgttcgtgctagcttgacagcgatgagtgctgtcaactcgaagcatatatgtattatgaaccgataaaattatccactttatatgaaacgtgctaagaag

SEQ ID NO: 2826 - DNA, 405 bp, Arabidopsis thaliana landsberg
  unsure (1)..(405): unsure at all n locations
ttgattaactgacctgatgaataccactttcatgcgcaaaggcgtttgctcctacaatagccttatggggctgcgattgcataccagtgtactcctcaacctgagaaaatgagaatagaccttaaaaaaaaggagaatcgccaaataggaaaaatatactttcgttgccacagagacaagaaagaagtccaaaatgtgtaccatcttgcttgtcataannnnnnnnnnnnnnnnnnnnnnnnnnnnnnnnnnnnnnnnnnnnnnngctccacggaatttgatggccctgacaacctacacagcctgagtacaatgcataggagatcatgtaagtatctatgtgcagggcactatgagaccatacactgtacataacttacgtcataatgtctccggctgtctgat

SEQ ID NO: 2827 - DNA, 521 bp, Arabidopsis thaliana landsberg
  unsure (1)..(521): unsure at all n locations
aggtaattttactgaaacacttactattagatccgttatagttttctcaaagctataattttctggggggctctgtaagtatgtcagtatccggtgtcaaatcccacaagttctgcaaaaaacaattgtaaaccatcatcacagaccaacttaaggagacaatgagataataagcgtatatgtttcagaataataatactgacctcatacatggtggaagctataccagaaccgtcctgacccatacatagaaattgaggcagaaaatatcagaaataagaagatggaacaaaaagagacaaagacttgaacaaagaaagaacaactcacatcaagacgtattatgtggcacaagtcaggcttaaacgcagcaaagcgaacaatgcctttcatcttcccaccannnnnnnnnnnnnnnnnnnnnnngcctgagttccaatcaaccttcatcctcttagacatcaaaagacaatcttttcgtgcattatcatactccttcttcaccaagttgacaaaagact

SEQ ID NO: 2828 - DNA, 348 bp, Arabidopsis thaliana landsberg
  unsure (1)..(348): unsure at all n locations
gaaaccaggagcagaaggggccgagcggggnggaaaagaagaacaacgaggcggcccaccaggcgcgggagggcaaccacaaagcgcagaagaagaccgcaagagacacgaccagacaggaggagccggccaangagaccagccgcagcaggggaccagacagcccaccagccacccccaaaaaggaacaaggcaagaaggggcacaaaaacgagccgggacccagaaccaaggcgaagaccaaaacccaagggaaccgcgcaggcccgaaaacgggaacggngaggaagcgcagacgggcaggcgaagagaaccnggccacacacagaagacccccgaacaaaaaaa

SEQ ID NO: 2829 - DNA, 1542 bp, Arabidopsis thaliana landsberg
tgtgcatctgtcagattccagagcgaagcttaagcgtgtcgcatatctgtgcttgaccccggcgggtgaggtgatgactgcagcagcgcctgcccccacatggcaccatgcgccgttgcaatggattgtccaaactttctctgcggatgggtccggttgcgttattggcccagtccagtcgacgacgaagtctgctagaacttgtgacttgatggctgtcttgggctcgaaggtgatgtggtagccggagagttcggccgcccatttggcgatccgtaccgatgcctccgggtttctgaacaattcgccgagtcccctatctgaggtgactcggaccttgaatgcttcaaaatagtggcgcaatttgcgcgaagacataacaactgcataggcaatcttttccagttccgtcatgttacattttgatggtgtgagcatttcggagacgtaataaactggatactgcctgatcacgccctctactgtcagctcctgaaccagcgccgcgctgaccgcgtgcggcgaggctgcaacataaagcaacaggggtagcgaagagtcggggcttgtaagaaccgccaattccgacaggtactgttttaatgaggcgaaggccgccgcctgctctggtccccaagcgaagtcttttgcgccgcagagagttttgaggaaggggagacttcgctctgcggagtttggagatgaatctgttgagggtggcaatctgcccgtcagcgctggacatctctggctgactgcgggggcgtcatgttgatgatggcctagattttggtcgggttggcttcgatccctcggtgcgacaccaggtagcctagtatcttcccctggcggacgcagaagacgcacttttcggggtttaggcgaagtcgtgcatcccgcatgttcgcgaatgtttctgcgaggtcagccagatggtcttctttgcttttactggcgacgactatgtcgtccacatacgtaaatatgtttctaccgatttggctctcgagcaccattttggtgaggcgagagaatgtggacccaacgttcttaagtccctccggcattttgatgaagcaatacgtgtcgaagggtgttatgaaactggtaatggccttgtcttcctccttcatatatatttggtggtagtcggagaagcaatcaaggagtgacatgacttcgcatccggccgcactatcgatgatcttgtcgatccgaggcagcgggaagttatccttggggcaggacttgttgaggctggtgaaatcgatgcacatccaccacttgccgcttttcttttgcaccatgactatgttggcgagccacgtagggtaggcgattggcttgatgaagttggcctccagcaggcggtgtacttcggctttggcggcttctgttttttcatcagacattttgcacagccgctgcttctttgggcgcaccgaagggtcaatgctcagactgtgctcgatgacggagcgactgactccgaacaggtccacggtaccccaggtgaagacgtccttatttcggagaataaag

SEQ ID NO: 2830 - DNA, 1166 bp, Arabidopsis thaliana landsberg
gaatcttcaaaagcaccgcgggaaaatcctagctgcttacaactgcaactactttatgcggccgagtatcttccctgagtctcgtttcgaaggggacgaagagatcgtttatctacactgcgacgccgcgcaaccctcgatgacttgcgacggtttactctgcatcaccgaacctggttggtttaacgttttgaacccatccgctggacaactccggcgattccctcccggcccaggtccagtaaaaggtaaaatctaacattatagttgtttgtttcttgcagtgaaagaaattaaaaatatttacaacttgcaggaccgcaggaaaattggctattgggattcggtagagacaacgttacgggcaggtataaaatagtgaggatgtgttttcatgattgttatgaatttggtattcttgatattgaaactggtgtatggagcaaactgaggtcacctcctcataatatgcttccgggaagtaaatcggtgtgtgtgaatggatcaatctactggttacaaattagtgcgggttacataatattagctatggatcttcacgaagaaagctatcatggtgtccaccaccttccggctacgtgggtcacgcaggaaaccagttagtgaaccttgaggaccgtctagccatggccatgaccaccaacgttgggcctgaatggatactagagatctggagcatggatatagaaggaaaaggatggagcaagggttactcgtggagcaagagttactccataagtttagcccatggagttggtttttcctggccatggcagaaaaggtggttcactcccgtgtgggtttctaagcaagggaatcttctcttctatgataatcacaagaggctgttcaaatattattcaggtacagatgagattcgttgtctctcctctaacattaatgttatatcttcttacgttgaaaatttggccccacttccgttaaaaccaagccatacgcatcacgatcttgggaattcgaattccaagttcagcacatccagatgccacttgtttccgacgcgaggttcttggatatccaaagtttttagaaggaatgttttgtttacctctctagtagtagttggttatatatacttacctctctaagagtttacttatttagtatcaaactaatattgtggt

SEQ ID NO: 2831 - DNA, 565 bp, Arabidopsis thaliana landsberg
  unsure (1)..(565): unsure at all n locations
aatgctcgacaggaacggttatggtaaaattatcgattcaagagcttgttgtttcattggagaatctaggaatctacattgcagggaaagacttggtgcagatgatcgagaagattgatctcaacggtgatgggtacgtggacatcgaagagtttggagggttgtaccagacgataatggaggaaagagacgaggaggaagacatgagagaggctttcaacgtgtttgatcagaaccgggacgggttcatcacggtggaagagctaaggtctgtgttagcttccttggggctcaaacaaggaagaaccctagaggattgcaagaggatgataagcaaagttgacgttgatggagatggcatggtgaatttcaaagagtttaaacaaatgatgaaaggtggtggatttgccgccttaggatcaaacttgtaaaaaaaaaactcatttttcgggttcgggtttgagacccaaaatcattgggtatttttttcttcggaatgattattanggcaaaacctttgaagcgatgatgaatggatttgcanaagaaaaaagctcaacaaact

SEQ ID NO: 2832 - DNA, 507 bp, Arabidopsis thaliana landsberg
aagcaaccgcccctcttagctaccattcaacgcaaaataatggaaactttcaatttataaagcagtgatggattcgttcatcgatcggggctcctccaaaagatggccaatgaccatacaagcacatagaagggcaacaaagagattaagtgaaacgacagatgcgtgatcagaagttgacaccgatagcattttagaggttaaagaggcgaacattgtcatctttctttttccctttttcttcaccaatgacgtgtaaaatctattaagaaatcaaagaataactgcgtattcaaaatctctcatctttccggaccctccattccaacaactccctgtattacaatcagcaaaagattccctataaaccacgtaagcatctaacattgtaaccaaatcggaatctataatggcaaatttatccaatcttcttaacttatcagagcatgctaaacaaaattaggtcgaacttaatcatcactaattgcgtttccgaacaatcaaaca

SEQ ID NO: 2833 - DNA, 539 bp, Arabidopsis thaliana landsberg
aagctatcagtgttgtaattattctgcaacaagacctttatcgtatctccagcttgaagatcagtgtctattttgccatacagctttgtaaatgttggtaaagccgcggttcgcatccagacaattagatcttcttgctcactcaactatcagaaccatacatttttaaaaatgtttagatatcgattgatagcgagtagattggttcatctctcttatatatcactttagattattattttccttaaaagatgagatttcaatacatcaaaaagacttactggaatatcttgatcaagacttttaccgccgatgagagatcctttctggaaattttttgggaagacatttttaccaaactttgattctctatcactcttccacgagatgtctttcttattcactggaagtttttggttgtttctagtgaaatcataagtatcattgaacaaactccaagcaacaagaccacaaggaacaataggttgaccacctagtgtattctccgggcacatgatttggtatccgttcatcttttg

SEQ ID NO: 2834 - DNA, 260 bp, Arabidopsis thaliana landsberg
  unsure (1)..(260): unsure at all n locations
actaaccctgctgaagaaagcaatgaatttatggtttattttgtgaaagatattgggaccttggggatcgagtaggagaaaatgacatacacttcagactactttcctgaactgatgtaaatggcggaaaaactcatgcattnnnnnnnnnnnnnnnnnnnnnnnnnnnnnnnnnnnnnnnnnnnnnnnnnnnnnnnnnnnnnnnnnnnnnnnnnnnnntggtcaatcaatctcacattaagtgggtttgattatttaat

SEQ ID NO: 2835 - DNA, 585 bp, Arabidopsis thaliana landsberg
tgatcccctatccccctatcttttcatcttatgcagtgaagttttgactggtctatgcttgaaagcacagcagagtggaagattacgtggtcggcgtgttgctaaaggtcgccttagagtgaaccacctattatttgctcatgacaccatgttttttagttgatcaaaccccgatagctgcaaggccctccttcttattcttaaaaagtaagaagctgcatcgggacaaatgattaacaagaccaaatccacaatcaccttctcaactaaaacccctgaaagcatcaacattgaagcacaagctatattaggtattcaaagtactggcggattgggaaaatacttaggcttgactgaaatgtttggaaggaaaaagagagatttgtttaaccaaatcattgacagaataagacagagatcacttagctggtcctctcgcttcttgtcaactgccgaaaaaactactcttctaaaatttgtgttagctgcaatgccaacttacacgatgtcctgcttcaagctaccggtgtctctctgcaaaaggatagaatcagcccttactcgattctggtgggattcaactgc

SEQ ID NO: 2836 - DNA, 609 bp, Arabidopsis thaliana landsberg
aaagagcaaataatattaacaaaacaaatacaacataaagtttcttatttttgtttataaaatatcatctcgcggtgtaggatacatttaaatcaaacaaaataatatatagactatcctaaaaaacagttcaatttttttatttaataaaactataggttcacggtttacaacggattagtatcttgtatattaaaaaaattgacttgacactggtaaacatctaatagataaacatgacacatgtgtatagtttcgttataatttttttctcaaatttttatttttatttagtaagatacatattgcttccttataattatctttttaaaaatttaaaaaattgttttatattacatgtcgtttccttataaatatttctttaaaatcaataaatataaaattttgattacatgtgtcaaaatctgagatcgataaatttgacatatgtcatgattctatgagttactaactttgagaaacatactttatataataggattttcttatatttcttcctcaaatttctatttttatttagtaagatgcatattgtttgcttataattatcttttgaaacatttttcaagttgttttatattacataag

SEQ ID NO: 2837 - DNA, 171 bp, Arabidopsis thaliana landsberg
ataacgcacctcttaaaccctaaatctatgtacgataaagtcttagacagtgttaataccgtcatgacatcttcgttattaccctagaataagacatgcatttcttcctctttaaaagtcattatagcactggttgtatctgagcataagaaaaagaaagagaagaaacaa

SEQ ID NO: 2838 - DNA, 538 bp, Arabidopsis thaliana landsberg
  unsure (1)..(538): unsure at all n locations
cttgcaatttaggttcttacttttttggaatttttgtactttgaatgatattgatatctaaattttagtagttcaaatggtaaagaagaatttcaaagaatcagttaatctttctttgggataaaattttttaatttgtattgtttcaggtgtgttctactgtggaagtccaacgcttgttcgaccgctaaaatcactttgtcaggagttcagtctcgagtcgtccacccgctttacttttcacaaagagaatttctgaccttttttcttaaaaatgttttcggtaaattttgagttcagttattcacttaggaagtattattggttagggatttaaatagagttttaatgactgaaaatgttttgtagaaaatcttgttattcaatcatgatttttaaacagtttataatagtttggtgttattagtttaagatttgttcaaatttcataaatagtgttattgcattcatattattagaaagtcaataaaaattttctggtattcagnttgaaaaaaaatctctgattggtaattaa

SEQ ID NO: 2839 - DNA, 534 bp, Arabidopsis thaliana landsberg
caacattagctattgtgttataaataacactatacatttttctgtatacattataatttatatactattatatctttcactaaaaatttattccaacacatttcttaaaatatgaaactccgcacgtatgtgcgggtcagaatctagttaataatattggactaccagttaaaccagaaaaatgatgtaagatgcaaacatttaacaagagatctatgttaatactgtagacatgtttttcctctgaaagaatttgaaaaatgcaatgaagtgatttaatcgagcttggtttaaacagtatggtaactaacaagggtataatatataagtagataaagtcatctatttgtgttcctatttagatataactaaacaaggtggaaatgatgcatagtcatgatgatccgaaagagtttgcaaatagagaacttttttagaactagctagtcaatcccacaagagtttgcaaatagagaactagctaagtaagggtattttggaaaatgctggtttctctagttatttagaaagata

SEQ ID NO: 2840 - DNA, 329 bp, Arabidopsis thaliana landsberg
atgatgagccatagtattaatcgcttaatgcatactctttctttttcaattgctccagctctgctttcagatcactggggagaatctgctcacactaaactttattgccttcaaacgcaaagtacatcttccagaacatcttcttgaccctctcttcctccatatcaatctctagctgcatgtcccgcagaatcaaaggccccttctttctacaataccctattacgaaatcttgaaaccccgcgagtggccggtccaggatatctagcatgcggttacatgacttgttcttgttcatcaacacaatctgttgaatgtggagaaacaca

SEQ ID NO: 2841 - DNA, 1395 bp, Arabidopsis thaliana landsberg
  unsure (1)..(1395): unsure at all n locations
aaacattccagcgaatgaagaatctttcaaatcgatcaagaaaaagagtaaaagagagattttatttactcttcttttttttttgaaaaaatgttaaattatattcaaaaaaaaacaaaacgtttttacaactcgtgcaacgtttagcaaaatgagaaaagctgagaaaaaaaatagttagaaattaaaggtgtttagagaatgtttagagtgagctgtacgttgcccttgtcatatcttcgatcacctgcttatctatccaagttatcaagtgtgacgtggtgttcggtgtttctccatgacgacgcccattcctctctctccaaactgtgtgtattgtagcttgaaagacataccggattaagaaaccatcgactcgctgtaatgacttgtctgaaacataggccagaatttgtggccattcctttgtgaatctggtcttccatagcttcttagctacgtcaccccaaattgtcgagacatagttgcaggagaaaaacaaatgatcacgagtttccatagtgttagtacaaaacacacagagacccgattctcctctgttccatttaaccatatgctcccctgttgagagcctatcttggaccgcgagccaagtacaaaacgaaaactttggtgtggcgtgattgaaccaacccccgttgtaccaggggactgtgggagaaggagctctgatatggtgccacgtttctttggtagagaatgatgcattgtacacattatttcgccttgtctctgtactttagtatttttctccaaatccaagagcctgcatttgtattctgcttcaatgtccaaaaatgcttcctcctaagaaggtatgtggtgacccattgaacccataaagacttgctattagaaatgattcgccagaccaactttaaacaacaaacatcattagcttttgtcaagcttcgcaaacccaaacccccctctattttcggcttacaaactttttcccacgatatctttgccttctttgaactcagttctaaacccgaccataggtaagcggagcaaatcttgtcaatctctcggatacactgtctcggtaaacgaaaagcgcctagccagaaattgcaaatactccagaggatagattgaatcaagttgagctacctgcatatgagaggtagcgtgaagtccacgacgcgatgcgtttcctaatctgctcaagaagaggatcataatcctcagccatgagtctcttagtaacaagaggcaaacctaagtatcgaacttggcattgacctatatcaaaagggaaaagagctgcaatctctgctttaactaaagtgatactcctgccatatacattgtcgactctccatactnattttttttttttttttttttttttgaattaaggtaaataga

SEQ ID NO: 2842 - DNA, 442 bp, Arabidopsis thaliana landsberg
aacaaagaaaaattggaatggattgttgtttattttgcttcttttttcgaaatcttttgaaattgatattttgggtagggttttacggatatattatttttaacactaaaaaatgtttgtatttaagttattttttgtaaatatacgtattttatgcaaaatattaaattctaaaaacaacaacaaccgattaaacccaaacataacgaataaaaggtatgttaaatcacattttctgtaacgagaaaaaggacaaaatccacaaactattctaaagaaggcaaaatccaaaaaatatcatccaaaaaaggacaaattcataattgattcaaacttgaaagctaaatgttgaacattgacataatgctcttgatgtgacattcataaagacaagcatgttttcccatatgacatgtcagaacaaaaagtaatactatttttt

SEQ ID NO: 2843 - DNA, 1268 bp, Arabidopsis thaliana landsberg
caaaaacgtggctttgaccagaatcaaagaaatggttttggccatactattgaatagtttgattttttcagcgtattaaacaaagatttacaataataaaaccaaatgcttcacctattgtctattgaggcaatttactcagcagagcagaaatgttcttatggactttagttggaataaattcaatcccgggccttggatttcatttgtgaaacctgaggtacagttgatcttgtgagtcagtcatcaaatgagcaactgggccaaagtaaagataaacccagctcatgtccagttaccaatctaagcccacacactaaatcccagaacacgacaaaggcaaaaccctctaaagcttgtgtacctgcaaaagacgttgaggtgaagaagacgacgctcctcgattcaaatccgtttcaagccttatcctctttagctgatgactagtcaagcttacagctgtccaaattgataaggattctagattgttctctaagagtctataaagtgaagtgtataacgttctatcaagatattgagaaacagagtaataagattcaaagtttcatattttctaaacttcttcatggtatcagagccattgtaagctctcacaggcacaacaatggcggattcctatccctttcctgataacatccacgtttcaagctatgttactataaaattcaaagactacaactatctcctttggaaaacacaatttgagagtctcttgtcctgtcagaaattaatcggctttgttaatggtggaatctcaccaccaccacgtactctcaacgtcgtcacaggagacacctccgtcgatgtcgcaaaccctcagtatgaaagttggttctgcactgatcagctcatccgttcatggctttttggcacgctatcagaagaagttctcgggtatgtccacaatctccaaacctctagagatatttggatctccttagcagaaaacttcaataagagcagtgttgctcgtgagttcacgctccgccgtactctgcaactcttgtcaaaaaaagacaaaactttatcagcgtattgtcgtgagtttattgctgtgtgtgatgctttaagttctataggcaagcctgtggatgaatcaatgaagatctttggttttcttaatggtctgggaagagagtatgatcctatcactactgttatacaaagctctctgagtaatatttctccaccaaccttcagagatgtgatttccgaggttgaagggtttgatgtaagctccagtccct

SEQ ID NO: 2844 - DNA, 372 bp, Arabidopsis thaliana landsberg
  unsure (1)..(372): unsure at all n locations
agagggggattacctgataagtctgcttgtcattcgttgtggaagagctgaggggaaacatggggtcgggatccgattgctcagtagcgagctgtagagacacattggaaaaacctacacacagaggatcatactgaccgtctcaacagtgctcgagannnnnnnnnnnnnnnnnnnnnnnnnnnnactctttgggttgacacagggattcaagctgatctggagactttccacggcgacagcagcacatggtagagatacttggtgcaggtgcggtttcccctgtttagacatttaaacttatgggtgtatatatatctgtggagcatgagtttacgataagtagccaacatataatgatgtaattgaatt

SEQ ID NO: 2845 - DNA, 603 bp, Arabidopsis thaliana landsberg
ttacgaccgccgcccgattgatgatggtcggcgcactgaatctgatttcggtggctttcgcggtgttgttcatcggcctcggcgtcggtttcggcattcagtacagcgtgcgctatcgctcggagcgattcaaacacgacgacctgcggatggcgctgctgcgtggcgccaagcgatcagcggtgccgctgtcgctggcggcggtggcgacggcagcgggtttcctgtcgttcctgccgaccgattacaagggtgtctctgaactcggcatcatcgccggtgtcggcatgatggttgcgttctttgccagcatcaccgtgttgcccgcgctcctgatgctgctcaacccgcccggcgaaagcgacgccaacggctatgccttcctcgcgccgggggatcattttctcgagaagcagtcgcgtcccgatcatcgtcggcacgctgctcctgggtgatcggcggcttgccgctgctgtactttctgcacttcgacttcaatccgattcatttgcgcaatccgaaggtggaaaccatcgcgacctatcttgatctgcgaaggatcccaacaccggcgccaacgcattaacgtgatggcgccgaatg

SEQ ID NO: 2846 - DNA, 568 bp, Arabidopsis thaliana landsberg
aagtctgaaaatagccaaatagccatgggtaaaaaataaattaatttcaaacttaagataaacatacaacaacctattgggggttatggtaaaaaaaagtaaaataagtactaattacacgaaatccaaaaaaaaaaagtcaatattggaatattaacaacttaagagaaatatgcaacgagaatcatggggaaaagcaatgtcatttaataaaatagcatgtcatactaaaaaatataggagtaacgtgtgattgctatgcaagtggcgatggtggttgttgatggttacgaaagtggtaatagaaaaacggatttaatgactcttgattgatcatctttatatttttgggggatatgcaaaagtaccatttttgtactacccttttgcaataatacatttttcttttgtctatttttaaaaatacccattctcttaagtaaaatgaccaaatgaccctcatctaatgagaactctataatagctgtctatgtaacaaatttttccggctaaaaaaaatgcatttaaaatcattgtaaatatgttaagaactctataaaacaccttg

SEQ ID NO: 2847 - DNA, 543 bp, Arabidopsis thaliana landsberg
  unsure (1)..(543): unsure at all n locations
atgatttaaaccagaaaagtgatgatgagtgtcttgcgacaagttaaacacactaaattggaagttttgagttcttggtttttatggttattaggtacaattttctttcagttgtgaacattgttagtaagacaatcatgttatctcttagttgaaggggatagttttttaatttcaaaagtacagagatacatgttttcagaaagcaaagttggaagctaaaaagtagcagattctgtggagattgaggttgtatttcccaaaaaagcaaagtagatcattagaagaaaaagacattatggtgaaaaatctgagaagggtgaaggaagtgtagtattgtcaccagaggagagctttagaattgaccactatattcaaattatggatcaagctctccactcagaggtatggacaaatatttggctttttatttgatttgaagaaattgcagtcagggcgagaaaatatagtttgatggcaccttgtaccaatcttgaagcttntttacctttggaaatcattctgatattgttagtaatgatc

SEQ ID NO: 2848 - DNA, 1245 bp, Arabidopsis thaliana landsberg
  unsure (1)..(1245): unsure at all n locations
aatcttacttgttaaagcttctaatcttattgaagatagcaaattatctatatcctagtgttgactttgattgtctcactctgaccggagtaaattcctgaccacctaatttgatctgtaacttggttagaggttgtagtgaagggtttaaaataataaataaattatttgtatatcatagaaacattattagnnnnnnnnnnnnnnnnnnnnnnnnnnnnnnnnnnnnnnnnnnnagtgtagaggacattcatcaataatttcagaattatgactttgtgataacaaatgtggtatatacaatgttcactacgatttggtgttacgtatgattttgaacgatctggcatctataaagatataaccattaagttaagttttggaaaattaatcatcaattaagatatgaaatacttaaataaactatttacaaaaatatggatgatctaatatggttttttacacctagctgagattgtaaaaggctgatttatgatggacaatgtgattcttctattacaacaggagttaaatttgtaagatctgtaaatactctatcgtaattagactttataggaacacattgcttagcatttgatgcattatgttgtgtaacattctattacaatctagaaatgggagtggaacagttcctctttgcaggatgaaatgaatttgtgttgctatttttaccaaattccatttttttcttcattattctagaaaaacacactactattacgaattgaaagttctgagaaactaaatgatactgctaaagtatattatgtagatttgtataggaaataataattatagcttttggcagttactctgttttgatttgtgtgtatcttaattgatcttttgaaaagatcttttgtgtatattaagctatcataagaatgtgaatatcatgtaaaataaaaatttgaggctttacaaaaagagtttaacctaaagattgtatccatgccaaaaagaataaaaaaacattggtcacaaagacttgttgagtgtcaatcaacttgttagcagatcgatatagttatctcaaaaatttaacatgtggttaaggaacatttaagatgatatataaacatcttctcaagaatcgatgcgccattagttggaacaaccttctcccactactctcggaccccacctctgaagcagcacaattgttcttaccaaggtacgatttcaagcttcgattcactgcatatgagagagtgaggctgttcc

SEQ ID NO: 2849 - DNA, 863 bp, Arabidopsis thaliana landsberg
aaggatttaaaaaggcttaaaggaaagtccttgaagtaagagaattttgaaatgaaaagatatgggggccgccacccaggatcttgggaatagatatcataaggaaaggaggtaaggaactctttgttgtccctaggctagttacttggaaagagtcattcagaaattcataatggatggggctaaagtagtgaatactccaattggtgctcatttcaaattatcatcagttcataccgatgatgaaagagtagatcctgagaaagttccctactctagtgttgtaggcagtctcatgtatgctatgattggaactagaccggatatagcttatgctattggactggttagcaggtttatgagtaagccaggagaagtacattggacagcagtcaagtggttgttgaggtatctaaaaggatcaacaggattaaacttgatgtatactaaaggatctgattttaaagtgcaaggttactgcgattcagatcacgctgcagaccttgacaagaacaggtctactagcggatatgtgttcatagtgggtggcaatactgtgagctggaagtcatgtctgcaaccagttgttgctttgtcaaccactgaagcagaatacatagctcttacagaggctgtaaaggaggctatgtggataagaaacttgctagatgatatgatgcttggaactgagactgctgaagtgtggagcgactcacagtctgcattgtgcttgtcaaagaacaatgcatttcatgaaagaaccaagcatattggtaagaagtatcatttcatcagagacattattgaagcaggtgaagtcggagttcataagattcatacgactaggaatccagctgatatgc

SEQ ID NO: 2850 - DNA, 452 bp, Arabidopsis thaliana landsberg
caactctctccgtaacattgtcatctcttacttatacgatttttacttatatatgttttacctacgattgacaatctgtggctctatagtgaagactaaaacgaacggttttgcttgcagcattctgggatttttgattagtatgccaaactagattattgaaaaagttaattaattatattaaccaacccaaaatgacgttattagctcatttgatccatgttttggattgttgacaaaaaaaaatcttaaaagagcgtttcgaatgagaatacatcggcaaatatgcaattcaaaactggaaaagaatatatttgcagctttccaaaatttaagataaaatgataggaatcctataaaaaaatactaaaatatataataattgtccctaaattcaatatacagatttttgtttttaattattttatttcttctaaaagttaattatttat

SEQ ID NO: 2851 - DNA, 573 bp, Arabidopsis thaliana landsberg
tttcattatttcatgttttgttttcactcacacggatccgacattaatcacttctcctaaattcacccatcaaaagacataggtgtcaaaatcaattcttttaaacatttctacatgcatcaccatatttcatgaaactaaagtgttacaattcatccctctagcacatcgtatcgtcctggttgcgcatcaagaccgttacaatcgactttgttaaccctcttaactccacattcgtctgggtttggctctgataccgtttgtaactccccgacctccatctttcttagtgaccccacgtcctctctcggctcacgggctcactcttacccgatagccgatccattacgtttacgaggctttaaaggcttgtttaccgatcctacatatcaccacattatattttctcgtgttttatcctcgctcatatacagttgcgacaatcacttcttggaaggtcattccctgtaatttttctaacttaagcacgcttaattatgaagttcttttcagatgtttgactgaaaataagtgcaatttgatgatatacgtggtcaaatcacatttttaaaa

SEQ ID NO: 2852 - DNA, 486 bp, Arabidopsis thaliana landsberg
catctcccctaaaaatggaactaagtttacctgttgacaccatcctttcttttcatctctacctttgttatccatctgagtctatggtctaacaacgacaacaatgacaaaccatcatcaagagtccttaaccacttaccctaaaccgggtccaaccagagaacaagaacaagttgacgaagaaatgatgagcatgcaaatgcaagcgttgaggatcacaaactcattggcttgatccatggatgtcaaagctggcttggagcttggcgtgctgcatacgattgttgcccttgaggagggcgtatggatctcgccttccgagatagcttttggactccctaccaagcctaccaacccagaggcaccgatgttgatagaccgtatgtaacggttactcgtcagccactcgatcttgaaatgtcagttagttgaaaccggagaaaacaatcgaaccgaaagtacccaaagggtatatgcagcggaacc

SEQ ID NO: 2853 - DNA, 1855 bp, Arabidopsis thaliana landsberg
  unsure (1)..(1855): unsure at all n locations
aatacatgaaaacaacgttcttttttatggaaatatatctgaattaatcagactgaatacaaatatggcaatgccgagtaattaagccacacacttggcttgttttattcaaaccataattattcactctagttaccactgagtagtatacaacaattattaaaaagtaaaaacaaaacaaacgatacgtagccaaactgaacctaaccaaaccggtttagttgtttttggcggcgttttcaaacgaccagctccaaatatcgtgacgctcaacggcacgtcccatggaaccagcaaaaccggcgtacatgttttgaagaagaacttcgttgagcactctgggagcttcgatcaaagccctcttaggtttcttaacgttttcaggcgccagtgtaaccgtaatcgtagagtctttgtttctgaactcaacccaagccttgaacctctctccactgctcagattcacatctttaaacgaccaaacttttctttttccgactaatgtctgaacccaataaccagctttctcagcgacaagagaagtcatcgagttgatgttgattccgacatggttaccactaatgtcattagactcattgttcttaaacgtgtcgaattcgataaatatgaggttgttttctgactttccatcgttggttttgttgaggattccgagatatcctccgccggaagcgccggagttatcagcggctgggannnnnnnnnnnnnnnnnnnnnnnnnnnnnnnnggtttggtgcgaggagtgatggagaaagtgaaagaagttttaaaatcaaaaggagaagaagtgtttgaagatttgaattggattggattgatgtaaagaccctgaccatgagagaatggggtttcgtctcgggtcatggaaagagctccggatcggcttacgccatcagaggaaggaccaagctcagcgtctccaaggaataacaagttgctgccatcgaaggaatcgaagttgaatttgacggcaaaagctgcgttagctaagaacagaacaagaaaacagagtttgtgaatctgcattgtgtgcgtttttttttttggtgttgttgttttttgtgattgaaagattgatgatgaaaatatttggaggttgataatgtgtttatataagggataacgtaagccatcgagtttgaatattcaaatttatacttcgaaaaatggtcaaataaattaagccaagtggattcgattcagatcggacgccaccacaaagggccttgcagtgaaaatggacccatcagatgtcatgaacaaattaattttattcttttgataaaatataattgattcgagtaataattaattataagaaaaaaaaaatcgattataaattgttttgaataataattgattgattatattttcttgtcccctttctctacgaaacattacgaatttcatgcgtcgtgtacatatctgtaagacatagccacttttagtttatatgaactattttcgttacgtggatgcaaaatacgtttttctgacgtctatataaatacactctggaaaagtttacgttcagaggagtttacgtggatgcaaaaaaacgtttggcaatctcattaaaaagttttttgataaaaaagaaagataaaagtaatcatgctaataattaagataacacgttttaacttttacgtgaaatctctttgattcaacaaacataaaaaaaaaaaaaaaacattgataagaaaacactttctcttaaaccaattacaaacctcaattaaaacacatatcagttgagaaaaataagaacacacatatgtttatttagtttaacttggaagatgtcttcttctacgtatgaatggtcttcca

SEQ ID NO: 2854 - DNA, 409 bp, Arabidopsis thaliana landsberg
ctcctttgcaagctaatttgtttttattgccatatatgggacgttttgatttatcaccgtttttatctgcaacaagaagacttggagcatcagtcaacaccctttttctgaaagcctcattcttagcagcatcacgcttttgctttgctgttagaatcaggccttcttgcttcttctccattttcctgatctttctcttctgcctaatctcttcagcttccctttctcgctcttcctctatacggcgctcctcttcctctttcctcaatctctcttcttcttccttcttcttcctctcttcagcttctttccaccgcgcaagagtctcttgcttctctcgaacatgtttaggaactttcttttccgctactttaatctttacatctttcttcccttgtctatcctcctt

SEQ ID NO: 2855 - DNA, 609 bp, Arabidopsis thaliana landsberg
ggtagacactagggttttgtgaaagatgtaagtttgtaattgtaatgttttttttttcgacagcctttttacttcacgctttgccctaagaatcttcttggtctcctccgggaacggtgttcaaattttaatcctccttttttgttttttaatcctcagtaaccgatttacgtatataatcctggaagaaataatctcaaccaaaaataaaatgtgacactagttactagttacgagtgacacaagttgaatatctcgaaaaaaatagttggacggttggacatttaatttgatatattttttcaaatgggtatacatctatatggtcaacatcagcaccccatttttcattagttgatctgtattaggatatacttcaaataatgagatgtaatactattctaccatataaggaaatctcattatgtataaatactcttcttatgttaatgaataaatcaagttctttttaattatatcatggtattagaatcatccaatcgttggattattcagtggatgttgtttccacatatacacacgcttcagagctaataatatctaaacgtaagaaggtgttaatgaagaaaatcccatatcgaaatttga

SEQ ID NO: 2856 - DNA, 623 bp, Arabidopsis thaliana landsberg
  unsure (1)..(623): unsure at all n locations
ccttcagcggtgacggcgttttctagttcgcttccggttaacataccgatgaggaggtattcttcggatttggaatattccgatgacgacggaggaaggaaannnnnnnnnnnnnnnnnnnnnnnnnnnnnnnnnnnnnnnnnnnnnnnnnnnnnnnnnnnnnnnnnnnnnnnnnnnnnnnnnnnnnnnnnaggacgagatctgagccgggttcgtaattcggttctcaaattaaccgggtttttggaagcttgaaattggattaaaccggactggttttggattttgattaatttttttcgatcttccaatttttttttttttgtttttagtcgaagaagtaatcagcggttctcgtaattgtttttttttttagtttgatttttaattgaatgtcaaaaggaaaatgtcaaaaagaaaagaacattaatttccttgtttattcttaatttttgattctcttaaatgtcatagaaaaaagaagaagaaaaatataagttttacttttgctctaattggtgttctcattaacactacttttgcgctgacgaaattgaatttgtcgcaagaaaatgaaatttatgaatgtattatgaagatccttattattctgttctctaatg

SEQ ID NO: 2857 - DNA, 564 bp, Arabidopsis thaliana landsberg
  unsure (1)..(564): unsure at all n locations
agaatggaaggagatgtgtattctggatttggagagagataccaattggatggtaagttgttgcagaatttccagaagaggtttgttcaagttcaagacattcttgatcagaaccggctttnnnnnnnnnnnnnnnnnnagaaccatgagtcgaaacaagctgatcacttgggaagaaatgttggtttgataagagagctcaataacaatatcagaactgttgcaagtctttatggagatctctctcattcttttgctagatcggttgatgcttcatcggaaggcgaatctaccgggacattgaaatctgacggtaaggccaacaaccagaagagatttagatccggataatataaccaaaaacatcttgattttgtagattcaaagctaatttgattgtggattaaggtgtgtcatgtctttgttgttgttgttgtggaacagttatgacattaatattgcgtttcttcttaagggtcttcaacagttttgcttatgtaattcctggtgaatgttatctacataatgtctatgtctttgattctgagataataaataaaagag

SEQ ID NO: 2858 - DNA, 661 bp, Arabidopsis thaliana landsberg
tttgataaagtcaataataccataaaagtttaaaggaaacaacaaatacataaataaagaaaattaggaaataataaaaatagaacatattgaaaaggtaaaaaacttcacatttcaataaagcactaaacgaatgaacgaagaatgttgaacactatatatagtgatagtcaagcaaggttacaatattgaccaatgaccatcaatatctatactattaagtaggggagtaactcgcaccttgcgcggccaagaattgtttttcaaaattaaatttaaatttcaaagatcaagcataccggaatttttgaaattcgatcaaaaaatttcaaaaacagtatcttcttgaattaatcataatttagagtgataagttagagacattaaagaaattaaaaaatatatattatatggatataacaacacttatatttatatctatttacccgtatcaaaagcatgtgtcatataatgtttaggatattaactatcacattgcacccgttaatttcacatttcaagtcaaggacccaaaatactttttataggatcaaattatatcttaaataataagtaattaaaaaacaaaaaaaaaatcatttcttttaaaaataccaaaatttggttcactggttatgagtgaatcaaacaaaaatttgaa

SEQ ID NO: 2859 - DNA, 3603 bp, Arabidopsis thaliana landsberg
atcccatacggatcggaaatccgggaagtgaaacgattatgtcttgtatgagcacgcaagagggttccattaaatcaaattgcgaatggtaacgctctaatcataaattatgtactttattgttatagtattattatccaaataatcatgttataaatacattatccaactgtccatcatcttctccatcaacaacattccaaaataacaacgatcaatatcacaatggaagctacactgttttcttcaccgccttcgatttcaccactccgattccatccactggttctttctcaaagagccatcattcccaagaagaagaagatgacgatgagagtctctgctgcggcgtcatcaggaaaagatcattactgtggaggaggaagattggtggacgagaacatgatcgttcttaggaaacgtatccacgagatgaagatggtcgagcgtaactacgagcctccttctcactggatggattgggagaaacgtttttacaatagctacgactctgttatctgcgactccgttggtcttcttcagagcttcctcatgaactctcgacccactgttgcaatcgcgacgctgcttttcctcctcgtcagcgttcccgcttcctccacggggagcgcgtttcgccttcttgatcttttgcattggcttctcgcagccgcaacatcagcccacgtggctcgatctcatatttttcttcatcttgtgagtcgccgacaaattctctttatatatttaattatgtgcatatatagatatgtaaaccaccatattcttttattatttatcattttttctaaatatttttttacattcgctactgaataaaaacgtacgatttaattgcagttaaagtacggtaaagatcaactaataacggaaaatatatatatatatatattagttactattaaaactgcattgtactgtgcggttttattatcattcaaaatttaaaagtttaaaaaaataagatatgtataaattaattatcgttatttatgctttttcattttgtgggataagtatattttcttgatatgtcaatgcgatgaaacaatactaataaaacacatctaattataaaagtgtttcttgataacttaaatgaggtttataattatacattcggatatgtttggtcaaatatactacgtaatcatcatgttgtgtttttgtttttaataggatcatcatgttgtggttgataatttcattttgtgaacggtgtctatagtttttctggctcccattcatatttttaaacgttactctataattaattacgtacaaacaaaaattaagggtgcgtcagtaaaaagaaaagaaaagacagaatattttgggaatcatggggaaagtgaagcaccgatttggtaaatgtaaataaatgttgggttagtttatgtaaataaagacaaaatatgggaccgaaacaaaaaacgaattcaggtctgtgtaacctcgaaagtgagaccgttgtcgcccacaaaacacaaaccctatcttttcttcttcttcttcttcgttcagtcttcactttcttttcttttctccgccaccacacaaatacattcttcattctttgtaactttcacgctattcttcctcaatatattcattcgacctcctctcttcattcttaatttctcaaaaatcttatctttctccctcatttttcccgtcgagggttccttaatctccttcctaggaacgtttcatcgatttcatatttgctttccttaatccacaacgtttcttccttcgtttttttctgcaattttgttttcctttacaccaaattcatctcttagtcttgtccaattttcgattttttttccgacaatcctgattgtttgtttttttatctgtcgggatttcgaatggcgcttgcgtatgatcctctcttcattacatcggacaaatctttgtccgcctttgatgttgcctcttcaccgcctcagcccatgaatttaacacaagacgagctcaaacgtatcgccgcttacaaagccgtggaattcgtcgagtccggcatggttctcggtctcggaaccggctccaccgccaaacacgccgtcgaccgaatcggcgagcttctccgtcaaggcaaactcgagaacatcgttggtataccaacgtctaagaagacgcaggagcaggctctgtctctcggcatccctctctctgatctcgacgcacaccctgtcatcgatctctccatcgacggcgcagacgaggtcgacccttttctcaacctggtgaaaggcagaggagggtctctgcttcgagagaagatgatcgaaggagcttctaagaagtttgtggtgattgttgacgagtccaagatggtgaagcatattggtggaagcaagcttgctcttccggtggagatagtgcccttttgctggaaattcacggcggagaagctccggagtctgctggaaggatacgggtgtgaagcgaatcttcgtttgggagagaaagggaaggcctttgtgacagacaatgggaattacatagtggatatgcatgtggaagaggatatgggagatttgggagcagtgagtgatgcgattctgaggctaccgggagtagtggagcatgggatgtttctggatatggcttctactgttatcattgcaggtgagcttggtgttaagatcaagaacaaacactgaaacacacaccacacctcttctcgttgattttggcctttatgtattaggagacagaggattatggtttgctctatggtttagatgatatgagattaggttttggatgatgtcactgtgaggaggatgaatgactttcttttgacagagttttggatgcattgacatcgtcgtcatcatcatcaatcaatcttgtaaacagcattttgcttcttcattgcctttgttgtgtttgaatgctcttcttttactactgggcctgtgttgggctttgctccttgttatatatcatcataggcacactaaacactaaaactattgtttcgccgaaacatgaatcgtgttaggtgtgaatccatgttgtgacaaaactaaaactatcgacctcgcagtgaatagtaatagtatgattaatacaatccaaaatcataaccattctcttcctcttccacttcgtcttcatagaagttctcatctgcgtgtggtgctgcgtagtcttcttcatcttcaacatcttcttcatcttcaacaatctcatgctcttccttcttcttctccgttactgtctcggttctcggtttcttctgtgttggctgaaagaagaaacacgaacagaattgtatagacctgaaaagtgatgacaactaaggaaccaccaagccaagagaagagaggataagaaacttacgctagtatcaaagagctcgtccaaaatatcggtgttgattaacctgagtctctgtataagactcaaaatcagaaacccaagaaaacacttcttcaaaagatacaatatatatttaccttcctctcaagtgttctgcaaactgcttccgtggctgtagctggtggaggtgcattcttagcttcctcggcacgttttcgtcgcttttcctttctagaattcgcgaca

SEQ ID NO: 2860 - DNA, 450 bp, Arabidopsis thaliana landsberg
  unsure (1)..(450): unsure at all n locations
taccgcacactagttaaataatcattaattagttttacaccttcttcacgctcctaaaacccttcgggcgaatgaggagcgacttcagagtgtcttcgtttactatctctccagagggagagatgacatgaactcattgccatatagacacaaaaacctactccttattcgtctcctctcttcaaaggctactcctttccatttatctctgacaccctttattccaccatccttctatatatgaaccctattatcttgttcttcatcatcttccataacggagaacaacaaatcaactaaagagtccaagacttattataactcactcgtgtgcaactaccgaagagctgtacgattttacataaccaataacaacaaatggaatcttgaacgcatatacaataagcttaatcccannnnnnnnnnnnnnnnnnnnnnnntcatcataat

SEQ ID NO: 2861 - DNA, 478 bp, Arabidopsis thaliana landsberg
  unsure (1)..(478): unsure at all n locations
cccaaaccnncaacnaaagccccaaccanatttacctttacaccancctcaacaataagctctagtggaaagctcttaacaacaacaaaatgcttattttatcgtaatattattatatacttaaatcttacttttatcaaaaaatgaaccactgtataaaagacacgtggcttatgttgttcatgagagaataaaaaaattctcttcattctcttaaataatacccacgtctccccaactctactcctatatctctgtgttgattcatataatatcacctaacaaaccccattcatcttacatccctccattgaggataaactaaagcttgaccgaaacatgcccgccaagcataacatacatctaccactagctactaatttcttggcaccacctaaagcaaaccaattcaatgacagctggcccacaagaaacaaaagacatgcctaacttaaatacacaggtggtgcaggagata

SEQ ID NO: 2862 - DNA, 559 bp, Arabidopsis thaliana landsberg
cagctgttgtagccaaataatctcacaagtggcatgagcaagacttttttattcattctttgtactactccgactagctactgattgtttctttagtttccatgaaagagtgaccaagataaacacaataaccagtaactgatctacgtgtatctttgcaggttccgcagtccgtatccgcaaaagcattcaagcataattttgaatcagctgagtacattaaaccttgaccatggttagatttaatatacatgagcactttgtatgtagcttgaagatgaacatctgatggtactgaaatgaactgacttagctgatggactgcaaaagtaatgtctggtcttgttattgtcagataaagcgatcttatttttgtttgtggaacaaaactgaggaagaaacaagaacaaccataagcgtaaaaaccgattcttcatttttccggtttgattggtaataccggttaattaaatgataaccgaattgaaattgatcgatctgttactttctctagttttgttgcagttcggtttgaacacttgggttactgtatccttat

SEQ ID NO: 2863 - DNA, 585 bp, Arabidopsis thaliana landsberg
atcataggatagtttatggtaaaaaacgagcttattcatcttttaattgacttgaaattaccataggaaggtataaagacaagaccaaaagggttcgattgagagaacaaatggaattagagaaatgataatttgggaacaatcaaactactacatgtacaacttcttcttatctctctgagacacatcgagtcaccatgactcatgagagatggaaatagagagaacatctgactgactaaattatcaaaagcaaataattcacacctacaataacagcatcactagagattggcccgcggtacactgcggattgatatatcattagaaagttaacgattttattctaattaatattatattacatatatatatatatataacatattaagagatataccacatgtgtatatttttatcaaaaatgaattttgtctttaagatgatatatagacatatgttatttttttaacgtataatacaccttggggcaattttagaacaaaatttttttaaacttttaaggtatatatatatatatataatatgggtactttggtttagtttttaaattggataattata

SEQ ID NO: 2864 - DNA, 618 bp, Arabidopsis thaliana landsberg
  unsure (1)..(618): unsure at all n locations
aaaggacaatacatttttgttggactttaggcatcatatatgtttggacctttcgtgtttagattcgtccattgtatacattagggtatctggtaaaatgtttaaaatcatttgtgtacgtacattatattgttgtaaaaagttaaaagcatccaaaaactttacgaatgatgatgcaaaaagaaaagacgatagaagtaaataaaaaaatagtcgaaatattccacatttgtttttaatctattcatcataagcactataaaaatgatgggggtcttttatgttttattcatacagattaatataatcttattggtctgattgataaccaaaagctgtacaagtttttttagttgttagctttatccgaatagcaaaactgttaaaaaaagttatataaaaatggtaagagtaaaactttttataacacttttgataaaaaaattatgattggtaattgtcaaaactgtacaaagttgtattgctattaaaatggttactattcaaatccattattaattntaaaaatatataatgttttttatcagcgtaatgattaccttccatttaaagcgtaactatatatatttaaaaacttccgttaattatttttacact

SEQ ID NO: 2865 - DNA, 632 bp, Arabidopsis thaliana landsberg
  unsure (1)..(632): unsure at all n locations
ctattttgaaaaatcacttgtttcctatttattttgaatcgtgtgtttgtatttttttggcctnnctctctctctctctctctatctctcgctctctctcaccttgggccattaccatctcgacaaacttcgttaccaatgataatttaccaaccttaacaaaatcaaacaaataattcaattaagatgacatatatgaaaaaactacaatgtctaaaaaagagaatagaaaaaactacgatgtcaaagaaaaaataatagaaagaggggataaattacccttcatcaccgatgacaaaaaccagtaaattcattatactagaaagatcttacgaaacactataaattaaaaagatcttacaaacaaactagaaagaaaaaaaatctctagatctaagaccatctccaacagaccctcaaaccctcaaatttgaggtttttttaactctaactccaacaacccttcaaaccctcactttttaaaggggtgaagtagtgcaccctcattgcactattcacaccctcaaaatctttctcttatttcattntagtctntgtactttatattctttacaaataattctattaaattcaactatttccaatatattcatataaaattaaaataataa

SEQ ID NO: 2866 - DNA, 1376 bp, Arabidopsis thaliana landsberg
cgtctcttctcgaaagcgaagcgactgagtataacagctgagtccggtttcagtacttagcacgaagtagccatagctccacaacgactacctcaagcagtagcggcggaagtaacggaagcacggccgtgctacgaccaccaccactccaacaataatgagctgttgcgttggttttaaagcgccggctaaagcgagaagcaagcgtcgtcgtacaggacgccgtgatttacgagttttgtggacaggaaacgagcaaggaggaatacagaagaagaagacgatgactgtggcggcggctgcgttgattatgggaaggaagtgtcaacactgtggagcggagaagactccgcaatggagggcaggaccagcggggcctaagactctgtgtaacgcttgtggcgtgaggtataagtccgggaggctagttccggagtatcgtccagcgaacagtccaactttcacggcggagttacattcgaattctcaccggaagattgtagagatgaggaagcagtatcagtccggtgacggtgacggtgatcggaaagattgtggataaaaagtgattaggattaatttttattttttcggagaaactttttttttttttccgtttaatttctctttatttgtttttaaagtctgttttagggttttgcagtttgaatttaggtttttaattttttgcttatcttttttatttgtgaaattagtggtaattacttatttagggaatattatggtcatggaatggaagataactttctcattttactgtttgtttgattctaatggtaattttaaaaaatagaagaaaaaaaatagatttgataagtacttgtttgataatataaatttgacccttttaaattgtctattttagttaggccagctaattatagtgatagatattggaattatacatgagtcaattttggtggtttcttgcatgtcttgattgagtgattcttcttttgcctttaattactgacattgtcgaaaataacatattgtcaaaaaaaagatagatagcaaccacaaactattaaataaatgctgatattataataattctgtttttttccaaagtaaggaatgcaataagatcaagcaaagcatttgtattttactattgaaaacgaaatttagactattgttgggtgagcaaaagaaaaggaattaataagtgtcaacaacttatcaactaacaaccaaatctatcaaagcttgagcaattattttattttatattgtacaagacattttaatggatccatatgatcaacatttatccactaacataattatgcgtagtgactcattacaaaacataatttcgtcatggtgatctaaccaaaacacaattatgatgt

SEQ ID NO: 2867 - DNA, 2186 bp, Arabidopsis thaliana landsberg
agagacaatgtcgtttgtgagaagtgtgtggaggcctgagtttgagagtagaggactgtatcgctggtcgattagaactttctccgctgagatgttttggtgaaccaatgctggcttgcttcctttgtatgaatgtagataagcaatccctaaacacaaaacatcaaacacataaacaaaaatgaatcaagaacgctaacaaaattggttcggcataaataaaactcataccttttgcgatgcctttagcaatggatactctcgtggaccaatcaagaacatgcgcatcaccatctttgagatcaagatagctcagtaaatttccattaggagcaaaatcatagatgagaaaacattctccacggcctcttgaacagcagaagcctctaagttttgacaagttttcatgtttcagagacgccaacatgttgagtcctttcaagaactcaggttcttcagatttgcaacttgttttactaaaccgtttgatcgctacagcagaaccatctctcaagattcctttgtaagtcgcagagaagttgcttcttccaagcaaattcacttctgagaaatactgtgtagcagtttcaacctcttcaagattgaatcgaaagctctggataacttcttgagcaaagacactgagattcctattgtctgaaagtggatcccaaccattagtatattcaagactggccaatggagaaccattgttcttcctaaaacctcctcctacggtgttgagacggttgtccgacatttcataagtggttgaaagcttctgtttgcgtctgcgataatgcgtgaacaaaaggatgctaatagcagacaatgcaatagtcgagacaaccaaaccaataaggattgcaccttggtgagattttggaggagtattacagtttgttccattacaaggtgaccgtagattagctgattctggtatatcccgggatggaaaaccaaacacggttgcaccgtatggcttaggttcctcaggagctgtgccattgcaagatttcaacggcgagaactcagctccacatagtcccaagttgttttcaaacgaaaaaccttcatttaatctcttcagtactgtcaaatcggtacaacagagaaagaaatataaaccaaaatgagaaacacttcacaaaatacgcaaagttagtttcaaagatcatatagtgaatcagttttctaaccaggaggtacattgccagtgagggagttgttgcggatgtcgagaactcgaagcagaggagggctagctaacttgcctggtacagaaccaaacaaatgattgtagctcaaatctagccgctctagagcacttaaatctcctaaactcgcaggtatagctccagtgagtttgttagattgaagagcaagaacactcagcttcctcagtgaactaagctccctaggaatgcttccagtcaaattgttgtaacagagctgcaaaactacacaacaacatagaccaaaaaaggaatgaagcttagctttgacttacattaacttagaactaattctagatttagaaacctggtcctgctaattaaagctcaaatataaagccttttgaaagtaagtgaatcaattatctaaatgaacaaaattaatcaagagaagtacaagttatcttcaattcaagtccatattttgggaccagtaagccatttatggttccaattaaaagtttgaatcttttaaagttcttgactattcttccttacaggaaaattacaaaaagaaaaatcctaacaaaaagacatgaaaaggacgttttaaagacagatcattaaagcattaaattccaaaatcatctaattcaaataatttcaactaccagagatagtaatgaagtaactaaaacccctaagacaaggagctcagatttctaggtttcaaatctccacagaacattgattaatcttgggacaagtattttgcagaaaccaaagatctaacaatgctaaatttaggttttaagtttaatcaatgattaagattaaaattaaagtaaaaaagaactaaccttgcaagccttgcatcttcccaatgtttgaaggaatctcaccggagagattattaacattgagataaagatcagtaagttccgacaagttaccaagttctctaggaatatctccaacaagagcattgtagtgcaagaacaaacccgtcaa

SEQ ID NO: 2868 - DNA, 312 bp, Arabidopsis thaliana landsberg
  unsure (1)..(312): unsure at all n locations
gaaaaaaaaaaatgantcccttgatttccatgacttgnnnnnnnnnnnnnnnnnnnnnnnnnnnnnnnnnnnnnnnnnnnnnnnnnnnnnnnnnnnnnnnnnnnnnnnnnnnnnnnnnnnnnnnnnnnnnnnnnnnnnnnnnnnnnnnnnnnnnnnnnnnnnnnnnnnnnnnnnnnnnnnnnnnnnnnnnnnnnnnnnnnnnnnnnnnnnnnnnnnnnnnnnnnnnatttaaattgtgaaatggatttacagttttaaagaatacatgggctcgttttctcgttttggtccagagagatgagtaagttatcg

SEQ ID NO: 2869 - DNA, 600 bp, Arabidopsis thaliana landsberg
aagtgtgacaatgatgaagctggtgatgatgggagttcgttgttggtacatgttgacatcatggacaaacaaaatggggtcagtgttccgtatagtccaggaatctatactatatatccacttttaacagagcacctgtacatatttcaaggtgaagcagaggaggtcacttccaccgagctcatgtttgagtttgaaacaatgagtaacaaatgggatataggagaatgcgggatcatcttggaagtcccttcaagttgatgcttatgatgatagcttcaacgaggcgttgatgaaggttagaaaattaatgattttaagttgattggttgttttgtattttatttacgtgcatttgtgtgattatcaatgtgtgatggtgggtttatgtctcattgaaactaactgcagatatggagagaaatacaaacaatgacaatgaagagaaggagaagaaataatcaaagtcatgagtggaatctgaaatccatgtgagttttcagaaacagtgctatccacaaaacaattcagtaagctctctcttcattcttttttcttattactgctataagttttaagccaaatcactgactcaatatt

SEQ ID NO: 2870 - DNA, 252 bp, Arabidopsis thaliana landsberg
  unsure (1)..(252): unsure at all n locations
atttaaaagatttacaatggattttacaagggctttaaaagatttacaaaagtttttacaaagatttttagaggtttaaaattgctttaaaaggcttttccaatattaccatggcattttcacagagtctttagattttttcatggcgactttcacacnnnnnnnnnnnnnnnnnnnnnnnnnnnnnnnnnnnnnnnnnnnnnnnnnnnnnnnnnnnnnnnnnnnnnnnnnnnnnnnnnnnnnnnnnnnnnn

SEQ ID NO: 2871 - DNA, 545 bp, Arabidopsis thaliana landsberg
  unsure (1)..(545): unsure at all n locations
cttatacatatccttctacaagtacgatggttgatatagcaatcatgatgttttgactcatctccgaagattttgtagttttgtgtctgcaaggtaaatgacattaaataacagttatcatggctccataaatagacaatattgcgatcaaacggatgcattgacatgggtgcataacatccaataaatgggatgctgacttcccacataagttgccaagctgaatcatcaatcaacctccaaaccttcaaaagattacctcccggttgagctaatgttttgatatacatgacaaaaccgctggatgtagccaaacatgttttgttgcgattcaaagcatgatcggggagcggtataaagtgacaatctttgggtttaccatagaaatcgagaaccataagtcctggcctacgattataagaatccccccgttgcgaaaaataaagcgtcccattcaaactaatagggtcatagaagttgggtgagcgaacagggcatacaacttctttgtgaatccaanagcctgtctcagacgaatacacata

SEQ ID NO: 2872 - DNA, 371 bp, Arabidopsis thaliana landsberg
caaacattattctatactgcttattttgtacaaaccgcacttgttttctaatttctcccgcacgtaccacagtgaggggggaaccgcactgtaataacgctttacccgcaaaataaaaactgtggttaccattcggacccttagttttgatatttcaaatatgaaggacaaattaatccaacttgcaaaagttatgcaaaaacaaacaaggtacaaagccgtaaatgtatgaaaatgatgtgtgtttatttgatatttatgaatatatactgatccagatatcgtgttattacaaaaagagatatgcactgtgaagagtttttactacaaagaagaatcagattcttctgtcgagagtttgaacatgacac

SEQ ID NO: 2873 - DNA, 2113 bp, Arabidopsis thaliana landsberg
  unsure (1)..(2113): unsure at all n locations
tctggatttttaattcgtctgcttttctttcggaatctagggggagcttgtgagggtcttcgccaatgaaaattgcaagatcacgtgtcgtaagtctatgcttttactctgaaacttttgtcgctcatgtacttaacaaaactcgatctgtggcttgtttgatccatacctgttgaaactccgtagtttacctcatgcggagaaagcactactgcgtgacctgttttgtgttgagttaaagatatcaaaactgcatgacttgtcagtttataattcagtattggtttcttctggctgtttttcggttggtctgataattcaattctatctcctttagatctgagcgtttctggtaaataagaagaatatttcttgaaaagtttcttggaaagcttactttgctgttagtattcttagatactgcagggattgccgctgcaaatattctgtgaattatctggtgactggtttcctcttctattttcgcagatccagagatgcagagtcatatagagaagagtctttataacggtcatgctttattcaaagtctcctattcagtatgccacttctcttatttcatcttttacaaatctggtctttggttttcctgcacatacctcctctatgttactctctcacttgtgcgcctattgcttttttactatgcgatctctcttatgaaacagattggttatttggatatatgggaagcagctacattgtctattaagaaagaaggctacagcatcaaacctactaatgaccctgtaattacagaaaagttctcctcttctactaatgtaagagtcttgccttatttgcccctttgtgttagaaatgtaatattggctgaattatgttaacatacatcccgaagaatgaactaatattgtgatctttctgattctgctcgtagattgtgattccctttgatcagcctgcggattttgtgattattggtaccgatggcgaggagcatctctgtcgagtagtggacaatgatgcaacagatcttagctggtaagtagaagtcgtctttctttggataaagtaaagtagatcaaaactccttcgtcgtttaaaacagattttcttctatgaaaatagatgaaagtgaaacgagacgctttttgtttttgtttctttctgatttcaaatgcatcaccaatagtctaaacttgaattagaataatctgctagtgttttctttttaaatgaagttgtttaatgtgttccaagtattcagttttgggtttcttgtattaagcagtcaatcttctgttttgtgtttgtatttggcagctcaagagatacaattgtgctcacccttagattatttcttaagaaggtaatgtttcagactaataaccatttatcttctttgataacatggttgattcgtttcctttctaacaaagcatcatagtcatactaatattagcgctttttgagagaagcagtggttgattgtttggttctctgatttggttgcagactctgcagagaaagaaggggaagaaaaaaggatttttgnnnnnnnnnnnnnnnnnnnnnnnaaatagtattgttggctcttttgtttcttctctggcctctccagctttagaatattagagatagtcttatgaacgattcagagttatttatgtaaggcttctgtagctgattaagaaaaaactattcaatcaatttcagtatatgaaaaaaaaaatatgagcaaaaaaaaaagtagtaataaaccaaatcttttgttgatctgagttccactttacatttcattacaaatgtcggttttcagaagaagatgaaatgaaatcatttctaaagagaagccattctatattctaagtcaacatgtaattaccaaaatgccgtctttggcatatgtgatgttcattgaaccacatcatacaaagctaacaaagcccaacatatgtgatgttcactgatggcatatgtgatgttaaagtgggctagcagccgcgggcctgaacgggctaagtataaaaaggagcttagagaggaggttatgcaactaggagtgactctcgctatatgttgatgttcttgctgcatgatgaaattctagtgtgttgcagttcggcttgaa

SEQ ID NO: 2874 - DNA, 521 bp, Arabidopsis thaliana landsberg
  unsure (1)..(521): unsure at all n locations
aatccggaaggtatatacggcctctcgctcattatatatataacgaatccgtattgaagggttcaactggttcgattacttccacaaatactcggagttcttggagtttgtggttccgtatataaaagaagggaagataaagtatgtggaagatgttgctgatggactcgagagtgctcctgctgctctcgttggactctttcacggtaaaaacgtcgggaaacaacttgtcgtggtttcgccatcataagtgataaaatgagatcagtacgtacttgttcggtaagtgatgtttcggaagttggatatgtctccgtacaagatatgaaattgttgaaaagtatatgtatttggtgaagtttgcagaggacgttagtgttgagtcctttaatttggttcataatgttttagtttcttcagcaacaatacaagagatcagggttcggttttgtcaataatgtaataatttgtctaaattatgaaatanatacatttattattagcctattccgggtttttcg

SEQ ID NO: 2875 - DNA, 1451 bp, Arabidopsis thaliana landsberg
accttgttattcatactaccaattctctgttcctccatccaattcctctttgaacacttatcaaagttgcaagtatttttctatgtgtattgaaaacacagtcgaagataagatcattctttaatgtttcagcctcgtcaatgacatatgtgggattcaggtgattggaactgaaacttgagaacaagttttttttcgagattaactaaaaatagagtgcaaagagaaagcttttagaaatcaaacataaaatcgagttcttcgatacaaacatagtttaaccaaaacatgtacagagtactttatctttcttttttcttggttcaaagttcaaacagagtagtttaaccaaattttaaaaacgatattaaaatttggaaaatttgattaccacatgttgtgcacttataaccatgttgtatttttttataaagttcagaatctcatggctaaggatcgtaaaacttataaccatattgcattcaaatattataaccttgtttattcatcccgtaattcatactactttgttggaagataatgcatttttaattcatactatttccaaatccaataaacctattaagagctccacatgctattaattggcaaacacaattactcttggatcggccatggctactactgttcatctcagctcattctccctcttcatccaatccagaggaagaagagacaactccatatcttccgtcaagagtctcaaaaaacgcacaggtttgtctccctcttctgccctcacctcacaaggtggcagagacatgattccaccagagggaaaatgcaatgatcacaactctgcttttgatttcaagttgtatatgatccgcaaagccgaatctgtaaatgcggctctcgacgtttctgtaccgctccgagaacccctcactgtccaggaagccgtgcggtactcattgctagcgggcggaaaacgtgtgaggcctctgctctgcattgccgtctgcgagcttgtggtaggcgacgaggctactgccatgtcagctgcttgcgcggttgagatgatccacacaagctctcttattcatgacgatcttccgtgcatggacaatgccgacctccgcagaggcaagcccaccaaccacaaggtatgttgttaaatcatataaaggctcaaagaaatgctcactagatttgaatcgttcattgattttagtaaatattcactcgtgttggaccaatttttgctcaaacaaggtatatggagaagacatggcggttttggcaggtgatgcactccttgcattggcgtttgagcacatgacggttgtgtcgagtgggttggtcgctcccgagaggatgattcgcgcggtggttgagctggccagggccatagggactacagggctagttgctggacaaatgatagacctagccagcgaaagactgaatccagacaaggttggattgga

SEQ ID NO: 2876 - DNA, 481 bp, Arabidopsis thaliana landsberg
aaaagacataaccgcatcataaagtttacacaatgccaacgcggaaagcttcaaatctactatgtccccttctgcatgactcaatttggtctgacatattcacaacaagtgttacgtaatattttgatttttttatttctcttgtctcatgcatgtttcttttaattaggaaacatatcttatctcctatatatatatgtggaaaactaaaatcaccctaaatattaaaagcttggcatgttttgccaacttctaggtaaaaaagctaggagtgtaacgtcattccgtgtgatcatcttttatttaggcatctctcaaatcaacttttaaatgtgatttgagtttttattgtcgatcaatggatcattaatttttgtaaatggcatcttccaagtttcaaattttaaagagaaacattgaaaaggaatatcaagatatttgaagaacgatccatatatggagacggttcttaattactcct

SEQ ID NO: 2877 - DNA, 850 bp, Arabidopsis thaliana landsberg
caattttcctgtctactatatgtacaagaaaaaatagagatcatacaaatagcttttcttctaactatcgaaatcaatattcttataattaggcatgaatcctttaaaaatttaggggtcatgtaacacttaacataagcaaatatatgaatgcataaaattattaacttttcgatcattttttcaaaaaattataattttagcaacgtatttaaaccaaatttcacaaaattacatcaatttcttttttagattgctatctaagcccttaaccgaaatacctaaacctaattgaaccgatcagttcaaagttgccagcagataaacaatgttttcatgtccgactcatactccatagttgaacgattaacccaagaaacatatttccaatgaaggtttaggctccgaatggtgactgcgtattgcggtgcgggagaagtgcggtgcggttcaaatagtgacgaaaatacatagatacatatgtatatgtagagattttgatactgttacggcactgttgcggtgcggttttggatgcggtttaggttaccattcacatccttagtcttaaatctaccaatataaccagaaaaatccagaaaaaacttgccattaactaccgcatgatcaaccggttaaaacttctgggtgaaaatctttccaaaatattgagattttgacttcaaaccctttgctacaaatagaaggtttgatcttggaattaaaatatatagtttgtattaaaaaagaaagagacattaatatactcatatgaaaagagtttaacaaaataaaaatcatgaaggagaagacaataaacgtagcttacctcatctccctcttctttttt

SEQ ID NO: 2878 - DNA, 259 bp, Arabidopsis thaliana landsberg
  unsure (1)..(259): unsure at all n locations
aaaaaaagatctgaaagncgaaaaaacatcagaaacaaacataattttttgcattcaagaacaagacataggggggaggaaacctatctaggtacttccaaaagggactgaacaaagttagacaaaaaggtagttacgacaaacacaaggaactcgaagaaacatacttgaaaaacagaggacgagaaaagaaacataaccagaaaaatagactggcacgtgccataagcagaaacccatcaacttattataggaaaag

SEQ ID NO: 2879 - DNA, 459 bp, Arabidopsis thaliana landsberg
aaattccgccaaaaataaatacgcccaaattttccagcctataaaatttgaaattcaagacggatattaccaaatttgggaaggattctaggtaattcaggaagggtttcacgaaatttagaacatatttttttgtgaaacccttcttgacatttgtagaatcattcttgaatttcgtggaatctttcaaataatcattttctgaaatttagaaaggattctacgaaatttaggaaggatttcactaaatttagggaaaggtttcacgaaatttttatttgtgaaaagcattcgtgaattacgtgaaatactactcgaatttccgagatgtcttcctgaatatttttgacaggaaaacattagcgagacttgctttacgaaaagctgttgacataaaaaaattttggcgaaaaaattttaacagaaattctgacgggaaatatttacttttatttattt

SEQ ID NO: 2880 - DNA, 392 bp, Arabidopsis thaliana landsberg
  unsure (1)..(392): unsure at all n locations
ccgactcgttagtcaactagtaatgttatcaggaattgttctctagatcttctatggntaactaggagcctgggctgcttatctcatctctgttctctccctccaatacagagctagtaaagaaaaagaaggcaaaagcttcaaaaaccacgtcattcaggtcccctctttaaaccctctctctttaatcagaatcactaaatcataattatctttcattaatctaacacttttaaaaatctcaacagtggtttgaagtacttgatggattacttggttcatactggaaagcactaggactcgcatttaattgcactttcctcttgttnggatctgctatccaacgtcattgcttgtgccaagtcctnaatctattaaccactctctttatc

SEQ ID NO: 2881 - DNA, 724 bp, Arabidopsis thaliana landsberg
ctacctccgaggagctgttccgggaagccgacctctccatcaccgccgacgagcgggcccaggatctcataggaggagcaaagcccgcaccggcgcaccacgacacgacgcgaaccaaccacccgacaaacgctgggagaagaggcctcgtgaagaggtacacgccgccggaccacccgcctctcgcgcccgaggagggctcgtggaggcgagcgcacgctggacgacatcctcgacgcctagtgctcgtaccacaaggacatgcgccatactctccgtaactgccgggacttcaagcactccgtcggacatggtcgacccttccaacccctaccacctcctccgccgaggggaggaccaggtgaaccacgacagccccatcggccggaggaggggggaggaggagcattcccgcgcgttgacagggaggtcaacgtcatcttcggtggacatgggtcgcaggagaacaagagacaacaaaagctcaacgatcgccagatactggtggcgaccaccggccctcccgccccgtaccggtggtcggagcacccaatcacgttcactcgggaggatcaatggctcaacttcgaccacccgggcaaatacccactcctcgtcgatccggtgatccgagagagccgggtgaagaaggtgctagtggacggggggagcagcatcaacgtcaccttcccccgtacgctccaaggcttgggagttcacctca

SEQ ID NO: 2882 - DNA, 558 bp, Arabidopsis thaliana landsberg
  unsure (1)..(558): unsure at all n locations
accccgaagatagcacacaaagcacccataattgataacagaagaaattctctgttactgatacgcttctttgctacagggacttggctactagtcactgacgttccattgaacctgatgcggctgaagctagacatacgcacaaaggtctggttaagaggaccctcacaggcagaggctggtgttgatggtattgattccaataattcccacnnnnnnnnnnnnnnnnnnnnnnnnnnnccaccaccattttgtccttccttgtattggggatttacactcatagtgggattcatagactcaggcatcacacctaagaaagttggtattcacaaagtatcagtaaaaaaggccctaggttattatgtttcaagatcttaacaagagggtttgatatcaacaaaaagaaaacagagtataatatatacatgtcttggttaaattcaaaaactaatgcttcgtgggaaatataacttggcagacaacataagggaatgctctgagatgagggtgagtttaaagaacttttaagtacctgttgactgtgaagtgaatgct

SEQ ID NO: 2883 - DNA, 3671 bp, Arabidopsis thaliana landsberg
  unsure (1)..(3671): unsure at all n locations
ctccttatgggctaataacatgaacggctcacaccaaatcagcgagacagatcaagggtgtgtatcaatcgcatcaactataagaaaggacggctctaaatcaaacttcggacgcgtatctaatcggcgtagtgattttgtgccacaatgtacgaggcgagtactcattggctcttaatgaaaaaatcagaaaatcatcatataaaattatttattgatgaaaaacatatcaactaagtctttaaaaattcaagattcgtatgtcaattattagaagataacgtcttataagtgctaaattttaaaattaagaacaatcaatataggttagtattccaactatataacttatatgtccatatatactaaggcataatttacggaatagggattaaacttggggatgtaaatttctttacccacgtctccatgtgttatagttcatgaagcttaatttcaatttaggattttaactctagagtacagtgtaaagatttaagtgtacgacactaacttaaatctagagttgaggggcttatgcattaggggatagggtggccacctttgctactacaggctcgtcctcatctgattcatctagttgcataattgaaacgttgcaggtcaagttgatttcctcaaattcatcttcagctgattcatctaattgcatcaatgaggcgttgcagatcaggttgatttcctcagattcatctacaactctgttgtatttttcctcatcatgctcctgtgacttgctgtacagatccagtttattaacccatactttgccaaacttcaaaggctctataaagcactttcgagcttgccagagttgtttgaccttgtcttagaacttgtaacagaaacttctgatgtgtccagtctttccacagtgataacagtcaaacacccttcgacctcgtctggacttggtccacacctttatgtaactagtcttctgatgcgatactgaagccttgggagtcattttttgcttgatcggtttctgctcttacttgactgtgttctgtagagctgacttgagtttactatcttcctcttcatgattcgttgtactctttacaaagttcatggtcttaggtctatcaagaggcgtctaggacacagaaggttgataacctaatcctctgtgatcagatccaactattcccatagacagaatttcatcaagattcttacccccattgttcagcattctgatcttcttgtgattctcactcagttctctttccagcaaaagagatttctccttttcttgactcagactctgctggagacaattcatctttctttctattatctgtttatcaggcaatggaagcttttcaccaatagcttcttcctttatttcttcctccaagagatctagttttgctgacaactgcagattctcctttgtaagtctcagcttgtccttgcttagcagtaaccagctgtcatacaagatgcgatagctcgcacttgtaatctgtgtctcatcgttgtctgactcagaatcctcactgctcgattcattgtcatcctttgcactgaaagcaacaaagttcagcataccacctgtctcatcctcactgtctgactcagagtcactgaaactcagaaaagttttttctttgcttttctgaatacttggacactcagctttgatatgaccaatcacatcacactcatagcacttcatatccttgcgttttgtgacaggacattctggttttgtgtgtcccataccaccacactcatgacatttcacatcgcgccttttaccagaattctcgttcttcacaggcctgctgcctgatttttctgtatcacttatgttccaacgactggattctcttgcatcacgactgtctctggttctgcctctttcaacgcgcttcagagcttttccaaaatttctagccataaggaatagatcatctttgatttcctgcagcggatcaggaactttttctttttcagccttaaacgctatccctttgttcaggttccattgatcttcaacagcttccatttcttcagacttcagaattccaaccaatgcttcatatttgagagtatctgtatttcctgaaactctcatgatagctttgtgtgcaacatacttctgtggtaggcacctgagaagtttcttcactaacttcttttccttgtaggtttttcccagagttttagcttcattagcaatcttactctgtttagcactgaattcaataactgtttctgaaggatccatcctgatgttctcaaaatatgtagctagctgatccaatctagttcgttttacactaacatctccttcattcagtttctgcaaagtgtcccacatctgcttagctgattcacaccttgagacaaggttgtactcgttgtcatccagacaacagtagatagcattcatagctcttgcattaaactaagacaggttcttctcctctttccgtccaatttgcctttggtttcaacaccttgagacctgcttcagttacgctgaaaggaggttcccagccatcttttacagcagtccatgcatcttctccttgacctctgattagctgtatcatccgtgttttccagtaaccataccctctatgaccgagaggtacaagccgcatgagttcagacttcgacatccttaatccgcaggatctcaacctgtattgagtgtttactcaggtcggtttcccgctctgataccaaatgagaataatagagatatcgataggttgaaaagactttcttttctttattagaaatcacttaaacaatcttacagatctgtttcatcagttttacacaggttaacacaacctatcactgaccaattcctaatctacccaactcacaaacatagcaacaactatgtatccctctttgttcactcaccaagaaccctaatagcctacaacttagaacgtaagattcacaaagacgtgagattagacggctacctaaacctaaagcttagactccgattatatatcagacggctacctaaacctaaagtttagacttcgattatataggtaatgacacacacgtcattaacctatttcctaattcaaagatatcttcaaatcttctttccttaatttgcttatatcttgaattacttgtatataacgttttggaacctccagtaaccaattgcagctcgcaacgtcatcagcattttagtctcgcagctcnnnnnnnnnnnnnnnnnntagcttacagaaaattaaagcttatagctcccggatgtctatcagctccgtaatgtccatatatcttcattctcccccttttggcttaaatgtgacaacgtcaagctccagtggatcctgtcaaggttagtttaccaaagatacaagcgcaatacaacatatattccttatcgtacaagaatctgatatacattcattagcataaaaccaagaaaacgatcaaggttcagaagcacacctcaaccgtcaggtatcaaagcagactcatctagtttcagtagtgcatataaaattagagaccaaagctaccctacacatttgctcccccttaactggatcctggacatcaaggttctcccatattctccccctccccgagtgcacagtcatgtgaaaaaaaaagcgatacaaggcaagaacatagttttcatttctttcccc

SEQ ID NO: 2884 - DNA, 3455 bp, Arabidopsis thaliana landsberg
tagaccatccccgctgatgcagataaatttatctataatagactgtcagatcttgcaggtagcctcctgaagagattgagcggcacagagggtagcttgtgcctgaaccttggatgcctcagcacatagatcccagcaagaagtgcaacaacctgaaacggcgtaacatacaacacgatagcagctatgagacagaaaagcacaaacaatgtggttgccctcgggtctctccagctcagcagcgataaaaaccgctctccctgtgttgctagatcgcctatcacggtctgaacccgtcctcctatgcttctgagccggtcatatcgcatccgcacaatctcagaggatcgggaagtcgggaaagtatcaaactcttcatcaagctcgtcggggtgaacagcgtctgcatgagacaaccgtgtgtccatgtgtggcgggtgccttggtctccaccggaaattccagatcccaatcaagaaaaggtacaagaaaaccgttgggaggattaattccgggtaaagaactaagataatgaaaagaacatgaatgagaattgtggttattgggtttctccagttgcagatctgatcaaaccattttccaacagcaatgagaccactcagaacattcatgattctgaagaagttagctttactcctcctcatgctccacatatgggagtcaacatcgagcatgtactccacaatctctttgcgaagaggcggctctgcgcggttcagccttgccgagacaatgttcatcgcctggtgtctcaggctgtccagctggagaaccgataacggatggatgtaatgcattttgggtagtaatggctgagaatacatatgaagcatgttgatgagagataggcaagtgaaccgcacagctaactgtatttcacctgtcttcttgatcccagaaggatgaaagacgagtagcggatatgaatgagtgtagatacggtcagcttcaagggtagagagccggattctcactttcccgattctcaagtcttttccgcttcctcctggaatgtgtccgttgtcgaatgctccaaaagttatgacagtgcaggtgtcaaacacttcccatgtgtactgctcattccatttaggcgtaaaactatccacgattgttcttgttctaatccatttctgcccatacttagccacgcaatatgcatctgttgtccccttcccgtcttttgacttcattggcatcagcccgtgtgcacttatgatccctacttcaagcagtccgatactcggtttccatagctgttttgcggttggccttaggtcgctgctgtagtgagttgattcatcaagaacatggtacccaccttcaagaaagattcttagatgaattctgcttgcgaatttgatctcttttttctctccttccaccataatatgtttctccaggttgaaccacctcgagttaagcggcctatggtctaaccttctttggacgttctgcaacgggattgcacaccggcctaacgtttcatctttattcggtgcaaccctatcttccaccgcgagaatcaaagcttcctcaaaaggctcagcaacaacaaacatcagatcttcattccacatcggattcaatgttttggtctgagaaatacgtgttctcagagtctggtttccgagcattgctttcacgtaaacctcagggaacttggttttatcatgaggtatcaaatcttgagcctcaattacattgaccctgacataccaaagctttggcgaaagataaacctttgaacggatatgtgtcacaccctcaggtccgaccgtggctgcatctgaatgccaagcatcagaaaaagcttcatctgcttgtgtccccatccaaacagctaacataagctctcctttaaccttacgcccatgtcgatcctccaacctataccactgaggagccaatggactatcaggcggtacccgtttaggaatctcattgagatcaaacatgattctaccaatcaaatcatctaacaccacatctttgtctttaacgacaacctccaagattgatgcttggatcctctcctttgaaaacgcaaacacttgcttccactccggattcgacctcttctcgaaatgcttagtcatccctctgtagtttccgagcttcacttccacatatggatcacaactaccggtcacatctttccccggtaactccttcgccttaacgacccgtacgtagaggtaatgcatctgctcaaccaaatcataagtgctgcagagtttatcacctgtcacagaacctgcaccaatctttggtgaagtttccttcagtgcaaaatctatattttgccctggtttctgcatcttgtctgaatcttgaaaacttcttgcaattatatggcaaagatccaagaacttgtaagaagaagcagtttcaggggaagctgcttggttctgttatctaagacaacccttctggtaaaaagaaacaaaacacagcagcaaatggatcagagagattttaacagtttacctacaatggctacaacatattagtaacatagacatctctcgaataaaaatcgaatgaatgaaggagtttgagatctacactctactgaaaataataatataagcactgtgaaaatgtttataaaagtggaaatggtaaacttttaaatgttatttaggactcttgttggagttttctcaccaaacaagcagctaccaatctaccaaagacaaacattttccttaaaataaagagattccccaagaaaatgtatataactttttcttcaaaaaaattagagcaacctctcttagctttcttctaggctgatccaaacaaaactcgaaagtgaacattttagaaagagagaaaaaaaaaaaaaaattttctttaaacgggatacaataaaagaagagtaaacaagatgatctacttgagagacagttaaaacaagaagagtaaacaagaaatgttttgttttaatatctttaattcttcactgtcgctgttacttgagctactgatcaaaacaacaactacacataatataaatatcaacaaatacaaaaccaatagaaaaattaggacatggtaatgtacctcaagggatctaatgaagaatagagagaacaacttggaaatacattgttttttgtaatgcaaagtttagaagaaagtgaaaatgttaaaaatgagattgcgaagaagagtagtgagcttttagtgaagtgaagaagaagagagtgtacagtagaaatagaatatatgggacatgtgggtgtgctaagatctgctgctttttagtggacctacacttttgacctcttctttcatattttattcatctttttcttacttttctattagccacttccaatttcactctctttctataccaacttttattagtttatcatttcttcacttactcgtaatagtttagtttttagtaatgcatttagggt

SEQ ID NO: 2885 - DNA, 2249 bp, Arabidopsis thaliana landsberg
taccagatcgttggtttagtaaccctgtaaggaccagatatatggacatggagcttatggatccaagtgagagcatcatgtatctggaaacttgaaaacttgggtatcaagcgatataattagagttagctatcaaataatttgtttctttagtggattgcatcgaaaattttcggattatttaggtaataatttattgattttgtatgcaataattgtgatgcattactttacaaagatttaaccattcttttatcaaaaatcattccatcgagcaaatcaacccttaagagaggaacatgacaaaacatactttatatataacattcattagttcggtaaaaagattgggggagccaaactcaaacttgtatttgattgaagaaaaagattctgaagcaaagatacaaattttgttggtacatgcaaaaaatcttatcctacagagagagctacaaagacttgacgatgttttcttcaatacaggctgaatccaaagaactggctgacaataattgccaatccaagtccaatggccacaagagaagatgcccacgttagtttctcagtgatcctaggaactttctctttcaacgcttcgctacacgacccaataaaaactgtgtagcttcccatcgcaatcaccgtcccaatcaagaacatgatgagaaacgaagcaccggctatccgagaaggaagagccaatgcaggcaataccatcatcagagcatccggttgcaggccatgaacaatcccagtcgcaaatgtcgcaaaccctatctttttcttctttaagcttttctcatctgtttcccattctccaaagtaacaacacatggttatgggatctcagaagcttctttgattctcatagcaccaatcacaaggagagtcaaaccaacgactcttgtaccccaagtccttataacttcagtgtggagcctatcttttagaagcagaagcaataaaccaaagatgagctgaccagcgtcatgaccacatccccaaagagctccaaccgcagcactctccattctcgtccgtccaatcgaaagtggagccaaagcagcaaggtgatcaggtccagataacgtgtgtaagcaaccagcaaagaaaccagtccaagcacttgtcaatacttcagtcctgaggagttttccaccaaccacagcagctccaccagaattagtagccgtttgaaagctagcgaaagcaggcggcacaagaatgggattaagcaaaagcgcagctatagcagagactaatataaccattcctgccgatatggtctacaagaaacacacaaatttgcacacatcagatacagaacagtgaacaatctcaaggtaaagtacacaatactcgatcacgaaaccctaaacttctagtaatcaatccaatggtttcttgaaacaattgaagcctataagcattgacgctcttctccagaaacaccaaatctagtaactgaaaccataacctatataaccaatacacagagacgtaaatggagaagattcatagttgtgaattaccttgcgttgctcaaaactgctcacgatccgttggataaatcctggattaggtttcgacgcatcggtttgagaagaagcaatcaagaaattactactctgattcagtcctggagatgtatccggcaatggattgtggcggaagaagcaggaaatggagctgattcggcgtgactcgagacggcgagaggagggaaaagtactaagattcgttgagtggagacgctgcagtaataagggagatggtcttgattggaatttggagggagcaattgagtgagaagaaggtggttgcaaaagcctatccatggcggcgtctacttctctttttgtccgataagcttatcggaggtttctcagagcttaaggaagagagtgagactttgctctcaatcggtgaggataaaactttttttttctaaaaatatattttgttgcttccttatcaatcaataaaatattagttaattataggaatggaaattaactaaagtaaatgttgatcttatataaaaaaaagtattaaaatataatactattattcatgttcagttttggtgaagaatatttttgttgtatagtttttacttttttatttattgaaagaaggtagagaatagtgtagaaacatgcatgtataagagaaattgtattttttaattgaaattttttttatgaaaaaaagatttatcaatttacattcaaaaaaaaaaaaaa

SEQ ID NO: 2886 - DNA, 1363 bp, Arabidopsis thaliana landsberg
taccgatccacttcgaattttgggacccgggggatctctagaaaattcctcagatgagcaagcccaatttctgtttcagactcataactccgaatcaaaatcccgagcagatgtcttaaagaccgcatcgtaatctgagaaagggcaatctgatacgatgtcacatactccaagactagcctcgggactggcagccacaagaagcagccataaaagaacccctcatacaaggtatagaaacccgtagggggattgtcggctcgctcatctgggctaggaacacgcaagagtgacgttgccaaaaccgaaccgagcctttaaatcagacaatgaccgctcggtgcataaagacgagccgggaggattcggcctaaccacttttttgttcttcttcctcttctttttctcgcctatctcaaaagccgtcttctcgaacgctcgaacaaggttctccgtctcattcggcccgaaaaacagatgctcttcaatcttaacctcaagataaaacggctcgggcacgtcttgccaattcgacgcgccagcctcgtcggtagctgggacacggtgcctacgaacgagggacgtcttgggatctttaggcaaatccagctcgcgggcaatatcagcagtagcgtcctcccgagccataaagggagtcgcctcgaaagcgttcaaagacgacgctgcatcagcctcggagccctcggacgaagtccaaaccattctgcgcatatagatcggggggagatcatctcggtggttggaatcgctggagtcggtgaggttgctactggaaaccgagagagaagcgctagatcgtgaagaagtcatcctcggctcggagttaactaacgaaacgaggatttggaaaatttctagtcggaaaatcaaaatactaacaaacaacggcggaagtctaccgaaaaagaagcaaaactcaaatttttcttcggaaacttcagataaatgaatcctgaggagcagctcaatatatatagagatataaaggcgcgtcgggtccaaaagagaaattaaaacacatcaagagcgcgtgagctcgaaaggagaaaacacacgcgcaaacctcgggaataagcgagacgcttccacttctcaagaaagaaggcgaccacgcataaatggatgtttgaccgtccgggaattcgaagcgccagaggtcatgaacagagaagacgtacagccggctcgggcatctaaccgcatgaaactcgtcgcccataaacaaagacaacgagctggggggcaaactgttggggtcggatttggtctcgtaggaaccgaaacaaccaagcaattttcgagaacgcctcggaaaccaatctttcagatgcttcggatcggg

SEQ ID NO: 2887 - DNA, 392 bp, Arabidopsis thaliana landsberg
  unsure (1)..(392): unsure at all n locations
aggcctcctcccataaaaagtctgatagatcttgggcataagccccaaagaatttaattatgtaaagccaaaaccacggatcagaggcgggggggaagacactaactccagaaatgagtgcaagctgtggtaaaagtccatagacggtcagaggaattgaccaaaatggcttaaacggagagttgcaataacctaaacccattaaaaggtccagtgacttgattccataggtaattgggctatactttgaaaaggacatttcgaaaagcccaactgcccaacggatttgttgacccacaagatcaactaggccctttggggaatcnnnnnnnnnnnnnnnnnnnnnnnnnnnnnnnnnnnnnnnnnnnnnnncttcacaatgaagcataaac

SEQ ID NO: 2888 - DNA, 437 bp, Arabidopsis thaliana landsberg
actagtaccgttactatttatttgagactccctccgggtctcaccgttttgtctaatacacgagccgtgagtacataaagggtgggacatgtttgatgttgtggaaattacgtataagggtttcctttgtttttatcagaaaaagaaatcctctgtccgagttcgagtgttttgtatgggctcaacagttggtaaatgggccttaattgtacattcttatttacattagaatcaaattaaatgttgaagtcaaatcgtcatcgtcgccgacaaattcaatggcggagtgggagctgagagaaacgtcggcatttatgagagtttcaattcaacggaattagttatcaggttggtgaataaaattatataatactcagattctctttaggttttactcgaaaatagctaaatttttgggggggaattctagctcgtgt

SEQ ID NO: 2889 - DNA, 370 bp, Arabidopsis thaliana landsberg
  unsure (1)..(370): unsure at all n locations
actgtaccaagcncnncaccnanggacctttgcattgcaggcttccagtagtgcttggggggaccttggagttcgattcagaaaggaatcacgcaagggaaagatggagagataactgcgtcccatttttgcaagataaccatccattggtcaaaatgatatggcctattatcaagaacttgttgaaggtcctccgagaaatcaaacttgagttgaaaaacttcctgtcctaggtctgaaccaatggctttacccctgagagcccacagtccgtgtccatagggattggtgagacggccaaagagggttagggcattttcttcaatgagatctgaggtatcaaagtcaggaccgcggattctcttacggg

SEQ ID NO: 2890 - DNA, 429 bp, Arabidopsis thaliana landsberg
  unsure (1)..(429): unsure at all n locations
ttaactttgtagttttgctaatgtcttttggaggtctccgacaagttggttggaagagagtcctctggaatcagcaaaacaaaattaaatggatcatgtttgagaaaatcactgggtcataaatttgtttnnnnnnnnnnnnnnnnnnntttaaaaagggtcttacgtacagtccttgtagattcactaggttccctagttccttaggaatagttccagaaaattgattggcttcaagaactctgcaatcaaataaaaagacgaaagatttagttttcaaaaaggacaaaaagctttatatgtaaatctcataagatcaacaaaataatgttaagaacatacaanaggttgaagttaataaacttcctcaatcctttgggaatgtctcctgataagcggtttgcacagacagagctacagagaaatatt

SEQ ID NO: 2891 - DNA, 2259 bp, Arabidopsis thaliana landsberg
  unsure (1)..(2259): unsure at all n locations
gaacaaaatcagtaagaatttgagaaagagatgattgagcgaattaagaagatggagaaagagatgattaagaagattaataaggtgaaggttattgggaagagtgtaggttcagctgtgaagactgtaggtcttagtattgtaattgtaagatcaattgtatggctttggggaggagtgtagtttaggagtgaaaatggtggttggtttatagagtgtaataagaatgtgtatttggtatgtgtaatatggtatgttttaagagtaatggtaatggaatgataatgagaatctgtgttttgtgtcttttggtgagaatttgtgttaattgataagactaatgagaatctgtgttaaatggtaagactaatgagcaggatagtgagaatccctgtgattggccacttgcagcatgagcaatcccactcctctttggtcaagttcacaaaattagaacttccatcaatccagacctcaaacttgccatgtgttcctttggtaacttcacatttcatagccctctccaactcttcttcgagtatgtctgatacatactcggatatcttctttttccatcttctagccttctcctttctcttacttatacgtgccatagcttgtcgtctttacttgcatgtctcttctttagattctccactatatgcttcacacaaggtctgtgttcagcatttggcaatgcactcttaacagcactaatgattccctgtaaaagacatacattagacttggtcatctacagaaaataaatcacttaataactcacttagacttgatcataccttacaacggtctgacaaaatcacatagctagcgccatccttcaagttcaagtcatgcttcagctggttcaaaaaccaaagccaattgtctgcattctcggattgaactgttgcccaagccactggatatatctgattgtttgaatcatgagcaatagctgtaaaaagacaacccttaactgcatgcttcagaaatgttccatcaatcccaatgattggcctacaaaagtagaatgcattcttcattgctccaagacatacatatatccggctgaaaacatcattccctttggcatctctaatagtatcaacgattgcagttgaacccttgtttgaactcatgatttctgccacataccctcggagatgagaaaactgtttatcatactcttctttcagccactggagagctagaagtcgaccttcttgtacttgtcctattgtacttactaacttccattgttccttgatatgcctttgaatgtcaagaggcatgtaattaggttgcagcctcaatttatccataaatagtctgccaatcactcttctcttcaacaacttgcatttcccattagaagtacaagtatgatccaaacatttggtcttcacagaccacaactgcctagcagaatcgtatgaggcgtatacataccagtcacagtcctttcgttgagcacacctaaagctaatcttatccttctcccacctattttgcctagcattaatcctatgcttcaatgcataatgcaacacacattctctaaactcaaaaccagtgaagaatgtctttcctattgctaacttatcatctgatgccaacctaattttcctatctctagtgatcacaggatcctcgtcttcatcatctgaatctggtatttcattgcgaccaatccgaaactcatcaaaccaatttgctatagcttcctctatctcgaactcaaacctctccattatgtcttcttcaggtacatcttctttcttttttctcctcttcctttgagactctccattgccttcatcattttctgaatcttcttctctcttcttcttttccctgcgggtttgttctccatcttcggctccatcggcctctccatttttggctccattggcctctccatcttcggctccatcagcctcgacctctccatcttgggctccatcggcctctccatcttcggctctatcatcggcctctttttcaccggctccgtcatctctttcgttggctccatcgaactctctttcagcggctctgtcgtcatcttccttgtcgtctctctcagtctcaatctcactatcaaagtcccctgaatctccgcttttatcactatcacttccaccgtcgacatcactcccactccccggatattcgtattcgggatcactctgggtactctcataaacttaaccactcttaagatttngcccttcgaagtaggacgacattgatttg

SEQ ID NO: 2892 - DNA, 576 bp, Arabidopsis thaliana landsberg
ctctatcaatttttaatgattttgatgttcaacaagtgttttggttatatggctccggagtatgcaatggaggggatgggctcagagaaatcagatgtgtatagctttggagtgttgatattggagattgtgagtggaagaaaaaacgttagctttcgagggactgatcatggaagtctcattggttatgtacgtctcttttctttaaccataaattttcaggtctaactaaaatattcgaatatttgttactaatgaatgttctaaacggaaaaaaaaaaataaggcgtggcatttatggagccaaggaaagacaaaagagatgatagatccaattgtgaaggacactagagacgtgacggaagcgatgagatgcatccacgtgggtatgttgtgtacacaagactcggtcattcacagaccaaacatgggttcggttttgttgatgttggagagtcaaaccagtcaacttccaccctcgagacagccgaccttccactcgttcttgaactttggtgacattgaactcaactttgacggtcacgatgttgcctccgtaacgatgtactttcacaa

SEQ ID NO: 2893 - DNA, 557 bp, Arabidopsis thaliana landsberg
tgaatgatcattaattcccattttttaactgaatcataaatcatgttgacgcaatagtttccaaattttaacgcatctttttttcatcagcccacgcaatttgatttaaaataaaatactaaaattcatttttcttggtttgcacggcagggacgacgcttttcatgtatatgttcccaatgatggtcgtagcttgtttgggatgtgtctatcttcacttcaagaatcgaaagtcgccacaccatatcgataggtacaaattaatcagtcaacttttaggtatataaactgcatcactttctttgattacaacttgttgctcttaatcggaaaaagggagacgaagggaggagtgtggagtaaactaagaaagccaatgttagtgaaggggccattaggaatagtctcagtgactgagatcaccttcttggcgatgtttgtggctctttttctttggtgctttatcacttatttgcgcaatagcttcgccactatcactcctaaatcagctgccgcacatgacgaatctttgtaagctttctttttcttctttcgcc

SEQ ID NO: 2894 - DNA, 441 bp, Arabidopsis thaliana landsberg
gggagcttttaatgttaaagccattagcttaacttcatttttctttttttggaacgcaggggaaaaaacagagcaagggttgaacataatcttacaggctttataccaacatcatcagattcaaagatagaatctgacgtggcatatacttgtgaatgattaagtcaaacagataatcttacgttccaaagaaacatgaatactgaataattaattaattaatatcattgagagcagataaaaacaattaattgatatggtctctttaatctaagcccaatatatttctttctaactttcatctcgccaaaaaaatgaagacttattcattaatataaagtaattacatttggagtattatatgacaacttctcatattcctatgtaaagctaatccactttcagaaacagaccttgcgtttctctacgctttacggtttt

SEQ ID NO: 2895 - DNA, 567 bp, Arabidopsis thaliana landsberg
gggaggagaaaacatatacggcaaaggaccactgacatatacttattgtcttttgctgtggtttttttcttctggctggcgcgtatgcgtctccttctcgtaagtatgcctgtcgaaaaataagaaagctagtttcttataactccaataaaagaactatcatttttagcaatttataaaaccaatacaccataatttctctttattatttttagttatctttggtatagtatcgaatcttaaattaattactatcagaggtatacactaaaaatgaaataatggccacaactttggaacatttagtacaatttccaccagtcttcaagttccaaggccatcttttaaactcgacctttgcagttacatactaaaattattattatcttcggaaatctgagaacatgtttaaattataaactttatggacccaatatgtgggatttaagttttaaaacatcaaaagggacaccaccttatctccttttcttggtctgatcaataatctaaacaaggtttattatcattcacactaccactctgattaccctttacgtgaattctata

SEQ ID NO: 2896 - DNA, 580 bp, Arabidopsis thaliana landsberg
  unsure (1)..(580): unsure at all n locations
aactttttgttccctacaaccaaggtttcgttcttttcatcaattccaggggaactaccagcagggaccgccacctgggtttgcacctcatcaaaaccaaggtcctgctgcccctgatcctgaaatgaaacagatggttcaacagctactacagggacaagcatctagctcaatggaaattgctaagaaattatctgaattgcaccataagctggactgcagctacaatgacctgaatgccaaagtggaggcattgaataccaaagtcagatacttggaaggccaatcagcatctacctctgcacaaaaagttacaggacttccagggaagtccatacagaatccaaaagagtatgcaaccgctcacgccatcaccatctgccaggatcgagagctgccaactcgacctgtccctgatttcatcactgggggggggggaaccacaggttggnaattatttttttttccaaaaaaaagggaaaaaaaggggggggggggggggaaaagggggggcgccccccttttttttttcccttttttaaaccccctttttttccaaaaggggggggggttttttttt

SEQ ID NO: 2897 - DNA, 442 bp, Arabidopsis thaliana landsberg
  unsure (1)..(442): unsure at all n locations
tgtgttacgaaccgcgacgacgatggtaagcttcatcgacactaannattagattcggtttcgaattatagatgaattaaagattaattgattcgatctgcatctaaaattagaatatttgggttccctaaatgttatcctcttagggtttagattccttgcattaacaatcgtttaattagttccatcgagttcatcagaggaggttgatgaaagaattgtattgtgagtcgacggaagtgaaggaaacgatattgatggagttgaaagtggtgattttgaaggagtgtggagtctaaaaacagaagaagacaaagtgatatttcataaacaaattgaggagaagattgtcatttcacaaacgaacaaaattccctttttataagcccaactaaaatgtgtgtattttagagtttctggcccaaaatatgcttatatctat

SEQ ID NO: 2898 - DNA, 496 bp, Arabidopsis thaliana landsberg
  unsure (1)..(496): unsure at all n locations
cggggacgcgtgggtgcgcatcaagtcatacgaggactccatgntttcgctcaaggccagcaagttcctggaggaggtcttcaccatggacaatgtctcctaccccatcatcatcgaccagaagtactgccccaacaacatctgcgtcaagtccggcgcctccaaggtggccgtcaacgacgtcgtcttcaagaacatccacggcacctccaacacgccggaggccatcacgctcaactgcgccaacaacctgccatgccagggcgtgcagctcgtcaacgtcgacatcaagtacaatggatccggcaacaagaccatggccgtctgcaagaacgccatcgggaagtccatcggcttggcaaaagagctcgcctgcatctgaaccaattgactaacatgcatatattatatatataatcactcttcgtaacctctctctttcttacgtactctcaagtctccaccgaatatataatccgctggtctgcattttctt

SEQ ID NO: 2899 - DNA, 1010 bp, Arabidopsis thaliana landsberg
  unsure (1)..(1010): unsure at all n locations
accacaaataatccccaaaagctcttaagctccagcctatccacttctatctctgcgccttgcagagagcaagcttttctaagcaaccatttgtcccgaattctctgcatatctccattttctgatagctgcaaaattgcagcggagacgtccacagccaatggcgagttacgcggaaatgcctgaacagtgggagagaaaaaatacatatcataaatcactatcgcattatcaaattctaaaaagttatgcatggaagaacttcctgatgtttcttccttaattatctatcatcaaacaagtagggagttgtttatattcagaacaatactcacaaatccccatccgtttttcgtgaactcttgaccaactatgccgaactcacatctgtttgagaggnnnnnnnnnnnnnnnnnnnnnnnnncaacaacagccgcaacaccacctttcccaggaccatctctcaaggccttatcatattcctctggagaccggagagggacaagtcttgacacatggatattgagttcgtggaccagatagtctctgacaaaggagccttgtggatacccaataggatcatggtttgtttgcaaagtttctatgcctttaattggtgaagacagctgatgaactgtgaggattgacgtgaggcttgcggtataactagagttaattatgagaactacgaatagccatattatcagcactattcttcctaggttgctggtggtagtctctcctgtataaattcagcagagaaaattggaaaccaatttaaaaatggaaaacaacttaagatagaatagggggtgtgggcagtacacttactatgagagaagaaaagagttgaaaagctaaacctgcaagacaagtaaacaacgacatatttcagagaaaaaattgtagtgtttggaattacgttcatccagttggagcttattatgttttcaccagaaagtagtgatcacttgtctacgaggagggctcgaaactcgtcattgtgtttg

SEQ ID NO: 2900 - DNA, 3237 bp, Arabidopsis thaliana landsberg
aacattcgatcttaaaatcgattttttggagccttttattcggtatataccgtttttaatatagaaaaaatcaagttaacacaattgcattttcttgaaacacagagaatttaagcataatgatcataaacatgttaccatttaccaaatgactttatcatgcttctttggctacttgagcaagaggatctacaccatttttagagcagaaatacactccaaaaaaaagtaactcaagtctcaagatgagttgctagcaccaaaagatattgcgcggcgctggcttcaacaaaatctgatctacgtttcactagaccaacaactaaaatagggtggtcgtcctcgcttttgtgctccagaattcgtccattactggttggtgaatacaaagcaaaaaattacgaaaacgtacttgaagttgtgaactgttttatataatttacctttcttcaaaacgccatagaagcatagaacgatcgtgtaacaaccatgcacgtcaaatctcagggaaaagtccatgtaagattgtcccttccttatcatacatacatgtccttaactaaagaaggtaatttccaatatgcgtcaacctcggcccacggctgcaccaggacaacatgaaaaataaaattaaaaaccattaaggaaaaaagcaagcaatttgtttcatgaatatttatgcatagatataattaattaccttgcttgtttttcaggtgatggattatataaattaccacggctatattttgtaaagtcaaagaattcgttgattggacgacgctgcagcgagccttcttggcagtagtggttaatgagttcccatgcgagttccacattcttcatcgaaatcaacatcttgctggctacttttaattcactactagaactgtcgagcaagtaataacataaccctaatgaaacaaattacacgatcttatgagcgtgaagtggctacgaggtatttcataaagcattttaattttgaaaatcaacttcactatccaaaaagttcctaaaatctagagaaactagttttttaagcgatttgtttttaagtttgttacaaaatccaaaaattaatttaaatatatattcacagccaaaaatgggctacgaggtctattgacccaatgggctttttaagacttaaaccaggttagaaaaaatgaaagaaaagtcgtaaatgcctcgtgtacaaaaaaaagtggttaaacaaaacaaaacaaacaaacaaagcgggctttgaaaactccgcctccgtttgttggctatttacactcactctgtctccgccggtagatttgtcagctgcgtcttcctcgttttctctctctctgtctgtgtctcttagaatgcaatcagctatggcgctttcgttctcccagacgtcgtttacaagaccaaaccacgtgctcggatcatctggttctgttttctctacgcccagaagtctccggttctgcggactccggcgggaagcgtttggtttctcaacgtcgaatcagttggctattcgcagtaaccgaatccaatttctaagtaggaagtcattccaagtctccgcttctgcttcaagtaatggtaatggcgctccaccgaaatctttcgattacgatttgatcatcatcggagctggagttggtggccacggagctgctttgcacgccgttgaaaaggtttgaagtttcttatataacctgatttgatgaaagtaaaagatttgctctgcttattatggaaacattggtgattttgtttgtgttagggacttaaaacagccattattgaaggagatgttgttggagggacttgtgttaacagaggatgtgtgccttctaaagctcttcttgctgttagtggtcgaatgcgggaacttcagaacgaacatcacatgaagtcctttggtctccaggtaaatatcaactcatgttctctgtttaaagttgcaagctttgtctttggtgtgaaatggttgtagaagatcgagctagttcaggaattactcattacctttcactatcttctggtttttggttttcctttgggaaacaggtttcagctgctggatatgatcgtcagggtgtggcagatcatgctaataatctggctaccaaaatacgaaacaatctgaccaattcaatgaaggcaattggtgttgacatattgactggatttggcagtgttctggtcagtactcagtagtacgttctattctttcacgtttactaactgtagacaggaacatgatacaaacttttcttaaacgatgatcctaactcatatcaatattttgtatttctgcagggtccacaaaaggttaaatatgggaaggacaatattattactgcaaaagatataatcattgccactggatctgtgccgtttgtccctaaaggaattgaagttgatggtacgtttcttgttttggacgtagagttgttaagggagcatgcagacttgattattccttgaatgtttacattttggcgctgcaggaaagactgtgatcaccagtgaccatgctttgaaattagagtctgtccctgagtggattgcaattgtaggaagtggttatattggtcttgagttcagtgatgtttacacagctcttggaagtgaggtaacatgatgtttctgtactaatgatattactttagtacgactttgtgatgttgtgtccttgtacttgagattgtaataactgcaattagcaatgttctccaattttctagttctttgtttggtctcttcctgtattgagcttgtttttgtgtaaatagtagaaaataagattttaaggtaccaatctgttggtttttcgatttaaattgtagttagtgatcgaaaacggaaaccttttgtgcaggtaacttttatagaagcactggatcagctaatgcctggatttgatcctgagatcagtaagctagctcagagggttttgataaatccaagaaagattgactatcatactggagtctttgcaagcaaagtgagcctgttatatcatgcattgcaaatactgcttctctttctctatacagtgtgtccatgtattcatctgttaaacttaaatctattcttattcagattactccggcaagggatgggaaaccagttttgattgagcttattgatgccaaaaccaaagaacctaatgatactttggaggtaaccaatggaatttaaagataacatgatcttgtgtctcacaaagagaattttaacagttac

SEQ ID NO: 2901 - DNA, 380 bp, Arabidopsis thaliana landsberg
  unsure (1)..(380): unsure at all n locations
tctacgccgcagaccgaagaatggggattcgaaagttttgacggcggggctggaaccaccaccgagcttgatggtgtgtcaccgcctccaccgtgaggattagctacatcagttaggaacacgggcattgattaccagagacagggtcagtatgctgctgccataaagtggctctctagggctgagattgttatggatagannnnnnnnnnnnnnnnnnnnnnnnnnnnnnctttcatcaggggcttcacgctacaaacaagatggagagtcttagatagctgtagccgtctgccctaaggtatggtaagagaggcacattttctcttggatgcatcatggaccatggctcactaaggactcatgatanaaatgatactg

SEQ ID NO: 2902 - DNA, 3170 bp, Arabidopsis thaliana landsberg
cgatataaaaaaattagtatgctactgtcaagcattttctttatcaccaaaaaattctgtaaatgagataatattatagatttttaaaaatatatatatatatatatatataatttgctgaaaagttgtataaatatttcagatcgatgtggctgaaaaatatctaacgtgatctcatatacactataccagaagaatttaatttgcagcattacctggaaagttaaattttagaaaaagtaatgtttataaatcatcaaacgagtaccaaattttggatattttcttttgacaacatctactatgcaagttttagtttacatgtccgcgttattcgtggactacgatcgaggataaatttgcccttcactatttgtgtacacatatgcaatgatgcaataaatgtgaacgaagatatgcttgtattcatatcatgtgtagttgtgtacaagtgttaagaggcccgaagttggaggataacataacattgtgcttttgtaagcccatttataaataaatcttagcccatatgatttgtgaaaaccaacaccgtccattaatcctcaggttggaaaattgggttctgttacggtggaggcttaagtgactgaatttttgagttatgtttctgtcaatgagttgagattgttaatattcatccaacgtaaatagagaccaaatgataatgtggaaagtgaacttgctatttaaccttaaatctccagtggtgcttttgtctttcaatgttgcgagacaaagaggatttggaagcaacacaaagcattaagaggcgatttaataatctggtgaaggaatgagtgatcaaagaggagacatacaaaggagacatcaatgtgatacactgatactaagggctaaagtttctttgagctttaaagaaacttaaagtcacacctacttttcccccatctagttacatggagactactactacaaacaaacaccttatcattaagttaaaaccacacaaacctacaaaacttcccatcactgagagagcttacacatacatatcactacttcactttcttactacagcctaatactacccaagaaggaggaaattcacaagactgaaagagagatacaagctgagtaaacactacacatgcccgggtttatgggcagttcttgttcttaccgggaccaccgtagtagaagtaatgtccccagtcatcattgcttcccgtttgaacatcataacagttggacttctcggtgaatgtaccaagtccttttggtgctttgaggttgttggatccatctacgacttgaatgttccgaaagtaacttgctttactgaaaccttcttctggaaagtgaccacttcccatctgtgtccaagtgtggtggccttctgactgtgagttcacaacttctcctccccattcgatcatcgatgcactttctgttaggtaggagaacagaaatgatggccagtaccccaaaacatacccattcccaaattgcatccaccaatgtccctcctttggatcctatgacatgttcaacataacacattcagcctcaaggtttcagtttttctttagagaaacaaaagatttcagttctgacacaagtaccttccagattagaatactgatatcatactgggaattgcggtatccagagactggtgagatgcttgctcccattgctatgtcactgttgatttgaatgaaacctgagcaaagaagattgtagcaaccggtagcttgataggcatcactctggaagaagaaagattgagcaacgtaagaacatcatgctatattacacatacaccacaaatattcaattcaaagggagttttaaaatcttacagtccagtaagtgaagagtcttgtgttattgtctccatatagatccggactcacctgttgtaagcaccacacaatcaaaacacacaataaattgcacaagtcatctttacatctccaaatgatgaaaatgtcttacctgccagccagcttcaatactgttaagatcttgtccaaaggaaccccccaaaagccatatctgcgacaagctaaattcgtttgtgttctgtatctttggctcccacacattcaaagtcgccttagctccgtagtacttatctccttccacataagctatggcgtgctaatctcattgaagagttcaagaaaccaaagcttagatcaaaatgactcatacttaacaaagcaactacaaaagtaattaaaaaatgaagcatttcttgatatccctcacctgatgaccattttggttgatgaggtcgggttccgcagatttaggaataggaacagacctatgcttcttcaagccatatcttttaactgaacttgctctcaacacatcatcttcctttgtcctcctcatgggaatagttccttcagaacatttaccatatcgatgccacaactgaggaatatgcccttctttctcatttgatttaggagcagacactttgttgtcatcaaagagtccttcagggtggtaattaggcttcatctaaaaaaaaacaaagtatatataaaaacatcagcacttacaacataaaacacaaagccagatctaaatcagttatgtttttattctctagacctgaatcttgtgatctttgaggaacggatgatcaaaagctggttgctttgagattggaacacagtcaatcacatcaccatttggactctgtttaaccacaacggaacactaatattcaagtcaaaatccttaattatgaccataaacttttgtgtaacacttttatgaaatcttggctgatttcgagatcagcgaaattcaagagacaaaatactaagcgcaaatgcacattgcaaaagtaaaaataacgtaaccaataaaagttgcttgtatcaattagaacttaagaagttttcatataagcaatatccattactcgaagattctcctataaaagggttaatgaaattttcttcattctacttataccactaataaacttataaacatcaactatttttcatcaatataaaaagtacttgaatcgagcaagggatttcaccaatatactgaaaaacaattaaattgagtaggagaaaggtaagccgggcctagctcggtttgttactggtcatgtatgggctgtaccaaatctgggtcattgaaactttagataaaac

SEQ ID NO: 2903 - DNA, 352 bp, Arabidopsis thaliana landsberg
gtttcagtttgagagactcatgcgcatctgtagtttttttttttttacccataacttgaactattgggcttagggccaacgttctcagagcatcgacagggaaagagctgtttccagagatagagttgtgaggtctagcgtttactctttatttcacaggactgatttcttttttcagggttctttacattcacctctatgagtgtcaacggttccactgtatgcacatgaatatgtagtttgctacttcattctttccttttttaagatatttagctttccaatgctttcacaattcccacttcttaagtctttattggtcggttacagattttcccttgtcttttacttc

SEQ ID NO: 2904 - DNA, 572 bp, Arabidopsis thaliana landsberg
  unsure (1)..(572): unsure at all n locations
cgacagagccngcatcgagaaatggctatttgcaggcaagaaaaactcgtgtccggtcaccaaacaagacataaccgacgcggatctcaccccgaatcacactctacgccgtctcatccaatcttggtgcaccctaaacgcctcctacggcgtcgagaggatccctaccccaagacctccgatttgtaaatctgagatcgaaaagctcattagagattcagcctcttcccatgaaaaccaagtcaagtgtctcaaacgacttcgtcagattgtgtcggagaacgcgaccaacaagcggtgtttagaggcagcgggagtaccggagttcttggccaacatcgtaagcaacgactcagaaaatgggagtttgaccgacgaagccctcaacttactttaccacctcgagacctcagaggcagtcctcaagaatcttttaaacaacaagaaagataacaatatcgtaaagtcgttgacgaaaatcatgcagcgtgggatgtacgagtccagagtctatgccactttgcttctcangaacattctcgaagtagcggatccaatgcagagtatgactc

SEQ ID NO: 2905 - DNA, 660 bp, Arabidopsis thaliana landsberg
gtacgaactctacctcggccatcggccacttgtgaattttggcgtgagttctaccaggccggacacaaatggcattgtttttgatgtttacacaatcacctatgcatttcgatgccatggccgaatctctccaatttttttttttttttttttgtgaatgttggtttttgctagataaaattaacaagttgtagtgtgagtaattatggagagagatttgtggtaataatatatcttttttatttttggcaacgattattattgactgaaaaagtatgactcaattaattaacgtgacttccttactgtctcctttacatatcattaagtaaacaattgtgttgtgtataaatatttatgtgtgttcatcaatagtcaatgatatttttttcgtagtcattattcattaataacaatcataatttttggtataataaaggaaagatttgactgacacctaaaaagaaagaaaattttgacaacaaatttgactgatttctaacaaaaatatgtgtagctaatttgaaacatttcgattaatgtacctaatcagattactgaacttgttcggtcaacccaaaatcctgcttactatataacctaatcagtcgatcctgaagatataacacatcaactgattgtgataaagaataaaactca

SEQ ID NO: 2906 - DNA, 442 bp, Arabidopsis thaliana landsberg
gggattcatcctgaagtatgttgctgacgtaaaagcatgactacgaagttccatgtgtaataaacctaattgcttcggaagttttcgtaactgaagcctgatgatatggtcctcaatctttcgtggtctcctgcaagagaaagcacttgtggttaccattcactcttttatttttctgcaagacttactggtgtctctagttcctgaatgattcagctttaagtttttcccattatagctgagatgagccaaacactccatgaaatctattgaactagagaaataaaagaaggtcaacaaagcttcaagtgctcaccttgatgttctaccctttcgctaaatccaagaaattttcagcatcagccaataggaacggtgatccctcgtagctctccagaatatctggtattaacatacaatttacgtataaaaaaaaagaaaa

SEQ ID NO: 2907 - DNA, 2349 bp, Arabidopsis thaliana landsberg
aaatcagatcttgctatgaaaataatatttttataaattttcataaatgatgacatgaaacaaatcgcatattaactaatatgaaaatacagtattaattttactcacagaatagatctgaagtgtcaaggatatcatatccttgacacaaagtacctatttcaattgttgtgtgcacttacttttacaaatggccaaccattaaatttttaaatgtttacacaatcgtcttttttttaaatgactctatttattggataaatttattttctaatagtatggtattatactatctattttattgattaatcaatgatgaggaatttatattcctaaagctaactaagcatgaattccatgcaccgaatttcctaaaagagaaaattgacatgaaaaaagtgattctcttttactaatatacatttctcaaatgttttcattttcgctataaattttacacataagtatttacatgcaaaagtttctacgtaaaaagcttagaggaattactcatccttccttacaatgatttgttagagttattagataaaaatacacatgacgctcccaaaaatcgattaatggaagttgtgttgtgatatgtgaatagtactatacgagaagttatttaatttgcagattctacaagcagggcttcaagacaacgtacatgctttcgaataacgatattggtcttctgaacgggcttacttttgtcgttggtatatgtggtcgataatagcagcctataacaatcttgaaacatattttttttttgtggacacatcactgaatcgattcccataaggccacaactgactaaaagaaattgtagttgttatcagctagttggtctgattccttcccttccgtaagggaccatatatattccaacattccgaactctgttgttttagaataatgactcttgccacagattgctgattctttcctctataaaagtggctatgaatttccaaagagactctcactcactctcattaaaacctagagaagcaaaacatccgtataagaaaaatggcacaagctacgcgtcagtcttctctacaaggggaacttgaggtagatattgagatcaaagcatcggcaaagaagttccatcacatgctctctggaagaccacaagatgttgcgaaagccactcctgacatccagggatgtgctttgcatgagggagagtttggcaaagttggcagtgtcatattctggaactatgctattggtaaacacaaacgtttatttataatataattttgcaacaacatacaagatttgataggttaacccttcgttttgggtgcagatgggcagcccaaggtggcgagggagaggatcgaggcagtggatcaggagaagaatctgttagtgctcagggtaatagatggagatctgacgaaagagttcaagagcttcttggtcactatccaggcaaccccaaagctaagaggaccgggaagtgtggttaagtgtcacttaaaatatgagaggattgacgagaaggtggctcctccggagaagctgctcgagttgtttgccaagctaacccaatcaatggacgaaatgcttttgtccgaagtctagaggattccttggatatccatctatctatctatctatctatgtttgtgggtgttttgtaagatatctcaaattttcaataatgtgctctctctatgaagagatctgaactgcaagtattgcagagtttgtgttacgtatgtttgaagtttttaattagttgcaaattataacaattgtgttgctgctatatgtttcgcctatgcatgttatgttttaagaaaagtaaaagcgttcgtctacttttttttttttttttttatgataaaccctatcggctgatccggccagtctcggtagaaacgcactgaagtacttcagagtcaacttctcccgaaggaccaccacactgtatgtcccgagattggaatgctttccgactaatggcaggaggtaataagatcgcctgcatttctgattaccagataaaccaattgggccaaggctcaactgatagacttcccaaataaagtcgtatacttcttataagtacaataattaaagttgctaagcccaaacaattcatgtgatggtcaagtcttaaaatttcatgggaaattccgtcaaaattacctttattttcttgtaattaatgatatattattattagaatcatcttacttaaccaattttgtatcacttttttattatttcaccaattgacctaaatttgtttttatttgtttaacttttaaccaattctatatgttttgttatccactgttataatcgatcactctcggacgtctg

SEQ ID NO: 2908 - DNA, 624 bp, Arabidopsis thaliana landsberg
cattaaagaagattagatgtctaatctatctgaaatatacgattcaaaccacatgaagttgtctttaattgggccctatttgctagtgaaaatctgtgtttactttcgtgaaaaatagggcaacaaccaagaaaagggccacgtgagagttattgtaggagagtcgcaacaacagggtaatgcaacagacccttttttttttcttcttctaaaagtagactttagcagccataataaaataccagctttcgccatcgagtcactcataataatatatttgattaactagttatcatcaaatgaattcataaaatcttagttgtttgtcagtaaacaaaaaaaactacagttggtaaatgcaaccacaaacgaaataatcagcatgaggacatattctgtttttatagataaatcataaatggaatcaaacccaactgaagggtattattaaaaataaaacgtgtgatataagaaagacacatcttagatcaattggatgatcttctcatctaggatttgaatcacacacaaactttacgtgatcatgttaaattagggccaaggcccaaggcatgccatttatttttgaatacaatgtaaaaaccgaaaacttagatagaaaaa

SEQ ID NO: 2909 - DNA, 592 bp, Arabidopsis thaliana landsberg
  unsure (1)..(592): unsure at all n locations
acccgagagtgaagttttggagttttggttggtaatgctacagattttcttatgggagtaagcaatgttcagatccttcacttatctgataagtctcttgaggtatattaacgtaacattgattctttgagttagtgattgcagatagattgtgaacttgtttatttggtttttgtttcaggtactcactttttgttgtgaaacaataccggtattcaacaggttgatacatttgacgattaagactcaccgtcatggagaagtcggatgggaatcattgccggctttactaaagaattgtccaaatctagaaaccctcgtcttccaagtaccaacacattttgtttactgcatttgttaacacatttaactacacacaattagatttttgatggtgtttccttaatgattntagggactccatcacaaagatacaattaaatgtgaagaagttgatgggtgcctttgcaaatattttgaggacattcctacttgtttnnnnnnnnnnnnnnnnnnnnnnnnnnnnnnnnnnnnnnnnnnnnnnnnnntttttactacgatgatatgaaaaaacagttagagcaggacaaac

SEQ ID NO: 2910 - DNA, 575 bp, Arabidopsis thaliana landsberg
aaaaattttaaaaattcattagttttttgctatatgtatatatagggttacatgttgtacttttttttgtctttaacttaaaataaaataaaaaaattatcacacactaagtattcataattaaccaagtgttgttagctcaactggtaaagattttaggtcaaacttaaaggttgccggtttgaatgatgcttgagacaaaattaatattacataatatagtttcgggccttgaaagattattagtttaggttcagaacctcttcgtattcaaaaaaagtaagtagttagaatactgttaaaataataaatttacaaaacatttgttaaatttttaaacttttgatatggtttaatttgacttttatggtcaattggaatatctacgattaattctattggtttgttctcattgggcaaccatagacttcgacacgagaatcgcctctaaccaaatgtctaattttatcatgtttgtatctatttttcttttggtcaatatttgtatttatgcctaaatttagttaatactataaaaagattagttactaaatattaaaagtcacaaaaaaata

SEQ ID NO: 2911 - DNA, 532 bp, Arabidopsis thaliana landsberg
  unsure (1)..(532): unsure at all n locations
ctccgccggcacgggctgcacctcctgggcacgtcctctcgttgttcctgctggacatcgccttctagggaggtcctgttccagaaggacatcttcaccgccgtggggtggatccccaaggcggcgacgatgaacgcgctggaggagctgttcagcatcgcgcgggcgcagtccctgatcgcgctgtgcggcacggtgcccggctactggttcacggtggcgctgatcgacgtgttggggcnnnnnnnnnnnnnnnnnnnnnnnnncctgatgatgacggtgttcatgctggggctggccgtgccgtacgagcactggacgacgccggggcaccacatgggcttcatcgtcatgtacggcctcaccttcttcttcgccaacttcgggcccaacgcgaccacgttcatcgtgcccgcggagatcttcccggccaggctgcggtcgacgtgccacggcatctcggcggcgtccgggaagctgggcgccatcatcggctccttcgggttcctgtacctggcgcaaaaccgggacc

SEQ ID NO: 2912 - DNA, 180 bp, Arabidopsis thaliana landsberg
ctgacgcgaggttcttaccatatgattacatggaactcggccttgctccttacccttgatccagtgccgctatcatcatggcatgccgggtgaactatgtcaaggtataatcgatcctggcactcgagacatgattttgatcaaacgacaaccgaccactcggctggactctaacctccg

SEQ ID NO: 2913 - DNA, 473 bp, Arabidopsis thaliana landsberg
ttaattttaattttaaacaaatgatggtaggattgcgcaatcaaactctaccaaaataatcaaaaataagtagttaatcgagaaaacaaaagaccaattcagtcatatcaggtttcttgtttctttgtcataactcttggatcaatttatgaatcttatcgaaatgtcacgaaaacaattttacgtaaaatgtatgaactaatatcactgtagagtatagacaaagtcaaaatcaatattaaaagttaatatgaacatacctcttcaagcatggtgagtagtttcactttccttctttgatgctcaatccgatcagacgccgataaaggaggatgctccttgtttgctccggccgacgaaggagagctgtcaccaccatcaccaccgcatgtattagggtttgagctgttcccaagtttgttcttcttcaaaaatcctcttccaacactacaaaaactctttcaacaactctt

SEQ ID NO: 2914 - DNA, 509 bp, Arabidopsis thaliana landsberg
agttgccgttctgctttatgataatccgtcacgatttcagatttactttctgtcttcctctagtagtacactgggtaggaacctggtggaattctgatgaatcctgcagtaacaagctctcataaaaattactctgtgccaagagatgctgccgatgcaatagtgttttctgtatgcttcatatgtccagctgataatgtaggaagtgtaattggcaaaggtggctgtttcattaatcagattaggcaagaatctggtgcggccattaaagtgcatacttcagaaactgatgaagatgatgattgcataattttcatatcagcaaaggagttagtgcaaactttttcttcttaatgagaatctcatttttcaatatgtgaaattttaaactgagcttatttacatcagtttttcgaagatcaatccccaatggtgattgcagccttacgcttacaatcgcgatgcaatgagaaagtggggaaagattcaagtgattctgcattctctac

SEQ ID NO: 2915 - DNA, 574 bp, Arabidopsis thaliana landsberg
  unsure (1)..(574): unsure at all n locations
aaaaacctaaaataataagaagtaagtacgtagtgttaaaactagaactttgttttgttgtccttggaccctattttctggaagggtatccccgtcttgacgcgtttccacttttccatctttgtcgtagtcgaccttgatatgcgatatgctaacgggactatatgtaacatagacttttcttatgccggtgtaaataccatggtcccatgggctgcctccagtaccaccttggtattcctgtttaataggaggaggtggtgtgaaataagctccaagagattttaggtttgnnnnnnnnnnnnnnnnnaacccagtgattttgtttccactgatttcaagtgtaaacttagtgccagtgtcatcgtatcccatgacttcagaactcctttgattggtttcgaattgaagtgcttgcatcacaccggatatgttatcatagcaaccttttactgacaccacatgttcgccattgagatgattcatctcaaactgctagaaaaaaaaaagaatattaaaacttgatcagtaatatataagctgtgggggataatttaaaacaattatggagact

SEQ ID NO: 2916 - DNA, 513 bp, Arabidopsis thaliana landsberg
tatatgttgagcatggctccatgttctcctttgaaccgcagacttgagctcgtgcatgccttgtgttatttacacatcccaatcaagtaacagaggtacacgagtcacctgttaaacactgcaaatgccactatactatgttatgcagtgcggaatgggaatggagggagaatggactgagattgcatgaattgagacatgaatctaagttaaaggcatgaacaacacgggctcaaaaaggttaaaatcgtagtgtagtgtgtactcgagtcttcataggactctcttccttaagatcgttatatgtgctcctcacaaacggctgcacgtaggagcaatgagttgtacttgttatacaatctctcaatcgactgattggaggtcggctccttaggtaccaacttagactttatcccacgcgacaggtcgagggacttatcgaactcggcacggattgcctcgatcagaagagtatagctatcttgtagactgtggatcttgaccatgggcgtc

SEQ ID NO: 2917 - DNA, 5050 bp, Arabidopsis thaliana landsberg
catgcaagtgtggcattgactggttgtggagcaggacgctgtaagagcttgatggctccatagatgtttcgttcatgcgttagaacacgaataccttcgtaatacacggccgtgagagtgttagctgtcaaaacaccttaagaaaaatggtcgatgtcggccttcaacagcgattccggaggaattatggccccctccagcttggaagtcattgggatcgctacacaaggtgagaatattggcatctttgaggacatccggacggtagacaatgtctcttccgcgagtgtctgatcgtattagtgaaccaaggtctgaccagcatttgtcagccatgttcttagctatatgcgagagtaaatcattgaaaagagtcgggttaaccatgtttgaaatgagatactccgagatcgtcattaagtttttcactttaataaccactactgtggatttagttggggcaattacggttgaattaaatgtcatatatgtgttggtcagcgttggatgtcaaatcaatttatcaccttagttatgttagaaagtaaatttaacgtgtatgagaaatatagatatatgtgggagacatatgttttcacgtgtacgtacacaatacatattgtttgagaagtgtacgatgtgtacaagaagagattgataacagaaactaaattaagttcttacaagctccaaacttaaatgtagttgcaatctaagataggtttgtgcaaaataataagtgtaaggtacatattattatagacagacgattataataaatgcacagtaccctcctcgcgctttccgtgctcgtagatatccaccgagtatttctaccggtagaagaccatgtctgttttccgaatgaacaggtctgaaaaagggtttccaaacgcgagcaactccaagaacttcatcgtgtatggaccgcaatctccagtagttggggtttgagcaacggtgaaacaacgttcatgctcaaaaagttcaattgagtacgcagaagtcaatacatcctagcacaccgctctaactaagaacaacatcattttgcaaatatgagtcattctcgacttcacaaccgactcacgcatgtgcgatattaaagcgtcatacacagttattcgccgttctttgaggttgattcccaaagcaatccaatgttcatgattccagttcatcggagcatatacgaatcgacatcctttagccacttaatagggggttcacggtttatgtgtactccattagcattgtcggacagaaatttgccccatttgaatccgttcttattaatacacttcctgaagtcgacaacccgcttggtaagttcatggagcaggaagaagtccaatacaatacatctgtttgctatcatttgttcaccgttcttgtgccacatcaacattgccatcatttttaaatgttgaaatgatcaaatcattattcatcatattttaccatgtttgtagattttatatacatggtggcaagtagtgtacgtatattaatgcaacgtactgaacttccgacccatacactatgtgttataagcttggcaaaaaactcgttgtccactttgcgaaaccgaaaagtgtgtgaatcctgtaaatcaagtaaaatatttgataacaagcttaagtaagtaaaaagatatgattgtctgatttacttcaactgcagcatcattgtctgattcattctataaacaaatatgattgtcaacaactgttttattcgtttttctataatacgttcatggtaaaaatagatacatacattatttttaggaatagggacggttttatctgcttcatctgaccttgggtttggatgaaggaatttgtaccatgtttataacgatttataaaactaatcacaaattcaattgccaggaactgtgtaaacaaagaattaaatctagatcaaagggtttgaatatacctggatattctgcagcggaaagatgaatcatattgtttcacggttgttttagcaccccaagtgttgtgcctttaccggttttcacacgcacacaaactgcatcagatctggaatgctagttcctttgagatctaatctcaaaactcatacaaactatttgtctctctatttttaggtttttgagatcaaaagtgtatctcacaaaagttgctaatatatcatatatatagccaaatgtttaaccctaaccaattagggttaataatgggccaaagcccaataactctttttattgatccagtttgcttaggtgtgtgaccctgtaggtttgtataatattagtaatgagttataactcatagattataaggggtttctagcaaaacattataaccacctaatattatacaaatatcaaacctcgacattacaactttaactagagtaaagtacaactgatttcaggacattcccaacattggatcctcatttcctctagacccgtcgacaatatccggctcttccaacactccctgtagaagttaacgtacacaagtctctataatgtacacatataatcctatgtatgctaataagtgcgtaggaattgaaacacacaaattgttacctcgataacattagttgcatccaaattaacggagcctttggtatccaactcccgtatgacctgcataatataaattttatacatttgaacagttaatagttcattttatttgttgcaagagttagcttacattgtgaactacttgaaatggtgacgggggatcactgtgggtcttctcaggtatttcaacttccatcactgtcactaatttggattctcctgccgcctcaacctgtagaatttagcatcggaaagaaactttttagtaatgtatgctttttagtaatgtatgaaacaatatatatgtacacagaacatagtgacaaaaatgtacgtacacttgtggcaggtacgtgagctgtgtctccatcagaaggctcataagtttcttctgactcgctgccattagcttcagtcgatgcactggcatctcttgcttcatcctgaaacaaaaataatttgcaaagttttatgggcgtacacatatggaaaaagaacaagtgactaacacatacctgtgcagatgttgaaggtaaacctgatggattgtctaccatctctatgtcagcatcagctatttcatcggcccctgtatgggtaccaactaagccaggttcagcaacatcctttggtccattatcctgaaacataggctaccatagagttaagcgttagataagtgaagaaattaatgtaatagttatgcatatagtcatggaaatctgtatataacgattaccagaagatctacctctgaaactcttgcagacacattagatggaacttcttccatctcagtgtcaacagtagcttcttccacaggcctctcttcctgtgtaacatagacagtcccagacattgaacctaagaagacagtcttaccaacaacaatatttcctctatcctgaaacatagtttaactaactttttaagcgaatatgtacgtacaccatttaaacagattgttaagagtattagtagacgacataccagatgggattgtgtggatccagcataaggaactattaaaaatccagtgtctaatatctcttcttcagcggccgaagaatccaatccatcatttgcagtaaaatcactttcattattagcgccatactgtatcgaagcagacagtacagttatacatatggattataaaatatttagcaatgtacgtacatgacttacctgttcatcaatgaatccttgcatatcttccttattggaatcaggtagctcagtagtgtcaacagcaaaaagaaaaatttttcttcggctttgaaggttttcttcttccgccgacaacagtggtatgtactccagggacatccaaatcttcctctttggaattacagccaacagaaagtgcaggagtgtccacatcatgagaaacacgagtcagccttgaagactttctcgttccagtgcttccttttgtagatatccttctcgatagcttcttcgcagtaaccggtgccttatccatagaagtaggtggttcccgcgaatcatgggaaggtatggtttgttctggccttttgctttttggatcaagggcagcacgtatctggtcacggacaaagtctttcatatcttcatgcatttgatacatttggtcttccaactccttgaaagacctcctcatttcaacaataaacctctcaggcacaggctctccaaaacaatcctcagcgttctcttctttatcacagtccatttcagatttctgttttttcatagcaggttctttagggctcgggcccggtgcatttcgttttctcttaacatctacaatagaccagttgctgctattaattgggtttcttctgggtgcaataccaaaaaaatttgtaaacaacctttatacttatacttacctgtctcttctagttgtggtgggcgcacctgctttggtactctagcatagcctccaacccattcatcctcctgccactggtgcccatctatcaacagtgcctcaatgtaatcaacccttggatcatcaacttcatcatcccatgaaagagatggaggacaaacattatcagctggtttcacaatatagttgacctcaacctacacaaataagtatattaaccatagataatgtacatttacttattatgtacgtacatacacaatttaacacacctcatcagcagcctcacactccaaaatgcgagatgtccggattgctcgcagagaggcaagacgatggatagacctctcagcaaatgtcctgttaggtacatcatcaggtcctagcttagcaattgatgggattgtttcgaaaactaaaagctggagagctaatgggaagccatggagtgcataagaccctacaagtaaaccccttattagttgttgagcatcgtaaggagtttggaaatttgctatcctccccaaagtacgggtaaaggacacccttccccatgggtatttgcagaagaactccaggttataagtcatgtcgacagt

SEQ ID NO: 2918 - DNA, 516 bp, Arabidopsis thaliana landsberg
aggctctggtgctggatctggggctacctcctgagcagctccttgctccgacacgaggacgtactctccgtcagcaaggttacagtctatcgaaaggcaatgaacatgtatgtcatgattatgcaggatttaataacattatgctaagagaagaaaaactaagttaaagagtaacttagggtttttgggtcatacgtggcttttaatggtttatgcttatcacttctaggtttaggttttgctagggataggcatagggaattggtgttgcctctatatatttcagtggacaagttataaagggttttaggatgacacaaattttctattattcatctttccctttctttattttctttttatggtttctagtgtaggtttgaactacgacagtggtttaatattcccaaaaattctgtaaaaattacagtgggctgctatgggtcactatagcctattctaggaatttggggtttaaataaaaaggctatgctttagacaaaaatggggtacgag

SEQ ID NO: 2919 - DNA, 1578 bp, Arabidopsis thaliana landsberg
atagtgtcataatgggcatctagcgtgtttcttgcgctgcatcaaattgaagaagagatgctcgttttgtaaattgcttataggggatgttcgatgcagagccatggagaaggttataaaagcagggttagtctcatgttcaaatgcaatatacgggtgtaaacagagcaccacgtatggaaatcaactgcaaagccatgagaaagtttgtgtttttgcgccatgttcatgtcccataaaagattgtaactacattggcttctacaaggatctcatcaaccactttctcgctacacacaaagtgagtgcgggtgatatcaactcgtttgtgttcgaccgtcctgtaatctttggcttggatctggacagcagtgataagatggtcatttttgtagaagagaaacaagggaatctgtttgtagttcaaggtttcatcggatcacacggggtgtatgcgacggtcagccatattgcacctatggttcccgaagtgcgcaaattctcctgcagtctagctagactcagaccgtatagcacactaagacttggattggaggtgaagaatatacagaaattgagatctcaagaagagcagcctcaggaggacttcttgttgattccatcttatatggtgaatggtgatcacatgaagatggagatttccattggcgataaaaatgactatactcatatctgagatatgttaggtcagtagaagtagatggagttagaagtttagttttgtcgttagatcatatcattgggactctagtagagttttccaatattgaaatttttctttttttttttggagaattccgaatctgttgaaacgcaatgatcatcatgtaactttccttattgttagccctaaactaaatagttttacagtcaaataaaaagagaagtcgatcagtcataggatcttatcataatacatataaacatgttgccaaatttaagagatttgcatatgcgcttatattctcgtaactttggagctgtgctcgaaccatatcagatcatcagctgtattgttaattaacatgtaatagtttccactttccacattataaattgttacattttgataaaatatatagcatattagcatatgtagtagtacgtaagataagtcatcatatgtttccactttcctctttttgtgttcacagttttgcaatgggccactggcgcttattttgcttcttgatgcaacatatttaaaaatgattggcatgactaaatagaaaacttatatagtattactatgactagagataaaccttatttttacaggagttttgtaatttagtttagtatagtttagtttccaggagatagctttaatcattcgggcttacacagatcttataccatttttggttaaactgaagaatcttgtgttttatttttttattttttgttctacattatatattttctacgcaacgtcagaattattgattagcaaaaacatgacctcgagtcaaaagaagtgacattacacattaaggcataacataagatctcctttagatctacaagacaacaaagtcaccacaatgaagaagaaag

SEQ ID NO: 2920 - DNA, 2788 bp, Arabidopsis thaliana landsberg
taggtctcttcttcagtattgtacaccataagctgcagttgaagccatagtcgtcgaagcaactaaccagctggatacaaaacaacatgagaccaataacaagatttcagagaacacacttcatatgtttataactttaagggtagtgattagtccagctgtgtggtaattcgaaaaagacctattaccttagataagtgatccatgtctgggtgtctggattcccaaactctggttgaagtattgcaccagcgactagagtcaactggaaaactgtattcacctgtcgatagacatgttccattaacaaatcagttacacataccaaagatgccaagatgagaacaagctgtatcacctagagatcataccttgcttataaacaatggttctactttctgaggacttgaaccatctagattgaagaagtcactccaagttttccactgaaagaaacaagaccaatatgattcccatcaataaatttattcgtgttcttgttaaagcatatggtcgagcaggaaaaaaatgtagggaaacaagagaaattagtttagtggtctagctcaagttacaaaaattcaccttccagtccaagtttagtgcccttaggtaaactgcaccaccaacgagtgcaacatcccgtaacaacacaattccaaccagtccagctttagagcacaaatgtcccatgcatccaccaaaattgagtttagtatcaaagatttttaagaagtttaaaaggtagtagtgcaatctaggactaacacacacagccgagtttagcaactagttaattaacttagtacggtttcctcttgatacatccatgcaatcttgtaaggaggtttgttcaaggagatcaaataactgtgcttatgaaattatgaatacgacaattctaatacatttttcccaggcgatcactcactaggagtgtaaatcaaagcacatgttccttataagagaaaattttttcttttaactttgtgaactctagctatttcaaagtcgtcagttgttactgctaacttattatctaccacgagtaaaagaggtagaagaatactcacgatgtaagagatccttctggaccattgctactgctacacacccgataagaacctgaattcaaaacacgagctcaatcaagaaaacggaattgaaatgaaatgaaacctcacacatgtttgcagcttgaaactaaccttaactctcaaacacattcagagaacattcacaatgagccaacgaagtaaaacacataattcataaagaaagactttaccttgtctgcaagaggatcaaggtacgagccaaccacagagtaaatctttatcctccgagccacgtaaccatttaactacaaaatcaagcatctattaatacaatgttctttttccaatactacaaaaaagaaaaaagaatcacaaagaagatgcatacccaatcactagctccagaaacagccaaccctttaaagcagaagaatacatctcattcgagatcatcctacaatagaaccacaaacaaagtctcagattcttcatcctcctaatattatcttcctgaggaatatatacttctatacttaccaccaaagcacaggaccagatactaatctcgccattgatatcatattcggcacattaacaaaactcttgactaattttccaccatcttcttccttggaatcgttgcgatccaccgtcaatatgtttggtaccacagactgtaaccctaactgtctcggaaacctagttctgcttctaattcgatccaatctaagattcagagcttcgacttttttcaaaacagagccgtttccgcgccagtgcaaaggtgtcgcagactggagaagtttccaaggaggagaagataagaagagaggtccattaagaggaacgaaccatttcgaaagcggagataaacggtgtgagaaatgtgggaacaacggcgaaaactgcggtggagtcagagaaacggttccggcggaagctgtagcggtggtgaagaatggtcttgttttccggtgattgatttcaactagctttcttagagatctgtaaatcgccattgatcatcaacaaagcagcttcgtcttcctcattaattttaatttaattactgtttagttaggaatttgaattttgttttgattcctttaacaccggaaaaggaggaagaagatgtatcagagaggcgactaggttttcgctgctggcttgtgccacgtgtaattttcatgaaacacgtggatgctttatgtacacgtggtgagatcattcggtatagctataccgaatcgggatattaaccggaataagaaatcggattagcaacgttcagcccgattcggaaaattggatcaaatgtttgtttagggctgggcataaaatcagaaatccgaaaccgattcgaaaaattcggtttcgaaatcgaaccaaaaagttaaaaaatccgaccggataacgaattttctttatctgaattatccgaaccgaatcagatccgaaccgaaaatcgaactgatatccgctaatccgaaataaaattatatatttaaaaatattagttatatttagttataatttataatcaaaaaataataaatatcgaaaatatctgaaataactttgatatccgattttgttttagttatatttgttataattatacaatgttttgcaaacttaaaccaaattttagtaaaagtaaacgataaattaataaaattaaacaatttttagtcttttttttctcaaaaactgttccgaaaccgatctga

SEQ ID NO: 2921 - DNA, 1042 bp, Arabidopsis thaliana landsberg
tgttttgcattctgtcttggttttcgcgttgtttttagggttttgcttgaagtgctcgtgctatttaaccaaagttgctcccacagaagtttcattcaccttttcggctactcaaccctcagaatttaaagggtcgccttatctctaaactcaaattcatcatgaatcacgaagcgacctcgttgactggagtctctggtgctggtcagccttccgctgcgactccttctgaccctgcatcgcctccatctgttctgatgttcattcccaagactgaaccaggcatctgcatgtccaagaaaaccaagtccaaggtctctacagcgtttcagcgaaagacacaatatactgatgctacttcaaagaccagatctaaagcgcctgctcctgctctctaacggttgtctagcaggaagtccaaccgatctgcatctgctgctggacagaccgaagaaaatttccttgagacttcagatctgcaagatggtgatgttaccgagattgttccgcctccctttctatcccggtatcaagagaaccatcggtttctctctgctcgtgaccgtaagtaccctgagctgaaatttccgtcagagactccttacagtaactgctttcttactggagaaggacttgggcgctacaaggtcatcgggggtcgatgattcaacgacatgcgttttcttcctcttgatggaaacaacattgcgagtactctacaactcctctccactgttggtctgctccctactgttacagagatcaactcttatgtgcaagaggttgtcatggagttctatgcaaacctccccggtggtgaagaaggtgatcaacttgcttactccgtgttcgttagaggcaacatgtatgagttctccctggctattaccaatcaaatgtttcattttcctaatctatcatatctagtgaacatgtctgagattcaagttcctgagtccatggatgaaattgttgttactctgtcaaactgcaaagccaactcttagaagatgctcacatcttggctgttttctcttgagat

SEQ ID NO: 2922 - DNA, 650 bp, Arabidopsis thaliana landsberg
aaacggcccaactttgtttgagttgtattaaaaaatgtccaatttttatttgggttttgtttcacaaatggcctattttgtttttttgtttgtttgttaattatattaaatctaaccgatctgatctttttttggttgtcagcaaccaatccgatttaaccgcatataaaaccgaatatcaatcaaaaaccaaaaattttggtaacaaaattagaaactcatttgatcaaaaaaacatgaaagatataaccgatcattttaaccataagttgtcgtttagctcgcatacttacaagttcctagcgaaaatggtacaaaaaaaaacacatctttgaaatctaaatctagtggttgaccacatacatccgttttttgcgaatcttcgaaattgacgaaacccgttggtttattagaagatgtagccggttaatctaagttatgtacccataaacattgtaacaggtcatagttaccctaatttatgggccttcaaagtcagtccatcatcacgttgacctataaaagcttaacgcattatggcttttttctctactcatataatctccttggctgcagaaaaagcaccgaaatcataaaatccttacaattggcgactcaaccggcgaaagagtctgtccaacattttggaa

SEQ ID NO: 2923 - DNA, 3668 bp, Arabidopsis thaliana landsberg
ctaagtactaatctaacaagtttgcagtttctaaacagcatccatcagaatttctctaatctgccctcagatcccaacaaccaagctattctactaaaccaagttccactaacacttcacctacagagtttacacgattaagcaaaactcaaagttagaaccatcaatacaattagagcaatgactcagatgtcctcatacataagtcaaacctggaaattttagccttaccaggaagcaaatcattgttgaatccatataatattgcaataggaagaatccacataaacattgatgcaataaggaacttctgcataaccccagccatggttctgcatccaaattgttaaaccacgaatcaacgaagatgcaagatgtggaaaacagaatacacgaatctatatatagggttttcaacagaataacctaaataacacaaattaggcgacaaaagtaaaactttacattgaatctggcgagttaactcggtcttggactcaatgtctctcgcaatttgcgaagtcgagattttttcttttctctacagagtttcccttgtcaatcaaaatcacaaggaagccattattaaaccagaaagatatactaaaaccacatttcaaaccggcataagccggtatatttattcggttcaagttcgaagaaactacgtgccgttttctaaccagagcataccgactacacgttgttttccactacctggcagagtaaatgaacgtgttctcttgtttgactttgggaaacaaataaaatgagtttctttctcttcaagctaatgtcgatttgtttgcagacttttttttatcctgcgttttaaatatttttcaagaaaatagggaaggcaataataagcaatggagaagaagagggcaagatcttatgtcaccttttcagtatttgcctcttgtgactaagtcttcatctttagtttggccaccttatgttgaagaagagcttcaaacaatgtctaaggggccgagtgagtcaatggttaactcaggggaggctcgttaggttgcatatcatgaatatgcggaaatccctctagctccttgaatgcatctgatcttgcacattatgtggtacaagggtatgttcttttctttgacaaggtaacaattattttttcctttggtctactttcttcgttgtttgtgttatctgattcattttttcttaaagtggatatttggcatgaagcataaagtactcccaaacaattgttttgtttgatgcggaaagtttctagagaagagtctgctaacttttttggtgaggtgattcctggactggattgtgtgaatttcttctccaattaccatccatgttaggaatgcactatcatacggcagaccatgtcttgatggagttatgtccggggaaaccaacactcaaactagtttctatgttttacgctaggattatttagtatgaaaaacttgcatgccacgacaatagagcaagagtctacaataaacagagattagtcacatagcacaactgttttggttggaatctctagttacaaccggagatggatgtccagctctgtgacggagaccagtgagcctcctcctatttgcctcttgcacaacttcgccatgaacatattgagctacggaaaaagctagttgagtattcttcagagagctcagcagaggaacatggcttggcttcttatcgtggctcataggtacgtcactgcagtctacctagaggaccaattgggtcaaagttatatattatttctgaattgattatgtgagatatattcatgtcactgtctgtttactacattctttcgttatatatataattggtgtgttccgacttccgatcttacgagtttatatgactttcgttatgtcattgactggtttgttccgatcttacaagtgggaaagaaaacttgccaaaaacaaatatcatccgttcaaacaaaaaggaactatataagggatgaaaatcagcacaatctaaaacaaactcgtaatgttaacactaacactcagtatattgagctaaaagacccaaaaaaaaacacctagataaaaaggacaaaaatccaaaaaagccatcttcgagtatagtttgagatgatcattaacttctagatttaagaataactctctttatgagttgaagaaatttactcaaaacttaaactctcaactcataagttataccacatgttggtatctccttatatagagatctcttaaacaatcctaatcctaatcctaatagaactaatatttagataactcataaatattgtttagatatctcctaagttttctagtcctaatctctctaggatttaatgacttaattgtcaagtcatactcaaatttaactcaacatcgagtgtctgaaaaaaaaatacttgcatggcaaacctcggcggtagagctagaagagctgttttttgctgctggaaactcttaactacaaccggagctcgaggtccagctctgtgtccgagactagtgagctcctcctatttgcctcttgtgaaacctcgagacaagtcgtctcctcggacactttagccaataaatttaggcactcccaatcattatctgcatgaactggaagtattctgtcaccctcttcttgagcatcagcatgagatatatatagctcgtcagaatctctagtaacaaccggaggcgaagatggagttggagctggagccagaaggatagccagagttggagctggagctggatccagaggaacaagagcaatatatagcttggctagggagtggaaggaccagagccgaatcctctggccttcaattagagtgttatcggagacgacctttttccatcttgaagccaagacgtaaatggaagtggacctcatattccatctcctgagattaagctcaagtaacttgtccacgatgtggcacatacaagaaaggttaacccacatttttgaatggcttccatcattatagattggactgggcgtttcttcggttcctttcggttcttctgtttcagccccttagaatccataagggatatatctaggccctcatgtaatctctccagagctggtactagaaccggaaatatgcgcaccatcattctatgtccaatccattttgttgtctcttactgtcttacattaaattattcataaagcttctttaatcctttcttatgatttcaaatttcaaatagcagaccgaatatatcctttgaataattgattaatcagagtggtgagctgtagaagacatgagtttgtctgaataatcctttccacgtttcttgatctccaaggaatgatataataatctaatctctatagtcagatataagaacatgaaagtcaactgtgttcgttaggtatctatatatctatgctttgtatttcattcttcagaaagaaacctgcgagctgaacttgagaagcaagagaacagagcaatggagaaaagagacgatcttgatacaattttaccttacttgccgttaaagattcacgatccgtctctgtcttggccatcaacacacttgcgggaggctttagaagctatgaccaatggaccaagtcacagccgagtctattcgggacaaactctctctgattccatctctcttatgagacaagctctctctttgactactcat

SEQ ID NO: 2924 - DNA, 514 bp, Arabidopsis thaliana landsberg
ctgaatgttcctctttgtgtcctcctcggagtttccaagccagcttaaaagctttgtttgtaatattaagcaacccccatttgcattgtccttgtgcaaaccttgtgatgaatctgacaagaattatacaatgcatttgttggagaagagttgatatgtttctagtagtcacactactcttggagatcttctgggttctactcttatcgtagataacattgcgaatccgagtaggctctctgaagatatcttaagatgcatatgttctgtatattgtacactctccagcaaagccagaatcaattcttgtcttcaggcttatgcttcttcacctttatctgtctcttccaaagccacttttgatagcttgaactcgcgccatgaggaacgcaaagaagcatatgtgccaggcgttgttgtaatagaatctctagaactttacttggatgatggtagtttcaatcacgctgctgttttgctccaaaacttcaggtatataagatactttaaacag

SEQ ID NO: 2925 - DNA, 263 bp, Arabidopsis thaliana landsberg
atcgaacttgggcagactatgatttgggagggacgggaaatgcattggcggtattggcggtcgcaacaccttatataggagcgtggagagtcccaacaactctttttgatataccaccacctatggcgacgcagttacaagcgtgagaaaaaacccatgggaggttcctctcccataggacaacctaagcacccatgtccgcggatgacactcactctaccggcgcgatggatagctcgggcttattctcatggttagattct

SEQ ID NO: 2926 - DNA, 3193 bp, Arabidopsis thaliana landsberg
tttcttaaaaggccatattcttgtatgatcagaaatcgtattcagatgagatactacaggagaaacaaatctcctaacactatcccactcatattcgaattccaacaagagagaaataaaattccattaatttaccagaaatgtagacaacaaaaagcttcttcttccctttggcttcaaatatggcttctggaagagaacccttgaacgtaagagaagacagagcttccatctgtcaatcaaaaaggtcactgcagatcaatcagaacccttgaaccctaaattcagtgaattatataacgagtaccataaacccctagctagagccgatcaaacccaggaaccttaatcaatttgaattagcaagaaacaaagagatccacaactttacctactccgatcaaatgctgaagaacgaagaagctacgagtagatcagacgcagttaacgacttaacgccaccgtcacaataacgtcgttacatgtttgttattaaatatttatgaggtccattaaagttttcaaaatatctaaatgcacctcttaatttttgtaattgtccaatttaaacccaaaccaacaactctctcaaaagtttccaaattttttgtagtagtgtgtgataccaaaaagagttttatttaattgagttatctacgattagtattgttccatgatcgaaaacactattatcttctggatacattgtcccattccatctcatttgattggttatggctttcactttgacaagaacatcaaaacggtctcgtattataactgctccttctggtctaagaatcctctgcatctccaagagtatatcaacaatgtcacatctatcataagaaacaaagaaaaagaaaccattacactttgatcaccaaatgaatgtaaatcaaagttttcaagttagggacggatcttacttgtccaagtacaaactgaatacaccattggcatgaatcaggtcataggttcgagggtatgtagataaagcttcacacctacaaaaaccggaaaatatggtataagagatgtcaaattagatgatatcagagacgttttgagtgatttaccagttcatgtaagttccaatgagaccgcgatcatacacaacaccgagtgtgttcggtttaagatcaaatggaaccacattcataacccacattggatatttgatcaaagctgcagcaaaaccacctaatcctgcgttcatatcaatgacgtttctgtattttccattgctgagaaacttaaacttggtgtcatagtacaaaactcttctttgccacaggttcgtgtcagctttgaagccggcaatagttgttccctgtatcgacccggttttcattcgaggcacatggtttagtctctcaggccagtttttgagaacggtcttgtttgtgtcgttaacatctggaagaggagtgatgcacggctccatctctttatacctattaataaaaagatccaaccgaatcaagcttaagcttttgaagatgcagagcaaattagattttgggaaagtgaagtcaccacgcagcgtcagggtcactagaagagcataatccaggaaacttaagagcttttagtcttttcctacactgcaaatgattagaaggctttctccagatgacaaccgggtaactttcagcaatcttctcccaacaaagtcttctaaaaacatcatttagtttctccatctggttctgcaactccttggaatctctcttctggttcttaaatttaacccttgatgctacagggggtccagacaacacccagtatccctcaggacgtaaaacacgatccacctccatcaagtaaagcccatctggataaaatgttctctctttcagtatcagaagcagagtggatgaagcaagcagttcaaaacacagtgaactaaatcatataaacaggtctatttaaatacacacattaccataggaagtccaattgacaaggcatctagaacaatggaccatgtcaaaagacctcgacgggtaaggcagcttataagtgcttaaaacaccgagcatagcagggagtccacgttctaatgcgaactgaacttgagcctcatgtatatccctcggtgcaatggacattgtcaaaatcttatagttcagcaaaaaggctccaaaactcgctacctgacattttgggtccaacaaaacacatggaatccatcataatcgaaagtagtaatactgctataaaatatcaagatgaatcaagttctggtgtctattcatgtaactgaactcactccacatccaatatcgagaacagtcctgatactcccagaagccaaaggcaaaacactcagaatcacatcaacatagtccttcacaccaccggggaaagaagtcccgcctcctgggaaaacaaaacggtctccttcaagtctaacccaattctgagtctttttcaactcagctagcctcttgaatggtacgttcctaaaccaagcatattttctactctcaggccatggaaaaggcgttttgtagccagtgggctttgggaccaaacacctgaacttctcttgggctatgtcaggacagtgcctctctctccgatagtgtctctcaatgctgtactgtcgtgctgttgatggatcgtggcaaggcaagtagttggtgaagttcttgggacagagtggaaagtaagaagataacgatgatgaggatgatggtggtggtggtagtagtagtggaggtggtgacgatcggttttctgaagtttctggaagggagtagtaatgggaaatggaaggtacatgaagctgtggaggatggtgacgatcttgggaagagatggtgatggttttgatagtggtgaggatgtaatagagagagaacaataagaatggagtgaagaagaggaataggcgcttaggacatagctttggtaagtgttgttgtgatggattcatcctcttttttttgtctggacttcttctgcaattaggtttcaaaacagtttagagctgcagagagagagagaggacagtgatgtgaaatattattactttagttaagtcagactcaccttggaatcttcaactgtacttgtctttattagtggccccagatggatttctgagatataagcactcattttctaataataaaaattagtattaacaataacacagtagtatatttacagaggattcatgaaa

SEQ ID NO: 2927 - DNA, 575 bp, Arabidopsis thaliana landsberg
taattcatgtcatcttcaatatatgacacatatatttgtttatgtaattttttgttttagtagtttctgtaacgattttgtaattgagttttgatagtaactaggatatgacccgcggtacaccgtgggctaattttttgttttctatttatttatttttacactattgaaattgttgcttataatattgttgttgtacaccgtgaatcgagttttttaatattgaatttgcagttgtatttgttttgttttgttaagtatttaatattgtataactatattttaaatgttaattctaagatttcatccttaatatactatttcgtattaatatcgacttaaacatgtcccatcatataactccgtcccgcaatataacccttcctaaaaaataaccttgtcacgcaatataacatgtctcgtatttctttatatatatttaaatattcataatattactaacttttttatctattctaaatatattgattattatataactcgttctagaatatgacctgctatgtactacgggattattatttgattttaaaaattttaatgatgatttttct

SEQ ID NO: 2928 - DNA, 562 bp, Arabidopsis thaliana landsberg
  unsure (1)..(562): unsure at all n locations
atttatgcaaacgacaaacagcatgaggaggcaaagattcaccnnnnnnnnnnnnnnnnnnnnnnnnnnnnnnnnnnnnnnnnnnnnnnnnnnnnnnnnnnnnnnnnnnnnnnnnnnnnnnnnnnnnnnnnnnnnnnnnnnnnnnnnnnnnnnnnnnnnnnnnnnnnnnnnnnnnnnnnnnnnnnnnnnnnnnnnnnnnnnnnnnnnnnnnnnnnnnnnnnnnnnnnnnnnnnnnnnnnnnnnnnnnnnnnnnnnnnnnnnnnnnnnnnnnnnnnnnnnnnnnnnnnnnnnnnnnnnnnnnnnnnnnnnnnnnnnnnnnnnnnnnnnnnnnnnnnnnnnnnnnnnnnnnnnnnnnnnnnnnnnnnnnnnnnnnnnnnnnnnnnnnnnnnnnnnnnnnnnnnnnnnnnnnnnnnnnnnnnnnnnnnnnnnnnnnnnnnnnnnnnnnnnnnnctaccgcatttgtgatattgctaataaaggcatgagaaggctcaactatatatgaataagagatatagtccttgatgggatatatgatagtgctagtattattataacaatg

SEQ ID NO: 2929 - DNA, 577 bp, Arabidopsis thaliana landsberg
  unsure (1)..(577): unsure at all n locations
aatctatatctcgtccattttgcatagagtgtaagtcgcattgcatatatcctaccagcttgaatattcttggatcatcaaatcacatttgctctttgaattgcgcataccttacaggatccagaagactacaagcaaagtgaagatagatcgttaaaacccaaaaatggtttttcagaatgtgtcaccttttgagttatatcaacactttgattctgttttgtttcgtattattgcaagactaaacaatttctctctttcaattatttttcacttaatgaaggcgatttttcatttaaaaatatctcaccttttgagttgagtgagtgagagataattacatttttccttttcttcttttaggaatattaatttgagtatgtactatcattcttctcgagaaggatcttgaagcatgagaagttattaaagcatgtcttgttgttgttgttaagatcgctctcttcttcttcctccttttgtctttctcacaagcttcattccttcaactcanaactttacttgctcatgtcatggccgtcccaatacaacaacgtttgacagtaacattactttt

SEQ ID NO: 2930 - DNA, 465 bp, Arabidopsis thaliana landsberg
  unsure (1)..(465): unsure at all n locations
caagagatcgaaaaaggaacagtgttcgaacattgttagatcctgaacggaaccttaccgggattgttcgctttggattaaagctgactatttagactgctgcagctgtaatccatagagacaaaaaacattgtagaagtagtagatgacgatacagattaaagccaaaacgaacaggttgacgagctctcgcgtggacaactagagaccgccagcgccttgtagagggccaccacatctcgggtgagagannnnnnnnnnnnnnnnnnnnnnnnnnnnnngggggtgacgttgtgcgctttgaagggcaatcgtagcctctattcggtgtatagtaatagagggactcgtggaatccattctaggcagtcttagactcacatttgacaacactggtccctctgcttcacctttcaccgccagtgctgaatctagtatttacatttaagatagtcgagcaaaaaa

SEQ ID NO: 2931 - DNA, 150 bp, Arabidopsis thaliana landsberg
ctattatcataacataataaatacactcacccatacaatcaatcttttcaccttaccaaaaaaatcatcctatttttctaacacaaatctaccatctcttccataaaactaaaaatgttcaataaacatgtcccacccaaatcaaaatcc

SEQ ID NO: 2932 - DNA, 611 bp, Arabidopsis thaliana landsberg
gacaggccacaccactttacatagtttcactttatttcctaaaccaaccgaaagttttagaaacatagtagatatagacaaagaagtccatggtaaacgttaattatttaaataactattaaataagaaattaacaaaatatttactttatcaatttgtttgtaattatggttgaaaacttgcccatcaaaattttaaatatattctcttttttaaaggaattcctaattgcctatgataaatgattctaaaatagtaaagtataccaccaaatcgttcatttatactctttacaaatgatataacgacagtgtattttccaactaaatggtcggtgtttccagtgtatttgaaggaatttaagagcgataattaagaatttataagcttctctttatctttaattcttcgaaattggttcatttgagtttaatttatttcggttaacaaaaaaaacaaatgatataaggaatttgaaaagttaaatcctccgtcaactttctcttgacatcaaaagtacatataacataataatcaataataataaaaaacaattatctctaattataattttttaattactttaaattactcaaatactcattaaatta

SEQ ID NO: 2933 - DNA, 478 bp, Arabidopsis thaliana landsberg
  unsure (1)..(478): unsure at all n locations
gctctaactatcagactcttggctaacgaaatgtacaatgccatcgcccgtgtgacagatgggatctatgaatgttttttctatttactagctcagaatccactaatgaatatgtgccttccgcctatcatttctgaagattcttaccatgagtttatgatttgtgatggccgtatgcatcgctatcgggggagatctgacatcgagctcaactatatctgaccatatcccggnnnnnnnnnnnnnnnnnnnnnnnnnnnnnnnnnnnnnnnnnnnnnnnnnnnnnnnnnnnnnnnnnnnnnnnnnnnnnnnnncccttgggtctactgggtaaccatgagaaagctatactgacctcagaggccattgaccttgcctctctagttcagctagcctatttaactgcaaaattttgttatcattctgtcaatattgcagatcagatggtggttgtgcttggagagctcggaggaagaga

SEQ ID NO: 2934 - DNA, 188 bp, Arabidopsis thaliana landsberg
tacaagaaaaccccccttgtgtggtgttgtaatttaaaaccttaccgccgcccaccccgaggccggcgggacttgaatcgggttttggagcgttggggtgaagacatggacaaactaatgactgaatcacgtttgaaaccagttgctattgattccaatcaggatatatattgtgtatattgtgggat

SEQ ID NO: 2935 - DNA, 385 bp, Arabidopsis thaliana landsberg
aaagacgggtcacaccaacacttgcggatttttgcccttttggagctatagctaaacattctggggatcatggggttaactcaaaagcacattggggggggccctcctccaccggctgatgcaccggtgaccacattcgacggcgtgggtcctgtctgggaatgtgctgatttcctcggccacgacatagagcttgccactactacacacgtgtgatggggatatgattctgattggaagctcaggtcatgtggaatcttatgactcccttgaatgcagcacagggcgctggtctggtgcgctatgacgctggtgcatactgtatgagcatggctgacactcacaaggtcaaactgcgcactgcgaattactgtggaccgacaca

SEQ ID NO: 2936 - DNA, 211 bp, Arabidopsis thaliana landsberg
agagtcatacaacgcagtaaccggatgtctctgacctttcggcgtcccggtaggaagcagcaacgttgacgcctcaacgcactgagccacaatcgctatccggttcttatactagagtactggctagagactgaacagtgcatgtcggtgaattttcttggcgcttccagtgagagaccagaaacaagatcacttactatagactccaaac

SEQ ID NO: 2937 - DNA, 501 bp, Arabidopsis thaliana landsberg
tgcctgctgctttccatgatgtcagctgatatcgtcggccagaaaatatatgatgaacaattatatgactctgttaacctcttgctgtctttacaggtgaagttatatatactcatacgattttcatcaaattttgtgttaagtttttttaaaactaattgtgttactaaaactgccactctttatgtagagcggaaatggaggtgtcaatgcgtgggagccatcccgtgcatataaatggttggaagtaagaactaaaatgtgttttacattattttttttgcatactcaaaagtaaaaaaaaaaaaaaacaatctacctgttaggagttatatacaaactaaactctaaaaactcttaaatgtagttatcactacaaaaactagctcttaagagcaaaagacgctgctaaatcttaaaatcataagaatttatttttttctttatttgatgtgcatttttattttattattatcaacctccacatacttgatttaacgt

SEQ ID NO: 2938 - DNA, 158 bp, Arabidopsis thaliana landsberg
  unsure (1)..(158): unsure at all n locations
agagaaaattctccagttttagtttgagcaagaatagtagctaaatgntctacaacccacaaaagcacatcagcgggggggctgatgaaaattttttcctaaaaatccccccccctctttttctaagaacaaaaccgattgattttttaccataatat

SEQ ID NO: 2939 - DNA, 574 bp, Arabidopsis thaliana landsberg
atcaacgtaggtcacgctgatcaccgcgacgccgagtggtggccgaagctttccaccgtcgaagatctcgtctccgtcatcaccaccatcatctggctcgcctccgcacaacacgcggcactcaacttcggacaatatccttacggtggctacgtcccgaaccgaccaccgctaatgcggcggttgattcccgacgagtcagatcccgagttcacgagttttatcgaagatcctcaaaagtattttttctcgtcgatgccgagtttattgcaaacgacgaagtttatggcggtggttgatacattgtcgacacattcgccggatgaggagtatatcggagagagacaacaaccgtcgatatggactggagatgctgagatcgtagatgcgttttatggattctcggtggaaatcggacggatagagaaggagattgacaagaggaatcgtgatcctagccgtaggaatcgctgtggcgcgggagtgttaccgtatgagttgatggctccgagttctgaaccgggtgttacgtgtagaggagtgcctaatagtgtatctatttagaattattcaa

SEQ ID NO: 2940 - DNA, 474 bp, Arabidopsis thaliana landsberg
acacaaaatagagagaaaaatcgttctgtttcatacatcattggttatatcagaaacaaattgttttcagtttttaacaatttttaaagtagatgaagatatggtggtcgagaagaaaaaaaacttggagaaaatccgtcttcgtggtacagtattcgtaaatttaagagcagacacaaaactcgaggtaaatcaaagtaactgttattgtcacttttctttattacatatgtaataaatgcaagatgttcataacatatgtaaatcaatcaatgtaggatctggcgaatatgatggcaaaaggttcaaagtgtagatggggaaacttcgtaggtgttattatatttcctttatgggtgagatccgaagatgatccgttggaatacgttcgacgagccaaatctactatggatataaaaaaactgtccatagaattacttatttgctatggactcatcaaacttaccagaaaaa

SEQ ID NO: 2941 - DNA, 881 bp, Arabidopsis thaliana landsberg
tcggagttccatcaagagaattcctcggatatctagtaaccgaaagaggcatcgaggctaatcctaagcagattgcagccttcatcgaaatgccatcaccaaaaacggcacgagaggtccaacgagtgactggccgtatcgtcgccgtgacaggttcatatccaggtctaccgacaaatgcgtccccttttatcagctcctccgaaagtagaaaaagttcgattggaatgaggactgcgagcaagccttcaagcatttgaaagcatacctgtccgaaccacccatactcgcaaaacccgaagaaggagaaccgctgtacctgtacacggcagtctcccgaaccgcgataagcgtgtcctggtgagagaagatcacgaaggaaaaaaaccgatctattacgttagtaaaacgttgatagacgctgaaacccgttatccagcaatggaaaaactggcactggccgtagtcatgtccgctcgaaaactgagaccatatttccaatcacaccccatcgtggtgatgacgtcccaaccaatcagaaccattctgcatagtccaacccaatcaggacgacttgcgaaatgggccatagaattaagcgagtacgatatagaatatcgcactagaaccagcttgaaagcacaagtcctagcggactttgtaatcgagctccctttagtggacctggatggaaccaactctaataagaaatggctcctccacgtcgacggctcctccaaccgagaaggatccggagtaggaatacaactcacctctcccaccggggaagtcatcgaacaatcgttccgacttggattcaacgcatcaaacaacgagtctgagtacaaagccctcattgctggcattaagctagctcaatg

SEQ ID NO: 2942 - DNA, 454 bp, Arabidopsis thaliana landsberg
  unsure (1)..(454): unsure at all n locations
gaattggcaaggtggcactcatctaccagatttcgggtttatttcccacccccagggcataaggtcttgggtttgccttgcataggggttgcccgagttgcgattacggtgtgatcaaactcaacgagaatgccccactannnnnnnnnnnnnnnnnnnnnnnnnnnnnnnngagaaacgtgatagctatctatctcatggaagccagtctctgaaggttcattggagagctgtattttccccataatttcacttttgtggtggacttcatcttatgattatcagtggtgcttgcctcttaactaaacgccatgctgatccaaaggctaaactgggacacgatccactgaacgtgaatgctctggacatgggtccgtatgcaatggcaaaaacacaggaattgctgacgaacccataaaatgctattactgcgtgacgaagtggttcagaatcc

SEQ ID NO: 2943 - DNA, 688 bp, Arabidopsis thaliana landsberg
tacaacggttgcttgcagcctaattaacatatttgaatctataaacgagtaacaatgttctgaatccaagccacgtagccatttcttgggtaaaaagactcaaatcaaaggtcacatatatgatgataattatgaaaccctaaaacaaccctaaatttctcaagtctaatggctaatccaacatacgtaaaggcaaatatcttcaagtaataaatcattcccaaaatccccccatattttgcatcaacattgaatcaaattttcacagaaactaaaccaaaaggtaaaaagaaaaaaacgtactcagtgcctttttgacgaagaatccgaaactgctcaggagaaagaaccgcacgccactcctcctctgttttttgaaccaccaacgcaggagccgccatgatcaccacggagaagctacgaaggctggaaagtaaccggaagctgaaactacgacggaggaagttttttgatgatgatcaggttgttcttgaaacactgcagtgatctatatttgtacttagattgcgttgatgaatgattcaaagtttgcgtctagatacatatgaaccactgtgatctactataaaactggtgaatgattaatgcacgtgataatacaagtgctcatttgtcccattataatgacccggttcggttcacaaaattcgtgtttgatattatagaa

SEQ ID NO: 2944 - DNA, 598 bp, Arabidopsis thaliana landsberg
ccgatctgtaccactgtttgtttcccatatgcaatctttttatgttttaaatcagctgaaacttgtaacagaggggtaggataagcttatgagattatatctttacgcattcctataaaaaaagactgtataatatatatcataaagattttaaattaagaaaaatattaagttattacaaactgaaacctcgagttgcttctaggacttaacgttatgcaagagtagataccttgtgcgttaaccttgtttccttgcttgcagcatcattcgcgacttctagatgatcagcaaagaacaaaatctgcacaacaagtaaaactacatcttaatatcaagacaatgcactctcatgaatcaatcactaactaaagtgaagcttactttgctcataaactggacgtttgatgaatcagcagccatgacttgcattccaaggcacgtgtttgggacactacataaagggcataagatagttttgaaaacacatccatcttgctggcaccaaataccctgaccatttgagctatcaaaaattgtgcatagactctgattaaccaatgagcaatctgtcatgataactgaaacacttgttgca

SEQ ID NO: 2945 - DNA, 556 bp, Arabidopsis thaliana landsberg
  unsure (1)..(556): unsure at all n locations
taagcccgtacacttatgtatagataataacgtaccttttcgtggtactcgtcttcaactaagtgatccatggtggattgagacaaaacttgtagtcacagtaaccggaaacgtactcgaggttagaaaaatgtggacggagtctagaacctgttccttcagtgttcaaaagatttcttcatcagggttgtttaagaaatatgaaaaagttgattctttgggtgacgaggcaatgctttgggatctaggcatcactgtgccggccaatgacattgaggtttttaatagaaattgcatctatttttgtggtagtcctagaggttttcatgaaaagaacacaagtaacacggaaggtggagctactgcacaaatttgattgttcgtcccttcaactctctagagctcgatggttcttaccaagtttgactcacacatgattgatcttagctatgtgttcctcttcattatgttgtttctttttccttttctttggtattagtactcaatatgctggtttacactatcaataatcatgacntatgctaatttttaagat

SEQ ID NO: 2946 - DNA, 379 bp, Arabidopsis thaliana landsberg
tgtaatggtgtcatttgtatccattagtcataattgagttattagctgaggattaagattgatcctgtaattagccgcggaaataactcatcttgtggatggatggatacccttggtattctccaactttgctcctactttgtgaaattagggattgagtacccaccaggtggtactctctgggcgtgggtgactatctttaatttaattgacgggtgattttgtttgactgtcttaggactcttgttgtctatcggggttattagaacaatggtgattgattgggtggcgggctatttacaactggcagcgtatacaagcatgaatgctattgtcgtgagtcacaaatttcgatcttatggatttctgatgggctact

SEQ ID NO: 2947 - DNA, 522 bp, Arabidopsis thaliana landsberg
gggaaatacaaaaatgcagtgataggtaagtaacctgtcctttttgagaagagcatgcctgagtgacccattcactcatgatctctgtaacagttgccaaggttcctccagttccatcaggcactataccgtagaatgcaacaacgtttgggtgatgaagatttgagagtatttgtgcttccctccagaaatctttcgtctgataaagcaatacagttaaaacaaagaatgtgctgcgaaggagaatacctcatattgtgtacttcataccaaaacagtatcaagaagatagatctaagaaacaaaagatttgaggactaaccaagcgttcttgttcagatgatctccctgcaaagcaactgttccgtattctctttatagcaacatccgttccccgccatgttccatgatagacagttccatatgtcccggatcccagttctgtcaggtcttcaagatcagcgttctttattatctgaaggtttaggatgagtaaaatttcaaaattctgaagcatgtcaa

SEQ ID NO: 2948 - DNA, 108 bp, Arabidopsis thaliana landsberg
taatctatcatatttccttctcaacactagcgagaaaaacaaattgtatttagttttttggttgtttggatttttggtgaaagaaatggggggaaatggagaaaaagg

SEQ ID NO: 2949 - DNA, 218 bp, Arabidopsis thaliana landsberg
aaaaccctaggtgtgtgattgtgtctataaattcaacctcaaccggtgcatacgaaatcaattagagctgttggcaacagatgatgatggtactccgaattggtcggaacttgtcacagacatcttatcattggttttcaagcagttgagctttacagattttgctcgagctaagaccgtttgttcgccgcggtactttgcttccaattcacttctca

SEQ ID NO: 2950 - DNA, 429 bp, Arabidopsis thaliana landsberg
tccttcttgtgggctcatgtgggtctcttctgttttccttctcaaaagctgatcttttctattggggaggggcagagtcatacattgagagaagagaagagggagagagatagagatatcatattactatcacatatcaagtatagaagtcatataactaatgacagatcttacatggatgattattgaactgtggatattgatgtgaccggacgctaaaactaaactatggactgataggaaccaaacaacctagactgagaaaggtatcataagtggatcttgagaaagatgagcttatgctttgaactctatacgacagtgtactttattatgaagggaggcactaaccttccatccctagatttaaatctgcattgagctttgtctggaagagcctccattgagtgaaaacaagggtgcaagggg

SEQ ID NO: 2951 - DNA, 546 bp, Arabidopsis thaliana landsberg
  unsure (1)..(546): unsure at all n locations
tggtcttttagaacgatacaaggcgagattggttgcaattggttttcatcaacaagatgggaaggattatgctgaaactttcagtccagtcattaaatccacaacgattcgcgtagttcttgaagtcgcagtcaccaaagcatggacaatcaaacaactagatgtcaacaatgcttttctccaaggcgaactcaccgaagaagtttacatgtcgcagccaccgggtttcattgataaagaccgacaatcatatgtctgtcgcttgaagaaacccatctacggtctcaaacaagctccacgtgcctggtatatggcactcaaacaatatctcctcgatgcgggattcacaaattctttggctgatacgtcactcttcattttgagcacggcgacaacgatcacatacgttcttgtatatgttgatgacatcattgtcacgggaaacaataccacaatggttgctaatgtannnnnnnnnnnnnnnnnnnnnnnnnnnnnnnnnnnnnnnnnnnnnttacattactttcttggcatcgaagtcacacg

SEQ ID NO: 2952 - DNA, 1508 bp, Arabidopsis thaliana landsberg
ttctagaaccggggctccctgctcacgacgccactatcgagtttctctctacttacgacgccactatcgtggttctctctactcacgaccgcacaatttctatttttcaaactaccttggagatgatcaagtattatttcttttagggctaaaattctacttgatcaaccttattatctcttacttttttggtcaaaatctttctcttagggttataacaagcgaaatagagtgtgaggaaggattaggtgtttctcgtctgtgcaagtggacatttgaggataacaaatggttgttcttcattgataatcgtagaggttgtcgaatctagaagtcaaccgatgttgtttttcaagcaactcaactgtgtgatacctgatgatgagggccttgccattatttctgataggcacaaatctatcgggagagcaatcaatgtggtttattcaaaggctagtaggggtatatgtacataccatgtgtacaagaatattttggtggcaacgaggcgagccttgtaccgctcaacactgccatcaggtttccgcttaacccgataagaagacccgttgttggtgcaggaattagcaccttcgtcaataccggtttaaacaaagggaaatgtgaatctaatcaagaattcgacataaccgggatatcccggtttgcctattaatgggcaaaagttgtgaggtcgccggaagacctaattcaatggatagagatcgcccagccgacttcctgaacgagcgaaagagaagacttccattttgaaagaagaggatcttgtaaagaatagaagaaatgaagatttaaaccttagataattagaagtttatcatattctgatatcaaggaaacattgtataaatagaggggtttgtcctatattcaatggatgtagaacctaatacaaaaacactacttttgtcatagcaaaaacgctagcttctttttcaagcaactttgttcttcttttccgattactttagagctaagagagaagtgaatttatctaaccccttagtataaattcattgtttgatctacagaatcaacatccgtttaaaaggtaaagaagcattcggattggttaagaaggcggctaatgcttttagacaagtcgactttcaaaccacatttgatcagaaagaaatgatgaatcttgcactacatgcttacctagaaagaagcattcggattggttaagatgtgcaactctggacacatgtacatttcctaggtgatacgtacaacttgcttacaagcaacattgcagaatcaatgaataatgtggtgtcacatgccaggagttttcctattactcaactattacaggaaataagatccatgatgacacgatggttttcggatcgttgagccgatgcattaaatatgactacatctttgacacgtggtgtagagaaaattctgcagatatattttacttcagtcattataacaatgacgagtaaacatgtatataagtttaactatgttattcattt

SEQ ID NO: 2953 - DNA, 259 bp, Arabidopsis thaliana landsberg
  unsure (1)..(259): unsure at all n locations
cactgtggtgactattgccacctaacatgcataatgtcaactgtaaaaaatccaaccagacatctggcagaacgtcaaccattgactgtatacgatctgttgacgattttcgtagactgtaaatgttcatttaccgtgtgatacaaggacgtccgagaagctgcaacagaggaagatcaatatggagacaaataacttatnnnnnnnnnnnnnnnnnnattggaggtgctaaaaagggaggcttagtgtcgtaccgcaa

SEQ ID NO: 2954 - DNA, 2163 bp, Arabidopsis thaliana landsberg
aaaatgaagacatctttaataaactgaaactttttgtgcatggttctttgtttacgaaagttcaatagtactattgatatatagaatatataaatgcaaataataaaagaatgtataaatatcctcaaggaatttgaaacaagtgattgtgaacaaaaaaatgaaaaagaaaaggtgatcttgttggatatatatgaagttgcggataatgtcacgtatgtgtgtcccgtgagaaagatggggacccatcgttttcaattgtacgccatctcgtatttatgagagacctatgtctatctaacgtttccatttattaatgttatctatcacatgtatatttcatacgtgatcttgccttataggtttgacaaagattttatctttcaatctcaaaaacttgtaacctaatagtttgtactatatttaaatattgtgtgttgtgaattgtacacaacggtaaaacaaaaatatcatcagtttctctattctctcaacagattgacttgcatatgaccgatttcattttggtcgttcgttaaaccaaaatacatattcttttttttcctaaagttgtatttaatattttctcattaatatttcaaaccccctcatgtagaaaaaagattagagagtttaattacattttggttcatgatgctttagaaaactaaactaaataaatacttttcacacttcaattagctctttcatgacttgtccatctttcacaccaaaagatccattcgcttcagcatcagaactcgcatgaacgccataaaacaaatacacgagcacgatcaaaccggagaagaatccaaaccggacgtaagagggtgcgtccaacgaaccaagcaaaaaaatgttcaagaatatcgacacgcacggggtccacggcatgaacgggactccccacaactcgggtttcctagcctggggaaccacgcactgaaagctcagcacgatggctatagccaccaccgcactggcaccgagcatgaaagctttaggcttaccttccggcacaagtttccagatgagggtgaagacgagagaggttatggagaatagtgtgaggaagcagagtgtgggccatggtttggtgggtccgaccgggacgtaacgtctgaagatgagagcgtttgcgaccatgtagaagacaaatagtgttccaatggatacgaggtttaggaggacgtttaggtcggtgaaaagcgcaagagccgccgtgaaaatgcctgataagggataaaatatacgaacgttaataagattggtcaatggtcatattctctataactgtagatgattcgactagtgaaaaaagtccaaatttgatggtagtgggaggatttgttcctttattttgtctttttgtcaatgctattgatggatatagcaaatgtgagttagtgggtgctaaaattagcaaggataaggttgaacgatgatgacccccttaataatgatccattttgtgacaaaggcatgagagtaacttaatgaggaaaacaatgcttgttacaaagattatgcatataaatatggctctaaacgttagtatatgttttccaatcttctatgtattttatcaaagatggtcattattctaaatcctggtacctaacaactgcatagctcagccagattttccggaaattacgaaaagttggagttgtcaaaatatcagccgactaggcttagtagtatcttcacaaaaaaaaatgaaataaaaaaaatgattgattaactagtagtcgtccaatggatgactaataatccaactatcgtatttttataaaaaaaaagtggaatatgtatttttaacactaaggagacacataaagaaccaaagagacccaccaaatccatcacaatcaagaccgttgaaaagattgaatctttgaacaatcaaaaaactcgaaacttttcacagagcagaaaataaaaccagtggtgaacaacgacatctagcaatcggactcaaatgctctctctgtgactcttgtcttaaacaccagacaatgatacaaatctcattgaaccatgtccctacattgagatatacttacacaacgtacatagcccttgtcacgatcgaaatcgatagcagaagatttttaaaatggtgacgtccaaaagctttcgatctttataatatattaa

SEQ ID NO: 2955 - DNA, 332 bp, Arabidopsis thaliana landsberg
  unsure (1)..(332): unsure at all n locations
cttcatctacaaaacttctcacaaaagcccattgaagcctggacgcccagagaatatcttgttctcactggtttttacatatcnnnnnnnnnnnnnnnnnnnnnnnnnnnnnnnnaagctaaacatctaaccgagattccagatttttaatcaaaaggctcctcgattactcctatgacccgaactatcgatagtacccaaagagacacagcagcctacagacaacgtgtacaggagagtggcaatgaaactagtttagccatagttctcaatatctaacgagactatgtgtaactcatctgtgttactctaaacaaccacacacaatgact

SEQ ID NO: 2956 - DNA, 461 bp, Arabidopsis thaliana landsberg
  unsure (1)..(461): unsure at all n locations
actctggttacacatacacagagttcctattcaatagaggcttcagataagattaggcttttaaggccaagtatttgaagagtaatgagactcttgtctgaatcgttgtgtagactttgctagtgcctagtgagatcatagatagtttagcttgctgcttctttgccttcatccatggtgtaaactggtatttcccagttcttgttctttttcggatcatcagtcaaagtgagatcggtttcgtactctctaaatgttttgaagaatgtctttgcacccatcattatcaacctctccaccatgaacaactggtaattgttctcgatgatcggatccaaaatctcactaaaattcgatgaatacgccactgtgtatctgcagtgtaacaagagtcttacacgaacattctacatatataactaagaacttgaatctaaacattatgggttntacctgatagc

SEQ ID NO: 2957 - DNA, 2031 bp, Arabidopsis thaliana landsberg
ttgcaggtcgactctagaggatccccggttcactacttgttttcctagaaacatgaacaacatttcttctaggcatgtgattaataacatttctcctcgctaaatttctatcatgcacaacatgggaactagaagcagtcatagcatatgaaacaacattattgcaatgaacattcctagaatatttcctatcattgtataagaaagcatggttcttttgcacactatttgccataggggccttccctttctccttgatggagatgggtgccttatggcttgtcaagttcttggcttccctcttgaagccaagcccatccttaattgaggggtgtctaccaaccatgtaggcatccctagcaaattttagtttatcaaaatcactcttgctagtcttaagttgggcattaagactagccacttcatcatttaatttagaaatgcgagctaggtgttcactacaagcatcaatgttaacatctttacatctagtgcaagttacaacattttctacacacgatgttgatttactagctatttctatcttagcattcaactcatcgttaatgctctttaattttgaaattgtctcatggcatgaagataattcacaagtaagcatttcatttcttttaacttctagagcatgagatttttgagcttctaaaaatttatcatgctcttcatacaataaatcctcttgtttctctaagagtttatccttctcattcaatgcatcaattaattcattaattttgccaatcgtaattctatctagacctttaaataaactagaatagtctatttcatcattgtcactagaatcatcaccactagaagaagcataagtagagtttcgagtacttactttcttctccttagccatgagacacgtgtgacgctcgttggggaagagggccgatttgttgaaggcggtggcggcgagtccttcattgtcggagtcggaagaggagcaatccgagtcccactccttgcctagatgcgcctcgccctttgccttcttgtaatgcttcttcttctccctcttgttcccttggtcctgatcactatcattgtcgggacagttagcaataaaatgaccaagcttaccacatttgaagcacgaacgcttccccttggctttggtcttgcttggctgtcccttgcgacctttaagcgccgtcttgaatcttttgatgatgagggccatctcttcatcattaagtccagccgcctcaatttgtgccaccctgctaggtagcgcctccttgcttcttgttgccttgagagcaaggggttgaggctcgttgatcggtccattcaaggcgtcgtccacgtatcttgcctccttgatcatcatccgcccgcttacgaattttccgagtacctcctcgggcgtcatcttcgtgtacctgggattctcacgaatattgttcacgagatgaggatcaagaacggtaaatgaccttagcattaggcggacgacgtcgtggtccgtccatctagtgcttctgtagctccttattttgttgaccagggtcttgagcctgttgtacgtttgcgttggctcctctcccctgatcattgcgaaccttcccagtttgccttccaccaactccatcttggtgatcatggtggcgtcgttcccctcatgagaaatcttgagggtatcccaaatttgcttggcgttatccaagccgctcaccttgtggtactcgtccctgcacaacgatgctagcaaaacagtggtagcttgtgcatttttatggatttgctcattaatgaaaacggggttgtcagtactatcaaaaagcattccgttttcaacaatctcccaaatacttggatggagagagaataggcgactacgcattttgtgactccaaaatgagtagtcttctccatcaaagtgcggaggttcccaagtggaattgaacgtaaatgagcattggagttaccggaatacgagaataacaaatgaaaagtttgagttaacgattgcttttctcgtcgtcgttgtccttggggaag

SEQ ID NO: 2958 - DNA, 654 bp, Arabidopsis thaliana landsberg
ctggattagacttagaccaccagcacctgcaatgttttcagttttttgagcaaagagatgtgttccttgcggttccaaaaacaaaaaacagaacaactctgtttcagtagtttcaagaattgtaccaacgtatgagaagaacaaacagtaaagagctgcgacgataggagctggaatcgaagcaaagatagccccaaatttacctggaaatgattgcaaatcaattgtgtttatctatgtaacagcttcagagttgtatgttcagtaatagctgagagaaataccaagaatggagaagaagatcatgaatccagctgctacttgaattacacgtctactaccaacgcgtgttacagccaaaaagccggcattctctctacaaaggatcatcaagaaacggtttcaacatctgacaaagattgttgttcatttcgaataagagaatcttttctgcttttgttggagattagagatgaaactgtctttacacagacacggatgttgcatttcctgctccaaataatccacagagaagaattccaaatcccttaaaaacagagaacctcattagcaatgacagtttggatgatgccatagagaaatatttgaatctttttgtgtgtttacctgccaaccgatccacgacttaagcac

SEQ ID NO: 2959 - DNA, 760 bp, Arabidopsis thaliana landsberg
  unsure (1)..(760): unsure at all n locations
tgctgatagcatgattcccagtatcttgtataggaataagtatatcaacatggtttctttatcctctatatatgatgcataaataagccttgtgccaaaagtttaggaataagtttgtgttgcttcagatgattgagtatgctgtttttatttctggaaatttccaccattttcagatcctttcactagagaaatacaaatttagctgtatttcctgattcagttcatgcttttctgcgtttgtagtggagtgaaattagcaagtacgaaatggaagatattttgaacacagatgatttttaaaattggtcttcctgttgatgacttgtttttttttagattgctgctgtgttccgcaaatcgttgaggttaactaatgaaggtcgtagaaagtttcaaacaggaaagataaccaacttaatgacgactgatgccgaatctcttcaggtgagtatccctttcatattttcgaattcaagtttgcatgtttctctatatcatagttgcagggctgttaacatccggatcttgaatatttatttttgtccgcagctggtattgagtgtttacagttactttttatgttcggtaatagaagttggatttacttagaaatgatttccagcatactgatctactgaatctgtttgctaggtctaagattggctatgaatagtgattgcattntcatttctagcttgcactttgttatcattgaatttttctttcttcttttttattttggttcttatgccaactt

SEQ ID NO: 2960 - DNA, 334 bp, Arabidopsis thaliana landsberg
aaaataactactcgcggggttgccattctctttttacctattacgttatcttccttgtggtcctactaaaagggacttcgtggattcttgctggtcctaaagggcccactaaacacataggaactcttggatgggaagggtactcagacgtacctgctgttccttcggctactagaggacctatgctgcccgacataaagcttaaatccatatccccagaggctgccgttataccgctattttgaccagtaccagaaaggacagccgcagctactacccgtatcgaatgcaccatgccgagacagatcttattaaggtcctacctgctatgata

SEQ ID NO: 2961 - DNA, 313 bp, Arabidopsis thaliana landsberg
gagtgacgtagtggcgctgtacacgaagcttcacacagttgcatcggagcagactatcatgtatgttacaaggcgtgtatcacaagtatcggtaaaaacccgtcggtaacttaagaagcctccaccggaaggtccaaactccggcgtacttgtgattcaagacgaagaatcgttgaccacttgttgctttggtttgtgcaacgagattttcctaagaggattaccgtttccacagaacgcagcgttgacagttagacgcgacgacggtggacagaacaatactgttcatcgtgatccggttgtgttcatacct

SEQ ID NO: 2962 - DNA, 721 bp, Arabidopsis thaliana landsberg
  unsure (1)..(721): unsure at all n locations
caaagtgtctgacatgaatttggccttctnnnnnnnnnnnnnnnnnnnnnnnnnnnnnnnnnnnnnnnnnnnnnnnnnnnnnnnnnnnnnnnnnnnaaattccagttccagatctccgtagttatcagaaatgtgttcgttgttaggaaacggattaagcctcgggttagccatctctgtcgtcgacgccgcagggttcacctgaagaagatccgattgttgagagtctccagctccaccagtttcatcaccgtcgaccatcatcgcttgcgaatctcgaagatgatcacagatccgatgatttgggattctgattttgagtttccgttgcagttagggttttatattaggagattttcagcaaggtattgagtttctcaaatctcaaccatgttttgacaaagtcaagttgggctttcactaatattagtcattcaggtttttatggaccaatttgccctttaacttgaactgttcttgttcaattacaagagttctaaattttttgactcattaaccatcattaccggtgggttattaagggattcttaacatttatctttaataaaattaaatcattaattggcgtaaatcataagaggtgctctgtatatagagcaaaataatatatgaagagccgtatatgtgctagcgtaggggattagaagaattttgagggattaggagaattntgagacnnaatatagagaaaaagttaata

SEQ ID NO: 2963 - DNA, 2999 bp, Arabidopsis thaliana landsberg
  unsure (1)..(2999): unsure at all n locations
tgcttcttcttcttcttcttgttcatgtttctcggtttaaggttgattctgagggtgagtgagtgttatctccattgtaaacacaagtgtaactcttgattgattatagtgaaagatcgtgaggaggaagatcctcaccgagacgtacctcagagttgccaattgcaactagagggaactcgtaaatcatcgtgcacttagtttatgtttgttgctttagatcgtgagttgagtcatgggacgtagtcggagacatcgatttcacaacaatgtgtttaccaaaaaacaagaaagcatgttcgtaattttcaattgaaccggtatcgtaatttttgattaaactcggtttactcgtaccggttcctttatctatttattgttgtttttaggtttccggtgggaaccctaaacaagaaaacgtcattgtgaagcaattccctatatctcaatgcacggtcgtaagagagaggaggatccgaatccagaggagaccgcagctaaagccctggagctccggtccctccagtcccagttcatgtccaatcaccatcaaaagatgtacatacagtattcttcttcttcttcttctatttcctttctctctcaaccaaccaatcatttgattttggttttccagttacacaaaggaagcaattcaattaagcgcgaagcttctaataaccaatccagagttctacactgcttggaactatcggaagctcgccttcgagtcccgactcgacgaggactctgatacaagcgtggtcaactcaattatcgatgaagaactaggagtcgtgagtggtttataattgctagctgtgttagcttgcacattccattcatgtgaaattttgctcatgatctcttgcttgttaaatacttaggtaaaaaatgccttggagaggaatatcaagtcatatggggcttggtatcatcgaaagtgggttttgagtagaaaagggcattattatccctcctttagaaaatgaattgcaacttttgaacgactatcaaaagcaagccaatcaaaagcaagacgatgaaaagcaagacgatcccagcaggaactttcacgcttggaactatcgcaggtgagagatttagggagttgcttgattcacattgtcaatttcttcatatcttgtcttgtttcaggtttgttgtggagctaaccaagacgtcaaaagaggatgagttgcagtatacaactgatatgatcagtgatattagtttcaccatctattctgcgtggcactatcgtaggtatgcttgcatttttaaagaactagttagatggtgagagagagagagatgtatataatttgctgttgtttctgcagtgtacttgtttcaagtttagtggcaaaaaaggctgatgggtttatgccaaaggaaacgattcgtcgtgaattggattatgtacatagtgctatttttacgttagaagagaaacaaagtggctggttttattacctttggcttcttgatcagactgttaaaatggagactcctcttcgcttttcctcatggccttcagatggttccatcatcattctatctggacctgactgcttcaatgcctcttcttctactactaagttgactactttctgttccgagtctggttcttttccactgattctttactttgaccaagccgtaagtggagtaagctcgtctactgttacaattgattctgaactcaaagaccttgtttgggaaccagtttcggataagaaaaactctcaagtggactcttgtgtttgggttgctcgtctgaaatgtgacagtagagaaccttgctttagtcgcaaggaaaccaaagtcaaggtcagccttggaggaattgtttcttccatgggatgtaacttgaccgctccttatgagtttgtatttacactgcgtattcatgacactctcgaaggagagtcgtcacaacaagaaagcattgtttcatggacggatgatcttgacaattgggatgatgatgcattgtcgaatgatttgcattcttttatcgccttcaaagctgatactggttttgagtggcgtaagaaagctatcaagatagagattgaacattttcgtactttgcctgacaggtataaaataatctttctagatttaatggaaaagagaaatttgtatgcagtctcttgaccttttgagttcttgttctttccttgtttagcaaaattggaaagctcattcttgcaaggcttttgatggctgaggaaactatgatcgcaaatggtgtccattacaaagaaatcctccaactgtataacgatctaatggctcttgattcttggcatgcccagtactacaaggatgagcacagcgtagctctaatccacaaggtacatatactttttcgtgaatctcttaagttgactttttgctcttaaaactctcaagccataaagagaatgttgatgcacaggtgacttcaagaactgaatccatgtccagacacctctttcggtacaggagtatgaacaatattgtatgtttaaggctcaataacttaacactatctcggatagccgcggtcgagaagttgctatttgtccaaatgttagatctcagtcacaatgagtttcattcagctgaaggtaacattatctaacgttttttgagccttgttcaatatcagttgttgcatcttttaaatatgtatgggtctgtatgtaggattgaaggcgatgcagcttctctgttgcctaaatctgagtcacaacagaatcaggagcttttcagcgcttaactctttaagacatcttaagcagcttagagtgttggatgtttcacataaccacatctgtggggaactcccagtagacacaacaaggtacctttgttcttcgccgctctctaattcgggtgaaactggaagagaggtgcataataaaccccagcctgcgtatttggtgcttagagatttgatgaaactgaaacagttagatattagaggcttcgncttgntatttgcagga

SEQ ID NO: 2964 - DNA, 498 bp, Arabidopsis thaliana landsberg
atccatgaagctagcagctcaacatcaaaaagaaatcaaagaagggatcttgaaatggatactgttattactcggatcacaaacacaattgttgtaaacacaacaaactctttttcaatggaaagttctacaagcggaaaaggaagttctagcgataatagcaaaagctttggtagcttcattagcggaggcgctttcacagacactacaggttcaggctctaacttaggcattcctgtagttcctgaactaccggtagaagcttgctagtgctagtggaagtcctacgagcaatccttctggcagtggggtttcctttacggacactactggtggaagctccattagtcctactgaaagtggaagtgctggatcagcaactcagaaaaacgctataacattgacacaagttgaggctgagacttccaaagaagtcatgatattcatcataaacctccaaaaacagtgtccaccaaaagaggaatacgaggtcttctt

SEQ ID NO: 2965 - DNA, 575 bp, Arabidopsis thaliana landsberg
tcttttcttgaatttctttcttaatctgttatacatatgcaagatgaagtaaataaaatgttttctttttatacattttcaccttcaagaaaagaatgtatttcgaagtaaatttgaatttacttgtctagttgtcttagaacattctttctcgaggtccgacacaaagaccatcactactttaacggtgcaaggctctacatccttcaccgtttgcggatctggaatttgaggtaaagatggcttaatcttcaagtgagctgaaacaatgtccagaagggacacagatacaaaaagaatggtgaagcataacaacagctgaactcatgccattattctatcttgtgagaaatgaaggttgaagaaatttatttatttgttctgctttcgtagatatgtttagtgttcaatgtttagaatcattgatccactgaccattgagaatttggtggattgaggtcaaaataatagcaaagagtttcacaaaagcattgatggtaaacttttgtattttgccattgtagttgtctttttttttttggaagacgacactgcctaagatttttcttgacccc

SEQ ID NO: 2966 - DNA, 235 bp, Arabidopsis thaliana landsberg
  unsure (1)..(235): unsure at all n locations
caaaagggcnnaaagtatataagccagaagatggaaggaaagactctaaaggagaaagaggatttaaagtcatagtataagatcgctgattgagatagaacatgcgcagattagagtggagtttgtttcttcgaagtacttgaattttgaatgtggtctatggatgtgatcatcattatgatttgctccggaccatgtttatttgttcattagattaaaaaaaatacgagttaat

SEQ ID NO: 2967 - DNA, 532 bp, Arabidopsis thaliana landsberg
  unsure (1)..(532): unsure at all n locations
aagacccaacggttaagattcataaaaaatggtcaataaaccaaagcttgaaccttaaagagaatgaacttttgtgttggcctgtggaagagcttaagcctgccatcaacaatagctggaactttccccaatgggttaatatctgaagaacaagacacatttcttaacaatatttacattaagaaacaacactaagcatatatagccttagtctacactaatctacactaatgatctcatatacactaaacataaatctaccaatactcagatttgaaactttgttgattatttgtacgaacctttgaattcaggagataattgttgacgnnnnnnnnnnnnnnnnnnnnnnnnnnnnnnntggattccattaaccctgcaaaggataaaatccatacaaaacaaagattctcatgtataagagaaaacaaaattggctgaatctggaattaacaaggaagttcaacgaaattacttgcagaatatgataacagcacgtgatggctgtgacattcgatctgcatacaccttg

SEQ ID NO: 2968 - DNA, 295 bp, Arabidopsis thaliana landsberg
  unsure (1)..(295): unsure at all n locations
gaaaactgcctttaaacacgtgggggcatctttgnnnnnnnnnnnnnnnnnnnnnnnnnnnnnnnnnnnnnnnnnnnnnnnnnnnnnnnnnnnnnnnnnnnnnnnnnnnnnnnnnnnnnnnnnnnnnnnnnnnnnnnnnnnnnnnnnnnnnnnnnnnnnnnnnnnnnnnnnnnnnnnnnnnnnnnnnnnnnnnnnnnnnnnnnnnnnnnnnnnnnnnnnnnnnnnnnnnnttgcggcccgacataacttgcaagtttgggagttttacaagttccttttcttgggatacatcatt

SEQ ID NO: 2969 - DNA, 633 bp, Arabidopsis thaliana landsberg
  unsure (1)..(633): unsure at all n locations
gaaatataagtgcatcacacaaaatgatgaaatttctaaatatttgtgtgttttgtataagtctttccttcattcttcatgttgtcactctaagtaatcaaaacaattattagtatgttatgttatggtgccacctcgctacaaaaggatttacttaagaaccttgtcattaatctgtcttcttgtttttcgatatagcggccaattcgaataataataaaacaaacttttaattttaaaacaacaaaaaaaggaccttagttgtatgaaatcaataacacaacacactactgccnnnnnnnnnnnnnnnnnnnnnnnnnnnnnnnnnnnnnccttcttgattatattttagtttatattttaaagtatgggtatgtgaaagttttattttagagatcaaatgttaaactgcatgtgcacaatatttagtaatagtaatttaannnnnnnnnnnnnnnnnnnnnnnnnnnnnnnnnnnnnnnnnnnnnnnnnnnnnnnnnnnnnnnnnnnnnnnnnnnnnnnnnnnnnnnnnnnnnnnnnnnnnnnnnnnnnnnnnnnnnnnnnnnnnnnnnnnnnnnnnnnnnnnnnnnnnnnnnnnnnnnnnnnnnnnnnnnnnatgatgaattggaatat

SEQ ID NO: 2970 - DNA, 121 bp, Arabidopsis thaliana landsberg
acatcacgaacatcctcaatttatacagaactttttctacatcactttttcttctctttctcttagaaagattctttaactaggtatatccatctaccccctttctcttcaaaaaacccaa

SEQ ID NO: 2971 - DNA, 537 bp, Arabidopsis thaliana landsberg
gttttctgaacacatgaaactgtaggaaatcagcagaggtacttagaagtaaactctatcttttggcaaggttccaaataggaaattgcataaggtaattctacaacaatgtaatgtacctgaaaaaaacatggtgagcatgtctgaaggtagagacaggcacaaagacagtctcttaccgtttctgttgctattcctctgcaattgcaaccttctccaacccattaaatagcttcctttctcctatttcttgttggattatatactgtattttacataaatatataaatatatgtttcctaccttcatcatgtctttctctaaaaagtttatctttgtgtgtagaattacaaaaattgatcactaacaattttctcacaaaatttgatcaaataaagttactcaaaaatgggagaaaatagtgatcaaataaataatttcattcaaagtgaaagaattacaaaaaacaaataaatgaaagctgtgtaaaaaagtaatatttctttgcacagaaaaaaatccactgtttcttctaat

SEQ ID NO: 2972 - DNA, 517 bp, Arabidopsis thaliana landsberg
tcactaaaccggtagtgcattattttgtaagcttaaagaccggtctttgtcaggctgggattaagcttcgagtcacggtgcaaccatcaaccgaagctgttactttcccgaatgttcccaagaagaagttgtcacctatcgtcaacagatggtagttaccctttcagacctcatcactaagcattgagtttagttcaagagttttaggttttggttttgctcttttaaagagtttttggtctttttattcttactattgtttcatttagattctgttattcagtttttcttaaatttcaaagtttttatttttgtttgatcaagattatgcccataaacatgaacatgttccatatgacattcacatgtcccatgtgttagattctgagcagtaacagaaagccttatcaatatacaccaacagataaacggagtgttatcacaaacttagatcgtgaattttaccacaccacaacgattcaatatcaaggtttcgttctttttatcaatggatgat

SEQ ID NO: 2973 - DNA, 612 bp, Arabidopsis thaliana landsberg
  unsure (1)..(612): unsure at all n locations
tatgtttttttggtaaaatgtgaaacatttatatcattaaattttgacagaactataagataaacatgtagcagaaaaaaaaaaactatagaattagcaaaaacggaaatctaaaacagaaacgagagaagaaacatcgattctaaaatatcaaattcagaaatttgcgtgatttccacaacttcaagttaccaagaagctgggatttcatcctatttgccacgaacaaaccctaacagaggtcagtactnnnnnnnnnnnnnnnnnnnnnnnnnnnnnnnnnnacaaactaacgcaaaaatgcgatgacaacagtagactaatgcacaaacccgacagttacaaaagcatctacgggtaaccaaagaaaccacctctagtcaccattcttattacaaaacaggaaccatctctcacggacaagtgatgccacaaaaaccaatgcgccgcctctattcgtcccttgaagacttcactcagagaaaacgcacacattcaaaactgttacagaanatgaaaaaacaccaacatcgaaccacccacaccaacatcatattttgtggttctaagttcttatttcttcctctacgatttaggagtactcacactttg

SEQ ID NO: 2974 - DNA, 598 bp, Arabidopsis thaliana landsberg
  unsure (1)..(598): unsure at all n locations
tatagattgtgtaaagtgtttctttttctttttaaagtttttngaaatactagcatttttctgggtgagtgttatatttattttatgtgactaaataactaataatactttgaaaaagataactagtaaaatatatattaaagtggtgtctgtttgtaaacatgaaaacttggtatgtatactagattttcttggcgttatgcatgtgagatccaacaaatggtctcaactccatctttagaaaatagtaagaacttgatattgcgattatttttttttttttttttgaataaaatttaaaatttattcgagaaaacatgtttacatcgaatgcatcgtttgtgcctataaacttttagatacaagaatcaatagaatatgtagagaactttattattttgaaccgaaccaacaagacatgcagccattgtagcgatattgccaatttgcttgggtagcttgccatttttggagataatataactaatatcccatattagatagtttcttaacattaaacaaattgggtgacctatcattttcaacaagaattcaattatttatttgtcagcaatgacaatttaaagagaaaactgaa

SEQ ID NO: 2975 - DNA, 120 bp, Arabidopsis thaliana landsberg
taggtatccgtcgattccttgcctaagcaattctacttcatctcttttttcgttttcgattaaatcatacatcttgcacagcctatgcttcctttttgtcaaactcgtgaacgagattac

SEQ ID NO: 2976 - DNA, 100 bp, Arabidopsis thaliana landsberg
ctcgacgacgcattgaagctagttgtggaggtggtggtggtcactcaaaaattttttaattcaccataaaaacaccttcttctctaggaaaactacaaaa

SEQ ID NO: 2977 - DNA, 384 bp, Arabidopsis thaliana landsberg
  unsure (1)..(384): unsure at all n locations
acgaaacaaatcagtactccacaactaataaaacagaaggctaagaacagagacgttgctcttagtatttctccaattcaacaaacttttcaatatctttccttgtgtagccacatctcccgacacgatgaggaccatcctccctgagaccccaggcaacctatcataccttttctttagacatcatcagattttgcgcttggaaacgcatcaaactcctcgtcaattgggcaaaggtgaatcagctttagacagctttatatccatgtgtggaggatgtctcggtttcaagccaaacctatatatnaacctaaanntaagaaaagcgggtatcaaaagcacagaaacaatctatgggaaacacaacaacacattgacaaacta

SEQ ID NO: 2978 - DNA, 178 bp, Arabidopsis thaliana landsberg
ggtgagcattataatcaatgtaccatgagcaaagttttattttttatgaatgaacaatatgccaagtgtgaggccctgttcacaatttcaccactgtccacgcatacaccacacggttgctactcttaacaagcaagtcctctttcttacttaccatgttcttacactatttcacatt

SEQ ID NO: 2979 - DNA, 291 bp, Arabidopsis thaliana landsberg
  unsure (1)..(291): unsure at all n locations
aagctgaaaaaaaaaaaaaagtcatcactaccaacttacatagtctatctatcaggctgatagccaacatttgcnnnnnnnnnnnnnnnnnnnnnnnnnnnnnnnnnnnnnntctagtaccattacctttgtaacatgtacctaccatattatatactctcaaatctcacgatattataagcaaacactcttcgtggactnnnnnnnnnnnnnnnnnnnnnnnnnnnnnnnnnnnnnnnnnngaaaaataaaccttactagtacagttcttttagtttataagaaaaacgt

SEQ ID NO: 2980 - DNA, 433 bp, Arabidopsis thaliana landsberg
  unsure (1)..(433): unsure at all n locations
accttcgttttttttttactccatccctagcgcgttcccataagtacagcactagttgaaccgttagtttaccttctcttccgtatcgacatgaaggcgggnnnnnnnnnnnnnnnnnnnnnnnnnnnnnnnnnnnnnnnnnnnnnnnnnnnnnnnnnnnnnnnnnnnnnnnnnnnnnnnnnnnnnnnnnnnnnnnnnnnnnnnnnnnnnnnnnnnnnnnnnnnnnnnnnnnnnnnnnnnnnnnnnnnnnnnnnnnnnnnnnnnnnnnnnnnnnnnnnnnnnnnnnnnnnnnnnnnnnnnnnnnnnnnnnnnnnnnnnnnnnnnnnnnnnnnnnnnnnnnnnnnnnnnnnnnnnnnnnnnnnnnnnnnnnnnnnnnnnnnnnnnnnnnnnnnnnnnnnnnnnnnnnnnnnnnnnnnnnnnnnnnnnnnnnnnn

SEQ ID NO: 2981 - DNA, 184 bp, Arabidopsis thaliana landsberg
  unsure (1)..(184): unsure at all n locations
gtgaacaagcacaagcgagtggataactccggtcaaatgaagcgcctgnnnnnnnnnnnnnnnnnnnnnnnnnnnnnnacaatcacagtccttagggctcctcacaccgtacatcgatttctgctcgtttgtgtgagtctcaatgagtaacctgatgagctctgaatacctccatcaggattcg

SEQ ID NO: 2982 - DNA, 609 bp, Arabidopsis thaliana landsberg
cgacacacatacattaacattattacacagtcattacatcgaaacaaagcgattttcgttatcttttcttgttttacaaaacatcagtgactttgttttgttaaaattttgatcatggccaagttatcatgttcttatttctttatactcatgcttgtgttctcaggtaatttcatatattccatttcttaaagttcattacttttttaaggttctgatttacattatgtataagatttttttttgtgttaataacacgatgttttactcttgtagctcttttaatggttgaatgtgatgaggggaagcgatgtcatacgacgattgacaagggaaatttttgtgatcttgtcgattgtcgtttaagctgcttttctggatacaatggagttggaaaatgctttgacgatcctaaagttcctggacgttctaattgtggctgtctatacaattggtagagggattattttaaaataagattatgttaaaataaaggtttccactttcgtaatcgatatgagtaaaagaaattagtggtttagttttggacgccgttaaaatgaaacgtctctgatagttgttaacatttttcagtgatcctatcaaata

SEQ ID NO: 2983 - DNA, 260 bp, Arabidopsis thaliana landsberg
gcttccccggctgagactaaagcctcctggcttgggacgaatcttacgaccgagagaagatccataacatgtccaaccaaccatcaagcgtaagccaaaggctttctgtcgtcacgacctaccaggaatagcagggcgactacgttctctgtggtttcgccgtggaacataaaagatacaaaccggacagtcgaaatgccagggtcaaccaaagatccaaccgaacaaggcgcgtggcacaaaacgttatggttgatctc

SEQ ID NO: 2984 - DNA, 120 bp, Arabidopsis thaliana landsberg
tcaaatgggtgtcgttgaaccgtacgagactataccttttagtatttaacaacataaacatgttaagcggagagtatatacttgagagaatctttactaatgatgatggatcctaggctt

SEQ ID NO: 2985 - DNA, 673 bp, Arabidopsis thaliana landsberg
  unsure (1)..(673): unsure at all n locations
catctatggggacacttaattctcaagttttcagaaattttaagtctcaagctccaaagaggtagatatgactaagagagtgctaccaaccaggccattactgatgcattgaggaagttcgaagaaaccttcaccggtgtaactcaaaagtcctcaaacacaaaaaaaatcatagctgaccttcaagcttctcacgtaacacttaatcgaaacgttgatacaattaactcttgtgtggaaactcttagtgcagggaccacaagagaggctcgctgaagcatggtgtactctcatgtttcattggcacgtaacggttcaatggtagtatgtgatatgtctataatttgcatgatttaagcattcattcatcactactttaacattgtttcattaacgccgcatcacatttgtagtcattttagtgtgttatgcatacttaggatgattttgcattagagttgcatataccttgcatactaggattgttttcaggtgttttggatgttgttggtgttcaaacagaagagaaacagagcagagagtcagcatgctcaatcgcaccttcactagaccactcgatcgcaaccaatgaccattttannnnnnnnnnnnnnnnnnnnnnnnnnnnngagaatgtaattgtaacacaaaccactcgatcacaagccggagg

SEQ ID NO: 2986 - DNA, 1068 bp, Arabidopsis thaliana landsberg
gggtttagctgtaacgcgttacgcgctattgcatcattaataaatatgaagataaagtatgtcaccgcttccatatacattaacatttgctcttttcaaatgcaactacttagtgctctctctgttttagttttatataagctgtaatttaaagttttacacatatattaaaaaattacaaaaatttcatttaatttatcgcttttatataaaaatatcatttactataactgattcaatcaataaaaaattatataattaaatgttattaattaaaaaagtattaaatatatttattatttgagatcaattatgggattagcactttaaagtgtatccttttgtgattttaggaacatttcaatatactcccaaaaacaggtaattatacgtgatcgtattttacaatctcacccctttcagcttacactcaattatttgatttctcttttatttatttttctcctcaatagttgaagatgcttcaacaacttggccattatttgctaccgcagaagattttctcaccgtcgcgaccaccacctccgtggaacgccttctgctccgccgctgccattgacggagccaaccatctccctttcatgtttcatcttttaaaatctccttaccctgttatctctccctctgattgttgaattccacattttctcacttccccatcttacctccggtcctctcttctcctttcagatttgctctctgttccctaattgtttgggttccctaattacaatccttatggtatatatttttgttaatgcttacctcaatatatgagtgacctcgatctcacttttcccttgggttccctgttttcagatcttaggatttagattttacattttcatcctcacctaaaatcatcttctcgttaatgtttatttgcttttggttgttctcaaacacagcttcttctctcgagggcaaaatcgtctttcaagcttgtaggaagtgtccaatatcataagcctatttcgattgtaccttatctccaatttgtagcccaaattgtgcctaaaacagtaatagccccttattatttgctta

SEQ ID NO: 2987 - DNA, 562 bp, Arabidopsis thaliana landsberg
cagaaggtggcggcattgtggcactagcatatcttgagacggcaattttagcacctgtggactgttttttgttgacaaacaagtcaacataatgagtaagcaagatgagattaaaccaaagagcaagaaaattcgaaagaatgaagagagagtctcattgactttaaaagttaatgagtatgcaacctatgaaattcatctattaaggacagcctttctatataaatggatatgaaaatctatgcatatcataaataattgtctaatgtcatttaaaaaaggtgaagatgagtgaaacaaacctcaacaagagcaacaaaagaagccatcatcatggcaaatgcttcaccagcatcaaacaatggtgctccccattggaaaggccacggaactcttatcctgcacaattaataagcgtaaaatgctaagccacacttgtattcactgacaggtcattaaagaaaatacttttttgctaacataactcagcgagacattcaatgttcaagccttgttctgaaattcttaccatggagcagcacttataagcccagcgcgatca

SEQ ID NO: 2988 - DNA, 511 bp, Arabidopsis thaliana landsberg
gctctgagacgttggctaacaatagtatcagcttaagtttctgtagcagtaacagtgtatgcagtgaagctaatctcgaaaagactcaatctttcgatgcaaacgaggctaatttcaaaagggtctttgctccttcgaagccgcataaaggaaacgatcttagatgggacgcgattcagaatgtgaagtgtagtaaaaacgaggatctgggtttagggcattttaggttgttgaagaaattgggatgtggagatattgggagtgtgtatttagctgagctcagagagatgggatgtttctttgctatgaaagtgatggataaaggaatgttgattggtaggaagaaattggttagagctcagactgagagagagattttgggtttgttagatcatcctttcttgcctactctttactctcatttcgagactgagaagttttcttgccttttgatggagttttgtagcggtggagatcttcatattctccggcagaaacagcccggaaaaca

SEQ ID NO: 2989 - DNA, 148 bp, Arabidopsis thaliana landsberg
ctactgtggagacggataatcctgatctcagagatcgtgcatacatatactggcgtcttctatccactgatcctgaggtgtgtgttaccatgatttcttatagcatactacgttactaaccagtaatcgatcgaactataccctttgc

SEQ ID NO: 2990 - DNA, 269 bp, Arabidopsis thaliana landsberg
ctcgttatctcaggaagcgatgacacttgggatgaaatacaaagacaagaattggtgaagaaatttctaagatgcttacctcagaaattcatggcatacaagactgtttttactgtgtcaaacgatcttgagaaactcagctttgctgaagtagtgggaatgcttcaacaacatgagcatgaattatgaggagtgaataaacttaaagggctagcattaacatcttgtgaagacaagttgcagaaggaagaagatgactatgtaagctt

SEQ ID NO: 2991 - DNA, 1167 bp, Arabidopsis thaliana landsberg
ggtggtagcctcggcgcacgctcttgtcgaggtgggcccgacggttgcggtggtggtgcccgttgccgaggcgacctggggccgcagctggtgttgcgcgtgcgccaggtgtggaccgaggcttcccgcatgaatcgggaagtcacggcgcgatgttccgaggggtacccctgccttcgggaggcggactttcggcccgtcggaccgcggcgtcctccaggagattcttgagctctctctggatacgccgcccctcggtggttgatggctccggcatcgcgcggagaagcattgccgctgcagccaggttctggccgactccactggaagtcggtggcggccttaccctgacatcgtcggcgatgcggtgctggataccctggggtaggtgacgcacttctccggccggagtggtctgcccattcctgcccgatgttccgccggaactgctcaagtgttcctgctccctcgtcgagcctggcctacatctcgcggatttgctcgagctgtgagtcctgacccctcgcagggactgggaccacagctagctcccgaaggatgtcaacgcgaggcacaggcctagggggatcaccgttctccagtataccaagatggttgccttcgccgggaccccctagatcgacgtggaaacattcacgacttgggccgcagtcctcgtcgccgaacctgcggctaccgtcggaacaatcggagaggcagtagtcgcatgcggtcatgaagtcccgcatggcactggggttaccaagtccggagaaatcccaacaaaaattgggctcatcatcttcctcggaacccgagggcccgtaggtcgacacggctgtcagccggtcccagggtgaccgcatgcgaaaccccggagggtttgatctcgcctctacgagagcgcccgccaaaccaaggtcgctaggcgggttgaggctgagtcgaaatgacgtaggatgggaatcggttggtacctttcggtcggcgagcagcgacatagtcacgtcggggactgattgcaccgccgtcccaggtacgagggcgacgtcctgcaagctctccacgagcgcactggcgtcgtccacttgctcggggttggcgtgtcgcggggagacggcgctcgccttcgtctcaaacgcgaggtcgacgcccgacgcgcccccg

SEQ ID NO: 2992 - DNA, 492 bp, Arabidopsis thaliana landsberg
  unsure (1)..(492): unsure at all n locations
ctttgcattgtctagctccgccgatcgccactttcattccgctctatactctcaacacaatttcatttttagctggactgcttgactcaagttccccactaaatgctccattttctattacagcactaaattctgtatgaacaattgagcaatactcaactggcctgtttctgagctcccgctttgctgcaagtaagaagccttcctatctgcagaaacctgtgctctgaacaagcgctgagaggagatcagggaaaccgaacatccgactttgtaaccttagaaacgttgcaagagcacagtacactgctccagctgcaatgtccactccccattaacatacaggtaannnnnnnnnnnnnnnnnnnnnnnnnnnnnnnnnnnnnnnnnnnnnnnnnnnnnnnnnnttgccacctcaaagacttccatcgacaatcatactctttctttctaaacgatttaaccttggtgagaaactggtcatcccatgct

SEQ ID NO: 2993 - DNA, 580 bp, Arabidopsis thaliana landsberg
atgaatatgtatagaataaatccatgtgtagggtgggttgaaaacctcatgatgtaacaaaacaattataattgaaaaacaaaaacaaacatacataggttacttaactttcgtttataacaaaataaaacatttatttgaaaattaactctttgtataacatatgtatctatagagcctataaatatgactgtatattgttttaataactccagcacaaaacaaaagaaaaaagaattcaaaacgattcacaaattttttttgtaattttttttttgcggtattggttaatttctatgaagaaatgaagttgatttttatatttttaactctattaatttttgtttcttcatgtaagtctaaatttatttaattaggataatatatcagtattataatcaacaacaaaaaattgtttaagaatttgatatatcttttcaaaatttgataggtacatcaacacttataaaggaatctagtgaagaagagagaatatatcctttcaatccagtagcaagtcctttcgatccacgttcaccgaaccaagtacttaaaataggcaaaattggttattggtttg

SEQ ID NO: 2994 - DNA, 481 bp, Arabidopsis thaliana landsberg
tacaacacaaccgttatttaccataacaacaatacagattgtcaaacacagtaacacacaactctttatccaaatgaccaaatgttcaggactgaggaacatacatgatattatcagtattcttgtctcaaatttttgaccaacatacatcagttgttcatcaaagaattctgtgtgttcttaatttcagagctgaggcaagaccaatcgaaaggaggaatcgcataaggtcccttaagtataccctcagccatcaatctatatgcagcttcagtcatatgaacaccatcccaactcacatactttgaaggatcgtcacaacattcaggtacttgagtcccacgtttcctacctaatgtgaagttaaacggtcctcctaaagcgcagcaagccggcaagggtctgcttatgaaccctgatttgataattagaaacagttaatcaatgaaattctttgtttgggtttagtagaaggatgaaa

SEQ ID NO: 2995 - DNA, 492 bp, Arabidopsis thaliana landsberg
acccccctaaaaagaaaaagttttagactttaaatatctagatctgaaaattcagattcataaccgttggaaaaaaatctctcagatgtgtctaaagaaaaaagatagaataagagcaaaacaaaagacttcggttctggtgctgagaaagccaccggaaccggtaaccctaaacgcaggcggcggctgaagttttagagataagggagagtaaaattttaagagtgagaaaatgacgagatgtgagcttgtaaatactttttgtaatataagtaactataagtaatattttttttgtaatacctcaaattttatttttaatgatatttacaagtttaacaaaacaaaaacaaaaaacaaaatattattctagtcatagcaagtgagaatttttgaaaagggaataaatgtgtgtaattaattcaacggtccaacagtggcttggacgtaacactaatgacatttgttcttcttgtaatttttatgtggctg

SEQ ID NO: 2996 - DNA, 448 bp, Arabidopsis thaliana landsberg
ttcttatgcataaaatgattaaaccctttattatttctctgtttgctctgatgatggttgcttcttatgtagctacaggaaaaatgttgttcaaggaacttgacattcttgggaagcttgagaacctcgatgtacctgaggatgatattgaggatgatgtgaccatttttgatttctcgtcgtttacaagccaatattctggtaagaatctggtgaatgtggatagctttaatgcatttggagatggagtttctgatgatactcaggtgcgttatgctcgaatcggtttaagaaattcatgataatgctggtggaatagacaccacaaaaccaccatatttatattttttaattatcaacttgtgataagtttctcttataaccaggcctttataagagctttggaccatggccttgctttgaccaaactattgtttatttgttccac

SEQ ID NO: 2997 - DNA, 636 bp, Arabidopsis thaliana landsberg
ttcgtattgaataactaaccttaggcagaaaagttaggcaaagtgtggcaactgaggtagtaaaccaaacaggccttaagtatgtaggttgcgtcaaattgaagtcagacgatgggtggcactaaaaagccggaaacattacattgcaataattattttatagaagtaggtgaaaattatctttagacattttctatcctaccttgtatatatagtagttttccaagatctaagttgaccgcctctagaaagctgtttctgaaattaaaaatgcaatttcttctaaaaatgtcctagggcaagcatactagcgaacgactacaggtgcttgtccagtcctatataacaagctaatcatgtgtttttttaacgtggaatacgtgtacgaatttgagacacccgccttcgcacgaggtctcgttgccatgcttatctatatcactatatataatctatcagtttaaactttataaaatcgacctaaccaaatcaggtctaccccataacctctactaaatctaccggataaattaccttcggattaaacaccatcagaatcaatgattcagatcgctggataacacatttctcttactacagctccgtcccacttgcgtgtcgcgctggttgtaagtc

SEQ ID NO: 2998 - DNA, 645 bp, Arabidopsis thaliana landsberg
tgccagatgtgtttatctatctaaccaaagacctcaattacataatccatttgaattttacatcagtttccacaatctttatttttaaatagttttgtattatttctgatatgcgacttaatttcttaaacagtcataataaccttaatctctctagctctgacattcaaaccggatcgtcttggttcaattttatttcaagtgaatggaaattacttttggtactcaatgctgatgatttatggttaaaaatcaattttcaacgaattcacaatgaaaattggttctattaccaaacaaaatatatacttgtacaatatgagagagaaatataaataattatttgaatagcactttaggaattttaattctattctttttggtgggcaaaggagagacaattgtctcccacattttataattttaactaaaaagaattacacactattgattattgaatagcactttagaactttacatttcagaagaagattgattttaaaattagaacaacaaattagatcagcttgtaataaggctttcaagttcaaatacagaattgaaaagaataacatttaaaaattctaaacatcacatgtctaataatcaactctcctaaaatcagttgaaaatgaaaaagatgag

SEQ ID NO: 2999 - DNA, 553 bp, Arabidopsis thaliana landsberg
accttatataattgttgactctacaaatgttaactaatgcagaatatctagagcacatatataaacaaacaataacaacagagaccagtcacaagtaacacacaacttcctcaatttttataatattctttgtagacaaacaaaagaaaaaaatatggagagcaacagaatggtgatgtttgtgacaatgatgatagtgatggtaatgggaaaccttctgattgaaacagaagctgatgctccacctcaaccttctccttttaaaacttgttacccaggttgtgttttgacttgtatcgttcagaagaaattaccaaagaatttgtggtgtccagtttcctgtatcaagacttgtcttgaacctccttcttcacagatggattccacaaacgaaatcaatcataatgattattactgcaaactaggttgttctactcatcactgcgcttccctttcctctatccaaaatccgagtaagtttcttttgtataagattatatatggtcttttttggtttattgacatttatcaacataagattactgtatttatg

SEQ ID NO: 3000 - DNA, 429 bp, Arabidopsis thaliana landsberg
  unsure (1)..(429): unsure at all n locations
taaaccccgcaaaccgcaggccgcatgagaactaanagtcaggacggganttttccttttcatcaaaggcggcccaaaaaagaggacactgaggggcaagagagatggcccaaataatcactagacagaggggaagaaaacataagtgggacacagtggcctcagacccaataaaagcgatataggtaaaaggtaaaaaccttaaacatgaaaatagatgcatgcttcaggtgactagtaacatgtgccttcagaaatatttgacaaactcgaaatagaaaaaaaactatggccaaaaccatacaaaaatggaaattcgataattcaacgtgaaaaggaaattctcatatcgctccgtctatatatacatggcgttgctcatcataattttcatcaagcaaaaactcttactctcctctgtctttcaaa

SEQ ID NO: 3001 - DNA, 5047 bp, Arabidopsis thaliana landsberg
  unsure (1)..(5047): unsure at all n locations
aaattattcaagtaagtagcttagattgtcgacttctcaatcgcgaaacaatattttgagatatgcaattttttaatctaggtgactggtgaggaagctattgaaacagccaagcttcttgctatcaaagaaggattattggtaccattggttttaacgttcttttttcgttacaaataagtaactaaaacatcggagtttttgataaacgcgatcattcatctggcaggttggaatatcctctggagcctcagctgcggctgcgttaaaggttgcaaagcggcctgaaaacgtagggaaactcattgtggtaagcttagtctttgacttaagagtgaccataagctttgaagtaaccgaaatcaaacctggtttattaaatatcgcgatcattgtatggtttgtaggttatttttcctagtggaggagaacgttatttatcgactgaattgttcgagtcagtcagatatgaagctgagaatttgccagttgaatgagtagtagtaacgtaggattcaataagagatgttggtaccaaggttacattttgattattgtaggtcattgtaaaatcaataagagttacatattccttgatgatcaattataagttgttcattaactaattttgatataatccgatcgctagaccgtcacaatcaaacgttaaatcttactcattgttaagggtcggttttggcccatgaacataataagcccaaaccaagcccagtaagtgatagaaaagatctggagtgttccatcgaccaaaggaagagggcaaagaggacagatgtactgtgcagagtggaaaaagtggtaaagacgtacaagcacaaaaaggaaaccctaaaaggacaggtcctataagtacaagaatggaaaggaatgaaaggaaatgcgaaattcccgctgacacagagaaaggacagcagtacaaccattgacctcgcctcgtcttcaagacctcacctcgtcttcaagacctcgcctcgtcttcaagacctcacctcgtcttcaagacttcgcctcatcttcaagacctcacctcgtctccaagacctcgccttgtctacacatcgccgatctcatcctgtttcgatcatcccgtcacaataccacatcccttagtcaagaaattctcgtttagtcatcggcctgttaaccgagacggattctttaactattcctagagaaacatcgtacttgtgtgatccctacatcatcactcatgactcttgtttgtaattgaattgaaaattagatacaaacacattaactagagcttgttttgatacagagcttttagctaactctgttaactcactaacggtcttcaataaatctggaaccgaatccggtttaatccctaattcacatgtaccgagtcttcttcattaaacacataccacaaccctccacacaaaggagagtctcttctatgtttatagttcaaagatatccgtcgaaaaggaagaacgagcccacgaccagacgaaaatgaacgcactacgaggagcaaccgccactacatctagtacaggaggacaaacggtgacaccgatcccagggaagtttcacatgtcaacctcgatacccgctaaagcgtcagcacctccgacgccccacggatcgttgctcggagcactcctcgaatcaccgccacctccgaacgacgaccggcggcccgcaactaaagagccgcatcaagtaaccccataagctggggcgccaggagatcaacacgtcgagactggagttcgcgtagaaccaagcgaaacgttccagagtatcatgaatcatctcagccagtaggacgagcgaataaacgctcgctttgcaactctagccgcagcacaagcatattcactagacgaactcaatcgactgcataatagccgactttcaactcaccagtcagctaggggaaatccagaacgtcgtccaccacaacatccagcgggctacacaggcgagggtgctcgcgatgcggaagtaaccgagctaaaaagaaccatcgccaagatgaactcaaggatccaccgagctacgagcactgcgcccgaactggatcgcgtcctagaagaaacacaacgaaccccactcaccttgcgaataacgaacgtttcaatccgtggcgcataaaaaatcaggctcaacagttataatggtcgcggcgatccaaaggagttcctcacctcgttcaacgtggcgataaaccgatccgacctaacaacggaaaaattcgaggcaggtagatgtcatatattcatcgaacatctctcaggcccggcgctgaactggttctctcgcctcaagccgaacacaattgacagctttcaccagctcacctcgtcgttcttgaagcattactctccgctcatagaaaatcaaacttcaaacgctgacctctggtcattatcctaggctccgaaagagtcgttccgtttgttcatcgatcgcttcaagctagtcgtaacaaacatcaccgtgccaaacgaggcagcgatcgttgcactgcgaaatgtcgtgtggtacgattcaatattccgagacgacataactctgcacgccccaagtacactcggggacgcactgcaccgggcctcgaggtacatcgagctggaggaagagaatctcatcttgtcccgaaagcataacccagtaaaagcggcgccgacgaaagatatcatcacgattaaagcgaacaccgacgaaaacctagtgccgaggcaacaccttgacaagaacgtaagcaatggaagaaagcccgctacattcgtcgtaaactctgataaaccttcaaatcggccatggaacaagtatgtgcgcgacgcagactctccgaaccctggtcccatgtattgtgagtatcagaagagcaaggcgcactcaactgagaactgtcgataccttcaaatactactgatggcgaagtataaaagcggaggaatagcggtcgtatgcgaccgcgttcaagcaaacaatagaaaccaatgccgaaacgaatgcacggctcgaaagtacatccaagaccaagaacaggtcgtccaaaaagaacccacagccgatacggtaaaagcagaggaaaatgaagtcgcggccaaaagacttcgcaacggcaaagcagtagccgaggaaccaaaagttgtccggcaagttaggatgatcgtgggaggcctgctaaattgtaatgactccgtgcgatcaatcaaagaacatcgcaagatagccgagatgaaagagtcatnnnnnnnnnnnnnnnnnnnnnnaagcgaaccttccgaatccgaaccaatatcattcacgagcgacgacctcgttggattggacacgccccacaacgacccattggtcgtcgaactaattatcggagatagccgagtaacaagggtcctcatcgacaccggttcaaagatgtccttacccaaatgagcataagtgattgacaaatcaaaccggcctctaaacctctagcaggttttgatggagactttgtgatgaccatcggaacgatcaaactggcaatcttcgtcggaggaataatcgcttgggtcaagttcgtcgccgtcgacaaacctgcggtctacaacgtcatcctcggaacgccctggatacatcagatgcaggccatcccgcccacttaccatcagtgcgtcaaattcccaacgcataaaggagtattcacttagcgaggaaaccaacagggcgtcgtaacgtgcttcctcatcgagcacaagagtagaatggccaaaaagttatagcaattaaccgacgcggcgccaaaatccaccaaggcgccaaagcccgtgaaagaaccgcaaaaatcgtacgaggaaactgaactgacacgaatcgagcaagtcaatatcgatgaaaaggaccctctacgttgcgccggcgtcggcgccgaacttcaaaaatcaatgaaagcggagctgatcgccttccttaaggagaattcgtctaccttcgcctggagcatagaagacatgaccgtgatcgaccccagtataaccacccacgagctcaacgcggacccatcttacaaaccggtaaagcaaaagcgaagagagttaggccctgaacgagctcgggcggtaaacgatgaagtcagtagactcctcaaagttggtctcattgtcgaggtgcagtactccgaatggctggctaaccctgtcgtggtcaagaagaagaatgggaaatggcgcgtatgcgttgatttcacggatcttaacaaggcctgtccaaaacagagctatccgttaccacacatagatcggctcgtcgagtctactaccgggaacgaactcatgtccttcattgatgccttttccggatacaaccagattcttatgcatcattacattgacgatatgctagtaaaatccctaaaagcgactgaccacattcagcacctccaacaatgtttcgacgttctcaacaagtataacatgaagttaaatccggctaaatgcaccttcggcgtcacatcaggagagtttttaggatacatcgtcacgcagcgcgacatcgaagccaacctaaaacagatacgcgctatcctcgaattaccttcgtcgaggaatgccagggaagttcagcggtttataggaagaatcgccgcgctaaaccgttttatcgcaagatccaccgacaagtgcctaccattctacaacctgctcaagcgcaaagcaaaattcgactgggacgatgcgagtgagcaagcgttcaataacatcaaaacctacctcacgactccctcagtgctaaccaaacccgaggtccgcgagatacttttcctctacatcgcggtatccgatttcgctgtaagcagagtactagttcgggacgaccgaggcgaacagcttcccattttctacatcagtaaatctctgatcgaagccgaaactaggtatccaacgatagaaaaggctgcgtttacagtcgtcacctcgggaagaaagttaagaccatacttccaatcacacacgatcgccgtcttaacagatcaaccactgcgggtcgccttgcagagcccaagcca

SEQ ID NO: 3002 - DNA, 537 bp, Arabidopsis thaliana landsberg
gagctgataaatctaacagcaaagaggtaattaaattttatcctcttaactcaatattataattacatatatacgcatcggatctaaacatgtatgctagtgatggatattattgctgttattgtatcacatctatattcaacaaatcagcatattgcatctttcgacaaagaaaaaaataacgattcgaaatttcgactatcaatactatttgacctagaaaaaaagagagtcatatatgttggtcttttaggccgaaagtatttttttttttttaaatgaggttagctgaaaaacaagaaaggtaagtagaaatactctagtctgaattaggttgagttggaccgattgatattctatattttggttacacgtctaaccaatttttggatatatataatgattaatgtctaaagaccatgattcacctatgattaattcatgaaaataaaatgctaagcataattaaaataaacaggtgaccaacagagaagtaaatgaggatggaacaattggagatggagacctcaaagatgt

SEQ ID NO: 3003 - DNA, 556 bp, Arabidopsis thaliana landsberg
  unsure (1)..(556): unsure at all n locations
tctgggaatgtgctctgttttcccttttctaactgtttctttgtacatgcccttattttcttctgtagggacggtcacagaatgaaacactactcacctatgagcaagatgctacaaaagattgtgttcgtatgtgtcatctgtcttcttttctcatcaataagttattggtatatagcttgtatcatgttttcttgaatttatgcactttgcaactgtacaactagtccgttttcctttccactcttcctctctagttgtctatggaaagctttgaagaaataagtaactgttgcttatttaaaattccataggcttcaagtttttctcctgttgtctctccccacaatttataatcttatggttttggatgtagcaatgtcgccacttagatttgattttctggatgatatgattgtacacattgattaatttctcgtggcattaaactatatatattgacangtttacagtatcctgaccaagtttctacggattcttacaggttatgcccatgtctatcagagattgaaggaggttgttgcagtcttaatca

SEQ ID NO: 3004 - DNA, 407 bp, Arabidopsis thaliana landsberg
acagaaagcgatacaggcaaccacaaaattcaaacagccacctatacatatttttgcttttcttaccagaaccagacctaaggttgataacaaccaccaaaagactactcatttgcaaacctttaaccgaactaagcatactatgtatacaccattaccaataccaaactagctgaatcaaaaccgcgctcataagaaactcttgggaccaaccggtaagaaaatgaggctgaggtcacggctagaaatcttgatagagctacataagaagaatcgggatgaaaagatttagagaaatcaagactagagtattataagacgatggctaatactatgcggggtgtctagaaaatataaatataggacacttaggacaaaatgggaaaccacaaaattgatggagtaag

SEQ ID NO: 3005 - DNA, 504 bp, Arabidopsis thaliana landsberg
gaccaggaactagaaaaccgaaacaacgcagcatccgatccttagttactaaaacggtatggcaagtttgaaaggaaatacataaacagtgggcagaacgagcaacatcgcaacacgcttgctgtttttgtggtcgcaagcgttctacagacaaagaacaaacgtctcttgaaggaggccaaaggcttagacgatgttgttcaggtctgtctctgtatcttttcactcgtttctctcaaagccaaacaaggaaaaatcaaactctggaacttcaaagttaaagttggtttgcagatactaggagacattgcgggtaatcttgacgccaaaaaagcatgtaaagaagcgttgaagatccatgaaaaattcctgaaaaaggtttctttcactatcactataactttgggaagatataatatgatatacaggtatactaatgcagatggtgttggtgtgtgtttcttgcaggctaatagtaataagcaataaagatttgcttaaaca

SEQ ID NO: 3006 - DNA, 175 bp, Arabidopsis thaliana landsberg
attgctttgaggaacacacagttttttgggctaaattctccttgacgtatgtgttcaattcttgttttttatgtgatttggatacccacttcaggtctgttaccacggcatagtcggaagtcaaagtttcaatttagcatggaagtaggctgccgagaaaactgagtacttaaac

SEQ ID NO: 3007 - DNA, 150 bp, Arabidopsis thaliana landsberg
  unsure (1)..(150): unsure at all n locations
agttggaaactgtggaagcaagaattattcactctgaaagaattatgagtaaaagtgaaaaatatccaacgaaagtttttttaataatctcatctctgttcaatatacaaaacctcttagagaggcattcactttcangaagagaaaaac

SEQ ID NO: 3008 - DNA, 262 bp, Arabidopsis thaliana landsberg
ggaagaggaaatagagagaatatatatatatatttatagagattatatgttgggaaggagagagcgtggacaatggcaagattgactaagaacctctatatattacacagacttaacaatttccatttactccaatgatctaacggcacttgatcgctggatctatcttagtacctgaaggggctatgacttcaaaagaaaccgggatttgttcgttgtgtggagactgactagctagtgctcctgattaaacaagctatca

SEQ ID NO: 3009 - DNA, 514 bp, Arabidopsis thaliana landsberg
  unsure (1)..(514): unsure at all n locations
agattgaccatgaacagcaatgtagatcaaagaccatcactgttttgagaaaacagaagaaaaaactgatatgcaagaattggtatgctccagaaataacaacttacccgcaattaatcatttcagaagtgtttcaactcctacctggcatggattctgaaggatcttttgtatgaccaccgatagacaaaagctggttatcccatggtatctacataacaaacaaagaaggccagtatgtgatttcaagaggagattactgaaccgaaacctgcccctgatgtttcaaggctagaaaacgaaaaacccaaaacatatgcaagttaaaatactaaccaaagaatgaccagcacagtgaggttagttttgctggagatgatgtttcctggtgatccagtcacacaccttggtttcaactcttgaccaagtccagttttttaaatccaanacctgtatttgaaacaccatttacagaagacatgcttctgaattgtcagcagnaagtgtcacagaa

SEQ ID NO: 3010 - DNA, 459 bp, Arabidopsis thaliana landsberg
  unsure (1)..(459): unsure at all n locations
aattatttacttttttttgaaaaaaaatttgaataaatcacttaagatcagaatatattgaggacncaacgcnataaagaacttttattttttctcatttaatttgcctaatttttaatttaaataatgtaaaatgatacatgtcattttcttgtatgatgacgtgacactcatatgtagagaattggtcaactttcaaatataatattataagtaaaaatatatctgtgtacatttaattcgtctcttacttttttttagtaaagatatgatgtaattgctacattcaactaaagatattggcctcatcttactaaattgttgttactcgcccaaaaaaaataatttatttcacaagaaccctaaaatatggagcttatttgtcaaggtatcccatatatcatattttattcagacaacaatctatgaaatttttgtaccaatggatggtgggagcaa

SEQ ID NO: 3011 - DNA, 596 bp, Arabidopsis thaliana landsberg
  unsure (1)..(596): unsure at all n locations
tatttagtaacattttaaatgtaatattgtggaattagtattgtattagtttactcactatccaaattcaacttcgcatacgctttgatttagataagacagctttttatatacatttattagctagtacacaaaatatgtgcccaatatttgatgtgcaaatgagagaaaaagtcaatacatctatttgtaagctccgctcttaacttaaacatcatcaagcccacttggccatgacggacatgccaccagnnnnnnnnnnnnnnnnnnnnnnnnnnnnnnattgaagcttgatgctcctttgcattttttgacccataaaatcggcagctagaaggtcaactaaagccatgtagatgagtagtcctgccgaggaagcgttgagcaacccaactgttataagcgattcagggctattctctttgtatgttttagatagtgccatccctagaaccactccaaagggcgtcgtcaccgcaaaaaagaaagccctcaccgcctttttaaccccacccgtactccgctacatgtattatcaagttctcatcatatatatgatttcatatcaattcattcaaaagcacgacgtttttcaa

SEQ ID NO: 3012 - DNA, 659 bp, Arabidopsis thaliana landsberg
gggatccatacacgtgcttaatactagaacattcggttcgttcctaactgcaaacgattttggtaatttagttaccccataattatcaccacaggtgaccttagttttaagtttgaaattcatctgcaacaccatatatttgaatacattacaaatacaatgaaacatatgacacacttgtgtgatggtttagataaaatacgtattgaaatagctgtaagaatgttacttgaaatgcaataaaacgcatgtcaagttgtcaacatgtaaacccaacaaattaaacgattaaaaaaatcagccacaaaaacaagtagagcatgcagcaaaatattctaatgcttgggtctctatgttaagttctgtaattcgtctttattatatatatatttggcaaaatttaaatattgaccgttggatgtttttggttttaaatctgtaccaataagcgaatgagagaatctacttcttcaatataattccctcaaaatctacttgtgatcattttataatgctttggtcaaaagtgctgattttggaattaattaatttttgtcgtttctaatacgagggtgaaaattgtttcttaaagtaaaaaaaaggaaacttgttaaatgttttagaaatattgacaagaaaaagggaaaaaaaaaaaaaaa

SEQ ID NO: 3013 - DNA, 261 bp, Arabidopsis thaliana landsberg
tgttctctgaattctcataactgggtacttcatatacagaacgatgcaacaaaaccataagtgacccgagcattgattttggtatcaatgattctcttgggtgaatctaacactactactttatatgacgctttccagagaagcgcttactctatactgacactttataggagcgctgtctgcgccctcttgtattccagcccccgcttacccttcaaaacattattactggagttgtccgattcctgcacagacaatatt

SEQ ID NO: 3014 - DNA, 484 bp, Arabidopsis thaliana landsberg
ggtttgttctatgatttgtttttgctcagtgattatatttgtgtttcttgaaatggatgttgatcttttggagtttggtgtgattaggttgactgagaaagttaatgatagatgggaggtttgtgtgagcttaagtgaaggacaatttcagcaggtatgtatttggttggctgttattattttttgttgttatgaagaatgagttaagtcttaacaaccttttctgctgctaccaggtcagctttgtcaactccatagcaacaatcaagggtggtacacatgttgactatgtgacgagtcagattacaaaccatattgtggctgctgtgaacaaaaagaataaaaacgcaaatgttaaggcccataatgtgaaaaaccatctgtgggtctttgtcaatgcattgattgacaatcctgcttttgattctcaaacaaaagatacactgactcttcgacagagcagttttgggcgaaatgtgaactt

SEQ ID NO: 3015 - DNA, 589 bp, Arabidopsis thaliana landsberg
  unsure (1)..(589): unsure at all n locations
tcttccagatgcatgcaaagcctcttctgtcattttcctccagtgttgagcgcaggaggagttaatgccaatttttacgctgagtcctctnnnnnnnnnnnnnnnnnnnnnnnnnnnnnnnnnnnnntctggaaatgcctacccacaaccagcaaacacactcaaatttttgcagtatattcaaaacacacacaactgttgactgaatatgtgttttctttttttacctcaaccgaaatctttttgatcgaagagtcttctgagaaaggttgcagagttgtcgtaccaggaggcatctctgtgtcgaacattgtttttgctaactggagaagctcttgttgctcattcttacacttggctactgtagctataccaagttccctgaatttacaccacagaaacatctaagtaataatcatatgccacactaatccgataggtgactaaccaattttcagcttcaattagaaccataatcatgataacaaagttatttcacctaaagctctgtaacgccaatgacgcattgttatcagcgatggcaattaccaaatttgcataaccaagtctcaggtggtcagggagttct

SEQ ID NO: 3016 - DNA, 556 bp, Arabidopsis thaliana landsberg
agccgcattttctatcatgcttcatatccccagttgcaatgggatagcggggggacccattactatcagtgtaatgttgttcccaatggtagctacacattcaaggttctggcagctttttaagtactatcttttctgtttgctttttccattaggcatatgtactttgtgtaatatttttgattcaagctgtagaagaaattctttgtaagtcgctatcatatgtctataaaacaattgatatgtctatcaaacattgcaccttgacattgactcaatatacttatcgacacactgtgttcacagggccctcttcttgaacacactggaacacacttgcacaaggtcttgggtgatgataatgttttaaccgtcaaattcgcggatgtccagaaaagttcatcaacatatagcattgaccattactttacatacaaagggattgccaagaacggtatcatgattggtttacgtcgttatcaattttttggtgggcattgttttccctttttctcttgattactacccattatgtcgttacacataccaaactatt

SEQ ID NO: 3017 - DNA, 526 bp, Arabidopsis thaliana landsberg
aaattgttgattaggtcgctgagaaacgaaagggaagcgttatataattagggttttgtgcttggccgtgacacagaagaaacagaagaagaaggagatgagcgattccaacaaaaagacatgcaacgatgcgaagcagccaatacttgtcctggacttggttagattggtcttggaacgcttgagctttgtagattttcatcgagctagatgtgtttcttcagtatggtattccgcttcgaaatcatgcattggaggaacaaatccaacagctccatggatcatcctctttccaaacgaacatgtgaaaaccaacaacgattcgtgtaagtcaattgatcctcgtgatcatagttcatacacaataagagatctcgggtttgatatggttaggagtcgttgtttggcaagttccggtagctggttccttatgttagaccataaaactgattttcatctcttgaatctatttactcgagagagaattcctcttccgtctctggaatcaattgatggattgcagatg

SEQ ID NO: 3018 - DNA, 554 bp, Arabidopsis thaliana landsberg
gcaccaagagtccgaagataactcggagtccaccatccatgaaatccgacaatagcacaatctttgttctcatggacaaattcaactaaattagcagttctgtctccaaatctttgagaggttctcccttttgatgttttaaaagtcaatgatgctaccctatcagtactcatggtcccgaccacagacgtgataaattcatttggatagtcaaccacaaactgcaataaaaggagcttcagataagctatccaacaatatatgtatatatatggtcgagggatgtattttattttattttctgttaaacaacgaatatatagttataggaattctgacctctacttcttctccagggtaaccatcttgcattccgtggtcacgcttttctactttgccatcgttgtcataggttataccgaggcacgttatataaccaccaatctcgaaaacggaaagctttctaacagcctggaaagcaccatgatcccaaagtgtgcctagagcagtaccttgccatgccaattttgtaggagtaatcggagtgaaatatg

SEQ ID NO: 3019 - DNA, 498 bp, Arabidopsis thaliana landsberg
cgaaaaaaaagatcgcgattgctttcccgcgcgcgctgttagagtctccccggccatgtcttcctccccgccagagctgtccttcgtcctcccccgcgttctcatcctctcgcgccgcactgtccgcaagaacaagttcgtcgacttcgtcggtgagtaccacctggacctcatcgtgggctacggcgcggtgccggtgatcgtgccgcgcgtggcgggcgtgcatgctctgctggactcgttcgagcccatccacggcgtgctcctctgcaagggcgaggacgtggacccgtccctctacgagtccgccgacgcctcgctctctccggagcatctggaggccgtgcggcgcctgcactctagcgacgcggtcgtcaaccgcgagaaggactccatcgagctccgcctcgcgcgccgctgcctggagcgcaacatcccctaccttggcatctgccgcagctcgcaggtgctcaacgtggcctgcggcggctcgctgta

SEQ ID NO: 3020 - DNA, 277 bp, Arabidopsis thaliana landsberg
  unsure (1)..(277): unsure at all n locations
gatattaaaaagctatgttgagactcatggtgaagagaaactgggcagacatttctcgtagatccggttcgatttccaaatttttgtgtttactagtaaaggggagatgggattttgngacattaaagaatttgtgtttctgcatgatgtttttttcagggttgaagagaggaggaaaaagctgtaggcttgctcaggaagaactatctaagaccaaatttcaaaagaggaagcatgtcaccacaagaacaagaccttatcatccgcatgcataagc

SEQ ID NO: 3021 - DNA, 325 bp, Arabidopsis thaliana landsberg
ggagcaatagcagaaaagaaagtttttactggggaccgggggacccctccacagatggaaaaatgctagctttttatatgataaaacgatgcttaacaggagaatcagtataagtggattgacccaccaagggatacaacgaagaggaggtgtggagagcttaaaggactaacgagaagccatataagactgaagctgggtctgtatccgatcggcgtcagccaaaacggcttgggaatacttttccttttgctctatatagaaattcatatgcctcatcgggaggggagggtcagcttttacattaacgtgatggatccttcca

SEQ ID NO: 3022 - DNA, 339 bp, Arabidopsis thaliana landsberg
  unsure (1)..(339): unsure at all n locations
aacgcaccatccgctcgggaataattaaagccaatgaccactgaatcctctggctggccaagaaaaacccttggagccccttgatgaaacggatgaagacaccggcctagatctgaaacccgtacaaacttacgggatgcatggctcggagctagtagacgtcgagaagaaaatctctaaacctagaaactgggaatagtgcagtcggtgcataaaagaagagaccgacatatcgcggggcccacgcgnnnnnnnnnnnnnnnnnnnnnnnngacgaggaaagacaagacccagaagtctgggtcttgccatgccatccgatgaccggataagcagtat

SEQ ID NO: 3023 - DNA, 175 bp, Arabidopsis thaliana landsberg
tgaggacgcccccaactaagaagcttatcgcaacgctgtccacaaacacgatcagatctctgttcggagcatctagaggttaccctatttttggcacaaggacagctactacgtggggcacaggggttacaggggggacacgggccacgaggatcactcaaaacacatacatgag

SEQ ID NO: 3024 - DNA, 437 bp, Arabidopsis thaliana landsberg
taaatgatgcgttgcaagatcatgaaactggtttctgtacgttccgttccttgattatatcctcaaagtaacggatgcacatattcacacctattcaacgacgcagtgagtgtcagctactggcaaagttggacaaacgaaagatatggctcttgccatttaatcggggcactcttcattgatggtgcacaaacacccttttgataaacattgatcctacatttattctgtgatttggtcgtttcacatctaagatctgatgacatgagctcaagaactgtctctcacatattacaaactctccaagacacatcaaccacaaacacattgtcattgaccgagatcatatctgagggcattttgtctgagagaaaaaacaaccatgtattagtgtcgaggctacacgatatcagttcctcagacgtagctaataactt

SEQ ID NO: 3025 - DNA, 671 bp, Arabidopsis thaliana landsberg
ttattcaaaaacctaaagccacaaaaataactatcagtttttcgagtacatgttaatgccatctatgctgataatttgaaacttacataaagttaaatgcatcgagattccgaaatgtgtcaggaattacaccggttagcatgtttgagcttaaatctctgcacacacacacacacacacaaatactctaatgtgagatcttaatcaaaccattagcctttaagcagcagagtttgacttacagtgtcttcagctcactcatggaaccaatgtattccgggataggtccccttatcaaacaatttcttagtaccctagtgaagttagcagactgttaaatattgtttgatgaaacatagtatataacttgattcaatgttaaaacttacaatcgtttcattttcattagatttcgcaggtccggaaaagaagaggccgcttgtccacgcaaatcggttatcctcctggtaaaatagagcttggtcaagaatttggacgagcatgcagaaaatggtatgttacactgttttcatacttacaattcagtcaagttcgtcaagtttgatattgaaggtggaattggaccttccattgatgtgccttgaaggtctctgcagattaacaatttagtcactacaacttttagtgtttttgaggaaaagttatttgag

SEQ ID NO: 3026 - DNA, 603 bp, Arabidopsis thaliana landsberg
  unsure (1)..(603): unsure at all n locations
cttttagaaacaggacaggcttttattaaacaacaaactgaaggtaccctgaatttattttttttttttaatcttggcaaattgtgtgatccattgaaagcattttctcaaattagatacatactaacaaagctcccacctgatcacagtcttttcgatataattacacgtttatatgtctttgattttaccttgttactgtctcagaatatggagagattacaaacatatataactggtaattatcttcaatttgcacttaagaggtaaattatttcttacaagtttttccagtatcctggacgcaggtattggtgaaaacaaccttccgcaaaaatgcacgattcaagaaaaatcaactctctttgtttggaatgatgatacgaatcttacttgtgttaatgcagtgatacattcaatgagaatactcctcccacaagtgaacctgaatatatatcttcactaggagctgcagtgtacaaagctatgtcaaaaggaaacaagaatgctgtatggttaatgcaagtatgccttcttttccattntattctcagtggcgtatgtactttanggatgcttttagactttagaaactgtaacaca

SEQ ID NO: 3027 - DNA, 359 bp, Arabidopsis thaliana landsberg
gctggatggacaatatgtgcgactggtggtgctgtcagaacccccaataattaattatatcctcttaaaccactccacttgctatgagtactgtaaagtgaaaattaactaatatagcaaaaaacactctaactatacttatccccacactaaaatcggcaactaaataagatacgatgcatgtacttgcaactgcgaattccacgcaccaaaggcaactacacaaagccacggctcttgtctcttgtggacatccacatacatccgcatttcaataggatcaatctactaccacaacctatactttgtctgaatacattctcgtttgcgaggagacaaggctcgatcttctggatctg

SEQ ID NO: 3028 - DNA, 604 bp, Arabidopsis thaliana landsberg
  unsure (1)..(604): unsure at all n locations
atcgcagccccaactggttggtatatccaaattataatgctactatacatttttttttctattgtgtttgattgtatctctgctgtgtacagagtgcaaatttttgcggagaaaacctttctgctgcgaataatgcttgtaaagcaataggagaattagcggtcaaggtaaaaccaaaatgatatttctctatttattgttgnnnnnnnnnnnnnnnnnnnnnnnnnnnnnnnnnatgaactcaatgtttcagtatcctcaagaagtctcaccaattgtgaccaatgttgtctattcattaggcatgattattcaactcggagaggtgactctaacagccttataagttaaagattttacttgccatgtctaattatgcctcatttttttgtttgtgtgaataagacactagagttgaagagtttaactacactagttgaatacaatgcaattgaactagctatgaacagtgcaattaccgttgggatactagcacggattcgtccagacctcagtgcacgatccattgagaacttcatgaagccttggtgcatgagatttgcaacgttagtgaaccttttcttggatttgattctttacatac

SEQ ID NO: 3029 - DNA, 701 bp, Arabidopsis thaliana landsberg
ctttgttattttttaaacaattaatttttaatatataaaagtattaaaatagcctcattaatttttaggaatatctaaaaaaaataaagttaaaatagaaaaaaatcataaatgaaaatttgatgtaactcctaattttaaagataattattatcttaaatattcttaaacaaaatctggtcaaaataaaacataacctttattaagtgagagactttttaaatatatttttaaatattttttcatttaattttaatatataaattaaataaaatgtttttctcaaaaatagttgaaaatataattaagaattcaaattaaattcttatcttaaatagttttaagcaaaattcgtccaaataaataagcaaataagttttattaaatgattgactttaaattttgtttttatattatttcgttaaattaaaaactatttaaataagtgtttatctcaaaatagttgaaaacataattaagtaattcgaattttttttttctttttttcttctaaattttgaattttgtttggatttattaagaaaacaacttttattttaaatctggataaaactgttatctaagacattaagaattacatttttttatttaaaaatagagcaaagatgttttttttttcaaataaacaaatttccaaaaaacaatgggtaaatttttccacaaaatattcccaattttat

SEQ ID NO: 3030 - DNA, 315 bp, Arabidopsis thaliana landsberg
cgtacaccagtcgatgctttgagaattccgaagttgaacttctcttttgagtttaaagcttcagaagttttgaaagatttggggcttacttctccatttacttccaaaggtaatttaactgagatggttgattcgccttcgaacggtgataaactgcacgtctcaagcattattcataaagcttgcattgaggtggatgaagagggaaccgaagctgcagcggtctctgttgccatcatgatgccccaatgtttgatgcggaacccggattctgtagctgaccatccatttctgttcactgtgagagaagacaat

SEQ ID NO: 3031 - DNA, 1928 bp, Arabidopsis thaliana landsberg
  unsure (1)..(1928): unsure at all n locations
cacaaatcgaatatttctatgcgtgagaggtgagacctaacaattcaattcaaatatgacattatttgggcctccttcttaagattcgcctacgtttgatcaatctaatttcatattgggctattaagagttattaaaggcccatatgaggcctgtaatgtttttttcgccgcattatcggaaaaacctcaagaagaagagtggtgacataacaaaaccccaaaagctcccaagcctagagattctgttgttgatccgattcccgctctccttctccggtagtacaatctccgtcgccggttacatcagccaggtaagagacattagtttttattttgtttcgaagtttcatctcttttctttccactttatccccttcaaggaatttgtgctagatctacgcttttaggtcgctggcatttgattgattttggaccaacaaaagctaatttaaatgttcataaggtcttgagatttgatgattaggcttttattttgtcgagactgatgttaggtcgaactatgttgatttaggtttgggattcgatttgattttatggaattggattccttagatagatcctttatatgcatccgttaggtcctcttttaatatgtaattctaaactgtgtaatggcttagggaagagttttaagagatggcatcaaagttgctacaattgaaatccaaggcatgtgaagcatcaaagtttgtttccaagcatggaacaacttactacaaacagttgctggataagaacaagatgtatatccaggagccagctactatagagaaatgcaatgaattgtctaagcagcttctctacactcgccttgctaggttagtcttcgctctctcagctgatcctggatttcgtttgatgtgtttgttagacaagaaattgtgcgaaatcccgctaatgatgtagataatcctgcttcgttatcaaatttggttaggggcagtgttataaaagaattgtgaaattatacattctaggtttgatggttctgaaccatgaaactcatcacatacctagttacagtctctactttgctgcatctgaactagatactaacaatcccctgcttatatagagtatagtatttgtgtagatttcttaccagaatagtaatttcactgtttctagatacgttattcagaaactgcgtgtcttctttgttgctatgactgacttgtttttttcaaatggatcgtagcattcctgggcgttctgagtcattttggaaggaagtcaatcacgtgaagggtttatggaagaatcgggcggatttgaaggttgaagatgctggaatagctgcactttttggtctggaatgctttgcgtggtactgtgcaggagagattgtaggaannnnnnnnnnnnnnnnnnnnnnctacccttgaagaaagaaagcaaccccctcataaacaaacatgcgtttcagatccattgaataccgaaaagcctttttatatcataattagcggcttattatctatctcactgctgacattagaagcaaagttaatttctgtttctctggataatttatacacaaaagttttgaaggtgaggcatcatcactcgtgctagctctaataatatcagtcgactaatgttggccatttggttttttctttgtcattttcatttatgtgaataaccatttttcttgggtttagagtctataaaccgtttggtaagatgtatcattcgtgaaacctcagcacataccaaccttaccagagaagagtaagacggcattatattataaaccgtttggtaatatgtatcattcttcttctatcacaaaaaaggaagaaaatcctatatttttgacaattgtctgaaaatacgattaggttcagagtatttcaacgctgtctctgtcatttgtctatcgccatttcgcataaaagcaag

SEQ ID NO: 3032 - DNA, 239 bp, Arabidopsis thaliana landsberg
  unsure (1)..(239): unsure at all n locations
caagagcggaatcaaaggggggcttttaaaaccttgtgcggaaatacataacatggaattagagaagaaacacaggtgtaaaccaattatagtacaagatatgtagtgcattggtgacttcaatcaggattttcacagctgtactgggaagaagatnnnnnnnnnnnnnnnnnnnnnnngatatttgttaaacatttcaactagctaaagaatcaagcgggtaatggaggcataaaaga

SEQ ID NO: 3033 - DNA, 339 bp, Arabidopsis thaliana landsberg
aacattttgattgctcttggagaatgtaaatagtttttgtttttgcatttttttttttgtcttcagattttatttagagttcagtagaaccaattctgaggaaaattatttacaaaagtgatatgatgcggttcggtacgaatttttcgtgccaaactgtccggcttatcgtttttgcttttctttcttctaaataaacctcctttgagctagaatcacttgcctagaaatgtcaacaaatggaacaaccgaaagatataagctctaataacattgtggtggtcaggatatacgaaaatggtctcatctcttcctgggagaatgttgtaaaaaaatgtg

SEQ ID NO: 3034 - DNA, 495 bp, Arabidopsis thaliana landsberg
  unsure (1)..(495): unsure at all n locations
cgtcttttttgacagcagcaatataccacattaatcatttttttattctctcttttggatcgctttcgttcaatgtaaccggcgaaacagagcaatctgaaattatcttagggctatagttatggatattttcatggatttcttcaataaaccttctgttacagagacattcgtcgacgttttgctatgtgcagttccgatttgggtcgctgttatgatcgggcttctgatcggttggtcttggcgtcctagatggactagcttggtttatttaggtttccgttctaagcttcggtttctatgtactgttcctcctggatttggtgctcgtcgtatttggcttgctttcaccgctctctctgttttttccgtttgttcaagaatcggttcaacctccaataaatcctcggttaataacggttcctctaaaccggtcgaagaagaagcattttcacggntagtcaataaagaaatgaattatgtttgactctgttc

SEQ ID NO: 3035 - DNA, 428 bp, Arabidopsis thaliana landsberg
atttcataatgggaaacagttctaggcctgggatttgtgtccgaaccgatttgtctgaaccgaaccaaaccgagatttgggcaaatcggtttgggtcttaatttgaattagaaccgatcggaatgcttacaaaattagttcggttatgcattcggttcggttcggaaaacagataaccatgacggttacccgaattttaaccctaactatataagtactaaaccaaacattagattcttaacctaatcgcagcctctcactctctcaagtggcgaaacccgagtgattgagctttgatcttcaacatccgttcgattgtcttcttgttctatattcttcttgttcgatcgatcttcaacatacgttcatcatcaatattcaaggtgagttcttgtgtctttacactaatgaaatcgaataattttttt

SEQ ID NO: 3036 - DNA, 652 bp, Arabidopsis thaliana landsberg
gaaaataagatcgctatggtaagaaaacataaattcctggaagtctttgtagtagcaaactttccattttagaatcaagtatccaattcccaacactggcagattttctcaaaggggatgcctgtagtttgaagagtatgaattaatcaggtaaaacccaggagacaaaaatcatcactacactagaacagaaagactaaaacaaactcgcgaagatcgacaaaggactaagtagaatatcctaggttaggttggtctagttattaacttccatataaagacgaatgtgaatagcagaaaaatatatacatacccttgcaagatccaagttttctgatgttactgaaaatcttcctttgatttgaaccacattagccttcgacttgtcatctatagaatcacgaaatcctgtacaagatagacaaccacgctaagtcaaccgcactagaagcaactgaaattactaagctgcatgaagatcgataatgtatttcctcacctccagaagatttgataggagctgaaagactgtttgctgaagcacgatttggaagattcaaaggaccactaaagctgggtgccctccggactgatgatttcagttgccgttcactctcagacctagcagatatcaaatttcatgttggagcat

SEQ ID NO: 3037 - DNA, 580 bp, Arabidopsis thaliana landsberg
  unsure (1)..(580): unsure at all n locations
gatctcgccatggccggagacagccaatatcttccaccgggtttcaggtttcatcccacggacgaagagctcatcactcattaccttctccgcaaagtcctcgacggttgcttctcaagccgtgccatcgcagaagttgatctcaacaagtgtgagccttggcaacttcccggtaagaaaatacaaaactaacttacttgtagttcttttgtaattaaggtttctgaaatctttactctcaatgttacttagggagagctaagatgggagagaaagaatggtacttctttagcctccgtgaccggaagtatccgacgtgactgagaactaacagagcaactgaggcatggttactggaaagccaccggaaaagacagagagatctttagttcaaagacttgtgcacttgtcgggatgaagaagactcttgtcttttacaaaggaagagctcctagaggagagaagagtaattgggttatgcatgaatatcgtcttgaaggcanattctcttaccatttcatctcaagaagctccaaggtactttaatttcaacccattcttaattttatgttgataaagt

SEQ ID NO: 3038 - DNA, 2068 bp, Arabidopsis thaliana landsberg
aaacaatgaattttgaatctatggaaaaaaaatcacaaacctgtcctgcataaggagatcctccttcgtctggaggaacaagaggaagaacctgaaatatcatcaacattgctgttaaattaatttcgtctactcttgagactaatcacagagaaattcacctgccaaacggagcaaccagtagaatgaagccaatcgatgaaccggaaggcttcttctccgagatcaccaatgccatgaggaccacgaaacgacgtcgggtgtagcaaaacgccagctcttctcctgctctctggatccggaaccggtagccactgctcatattctgctggaaaatcttcaccgacgctaatactagaaagacacgtggaattactcgaaacgacctccattcgaaacgactgcgacggctttgtcctgttcctgaggacagctgcgtcgattaaagaatccggagaggataatcggaaaagcttgagagaagaacagagtgaaggagaggacgacggcctaagtagaatcgacatggataatgatcatccaattcaaagctccactccactctaatccaccagatgacaaaatcaaaaacagtcgagatattttgttgctcttgagagagtgtgagagtgagatcacgtgatcatcacgtgcggtgtaaggaaactctcgtgaatgggcgccattttcaaggccgtattttgggccttttttaggccgtcgagatcggatcctatatcccttaaaagttaaaaacccatgagatccagaataataaattggttcaatggactattaaataattataaactgtttcagctatttattttatgttttactatagtcaatatatttttataaatatataatttaaatgcagtggtatcatctaccatcctcgcagtttcatcgactggtcaatatattattcaataaacatgcagcttccgtatatgatacttttctgctaaaaagaggaatttgcagttcacagagaggtggtgaggaccactcttaaagatattccgatatgaggaacaaataattggagcatggtcccttgagccctgcctgatgcattacaaaaagtagcatcataataaagtggtaggtgttgttgaactatttatccgatggtgacagaatttatgtagatataataatatcattccttgattatctatctggaaggtacatccatctccacaattgcattcaactattgaagcaatcatgtgttgataatccccttctgtttattttagtagaccaccactaaacatgttatttatattagtgtatcaagagagaagaaaggtatcttcaacacgcaataataaatctgacatttgaaaaaggaaaaacacatccttatcgaaatcactagtcgaagtcgcatttgtcagatactattgttttaacttcaaacgctaacttccaagttctataacataagaaaaagaaaacaaaccccaacagctaaaagtataattaaagaagcaacatttgagatctcaacctctgtgttgttgagcatgaagtgattgtttgggctcagcaccacgcaatgtaccaatccaagctggtggctgcatccctgtctgctcataaaccgtatcaagaaccggtggtaacatcttgtagagtccagcaatatcgttcatcgtagctttaccaccaccgttcatcccctgctcagcaccaccatggttccacacgctgatcttaggctgcaggtccctgatcgcaacagcattggtcttggcaatatcctgataaatgccattgttgatcatcaagaagtctctcatggctgagtaatcattgttaactgcgcctaagagggtcttgaggtaagtcccctgagcatcggccattgcgacaagtccctctgcatctttctgttttgaatagaaggcagcatcagctgcagctttcgtcgcttccgcttgcttctgcttctcgtaaagaacagcttctgcttgcttttgcttattgtacaactcccagttcgcttcttgcaccttagtttcatactcaacactggctttactgaggactcagcttt

SEQ ID NO: 3039 - DNA, 585 bp, Arabidopsis thaliana landsberg
tttctacacgttttgtttcccgtatgttgtatctgtttttgtttctaggttatataggtctagacgattttgagaggactttagtgtttcaaaaactcattgtagacatccgctaaattcgtgtacaaaactcagcaaaagttaaatgctgtctggttgacgtcaccgtcttgtgatgaagttagaatattccaaatcgaagttcctaaatgatgtttaacagtgaacaagtagtattttgcattgttacacacgagaaacttatttaggcaaaaaaaaaaaaaacttatttaaaatcatactatttcttaagctgaaattttatatgttgaatctttttttttaaatgttgtaatattttctttataaaggtaattattctaatcatttaagcacacgactagacgattagcactaatacaaaattaggatcttattcttaacccttttttacttttcaaagcaaagtatattgcatattgcaatgaattaaacctaagaaataacgtcctctaattggtttacctaaagaaaaaatgttttaattaatttaaaacaaaatagcttttaccaaatgaaaataaa

SEQ ID NO: 3040 - DNA, 573 bp, Arabidopsis thaliana landsberg
tttaacacttttctaaagcctttagaataaactggcatggcacctgtctcatgctgaaatatcaaagccgaaatggtttaggtcataggtagaattataatgtttacccaatagcattgttgtttactctaattcataccttgctaccaatagtgatatcgtttacatttttatctgtaaagaccatatagtatttaattagtaccaaagacaattttcaggtaattatgttaaaaagaaaaacttacttttccattcaacaagagaatcttgtttaaattttggttctgcatgatttggcttttcccaatgttttgaaaatgtggaagtatagtaattgatccctacgaaatcggctgagtttttcaattttcctatctgctcagtagtaaatttaggtaatctatgtccaacaatgtctttcattgtctgtggataatccccaaacatagttgtgtccagatgcctgaaaacaaaaattccataaaattcagatttatattttctataaaatatttcagtatacttgataactacttaccatcccatataaagtcaagtgcacgttcatgg

SEQ ID NO: 3041 - DNA, 587 bp, Arabidopsis thaliana landsberg
aaatccaaacaaaaaaacattcctagacaaagagacaacgccatacatcaatatttttaacattattttggttattagattgttaggagagaccaaaacaacaacaagaacaacaagaacagcagttcctctacttctccttaacccatgactgctgttctatttctctgcttccttctcatctgtttttccttcaccccttctctacaaaacgttagtgaatcggaaccgctcgtgcggttcaagagctcggtgaatataactaaaggagacttgaattcatggagaacaggaaccgatccttgcaatggcaaatggtttgggatctactgccaaaagggtcaaacagtttcgggcattcacgtcacccggcttggtctctccgggaccatcaacattgaggatttaaaagatctcccaaatctaagaacgatcaggcttgacaacaatcttctctcaggtcctctccctccttttttcaagctacctggcttgaaatctcttttgctctcaaacaatagcttttctggggagattgctgatgatttcttcaaagaaacgccacaactcaagcgggtttttcttga

SEQ ID NO: 3042 - DNA, 305 bp, Arabidopsis thaliana landsberg
attaaaagacagaaccaatacgaaatcaaggctaattttactaaaacaatgaagaaatcataactgagtaatttgttgattctataaccaaattcaatacgaaacaataaactaacgaatctcaacaaacaaaaatcatcagaatcatcaccatcaaagaaatcccaattcacgaaaccctaatttcattgcaatctatcaataactctaactactcacgatctacacaatcaataaggtagaatcataccttcataatttgatcggagcatgctagttccggaatatggagagccatcaaatgt

SEQ ID NO: 3043 - DNA, 3782 bp, Arabidopsis thaliana landsberg
aagagatcttcaatagcaaacaaacacatccaaacctttggtccaccgattttaagcaatttagatacttggaaggctcagagtcttttcataacctagtatccatatcgaatcaacagcacattacacgatacgattagattaaaaccgaattcaaagagctcaacgaacgcaaaaaccctcgaatagagaagcaaaatctctgacctttcttcgtcaatagatttgtattgacattaaactcacaatgatgagaagaaggtcaatgggaatttgaaagtgaagagaggataaagaagagagagtgatggtcggagagaattgaagccaaacccgaaaactgtataagaaaccaaaagacctctctcaaagtctcaaagtaattccgttaaactctctcttcctttattcgtgcggcacaaagagatagagagagaagatgatgatgaaggaattggaaaattccaggtcggggcttagaggagaagagacaagagagaagagggcttcgtgtgatgaaaacacagctcatatatacgaatatgatagagagagaggcagcagaattaattcacctcccttttttttatatcttttttaccttttaattacaatttgattttctgcatttttattgatttgaataccattatacattattacaatgtttcaatatattttaccgcaattacattttaagactattgattttttcttttgttagtgttaactttaatacagattggtatttccatattgtttctctttgttgttactccattaaatagtaaaatgttgtcaggagaatttcatttatctcaaccataaaaacgttatgatccaaaattcagccattgttgtttgtttcttctttttcatgctttaggaaaaaaaatgttacactgaacaattgttataatattgtgcatttaaatctggtattgaggtttagttgaaatctattcaattaggcacaaactcatgaaaacagtttgattttcatatatatacaattataagtttatattattttggttgaattgaacattaagagactggtctttaataaaaacttaaaagttactcttttgaaagtactgaaattagaaagaaaggagatatatgtcgaccatgttgaatataggaatctgcatccctttgtacaactcctttccttttttatcaacttcttcactacaccttcagtttaacgttttcacccccatagaaaatactttagagaagtttagatgaaacttatttttagtgattttatactttgacgagtaaaccaaagaaggcggaaagaaaagaaaaaaagaggaggctcgagtaacttgacgagacgctcatttggacccaaccaataatttgattgattaggtattacgattctttattacttctatttattgataatttcatttgttatgatatttatgttccaattggaacattctttgtttcattaaaactgatgtttgaaaattcctcatataaaatgacttgagagtttcaacatcacccaaatatccacatcctcagacagacagtttggaaatatggatcccaataccatcggtgggtttcgaagtctctcggttttataacccaacaaaggaggagaaagaacatttatgcataacagagtaatgccggcaaaaagcccaccatgattttttgttggttaatctttatctaagcccattaatgttttattacgtacaacccctagaagatctttcttatgattttagaggtaataaacaatcaaatatactcacaaaactgaattctaaaaagggtaatccttttacaggttaaaacaaattcagaattagagcctcaaattgaaccctttgaattgagactaatctttgttttcattttcaatagatagaagctaatctttgaaactttcatactcatatctttattctaagctaaaactaccgaagatactccttccctagcgacctgatttttgctggagagaaatagcagtccaaggagttaatcgctgtggacttggccgccccaccaccgtaggagtagtagtagtggaaggagcagcggtcacagtggcggcagaggaggagacacgttcgcaagaagggcacatggtgagagtagtaggaggagtcatgtgcatgtagagatgtggagacaacttcaacgccctcagctccgacacttctttctgcagccgtcgattctcctcggtcagattatcgcaacatctctttaaatactcacaatcaacctccgtttgtttcagcttcgtcctaatgtacgtacaaataataaatcaaaatcaccttaattagtgaagtgaacagaaataaaagtttaaaactgataagaaacaaaaaaggacaaaagtagattttatttgtacgcatacgcatgcatgtgtctttaaggctgtagtaaaaagtaagaaactccatgtgacagtacagaggcagagatcttattaggattttcttttaggacagggaactgaaatcgcttttgggtcataaaaggacaattatatccccatcatagcaattactaaggttctgtgaaaccaaatttcctataatacccctagaaaataaagataatttctttaccttgccctacggttctgaaaccacacttcaacttgtcttgcccttagattcaactgttttgctagagccagcttttgcttctgcccaatccgataattaaaaaaaaaaaaaaaaaaaccaattttagtcttttagagagaagccaatcacaaacgtccatgcaataagaagtgacaaataacgaaaatgtaattaactgaatttataagttagataaaaattacacaaaatgccactaaccggattaagagtgctatgttctttaaaagtctcctcgagaacaagagcttgatccttcgataaccgtagtttcttccttgatccgtcgccgtttccgccgtcttcatcgtcgctaccaccgcttccccctccgcgtgagcaagaagctctctccgcctcgttttcatctcctcctctcgccaccgcaagatcccttttatttccactcagactcgaaacggcgctgtttggagacgagacgacggcggcttcttcttccaagtccactaccgccaccgaagactgagctctgttcacgttgaaacctcttagaaatgacccggcgtcggagtttctctctgcagttgtacgtttaatccctagagtacatcaaaacccgaaaaacgtttttagcttcagtttcgtaaattactaaaacagaaatatctttatttaaaaaagaatcggatctgaaacatagatccgaagttatgcacataaaacagaatttcaacacatttaatgcttaaaaaaacattatattaaaacgagaaatagaaaagtattaccagaagattgaaacagatgagtccaagagatgttatgaatcttctggggatggctattgttattctgattgtgcatgtgttgaaacgaagaagaagaagaagaagttgtcaacggcataagattcaacctcagagatggttctttttgttgactatttcccaagcttagactcaaacccaacccatcatctctttcccccattgtcctcaacagaaagaacttttcttttctggattttgaaagactttctcgagaaaatcgatgtagtgataatggggttaaagacacgactaatatatatatacacagaagttgatatgtagacaattaatagagagaaggggttatgtggggtgcttggggtttacaatgatg

SEQ ID NO: 3044 - DNA, 389 bp, Arabidopsis thaliana landsberg
acaaagcctgttacaaatgacaccaccttgtggggggtctagcttataaacagatcatacgctagcacaaaatcttattatgttaattattatcatataggatgaatattgttagaaaacctaattaagtcatctaaatggatgagtaattagtcgtaaaaaaaaaaatggatgatgaattcactaatagaaaccaattattacataacttaattaacggaattgcaatatatttatacaacaatgggcaatgaaaagttaaggagtgaagtaattggcattataatggtattgatacctattgaatatgaaaaattgttggaaatagattggaaatttgatgttaaaaggcattgagattccaaaaatcttaaaattctcagaagaaa

SEQ ID NO: 3045 - DNA, 581 bp, Arabidopsis thaliana landsberg
  unsure (1)..(581): unsure at all n locations
cnnnnnnnnnnnnnnnnnnnnnnnnnnnnnnnnnnnnnnttagggccaatccaattcaaaactatttgacaataagtggattggcagtaacccttgatattgataatttctccaacttttgatgtgagactttctctcattaacactcccctcacgttcatgcatgaacatctgaagtgtgagcatgtgtaggaactacatccactgggtgatgtgtggcttttacttcaatagcatcctccctcaggttaaagcatgaacatttgaaacatgggcatatatgggaacaacatccacaaggtgtcccaacgatcaagtggctctgataccaaaggaaggctcgattctgtcaagatagctagaaaagcattagctcgagcagaagtgatggattatgtcgaggttaatgggtagaagagccattatctcgaagggacatagtggagaaatatctcacattgaaaagatgaaaaggacttgagtagtatataagggacgtggacttctctacaattgtaattggttttgagtttgaccccatgaaagttaacaacacaaaacgaacacctactgaattaagt

SEQ ID NO: 3046 - DNA, 587 bp, Arabidopsis thaliana landsberg
  unsure (1)..(587): unsure at all n locations
agacggttgcgattttagcggaatttaattttaatgtatataatcatttactcttttatattagctaattttatattcgagcagctccattagtgatccttaagagatccttaagcccaaatctttaaaattgacgcccaaaaataaatcaaaactcaagaaataaacaaggttggaacctaattttagagattttgatgcctctaagggacgcagacgtgggaccgtctaattggatcgacttattaggaaaacaaaaactcgacattctctctcttcttctagatagctcttaagaataagctaatcactgatttgttgtcttagtcttggtacttgtatgtttttttagtttatgttcttaaatagtttgtatcctaattgaatgttatctctatttgctcttaatggttgtttatgttcttgtgtttacaagtatgttgtgttttagtataaatgaatgttgtattatttaagatgtgattgctgctcttacttacttcagagatcatgtgttttggctaattttntgagtttactcaattttgaggtaggtgacaatgacacttcttactggcatcacttga

SEQ ID NO: 3047 - DNA, 648 bp, Arabidopsis thaliana landsberg
caccatgcactcaaactcaaaacacacaaaaaacgcaacaaaactcaaacagagcacaaaaactctaagttaactctttcgcatccactcaaacacaaagaataaaatacagcacaaactagagacaagaaagaaagaaaacaacaatacttcacgattaatatttgtttttaagattctgttgttaagtcaatttcaggtgaagtatctttttcttctcattttctttcctttcttggtcacagtgatgcttagtatgttttgttagcaatttcgtactttgatgctattccaaaagagaaattcaaagccacaacaggcaaaaaaacgtcctacatacggaatttatttgattatttagatatcagatatgttgctctttccatgcatcagatatatcagttataaggtgaagtttctctatttctgctcatgcttcatacaaattgtcttatcaatacattacgttacgacaaaccaatcgtaacaactggtttttttcatacttaataaacatgttcaatatatcagctgttgacattgtttctttgtcaagattaacaggagcaaagcagtcgaatcgggattgatcataatttgaaagatttcttgaatttcttaattagcatattttgggtttaatttaca

SEQ ID NO: 3048 - DNA, 617 bp, Arabidopsis thaliana landsberg
tttgacgtttgagtgcattgtgtttaagtgattttcgtgtctgtgaacgtttctgtttctagataacgtgtgttttccgagagtgggagtaaccaaaacaagccaagactcacttcttcaaatacaaataacctgtcgagatgacacaacaaacatgagaatagagtgagagatatctgacctgtcatatgctcaaagatatcagcatgaggcaagaaacacgaccccttacttggacttactactaagccaaaatttcacctgaaatacaacacataaaccataaaatgaaaccacaaaatcaatgccaagaagaagaaacacttggtaagaggtgtttatatagccaaaatctgaccgcttgctaactttattactttcaatcttgatgtgtatgacaaagatccaagctgaaaaacataactatcagaaacaatctcacgcatgaggaacataacggcagagaacacattaagatgataaaaagagactccaatgcatcatctaggcaacaaacatacattgaaacagcgatcgactgatgatgaaacactttaaactcatctacttgaacaaataacagagaagtttgatgaaacaattccataacattaaaa

SEQ ID NO: 3049 - DNA, 281 bp, Arabidopsis thaliana landsberg
cgattattcaatattacaatggaaattagttgagaaatatcaaatacattaatatattacaaaacatcgattattctattacaatgaaaaatacacattaagaaacgacaagtaaattcaaccactaaagagctagaaaacagtaaccattactaagcaccacgtcccaagtccccgacacattccaaaaaccgttgacactccttcgtgactctgcaaagcgactcatgcgccgaaccaccaccgtgaatactaagtgacatctcgacgtgtctctcaac

SEQ ID NO: 3050 - DNA, 614 bp, Arabidopsis thaliana landsberg
  unsure (1)..(614): unsure at all n locations
nnnnnnnnnnnnnnnnnnnnnnnnnnnnnnnnnnnnnnnnnnnnnnnnnnnnnnnnnnnnnnnnnnnnnnnnnnnnnnnnnnnnnnnnnnnnnnnnnnnnnnnnnnnnnnnnnnnnnnnnnnnnnnnnnnnnnnnnnnnnnnnnnnnnnnnnnnnnnnnnnnnnnnnnnnnnnnnnnnnnnnnnnnnnnnnnnnnnnnnnnnnnnnnnnnnnnnnnnnnnnnnnngctctaggaatattttttccaaatcatatgaatacgnnnnnnnnnnnnnnnnnnnnnnnnnnnnnnnnnnnnnnnnnnnnnnnnnnnnnnnnnnnnnnnnnnnnnnnnnnnnnnnnnnnnnnnnnnnnnnnnnnnnnnnnnnnnnnnnnnnnnnnnnnnnnnnnnnnnnnnnnnnnnnnnnnnnnnnnnnnnnnnnnnnnnnnnnnnnnnnnnnnnnnnnnnnnnnnnnnnnnnnnnnnnnnnnnnnnnnnnnnnnnnnnnnnnnnnnnnnnnnnnnnnnnnnnnnnnnnnnnnnaaagcacttttgataataaaaaataattagatttttttgttatctctgcataaatttaataaaattcgtttccattatggggtctcagaaccca

SEQ ID NO: 3051 - DNA, 669 bp, Arabidopsis thaliana landsberg
  unsure (1)..(669): unsure at all n locations
ctttggattcaatcatggagatcagtttgctctgttttattcattgtctttcttttgtttggtctttttgtattgccgaaagctatggactttccctaggtttgctggagattgtgctactggtcattggaaactgcactctgatccaatgtctgagataaagagtgatctcactgatacttgttcccaaatgattctccagcttcatgatgtatatgatccaaacaaggtttgaaaattagtccaccatcaaaataatgatattctgaaatatctagagttattctcatgcttgtttctttgaaggttaatgtcaggatcaagattgtttctggatcaccatgtggagctgttgcggctgaggccaagaaatctcaagcaaattgggtagttcttgataagtaagttaataatctgatttcattcttcagttctttagtttttactctctttgtgtggttgaatgattatatttcttttacaggcaccttaagcatgaagagaaacggtgcatagatgagttacaatgtaacattgtggcgatgaaagcgtctgaggcaaaagtcctgcgggtgaacttggccggntccttcaacaaaggaaccagaattagcatctgaaaaaaaaacaaaaacaggttgttagattctgctaaagcggnttgtttac

SEQ ID NO: 3052 - DNA, 362 bp, Arabidopsis thaliana landsberg
agacgataactatcagatgctctgttttaaacagacggaacttttaagaatcaggtgctctgcatctcgacacggggggggtgtcatttaatgaatgatacttacagagcttcgaacgaccatagatgggctcgcattatgattgcatagatcaagagagacttccatgcctgagttctcgcatccaactacgagaactcgttttccgcggtacctctggccggatttataatctccagcgtgaggaacatcaccaccggaatgttctaaaccctcaaactccggcaccactttctcagcattctctcccgtcgccaccactagccacctgcatatatactcgaactcacaataaccgagca

SEQ ID NO: 3053 - DNA, 3276 bp, Arabidopsis thaliana landsberg
  unsure (1)..(3276): unsure at all n locations
tcaaatgataataaagatgttactgcccttcgcagaaattatgcattattttagagattaaggcaaatcaagcttacagtaacacgtacaatggtaacaatgtgcctaactataccttattgtcagtctttattagcccggttcttatcattttgagacgtatagctgcatgaaacggtaatgcgtttcctccacaagtcacttcttcggcgtgcgggaaatgcatgttagatttcacatgtgatctgacctggatcaggtaaataagcagagagatattatctttggtaggtgggtcaatacgatccaactaagtgagcaaaagaaagtaaaccgtgatatttcctttacctgattaagaaaaacgatcagtgtctgagaatagccaactgagtaatggatttttctgagcgcctgtgtcattattcttgattgtgtgtctctgtatctttctcctacaggagcatcaagttcacattgaggggcaagagcagcaacctgtagattccacttttaatattaacagatgcagaaagaatatatgaacatattgagatgaaagaatgagaactcacactgtctaccacaattacgtctactgacccactcttggtcagcacatcaacaatatttagcatattttcaacagaatcaggtcgtgatatcagaagctcttctgtgttcacacctattgattctgctagagaaggatccatggcattctctgcatcaagataagcgcaataacctggtacaagcaagtcctttttagataaataaaaagctaatggagtgaagaacaaaagcaagtcagaatcaaactgtaacttcacaaaatcgaatcttagccagagcaagccaaaacgcttcttcttccattcagctacaaagcaagataagagtaaacacaagagacattcgtttagtcaggagcttgggcaaatcatcaatgctactctaaaggagataactttattttggttggattgttgtcctagtttcttcatctgaaaaatcaaatctttctttcttatactcaagctaagaattgttgagaaacattagagacgaagagaacctgagataagtaagagaagaaacggaatctctgaatcggactggcccatgagagtcgacccattccccgttcttcttcaagcggctcctccttcgctgttcagtttcaattccacagttctgtcttcgatctccagtttccgccatggtcattgtccttaaccagaagtggatacataaaaatcgaaaaccgtattaaaccgatcggttcaaggctaatggaatctaatttaacggaacctattaataatctaattattgggtaatgttagagtacaagcctattaacaaaccctaactttacccatataaattcttgcacacaagtttactttttctttttctttgctttcttctgtatttgccgccgcttctctgctctccagctccggtcaatccgtacaggtacgttctggttacattcaaaacggcacttcaccataaaagaacacaataggaaaattgaacagtcttctgcgttaatttctatttaacattttcgatttgtgtctggagttctagtcttagcttgtgtagtagattcataaaaagaagttgtgaaattcatctcctttaattacagatgcagctggattttgcatctctcttgaaattgaatcctcaaatgactaatgaaaacaaaaaaaatcaaatcatttttttaagataagatagaaataaaaatggaaaacgtctctaatcaacacagaaagaaatactataaacaaacaataattttggcattaaagtctcttaaaacgaggtcccaaaaatttacatcagtaagatttcaaagaaagatattttgtttccatatttgtcgtatataattattattttgtcaattcttgaaaattttaacgttttgtttttgaccatgtaacgactgttccggtaaatatgtaggtccaaagacttcccgcggacttaactcgttttgaaacccggtggttttattaccggctctaaccggccccaccgaaaccttgtctgtccttataagtaggcccttaaaactccaattcccaccgtttcctcctcgctaaaccacacaaagcttcctcttctgagaatcaaagttttcgattctgtttgattactgggaaagatacaaacttttgaacacaggtttgtttatttttgtttcactctgttttattatccgatttcgttagctgttttatttatgttttgttcttgattgactttaccaggtttgcgatggatattttcgacaactctgatcttgaataccttgtagatgaattnnnnnnnnnnnnnnnnnnnnnnnaaccctttggagaggttgatgtcaccagtgattctgattccgatttcatggactccgattttgatttcgagctggtatgatactttactctgcttcaagtttaggaaaggattgaaatttaatggatgtgatgaaattaatagcaaacttgttatgttgttgttttagagtcagagtaagacgaacaatgaaacatcagcgttagaagctaggaatggaaaagatattcaagggattccatgggagagcctgaattacacgagggatagataccgtgagaacagattgctacactataaaaatttcgagtctctctttcgatccagagaagagcttgataaggtttgtctaagccaattaaaaaaaaaaaactgatttttgagtcagttttatatgttcctggtgatgatatatggtagatcaaagttaaatcttggactttctgtgtgcatatttcttatgatttctggattttgttgttgtcaggaatgcttgcaagtggagaaaggaaagaacttttatgactttcagttcaacacaaggcttgtcaagtccacaatagcgcattttcaggtagagaacttgaccaactatatttgctatgtttggaatactctgtttactgatgcttggagtcatctaggtttttcactttttatcatttataaatcctctgtgttgctcagctcttgtgtttagcagtctagtctgcaactgcaaacagtattatgcatattggcctctcttatctcgcctgagtactccagtgtcgcaattatttcacaccgagtctaaaaaccccaacttgtagtgagacctgtcattgtatgaaaatagcagttcaaaacttatttgaagatgaataatggtgtatctggtgtcattggtcaatctcttgggtaaattat

SEQ ID NO: 3054 - DNA, 396 bp, Arabidopsis thaliana landsberg
  unsure (1)..(396): unsure at all n locations
gggtaaagggggaatccaaggcaatatcttaattttcaaaaaacttatgttannnnnnnnnnnnnnnnnnnnnnnnnnnnnnnnnnnnccgtgttgaaccctgacttcagggccattttttcgctcacctttcctaattgagaaacgtaccattcgtgcagcctatcaccacgccaattacataaccaactgtcttaaaaaactgacccccacatttgtctcacgaaagagcacactaacctcgagcttaccctaactacaggctcatgattcccatcacctgactgtatactcggtttacggaatacctctgcagacatatcacatggtcggcgacgatactaatgaagtctactacatatatggcaagatgcataacattggtttttatacata

SEQ ID NO: 3055 - DNA, 577 bp, Arabidopsis thaliana landsberg
gggccccttttgtatgggcaagtgacgcatcttcttacactttattctttttaaactatcaatgaaacgagtgggtactgtatttttgatgctctcacaccttgacgctttcactgatgtttcttgttacttttgacaatcaatagaccaacgagaggaaacccagggagtcgattctccgggcagagtttgctaatgcaattgactttataaacaaagatctgccggaagaaaatcggcttagattcctccactgggacttgcacaaacattttcacaggtatccttttaatttgcgttccagctgcttcaaataatgttatctatcaatacatttttagataagaaccagttttctctcttctttgtctttatttcagcaaaacagaaaatgtattggcacttcttggaaaagtagctgcctgtgctttgatgctaacaggtttcttttattatcaacttacaccagcaatgaagcttgagggttatatgagcttgtcttcgtcggagtaagcctttatttcgacttcctgtaacttactcgttcatcatataaattcttctccgagttatatgc

SEQ ID NO: 3056 - DNA, 435 bp, Arabidopsis thaliana landsberg
tcttcttgcccaagtatgccaaaaaacgtttatatttttttctgtttaattatatctcaaaatagcaaaattcatgagttaacactaactagcaaaccaaatgtttattttatatcaaattttgtatcatatctccacacatatagttaaagatattgtatacactttattttcacaatacattgtgatattaagcttttacaaataaaaaatacattgtgatattgcgttgtaacccattgaaagagattcttgtcgagtgattttttttttttttgccttttatgttcaacaattttttttttaatattacaataatttttggaaaacaattggtgaagtacacgcgaaaattatggtcgaagttaacgctgctcacaaatggtactttgtcgaaggtctatgctcaaaattccggactgcaataagcactgc

SEQ ID NO: 3057 - DNA, 378 bp, Arabidopsis thaliana landsberg
agaatgcgatgacgagaggtgagcaagcgccgatgtttgtgcccacctaacctaaagcacgcgatagcacgatgctcatggtgagcgacatcactcctaattgcaccagatgatggacctaaacacccgcccatgctcttacgatgcagcgtcggataagcctggaaactgctgtatatgatgagctaccgggaacactatgctcgtgcgaagttctcaacgaatgacgccaaaggagtaaacgtcctatttagggtgtggctttaggctagaggaccatttcggtggctgttaccgagagcagtactctggtccaatgaagggagactgacgcgctggggccagaggcggcatacccctaataccgtgatgacaggc

SEQ ID NO: 3058 - DNA, 3156 bp, Arabidopsis thaliana landsberg
aatcgtagtcagttaaccaggatatgatatcatctccatgaactggtgctttggcgtagtgaacactgggatcaaaaacattgggcgtcccttcatcatcatcgaattgatcatcattgattttcagcagtcttttatctagaagcagaaatgaaaactgagggtcaaagtcgatcttttctttaactcgagtacgacccaagacactgtccactgctctgcaaacaagatctgtaccatcattccttttacatttgatgtggtttagaaactcaaggatttgagtgagttcctgactttctagaaaacagatactatgaggcgcttctactaagcgagaatcgacaagactctgttcagaaacttcaagttttccaagatgcttagctttaaaacacatcatccagtctcgaatgctacaagagagaattttaaggtcgcaaaaagagacaaggagcaatttgatttccttgagtaacttactgcgctcttcatccacagctaaaggccattctttggaccatccattcttagctttagatgcaaacgctttcacatctgcgagctggttcttgatcatttcagtggcagcgactgcatccactggttcccaacttccaactattatcttacgaacccagtcttttcctatcctcttgactatatccttttctgaagaaggtttgaaatctgcagcatgttgttgttcaagatgattcttacattcttcagcactagagaacttcctcgaacacaaagttcggcatatccagaatttccattctctgtcttcctttgccgaagtgagaaccttctctaaaacttctcgttcctctttgtaatgtcctactccctcaacaaaacttgtaagctttgcaatgcttactttcataaaatcccttttgatcttgacatccaatcccacccagtacgacctcaatcctttaaacgcatcctcacgcgggtcttgacttttctttgactccacacttttggttagtgttttttacagtagaaccactagagtcttggaagatgcgatctcggactctgcatcattgattaaactcaacagtgctttatttttttgtccaattctctttgcgcttgcaaactcagttgagcaacagaatctgacttgcttgggagagagttaacagataaaccttgtttcgctttcttcaaagacttcttgtaatacaatactgacccaagcatttggcccaacaggaagagtgaactagcacaaattggtgataacgtaccatcttccgagaagcattcagcagaagccaaaaagtaagcaaatttcacgtcaggatcctctgttttcttcgctaggtcatcaaacattttaccttctctgatatgaagacgccatgcggttatatcttccccatggactaaaatcaaatcttcaattatctccaaagccttgatgtgatctccattatcaaagagtttttgagcatcttcaaggagttgtgctccctcatcatcttccatgaaagaagaatccatagtaaacgaaacgattctcaagattcttttgctttctttttctctagggtttttcttcttcggagagaaatctgaatcgcgagaagaagcagagtcgacgcggggaaactcaaacgaaagtaactgactaatgacagcaaggcaccgtatcatcacgtgaaagacacgtgacaaggcttgatagcaaaacagagacacaattttgatcattggggaattctatcaaacaccttgtgtgcattacccgtttgagaatttcccggaataaatcatcaaaataatgagtgaaaatcttcaaatctagctcaataattgaatctagaatcgtcttcatgttgggtatgaacaaaaattcgaacttgaaaagatcagcaacaagagagagattcgacaaatcaagtgaaagaaaaaaaaaagtttttttcatttatttactccactaccactaataaagataaatactaaagctttggtttgagacaaaaaaaaatgcagagaagaaagctagtagaaatctccatcttcgtaatcagaaaatctaatttttcatcttccattaaatctctaaccaatctcgacgtcgacgtttcagttgataatgatgaagatcctctttacgccgacgtacctaaacctccgaaggataaatcggagaggaaaccgtatccgactccgatgaaggagttgattcgtcgtgcgaaagaggagaaacaactgagaaaattacaaccatgtcgagttctcgaagatccaccggataatggtttacttgtgccggaacttgtcgacgtggctcactgtgttcaccgatgccgtaacatgttgctctctggcctctctaaaatcattcatcatgttcctgttcatcgttgcaggttactttcactctgtctcatctctgtgtttgatttgctgatacttcctattgcttgtttaagcgttttatataatctatacaaccagaatttgatccttgaagtgttttgcgtgctttgtgtggtaattgattggaacagaagatccagtgagatttgaaaaaaaattgagacttaagttggctttagctagttttgaagtttgaacttgtgtggtttgtttgcagattgtgcgctgaggttcatattggcaagcaaggtcatgaaatcaggacttgcactggtcccgggagtggttcaagaagtgcgactcatgtttggaaaagaggaagagtgagtgatgttgtgttgttcccaaaatgttttcacctctatgaccgtgctgtgaaaccgagagttatacatgatgagagatttactgtccctaaaatctctgcggttcttgagctatgcatacaggctggtgtagacctcgagaaattcccatccaagcgaagatcgaaacctgtgtacagcatcgaaggacggattgtggattttgaggacgtcaacgatggaaattcagaattggcagttacttctacaactacacttatacaagaagatgatcgttgcaaggaagagaagaagagcttgaaggaattaagcttcgagacgatggagtcatggtttgaaatggttttaggggacaggaaactgatggagagatacagagtgtggacttgtgggtattgtccagagattcaggtaggtccaaagg

SEQ ID NO: 3059 - DNA, 515 bp, Arabidopsis thaliana landsberg
  unsure (1)..(515): unsure at all n locations
aaacacggccaaattcgttaatctataaaaaactatagcgcaataccttctatttatcgatttcagaagagagtcccataacttggtcttcaaaatctcaaccaccattnnnnnnnnnnnnnnnnnnnnnnnnnnnnnnnnnnnnnnnnnnnnnnnnnnnnnnnnnnnnnnnnnnnnnnnnnnnnnnnnnnnnnnnaaataagcatccttatgtttagcgcatagcctccacaccatacacccttctcaatacgtatcagaccaccaccagccgcgagtctcgaattgccataaaataccccatcagtatttatattaaaccagcccatagacgagataagccaatttatcagcttctcaacccgaccagccctttgtgttgcctttctcgtactagcttttgcctacaatacctccttagctaactctctaatgaaccgcaccctattcttccatactttattctccccaaaaactagctaattgaaataccaaccattgatcaagataatata

SEQ ID NO: 3060 - DNA, 513 bp, Arabidopsis thaliana landsberg
agaacctaaaaatgaaaacttctattgcaactaacttcttttgtgtcaccaaccaattacatctatcaatagttaatcaacataacccaactaaccttatgtatatggtgagtgactttccaagaaagaatcaaagagaaactgcaattactccaagtaacctcgaccaaaacccattcctgcaattgctccaagtaacctcgaccaaaacattgagatatctcaaaattaattcagacaaaaacaatcccaacacatatcaaatccaaaaacaatccaaacacatatcaatcccaacacaattcaacacataacaatctatacttcataaacatatcatcttcacagataacaattcatagacatgaaattatataaatttctttaatgctaatctcaaatccgagtgtgaacaaacaatctatatcgcctaaatcatcttcaataatcactaataaccaagatataaacagattatgtattcttacaaacttaactttgttattattagag

SEQ ID NO: 3061 - DNA, 586 bp, Arabidopsis thaliana landsberg
  unsure (1)..(586): unsure at all n locations
aaatgcaaattcgggatttctgcaaagctatggtactacattgttaactcactaactgttttttgctgaaatatgatctcctgatgaatcctgtggtgtttctaggactttccaatgaagattgtgttacgaagatgaggttgttgtcactagtggatttggcctcagatgaatctggcaaaataccttacacctcgattaaagacactcttcaggtaaaaactctcctctgcttgcacttaacatgaaatattgagacccttttagtttctcatttttcttttcgttttcaggtaaatgaacaggatgtcgagttatggatcgtgaaggcaataactgcaaaactgattgagtgtaagatggatcagatgaaccaagttttaattgtcaggcaagtcacacatctattgaaactctgcacttatctaaacgcaacattcattatttgatggtttgattcatatcttacagccgctcttccgaacgtgaatttgnnnnnnnnnnnnnnnnnnntctccgaacaaagcttgcgacttggaggtaactacaaaagctntcacttatacagaatttatttacaaacatc

SEQ ID NO: 3062 - DNA, 615 bp, Arabidopsis thaliana landsberg
  unsure (1)..(615): unsure at all n locations
agacctaagtttatgcatggatacaaatgggctagtctctcgtcttaatcacttttaatttattgttttccaaataagaaattttaaataattgtcttttttatataannnnnnnnnnnnnnnnnnnnnnnnnnnnnnnnnnnnnnnnnnnnnnnnnnnnnnnnnnnnnnnnnnnnnncaaaattaaatgaccaaaatgtgtaatcaatgaacctcacttgttctcatctgttatatccatccattgtaagttgtcccaaatagtatattatgttcttaatctttcagttcaatggatgttatgaaattatttaaatccttagctgtcggttgtcccactcaactaatccaaaacttttccaacattcttcaagggaactggttataaactaaaaggggtttaaaaattataccgcacttccagattttctcaacattgtaactagagtgcatctagtgctacgaaccgtatatataggattttctatttgcgtgtggtatttttcagtgataagatatatgcatatagccatatatcctcggaagttttgtcattagtcaagtcttgccgtacaagcaatgtttttgttaatcatcatcatcatcatcatcatc

SEQ ID NO: 3063 - DNA, 523 bp, Arabidopsis thaliana landsberg
  unsure (1)..(523): unsure at all n locations
attcgannnnnnnnnnnnnnnnnnnnnnnnnnnnnnactctcttcacttctccttgttccttcattctcttctcttctcatcgtctcaaatcttctccgaattacttcacttaccactttcctcgttccgtaaagagaccacatttcgacttgcgatgctcagtctcaatcgagaaagaagttccggaaacagaaagacctttcactttcctcagagtctccgacggcgatcaaactcaatcttcttcttattcggttaaggctcgtttcgagaaaatgataagaactgctcaagataannnnnnnnnnnnnnnnnnnnnnnnnnnagaagctcctaaattcaaggaagatgtttggtctcgacccggtggaggtggtggaatcagtcgtattttgcaagacagaaatgtatgggagaaagctggagataatgtctctgtgattcatgttttatgcctcctgaagcttatagagctgctaaagctggcacgtctgagcaaaaacctggtccgattgcgttctt

SEQ ID NO: 3064 - DNA, 321 bp, Arabidopsis thaliana landsberg
gttagtatgatacgggggcaacccattatataacattattgtttatgagccattcagggatctaagcttgggcggagggtattaccacccaggggtgattgtgaatgatcaaccttgcgtttctcacttacaggcaatgaaggattatctgacccatttggtgcatttacgagatgacgcatatcggtctgcaacacaccacagatagaaactgttcttatgacaggaccgcggtacgtagctgaagttaaccttaaggtgaaaaatgagcgtacctgcatggatcgacacaatgctcttagactagcgttctgagccatc

SEQ ID NO: 3065 - DNA, 597 bp, Arabidopsis thaliana landsberg
aaacctacaaacgaactcgccttagtcgagtagacccaagagttttctcttttaacaaagatgacatcgcatcgggaacaggatcaaaagaatgaaagcctaaagataacaaaattgcatagtttgctaatccgtccgcaagacaattagcttctctatacacgtgaacaattcggaccaaccagtccttctgtagaaagttgtggcacaaccgcaccaggaatgacagcggatgagagtcactaatccctgtcttgaggaaacccactatcgcctctgaatccacctccaactccactcgaggcaccttcttctcccatgcgaaatacaatccgtaatacattccccatagctctgcatgttgagctgagcatcggcctatatttagagaaaagccaccacaccaagctccttcacaatcccgtagtactccgcctgcagaagccagccccggatttccacgagacgccccatctgtgtttactttcacccaacccacacatggaagcacccaaccaatcagccgttcaactctaggttgcgtacttccaaccaaagcgttacccgaatgtgctctatacactttcacaacccact

SEQ ID NO: 3066 - DNA, 436 bp, Arabidopsis thaliana landsberg
cctcctatctcttccactccttttctctcctctcctctcacttcccttccctctcctccttgatcttctccgacgatgaagatctctcctcgatccctcccgcttcctacttcttcgccttcgccgtcttcttcgccgcttcaattgcgtttctcgacctttgttgtggacccagatcgaggaagtgtcggaatcccaagtgtaaaggtttgaagaaagcgatggagtttgatttgcaattgcagacggaggaatgtgttaaatctggagctactaaggagatcgatcgattgccatggaaaggaggtagtgagagcaatcctgattacgagtgtttgagggctgagcttagaaggatggctccgcataatggtcgtgctgttttacttttccgatctagatgtggttgccctgttgctaagcttgaaggttgggg

SEQ ID NO: 3067 - DNA, 381 bp, Arabidopsis thaliana landsberg
ccattcctcactaggttcagcatggttccttttttggattatttcatcaattgattcgacatatattaattttgggagatacatattttgtatcattttgcgtgtcggtgttaatatttgatttggcgattaggagttcaaaactgtactggttgatcatttccaccaacgtatgcgctattgcttactccgaacaaccatcctttgctgtatgtactaaatcgcctcctcttgatacgcttctaacgaggtagatccccgccttgcattgaacgagacatcccaagaatttgcctacttaactaaacttgataatcaacttatttaattttatatttgacttacccaatttttttgccttttcttttttgaaggctatgt

SEQ ID NO: 3068 - DNA, 251 bp, Arabidopsis thaliana landsberg
ataaatcgtaaacgcaccgaatgactttcacaaggaaaaatctcgaacaactaaacattaaaagactggtgcatgcataaatacataagtccaaaagattgagtggacagtaattacgtactagtactaccgtgaagaaacttggcttgtatatgtaagtccaagaaaaccacaaataaaaactcttcacaagaacacgttttgaagtacttgacgaatccagacatgatgatcatgatctttctgatatg

SEQ ID NO: 3069 - DNA, 2154 bp, Arabidopsis thaliana landsberg
tttgtagatatcattgaaatgaatttacaaatgcgtacgcatgtacatcagcaaacctcattaacgtatccggtaaaattcgtatactaattaatatatacatatatatttggcattatctttctcacatcctttgaacttcgatcaattttctctgctctccatacatatttatgtgtgtatgtagatttacccattcctctttgaaaatttcaagcacaagccagtattgtactaatccggaagcatatggcgtatataccttatctcaaagatgatagaagtatccggtccaatcacttgcataagatacgggacataccataattgaccaattacataaggattggattgctttttaaagttagatggagaagaaaatagacaagaaagatgtctataagtttttgttgaatgaaattttagattaaagctttatgtgatatttcattctcgctgtactaccaagagaaatagagagggtgattgatttgttgaattagctaggcttataacctttgtgggatgagtgtgtatatgagtcttaataagtggttagtctaacatgataacaatcaaactccaacctcaacgaacatgatgatactagtagactttacttacttagtttctcaaatttcttacctgaaaataaacaccttcagcgcaagaaaagccggatttctatgggtcataaggattagtgtgggattcggcatgggattcactcggttaaaccgtttaatactttgttgtgtttagggtttcaacaaccatttatttcaaattagggtttggcaacaccaaaatgtttgtctttgaacttctaaacgttttctaacttgtggcttttcgagactgtggcatttctcattaatggaatattaaatcaatccatatcttacctaagaaaaaagcctcgagaaacaacaaaatactaaagagtgaaattttcaacgcataggccgaaaacttgggctttcagatcttatgaggccctatttatcaaaacatataacacaagagtccattaactttaaatccaaacccatttgctttcaaataaacttttcccaaattacccttgaaaaaccagcacagacacctcggtcattgaagcgaaccgaaacaaaacatccggaatggcgaaatcaaccaattgtgtgtttgtcttatttgctaaaaattattttcttttaaatatggttttgatttcggtccagggtaaattcgtaatttgcatttaaaccctagttaaacgcattataaaaagacgaaaccctagaagctgagagtgagtgagtgagagaagaatcagagaaaatgccgccgaaattggatccatctcaaatcgtcgacgtctacgtccgagtcaccggaggtgaggtcggagcagcgtcttcactcgctccaaagatcggtccactcggtctggcaccaaagaagatcggagaagacatcgccaaagagacagcgaaagaatggaaaggtcttcgagtcaccgtgaagcttacggtacagaatcgtcaagctaaggtcacagtggttccatccgcagcggctctagtcatcaaagccctcaaggagccggagagagatatgaagaaagtgaagacatcaaacataatggcaacatttcgtttgatgatgtgattgagattgctaagataatgcgtcctagatctatcgctaaggaattgagtggagcagtgaaggagattttaggaacttgtgtctctgttggttgcactgttgatggtaaagaccctaaggatcttcaggaagaaattaacagtggtgacattgatattcctaacgagtgataaaggtttttacttttgagttctctatcgttttattttttgtatttgattttgaggatttggtattagtaatactatatttcggaagttgagaattgttggcttttgcccatttgaatcctttcttgggattaatcaaaatgttcaattttctacaatctgtcaagttggttttgagtctctaaagattcaagattttatttttgaatgcttcacttgattgattagtagttgtcgagagtgcttaagatttagtctgtctcgtttccctgcatcatttagattatgacttgttgaatacatcaaaaggtttatgactttgtataatgag

SEQ ID NO: 3070 - DNA, 503 bp, Arabidopsis thaliana landsberg
  unsure (1)..(503): unsure at all n locations
gactccgaacttccaatggcccacaaccatttccccacatccacgcaccgaagatgaacttttggtcaacatttttttgggatattacagttgcgttcttccagtttaactagatctagttacaacatcacaaaaacgataagttatacccaccctctactttccttagctaatgttcaacaccagaagtctaacaaactttagaatcattagtgtaagacatctaattttgggaataaggatagaagcacatcaagtttctaaaccacccgaccgaactactatgcataacccaccaactaattaaaatgtcatactacttgatttaataagtagaatatcaccaacattatgtaagtccactcgactacaactttagaagcaaaagacctgaagtgcttatacccatcttttattatgtagatttcagatttcaattagaatatctatcgatattagtcgattccaaattcttggagaaactagntatattcacncatgac

SEQ ID NO: 3071 - DNA, 514 bp, Arabidopsis thaliana landsberg
  unsure (1)..(514): unsure at all n locations
aaatccctacctcttttacttggtgagacgatctttggtctgtcccaacgggacaaatgttagaattctatacattttactttactcggggaacgagatacatttttgcttcaaggttcaagccctctttcagtgcgctttgtgattccttctgcattcccaggataccaagggatgcagactgtctatatgacacgacatgccacacggnnnnnnnnnnnnnnnnnnnnnnnnnnnnnnnnnnnnnnnnnnnnnnnnngtcacttattaggaaacacatactacgcggaggacacactgttggagagatcatttgtgcatcaatacactgtctaagatgcacgaaagataatcatgctaatgctatgtgtctgcgtacttcattttatgtcaaaacacaactcgagctgctgtgtacacatcgtggcctatttaaagactgtttgcctgaaagccacattagccttctttgttgaggttagagactcttgtatgtggtctgatcacacctgaa

SEQ ID NO: 3072 - DNA, 247 bp, Arabidopsis thaliana landsberg
acagaacgatactgatggaaaatgggtaaatgggtaaatgcatacttggttccataatcgtgtgaaattcgcgaataagacggcggaatgggaagagaagggggacggggacatgctcggcatgtttcgtttcttgaccaacagcactacagagcatctgaacctacgaaggaaccacacacaacatatgaaaacaacgattgttgaagcttcatctgataaaaaagtgctctcgctgttagataac

SEQ ID NO: 3073 - DNA, 432 bp, Arabidopsis thaliana landsberg
ctattgatatcattttatctgttgtttaaggttaattatgttggaaaagctggaaacctttaccaaagtggataccagctcaatggaagcgcctatgtcatctcaaagcacataagcaatacatggttatgggatcgtgttcgagttagcggtggtgcatatggaggattttgtgattttgacacccattcaggttctattctagctctgtttgctgacttgttatttcaacatgttcttataactggtaaagcaataagaaaaatgtcccgttgctcattcatatttatagtcattagttatgtggcacggtttctgcgtggtaaactattcacatagtgctaaataatggatactggttcaggagtggtctcacatttataatatcgtgatcaaacttactgtaaacactagtggttctcgatgagacag

SEQ ID NO: 3074 - DNA, 237 bp, Arabidopsis thaliana landsberg
  unsure (1)..(237): unsure at all n locations
ccaacacaaccccccaaaagacaaactcctcgatacactttagaaaacctccagcgataaataatgttctcagaccactnnnnnnnnnnnnnnnnnnnnnnnnnnncccgaacatatcgcattacattgctcaccattcgaaccacattgcttcaccacattgacgcgacgacacgaagataacactggacagatgaaagcatacacaacacaatgagagactcaatgcttatctac

SEQ ID NO: 3075 - DNA, 540 bp, Arabidopsis thaliana landsberg
cgaggtcctcagctacagttctgatcaagacaagcaaatatgggctaatcttgtccctgccatgcgtaaagtagtgaactctcttagagctcgtggaattcacaacatcaaagttgggacacctcttgccatggacgctcttcgttcgagttttcctccttcgagtggtacattccgggaagatatcgctgttccggtgatgttaccgttgttgaagtttctcaatggaacaaactctttcttcttccttgatgtttacccttacttcccttggtctactgatccggttaataaccatttggattttgctctgtttgaatcgaattctacttataccgatcctcaaaccggtttggtttaaccaatcttctagaccagatgctcgattcggttatctttgcgatgaccaagctcggttatccgaatatcagtctcgcaatctctgaaaccgggtggcctaatgacggtgatatccatgaaaccggagctaatattgtcaatgccgcgacgtataaccggaatttgatcaagaagatgact

SEQ ID NO: 3076 - DNA, 364 bp, Arabidopsis thaliana landsberg
tcaatgggaacaaaagtaagacaattacaagatgatttatctttcattcttaaactccaatcatcaggagcctggtgttgcacaggatgctccaatataagtgaaaactgattcatccaaaccttaagcacaggcgtcaccaaagtagtagtttccgtctgaatataaacacattatatatgtaaactgataacagaagtagctgaagcaaatcacattcaagatgtatgtattatcaaagaaaaagtaccttgtacacaccgctcattgctccaagaacatatatacatgaataaacaattgtaagggcttttcctcgaatatacttgtcatagctctacatatacaaagaagtgagctccat

SEQ ID NO: 3077 - DNA, 374 bp, Arabidopsis thaliana landsberg
gacgtacatcttttttcggataaagaaaagtttgttactggcgcttataaaaggaaacttgaggaacaaattaaatggctggcagaagaaagattgcgtgaacttcgtgaggaaagagatgatgtaagttctgtttccttgttcattttatttcatgtttgtgtttctatctctctggtctattaaactagtacttgctaggattgctgaagtcctatctttgtccttttacgtttctgtcttaagtagctttggtttgggaactgtgtcaaggtagtttgcatgtggtggcttttaggacatgatgggtgggtctagaaaccattttcatgtctttgtattatcactggggaaatttatagcctatatttttc

SEQ ID NO: 3078 - DNA, 333 bp, Arabidopsis thaliana landsberg
aacgaaatggatgacgatgatatggagatggatgagggagaaggagacggcaggagaaacatcagagttcaaggtagaaagttatgaatgtcttgaaggaaggtggtttcgaggagaagagatcttcaaagctatcacaacaagagtttttgtatcttctttccttgttcaacaagtctggtattcacttcacataatcgttttgtggtgtgaaagttttgtccttacttattactattgctcaagttttaacatttggaagtcaaactcaatcccaatctttgagtttctgacgcaacccttctttctgctcataactataatgaatcactt

SEQ ID NO: 3079 - DNA, 493 bp, Arabidopsis thaliana landsberg
  unsure (1)..(493): unsure at all n locations
gaatcgtcggagaagacggtggtggattaaggctaatcgttgaggttttaaacgatggtgcgagaagagagagcagacaatacgcagcagctgctctgttttatctatcttctctcggagattacagcagattgatcggagaaatctctgatgcgattccgggattggtgagaatcgttaaaagttgcgattacggtgattcagcgaaacgcaacgcgtnnnnnnnnnnnnnnnnnnnnnnnnnnnnnnnacctgataatcactggcggatcctcgccgccggaattgttcctgttcttctagatttagtgaaatcggaggagattagcgacggagttacggcggactcgatggcgattttagcgaaaatggctgagtatccgacgggatgatatcagtgctccgtcgtgggagattaaaactcgcggtgaagatattgggttcgtcggaggtttcgccggcgacgaaacagcattgtgttgctctgcttttg

SEQ ID NO: 3080 - DNA, 455 bp, Arabidopsis thaliana landsberg
  unsure (1)..(455): unsure at all n locations
tggagcaatgttgtaggggggtggtgtattcgtctctatggaattttataattccaaactcttcagtgtgaaattgatttcatttaggctttgatttgttaggaactatttggttattacttttgacctccttggtggttttttttggctggttcaggaagctgggatcgatgtccgtctctgtgatatcggtgctgctattcaggaggtcatggagtcttatgaggttgaaatcaacggaaaggtcttccaaggtatccaatgtcacatctagattacggctcttacatcaatgtcacattttgacgttaatataataataaaccttaacatgttatgtccttttggcagttaaaagtatccgaaacttgaatggtcacagcattggaccctatcagatacatgctgngaaatctgttcctatcgtanaaggaggcgagcagacanagatggaa

SEQ ID NO: 3081 - DNA, 594 bp, Arabidopsis thaliana landsberg
aggactactcttgttacttataaaggccctacaatgattgcttgtactcttcaagccgtttcaatctttctattataaagcttacattgggattggtttcttaaccttagtgcctcggattatcctctagtaacacaagatggttagtaactctctctataatgctttagtagtctatgatccttttgagctttatatttagttgtgacttataattttggcttttctttttgtttctgtagatttgttgtatgtcttctcaaatctgtctcggaatgtcaatttcatcgagaatatgcagctcaccggatggaaactgtaagtataaccatgcttcattattcagagtcacaccagaatctcaaagcatctgtacttacttggaatttcttagcaggaatcagagggctaaatcaatcattgttgatcctgccctatacctatcgaagaaatccgatatcgcttggactactcaacggcgatcactttcaaattctttcaagctattcactggttatcttctttaatctcacagcttcatatctgtgagaaagattatgaaatgtttgaagatgatttatgtcttaattctgc

SEQ ID NO: 3082 - DNA, 502 bp, Arabidopsis thaliana landsberg
ttttagttttctagatctaaatatttaaaacttaaatctcctcctcctttggtttttgatgtttggcttttttgtctccgccattctcagcatcatatctggttgtatctttcttggtaggtagaagcagtcttcaatcggttcttctctgcctcagattaagaaatttcgccatcgtagatctagatcttcaattcttcctttcttcaagagacgttctttgagtctctatttttttggatgcgtttcaccgcctctgtgacttctcgagagcattataaagagggtcacacgacactttcatttggttttaacttgttataaagaagattcttgtattataatctgcttgtgtgtttttctaagtctcagttttgttttaatttgcaaggtttacgttttgttaatcttttttatggatttccagattctgatccagaaagtattaatggatgttgtgtaagtttatttgcttcggtttttttcccctttgtttactttg

SEQ ID NO: 3083 - DNA, 565 bp, Arabidopsis thaliana landsberg
  unsure (1)..(565): unsure at all n locations
ggtcctttagaacaaaagatttgttagaaatataggcattttccgtatcattttaattccataaattaatattataatgatgacatataaaatatgtttaatcataaaaatcgcgatctcaaatatatccataacaatatggatcatgagaacataaagcatatgaatcatataaatataataagcatataaacatggaacatgtattattatggaacaactgaaaataaacagatagcaatataaacaacatgactgtaaaattaaaacaaacagatttatcatattactaatatgaacaggcatcagacatgttatgatataatgcgacaaaacagtttggataaatttatggctatatatatgaaacagcaggtaacatatgaaacatatataatctgcagaacgtaaaacagtaaggagnnnnnnnnnnnnnnnnnnnnnnnncgcttcgaggatctagatccttgtccaacttcacttgtcatgtcgtacgagatgaagacgtcaggaactagcgatgaagacaacgaaggacgttgggcagtcgtgtagagctcccaaa

SEQ ID NO: 3084 - DNA, 415 bp, Arabidopsis thaliana landsberg
taatcttataaaaaatgaacccctatagagtgagcgcactaacttcttggttacacaggtactaacttgtcatttggcgatccaactggggattcaacttgaagcagcttgatatggaattggaccgaaataccatcacttaataacgattatgtatccaatcataagaacgggtcatctatttacgcaacaccttcattacttagggtcacagcgaaagaaaagagaaaaagaaaaacgaaaatagaacataaaagaggcttgattaccttggaaacaacaataagaacatctgaatagatgtctaaccaattcgctttatgatataaatccaaaaactctatcatagcactggctggggactcatgaaggaccctaagtcctagctgccaaggaaccatcgactcttattgcg

SEQ ID NO: 3085 - DNA, 533 bp, Arabidopsis thaliana landsberg
  unsure (1)..(533): unsure at all n locations
tataacccttgagaaggaatatatgcatatagatttttaaatttatctattttctttttgcatgggcgaaatagagtcaacttttctttatgacgggaatatgttccttnnnnnnnnnnnnnnnnnnnnnnnnnnnnnnnnntcttcttttcggttcattcacaaaatataatatcgcagtacattgatggaatggtgggtttaagagtttccacaatgtagacgaaattttacattgtcgaatcatatagattttgtttttataaaataaatcaatgtacattttatgtgagttcaattaaatcgatgaaccaaatgcagatttagatgtggctatatcaatcagtatgaaacaattatcttttgaatagaatagtttaatgtttaagttgaatagaatagctaaagatttatagaatcgcagatattttaaacctgaatattattaaagggatagttaattaaaatcgaaatatacatattggctaaagataaaaatcttttcaacaaatatatatgcgtggattaactca

SEQ ID NO: 3086 - DNA, 715 bp, Arabidopsis thaliana landsberg
tagtattatataacagagggtgtaatgttaaaaatcgcaaccgctatcattccgttcaaactttaaaccaataaattggttgggaagattggagttattgatccttctcctgttacatggtacattattgttaggtgcgactttattatgattgtatgagaaagagttcaaacacgtttgtgaattttctctttttctttttttgtatataaataacgatcaaactttgaggtgaactagagataaaaaaattaaatacgagtctcaatgaatctataggaggtaacgtcgcatgcaaaacaaatacaagacgatgtattgaaggagatactcacacttgacgccaaaccataatatctccaccgtttcgtctgtgaaagttctgataaaaagtgttcaagaagaatgtaccagtggtaagctacaatgatgtcaagcctttatattgagcgtatagcgaatggaggagagccttcaaatgtcatttccgggaaacctattactggatttttcttgaggtatatacattgtcaaattctagagaccaactagttaaacattttctcaaaacatacaaaaaaaaaaactagttattattcatataaactcacatgtgattttattattggtgcatgggtatagctttggaacttctggtgggaaacaaaagatcttccaaggaaaccgatatttccaaatggaggatcgatcagtc

SEQ ID NO: 3087 - DNA, 530 bp, Arabidopsis thaliana landsberg
tgaatatttaatttttacataaaactcaaatctttgccaaaaatatacaaaaattaatgtttaaatattaataatattaaaatatgtatagataactaaatgaggatggagtaatacaaattaaaaatgagaaatgttgatactcaggaaaattcataaattcatagaaattaataatagcaaatttagagaattaacaggaaacatgatatacatattatgtttgattatgaaatttaaatatatgaaaaatatgatttttgtcattttaaataaaagtagttaaatgctacctaattttttttaatgatatatcttgtaatatctcaataatatctgagattgtaatccaatatcttacaaagcttatcttacaccaaataatcgtttgtttctaattaaaatgtttttagggctcataaaaaaaatggcaccaagttgcttagccatgtggattgtgggacgacaaatacagatttcaaagtgaacacagagtcgctcgtgggtccagcaccgacactgacctttgt

SEQ ID NO: 3088 - DNA, 406 bp, Arabidopsis thaliana landsberg
tttattgacaataaaaacactttgtttgagagacagaaccaataacactataaaaatagaaactgatttgagagagagtgatagaagtcgaacctgagatatctcattgtacacactctagttctcttctgaagctgaaaaggtaggctaaataataactcataatactttaattttaaaagacttacttgatcaaaagatggagttaatcaagaaaccacaaactccaatttaaacactaaggaagatcatagattggtttataagaggaagggacatttacctgatcaaaagtgggaaagacataatccactggattttctggacttaaaaacgagtcaccaaaagatgtggttagaatactatgagggcagagcttaatttattcttttaatgatctaacatt

SEQ ID NO: 3089 - DNA, 747 bp, Arabidopsis thaliana landsberg
  unsure (1)..(747): unsure at all n locations
aagggttgttgcaaaattggtcattgtggtgttctcagtttctccctttgtaatattttcttcgactttcaggacagtggttgtattgagattggttgtcttaacaacgaacatttgtttgagtaacactgctaaaagatttggtgatgaagcatgactcgcgtgactcaagctttctttgtgttggagatgatattcttggagaagcaagttcgacctagtgacaaatggcggtgtttaatatttaacaatcatgatgttttcatacttcgcattcaatccattgagtatgtacatgaccaaagttatatctgtaatatgagcatctacattgaaaaaagttcaagagcctcttgaactattggcaagaatttgtattgagtcatcgctaatttctttcttaactagttacagagttgtatagtcttgaccatgactggtcctgagaataattggactagaacaaaataaaaaatgggagtcaaaattttctattacatatcatacaataaatacaaaattaatgaaaaaatagatttgtttattaattaggcagtcgatataaaaatttattagactttgatatttatgtttctttctcgtgaaactctttatatgacttatacatataaaaatttttatttcaaaataagccacttaaattttgggccacagcaaatgttntcatttgctgtgctcaggacaagtcttggtcctgacatatgtgttatctttggagttcggagt

SEQ ID NO: 3090 - DNA, 456 bp, Arabidopsis thaliana landsberg
aaaaaaaaaaagattgggaagaaaaatggttcacctttttttctagaaaatgaaaaaagaagaacaaaatagctgatcaacaaaatagggtttctgtttctgcaattgaaactaataacttaaattattcaaagctcattacttaaattttctttcaggggtaaagagatattatatgagatacctgaagtgttgttagtaggtatacgagtgtaggccatggaagtcggtctcgccgggatacgctctctctgtcgtttagggacgctccctccctgtggctgcggttgctgaccggtagaaagctgctgctggcgttctcggcgtttagcggcaggaacccacgtgctcttcacgtgagtgggacagtcaaggccacggctcttgcagcaagtcctacatctcatgtgagagcagtctttcttagattgattcccacaatcctggcagcttggt

SEQ ID NO: 3091 - DNA, 509 bp, Arabidopsis thaliana landsberg
  unsure (1)..(509): unsure at all n locations
cccgtcctctaaanacagcgttttgttgttatgcaagtctaaaagctccacaagtctcttccggtctagcaagattgttttcttaaacccaaggtacctgcaaaaagatgttcatttcaagaatcttgctgggaattagcttgaatcagattttcataatacctccgatgaccttcgacaacttttgccatgtttccataataggtaggaataaaagtgttgctggctacagatactatgaaatctagagctgccatttgagatgaatggttctgaaactgttgcaattctgttggatctaatagcatttcctttttcacctgaaaaaccaacaagtcaccatcatcaccaaatcgtttccaaagtgcgtaatgttgaaagtgataaaacttacaattcgtggaaatgattcctttagaagggctaatctctttgcaccaccaaaaatctcaccagctgcaatgtatatctgggtctcctttcgaaaccccaatgctttaaaaaccaaa

SEQ ID NO: 3092 - DNA, 410 bp, Arabidopsis thaliana landsberg
gcaccgtgtgatgacccaaaaagaaggaaacaggatgtctatcgcgtcgttctacaaccccggaagcgatgctgagatctctccggcaacgtctcttgtgggtaaagactcaaaatacccaagctttgtgtttgatgactacatgaaactctatgccggactcaagtttcagcccaaggagccacggttcgaggcgatgaagaatgctgaagcagctgcggatttgaatccggtggctgacgttgagacattctaaatggatgtgggatcttctatgatatgacatatggtgttgtaataaaacgattggggttaatgttagtaaaatccatagccatgtgatgagaattaacgtgttaagcgtgggagtgagtgaccatttatgtaataattgtgtgggttctaagttc

SEQ ID NO: 3093 - DNA, 613 bp, Arabidopsis thaliana landsberg
aatgaaactcccctggtttaactcatactcgaacatgagtgttttttttaccattttagagatttttgctatttgcttttcttttgttgtgcttattgatttcttgttttgtttcctaaacccaattttacattcatgttttggctccatgaatgtaaacttattggggtgttttgtgtttttttcttcctttgtaatccaatttcaccttggtgtaaaatactaaaaatctaaaggaaatgtgatgtttctgttttcaggaaatgtaatgtatagtatgtaaagactttgattatatatatataatatatatactaaaagatagtgccgggcaaataaaccggaaccgccccgaaaagttagattcgaaaccgaacccaaacccaaaaatttattctattggatcctaaattcctcaacccaaaaaaccaaacccaaatataggcgaatatttattcgaatatcaaaattttaccgaaaactcaaagatttacctgaaatctgggtatttacccaaaaattcgggggtatcggttccaaaaatgaccttaaaatctatacttgaaccaatccgaatccgattggaaccaaacagaaccgaaccgagaatgaa

SEQ ID NO: 3094 - DNA, 559 bp, Arabidopsis thaliana landsberg
cgctcgccctctggatcgggggccgccaccgccggcctggaaaccgccgccaccacataagggcgctgccgctgccgccgccgctcgccctctggatcgagggccgccaccgtcggcctgggaaccgccgccaccgccggcctggcaaccgtcgctaatgaatcgagatggggcgtaaaaacggatccctagcactacggatttccttttatagacgtctggacctggtctggctcgaccggattgcattgtctggcctgggcttccaataactaaaggaagcccagggctcctaatatacaatctatatatatatacacactaggtgagtgcccgtgcgttgcaacggaaaaatagaatactacgataacttatgtacaaataggtgggtgctcgtgcggcacggtggggccgagagagagaaagtggtggtggaatacatagcaagctaaaaaaacatttcttcccctttttccttgcctcgcttcccctcatctgtctcctgttctctcctctcctctccgtctgctttaggccccagaaatcgaagcaccacaac

SEQ ID NO: 3095 - DNA, 639 bp, Arabidopsis thaliana landsberg
tccgtcaagggcctctgctttgacctcttcatcattcaggggtggaaacagagctttcaatgcatgctggaggtgcacgacatgatcaatattatccatgcttgataaatgatgacaatggtgatggccatgatgtacgatcaacattgtattgatctttttctgagttttagactatcatgttgtttgctggaatggagatattttattgttcacttggttcttgtgatagagttaattaccttatttcggtgctttcttagtaccctttttctgatatttgagttgtaaataacaatttcccaattgtgctgtcattataactcaatgacattattaaaatcatatatataaatcaatatgttactaatcgttgcaatgtaatggtgaaatagctagattaaaataacaatttatatatgggtaggattacaatggattccgaaacattttctcataacaatataacacacatttgtacataagttatcgtattattatacgttcccgttgcaacgcacagacactcatctagttataacataagtgatcattctagccaccggtctctttaacgacaggtgcctaaaagctcaaaaatcgattgtagctatcgtacacactaggagcaaatatcat

SEQ ID NO: 3096 - DNA, 425 bp, Arabidopsis thaliana landsberg
tacaacatggcaatggatgaggtcagtggtgaggctgcagagggcgcggaagagcttgaccctgcgctcgaggagacgccgatggaggagacaatccgtgtgacgcgcgccaagctaaggaggcgcaccgccaccgaggattctgctgggaattagctgcatgccgttgttttccctgcacattgtattgatctttttccgagttttaggctcacatgttgtttgctggaatggagatatgttgttgttcacttggttcttgtgacacagagttaattatcttatttccgtgctttcttagtacctttttgtgtgatttaagttgtaaataacagttcccctccgcatttgtatatagtttagcggcatgggcaacgaatgcctgttattgcaacattacacgcttcaatctggtcactccttgg

SEQ ID NO: 3097 - DNA, 537 bp, Arabidopsis thaliana landsberg
ctgtaacagttctagatatctgtgattccagctagaccgtaccctaggatttgatgttctacttctctctctagttagagaagaatgggaagctgccaaattgccatttttatgattctggttgctcggaccataatcactagtcatattatgatactcagaaaatgaaccataaatatggagttcagagacaatcagagaactgcatatgcaattgtctaccaccaatttctgttttttaacagcgatgttgccttatatggctgctaatttctgtatatacattttccaggatgattctatctttaaaaggtgaagctgctagatccgaagatatgtttgcgcatattgaagaaattctgatatctgttagacttgcctttttgaactgctttctggattttgctggtaagctttttacaccaaacttccgtgaaagtacatgtatagatgcccacataaatgtgtgggcagacaaaaagacatttttatgttaatatgctaattgatttttgcacatatcagctcacttggagc

SEQ ID NO: 3098 - DNA, 2397 bp, Arabidopsis thaliana landsberg
ctctcccccaaacttaaattacacagtcccttgtgtaataaaaattcaaaggagaattcaagagaaataaccacacaaagcaagaaataaaagaaatgcaatgatacatacagtgaaatggagtgatacctcaacgttcagacgaagaggttctggacaaactcgtccaggcggtcttgtgtgtactcatgatcatgggtggaggtgttggggttgtactcgtttggccggtcgagcatgtagcccgagtagtactcctctcggctcgggtcagcattcagaaccaatcggttcactggaccgggtgggcgcctgttgaaacggcgatctgagaaggtggagcttctcccgagcttgtaatttgaggctcttggcggggtgaaacgaacgttcctttgtggtgccacactcgttgagttacatctcctgaactcgggtggaggtggtggcgatctctgtcttctttgcagctcctgaatctgaaccgccatgccgttcattgccctcttcatctttctcaccttcttcttcaacccactgatcaactttctctgaaacttccctaggcccttgtgcattcccagcttcttgtggacttgaccgggatctctctcttgatcggactcatcataatcttcaaagaaatactgctccactgcagcttcacacgagtcttcttgctcatcaaactgttcagctcgactgaactcagcttgttcatactcgacctggccatactcggccgagtataagcttcctgctcagcttcttcttggttgaactctgctccttcttcttgtgactcactccccatgctccactctgcttgtaaaggcgcaaggacattgactaagattgatggtggaggatcaaagtcaatgttgttcccaattctaactgtggtgtactccttgcaaggaagtgctaacctagagagacctagcgtggggtgcttgaacttgaaatggagttgatcagctgaggcagatctatccaagtagcatttcctcttcaagtactccatatcaatgtagtttgctgtgacagtgggagtgtgaagaggaactccagcagctattaggatgggtgtgatcactcctccagcacataagcttcctccatagccggattggtggatatcagtggcatactctctgaaacctatcaagtgatcagtcaacaccaccgaaagggatgtatcagccctatccccttccatcactatattcttccttgtttgccccaaaatgaaacataaggtgagatcaagcatcttcagctctccctcattaacatgatcggttgtcttctttgggaagaaggcacttgcaatccaaaggtggagatacctaagcaccgggctccttatcaatgaactcttggccctagatgacttgtaggggagtggaccggcgattgtcaaccatagatcatggagctcgtccttgctgaagttttggcggatcccatacttggtggggaacttgaatacaacatccaactgcctaatagggagggagtagtgaatcccaaacaccatgaatgtgatatagccaactcccttatgtatctctctctccctctcctctgcgtagaaatggagcttcaaagtggctaggaactggcagctctcagtttggtatccctcacacttgtaggagaagaatgtccccagcttggccatctccatgaggtagtcaacatctctacagatccccaaagcttgcatggtatgcctatggggatatcttgtcccctcaaagctcaactccatgaggtactggtagtgttcttcaattgtaggctccttcttccttcttgggttgttacttcttctccttgcaggaactattgggacctcctcgtcaatttccacatcttccccacatgcttccttctctagcacaggctcttcctctattgcagctggctcagactcccagaccctcttgcctcttgcaatttcctctctagcagccgcagtacgacccatagaaggctctggggctacactcggccactgtactcggcctgtcaaccgagtaaaaccaggactcacagcttcctgattccatgacggacccttctcaattatcatagcaaaccctctcgccacagctcgagcagaggctctccttcttgattcttcgggatccatgatcttgggatgatttacttcagatagtcaccacaaaataacccaaagtaggtcaaaagtagaagagaaattaatgtttaaaactgaacaaaggctgtaggagaggttttgaaaaggtttgtatggagagaaaacaagaaattatggctaagtttctgggaattctagagagaagtgagagtaaaatcttgaaatgtttggagagaagaagtaaaaattgaaattttgagcaagagaga

SEQ ID NO: 3099 - DNA, 548 bp, Arabidopsis thaliana landsberg
  unsure (1)..(548): unsure at all n locations
taccgaaaatacagcaattcgggaacatgaatagattagagggataatctaaaattcacaagaagtaaatacatacgggcagtagagcatatcagcacagcaagagagtatctgagaagcctcggaaagttcatcactaccaacaatgcaagcaactatagagaatatgcaagcaacttggctgaggcagaacataaatcccttcaaacacacaagatgagatttgttagtttcacacatgtgtaaaaccaataaaagttgaagaaaaagagagtatgagagtacaattatgcaattgtcgcattgtgttgtctggatgttgaattcatcctgcagaagaaagcgggtagaggccacagagtttccgaagcaaaggaagacctgaaaatttcaattgcaaatgctaattcataagaatcatgaagctgtttcacagtgacacagctacgagaaaaagaaaatatccaaatcataaactgtttcatgttccactttccatttcattaagtttacacanacaaaacgagtgtcattcactgatgttaaaa

SEQ ID NO: 3100 - DNA, 561 bp, Arabidopsis thaliana landsberg
cacttataatgacatttctctcttttcaattggtttagttttttctctaaaataaaaatttaattttattataaaattatagtaaaatattaatattttcttttttttgagaaactcattggatttctccttgataaagatgctcttaacaagctaaatgtttttgcatatatttttgcaacaaaaacataactatctccctccatctgcttaacacgtcaacatacaagaggatgacatgtggctagacactatttgctgaaaacttaaaaatgtgaagagccgattcatcttttgtagcgaagggttcaaacgtttgatctcaagcagctaacctaggcttttgctggacaattacaccgtcagaagtgatatgaatgggttctcttctttctaacaacaatcatcaattgttatgaaacccataggttgttcaattgttgtaaatttcgatcctcaattttgtcaattatgcatctttgtcacttatttttcatatataaacttttgtgcttcatttgagatctttgcacatttgtctgatatattaaggcacggatg

SEQ ID NO: 3101 - DNA, 717 bp, Arabidopsis thaliana landsberg
ctatctgcacctgtttgcatacgaatagcgttttggtcaggtcggaagagtgtgatccgaccgtcttctgtcctgttatccttgagaccttcaaatagtccctacaaacccccaagccaatatcaaatgattttctctcaaactctcttacaagcttttgcttaagagtatacgatctagattataaaccgatccaaatccaatatgacaaaacgttcaaaaaccaaacaccagtattgaacaaaaatttataagtgagtggggaaaaagtgaagagagaacaaaacctggccataattgagaatcccagcacaagggcttatagaaatatccccataaggaacaatctctcctgttgaaaagctctctccttgtttgcatttcgccacatacatataatctgttggaatcagtgcgaatcccagctcgtcccattttacattcgcatacttttcatcggctttactgttttattgcatgtcacaaaagaaaacaaaaaaacacacacatacataattagttagtaaaagagtttggccgttttgaataaacagagaaaggaacgttaaaaaaaatcatgtttatgaaaagatgatatttttgcaccttgtaaaaagaggtgatgaagaagggtgcacagaaggagccattggatagagaaataagacagagagcaagaaagtagttaatttaaggcttaagaacacgactaaacac

SEQ ID NO: 3102 - DNA, 485 bp, Arabidopsis thaliana landsberg
  unsure (1)..(485): unsure at all n locations
aatgaagctgtgcattgtacttcttcaattttaacaacattcaaaagactactgtaggtaaggtatcatctgaggaaaagcgcatgcaggtagcaaacgaagaaatgaaagccattttggtatgtaactacattatgacatgtataacaacacttatatgagcatgtatgtaacagaataatgtgtgaccaactactaagatataatgatgtgaccaattacaagttgaaagaaaccttgtcatgatttaataatagtgttctgttgttaacttacttatcctttactgaattgtttttacaggaggaaggctgtatctgatcatttcaacatgatctgaagacaagaatggtggataaatgattatctttaccatttacagaatatactggatagtctagaagaaannnnnnnnnnnnnnnnnnnnnnnnnnnaatgaaacaataaaattacttcattgcagtttttaacttctatacttgatt

SEQ ID NO: 3103 - DNA, 628 bp, Arabidopsis thaliana landsberg
  unsure (1)..(628): unsure at all n locations
aaaagcaaccttacgcgtttgggaattgaagtcttaaatccatatggctccagtttttttgagcaacgaagctagttggttcctgactggaagagacataagttgatttgcaccacctacgagctcttgccctataaagacagctggcacagtcggtttgcacccaagctctacaagtgctcgttcgatctctggtccattagacatttcgtctagctcatacactgttgaattcgcaccgtaaccagatataagcgacttgatcgagtgactcatacagcaggacgtcttgctgaatatcaccacgggcttgtcttctaacaaatttgatatcttctccattttgatattatctgaatgtgctgtgtcaagaaactcctgtgtgtatatatcattggctgtaagtaataaggacgatctggtttggtttgagtctcggttcaaggaaagtcattggtcatttatatagaaattttctgtttgggaaaaattattgataggccctcttattttacatgacttgcttgttaaacccaatattattttaaattaatgctttatactnttgattttgttcagattgggacataatctaacctncatatgagatcacattgataagacaacc

SEQ ID NO: 3104 - DNA, 393 bp, Arabidopsis thaliana landsberg
  unsure (1)..(393): unsure at all n locations
ctatctggcgtaacctccatgctacctcnaatcccagctcctaatagaggagatataggagggttctccaaagggaactgctgtcgtcgaggaagtggaagagaaggcacgacaatgcagattctcagctcatacacaaagacccaagcgccctcttccccatcaaaacccaacatggaaggaacagactagctcagttccaactgtctaggcctcaccctcgccatagtaacctgagatttcaaaacaacaccatcaagctaccaggaagcccacatcacacaccgtaaataacagtcacaacgaacagaccaactagactagcccaagtatgctcagacggacacaatcacaagaacaggagcgacatgtcctcaaaagccaactgttctc

SEQ ID NO: 3105 - DNA, 564 bp, Arabidopsis thaliana landsberg
tattgttttgcagcagaaattaagtacctgcaacaaaagtcaaatcaactagatcatcactcaattgcaatcattaattcaatatacatgatggaactaaacatggttcgaaaataggcctcagtgactggtttgattcttgcaaattaccaaactgaaacaaaggaatctgaggtcgaggttgtttgccttggtttactttcagagcaataaaaatatgttgataaagatggtactgatgtgcaaacctcaagtgtgtcgaatgataagtaaaggatcttaacattgctaattcccataagaaaatctgctgcatttcccatcattccttgtcccacactttttactgatcttcttgccttcgtggtctgacaaggtgtcagtcgaagaccgagcctggcgtcaacaagcgaatccaaattcacttttggatacttgattgcaacaacatcagtaaattctaagtaaacaagatttggagtatcaaatgatacactctgaggattataatcaataatctcagaacagattgttactctcttgagagtcgggttagacacagag

SEQ ID NO: 3106 - DNA, 205 bp, Arabidopsis thaliana landsberg
  unsure (1)..(205): unsure at all n locations
gaggcctttaaaattnacattcaagttattatcaaatgtactacaattacaatcctctctaaatttctgatttacatttccaacaatcacgaaagaggaaatagnnnnnnnnnnnnnnnnnnnnnnnnnnnnnnnnaaagctcataaatgcatcatgcacaatctagagaaaaaaaggaaggacatccaacccaaattttacgct

SEQ ID NO: 3107 - DNA, 559 bp, Arabidopsis thaliana landsberg
  unsure (1)..(559): unsure at all n locations
tgcctctggctaaagaaattcgagggtatgaggttcccctggtacctgaattacagaaaattatgagctatctcatagccactgggaatcaaacctaggtcctctgtaagagcagtaagagctcttaactaccaagccatctctccagcttctatgatagcaattcttgggaccatgactagggcaactcttttttttgggggggggtctctgtatagccctggctgtcccagaactcactnnnnnnnnnnnnnnnnnnnnnnnnnnnnnnnnnnnnnngcctctgcctccaagctttgggattaaaggcgtgtgccaccacgcccggcctctagggtaactcttataaaggaaagcatttcattggggctggcttacagtttcaggggtttagtccactatcatcatggcaagaagcatggaagtatgcaggcagacttggtcccagaggagccaagagttctacatcttgatttgtaggcagcagaagactgtgtgccacacttcatgtaatttgagcataagagacctcaaagcctgcttctaccatgtcacacac

SEQ ID NO: 3108 - DNA, 450 bp, Arabidopsis thaliana landsberg
atcattttagggtgaaagaaattgctctaattcttgatctaaccaaagtttttttggaatataatagcaataacaatctcaataaatgtcttttgcatttctaaacggttgcgtttttaccgcaacttttcattaaaatatttaaagtttgttttacggtcgtgttttttttgtcaaatatttttaaaatatttatggttatgttttcggacagttatacttgtgtaactatagccgtatctttttgattctgaatggttgtatctttttatcgtaactttttattaatattatttgcggttgtgtctttttatcgttatttttgttaattgcatattttggtaaaacttatgtaataattcaaatatttgaattattattataataatttaatacataaatattaggcttgggcgtttgattatgctgttctagcctcttaggatccat

SEQ ID NO: 3109 - DNA, 461 bp, Arabidopsis thaliana landsberg
tgtgcaacgtgagaaagaagcagagagactaaagagagaaagagacttagagatggagcaattaagaaaggtagaagaagaaagggagagggaaagagagagggagaaggatcgaatggcttttgaccagagagcattggctgatgcacgtgaaagattggagaaagcatgtgctgaggccagagagaagtctttgcctgataagttatcgatggaggctcgacttagagcagaacgggcagcagtggagagagcaacctctgaagctcgtgaccgtgcagctgaaaaggctgcttttgaggcaagagagcgaatggaaagatcggtttccgataagcaatctcagagttcaggtttctttggtgaacgaatggaaatatcactttctgataagcaatttcaaaattcagtctcttttggtgcttcaagatatcaagattctcatggtaaaaatactctga

SEQ ID NO: 3110 - DNA, 473 bp, Arabidopsis thaliana landsberg
tcgagcacacatttctactcaatttctctctgtagtcataactcgcagcagagaaatagacacctcgaagggaaaacaatggagaagctttcctcagctgagcaaatctcttcgccaaactcatcttcttcgattgtgatgcgacaatccctaaatgaacacagcttgtcattgttgtttaaccttgaagacggagggatctcgcgtttctgcgccgttggatcattttggtaattttgacggtcaagatttcttcttaaatattccagttttaataaccgaccggttcactctgacttctcttctctggtacgatttggtttaatattgttcagttaatgtctcttttgttcaggtttatgagcgtaggtaaagatgcctcttcaccttgcttttccataaacagaaacattatctccatattgtcaatacgagaatcagataaataaaccattagacggaagaacaacact

SEQ ID NO: 3111 - DNA, 528 bp, Arabidopsis thaliana landsberg
  unsure (1)..(528): unsure at all n locations
aagctattcgagaggaagcttggaagatcctaagcatgtgcttttcttgaggtacgaggagttgaaaacggagcctcgtgtgcaaatcaagagacttgcagagttcttagattttccattcacaaaggaagaagaagatagtggaggtgtagacaagatcttggaactttgttctctaagaaaccttagcggtttggagatcaacaaaacaggaagcttgtcggaaggagtaagtttcaagagttttttccgtaaaggggaagttggtgattggaagagttatatgactcctgaaatggaaaacaaaatcgacatgattgttgaggagaaacttcaaggctctggtttgatattgtagagttcatatctctatgtatatgtgaacaggtttaatctcaaacctaataatgctgggnttgttcttttcttgtatgcaatgtaataaaagttactttgatgtaagggtaagagtttaagattctgagcgatgntgtcgttttgtttcctttgataaatcaataagctagc

SEQ ID NO: 3112 - DNA, 538 bp, Arabidopsis thaliana landsberg
gtcaacactcaacaaccctatttatatattacgggctacaaaggggcatttcattggcaagtaccattttatcttagcatccaaaaagagtgtttgatcatttccccacaaaacaaggtaatcggaattttcttttagggtttttcgggagatcagtttaccaagaagatgaagaagaggcaagtggtgataaaacagagaaaaagctcttacactatgacttcttcttcaagcaacgcccgttacgttgagtgtcagaagaatcatgccgctaatattggcggctactctgttgacggttgccgggagtttatggcaagcggcggatatgatgctttgacgtgtgctgcctgtggctgtcaccggaattttcaccggagggaagttgacacggatggtgcttgtgagtattctactccgtatgcaaacaactgatgaacgaagatggaaaaaagaagaaaagccgagagaggtaactgaaaacaaagaatagaggaacctgctctggatttggtctattgtttcatattatatcgag

SEQ ID NO: 3113 - DNA, 793 bp, Arabidopsis thaliana landsberg
caccgactatgaaagtcgtgtccacattccagccttcctatttcttctccttccttatattcctcctacagtttttgcatcaattttagcaatcagtcatggttattaataggaagaatcaaaagtgcaagtcattaacaggattgcgatacaaaattttatgcaaatctgatattgtttacctgacaaacacagcatggttctacttcttgtgaagatctagtactacttttgtacttctgctgcttcaatcggtttgatatggtttcctcgttcaaaccggtacaaacatctccaatccgttcttctagagacaacagctcctgcagattttatactcatagttagtatgatgagcaaataaatgattatgggtttgctctggctttacctcatatgtcatgttgtcaacatcaagtcgcatgtctctatatcggtcatgaatatcagccgcacctagcattatggactgattgagaagcataacatcctgaaaaaagcatcacaaaaaaagattaaacgatcattcaggtaaaatctttttgtattatacgtaaatcgaaaacagtacctccaaacgcaagttccctgctctacgcatgtgctccaagatgttacggatctgtttcagaagagaagcacagtctcagctctatattacgcagttgctcaagaaaactatagggtttacagtcgatatgaacataaatctaacaccactatctataagaaacacaaggtaacactaatcttgataagagactaacctcggatgcccccattctggttcttc

SEQ ID NO: 3114 - DNA, 4315 bp, Arabidopsis thaliana landsberg
ggcatcgataaagtgtggatgcatggcgcgatctcacagtctctctgcgacacgattatggaaatccgtagcgccactcgtatgatttgggcctccatagagaaacctttacagatataacgacaaggcacgggcaaggcaagagcacaacgacagacgctctctcacccctggcgacctgtctgtgcatgattattgccagaagctcaagacactctccgatctcctcgccaacgttgactctcctgtctctgatcgtgtcgtcgttacgcatatactcaatggactttctgaaaagtttgacaacatcatcaacatcatcaagcatcgccaaccgttcccatctttctctgttgcccgatccatgctcattgaggaagaacgtcgtctctccaagcaggtcaaaacaggatcctctcactcagccaactcatcgtctcccaatgtgctctatgtaacgtctaatggaaatcaaaactccatgtctcgcgacaacaatcacaacacttatcgtgacaacaacaacaccggctaccgcgacaacaaccacaacaactacaatgggcacaacaacaatggtagaggtcgtggacgtggacgttgcggtaccggcagtaacggcagtaacggcagaggtcgtggacgccaaaactggcaatggaatcctcgcaattggcagacacaacaaccatggctctcaacaccaaccccatatccacactggccacaacaaaactggatgcaaagaccaccgatggcatacttgacagccacgaacccagcagcagggctccttggttcttctccacaagcagctatggttggttcgactaatcaattgacgcaaattcctgcaaaccttgctgcagcttttgggactacaactatgccagatcctacagatgcaagttggtacatggacacgggcgcgacaactcacctcaccgcgcagccaggtaccctccattccctttttaattcgagctcatccccatcggttgtgttcggtaatggatcttctgttccaactaaagccatcggttattcatttttgccttctaaaatacgacctctccatcttcataatgtgcttgtttgtccttatataatcaaaaatctcgtttctgcacgtcaatttactaaaaataattaagtatctgtggaatttgatccatttggtttttctattaaggatttcaatactcggacgaatcttctccgatgtaacagtgatggtcctctctactccatcacgtcgccaccattatcatcatcatcatcgtcatcacctccacaagtcatggtagcaacggttcccgattcttcattgtggcaccgtcgtcttggccatttgggaaacacaactcttcaatctcttatttcttctcgcttaattaagagtttgtttgccaactagtacgtttacagaacataattatgaaactagtacacttactatttacaatatgaaatgtactacaggtggttattgttggcttttttgttaccccggttctgacactacgatttccatgtaattacaaaattgccagtgaaaccaaaaaaaaagaggtttcttctcgactcttcatatttctggtttcttaagaaagttgagagaagttggtttctgtattatgaagaatatctgcaatgacgaagaagaagtcgagtaaatcgaagacaataagccctccagtggtaatgaaacaagaacccaagcggcgaaactccagagcagatgcacagagaggtaagtcgtaatactgatgacggttcctcaagcaattttcgggataatttctgggttaataggggttcataattaggtttctgggttatttgtagatacgcatgcaaaatctctggctaaatctccggtgagtgctcgagggttaagagacgagtctccaatttcaccagcgccggcgaaaactccggcgaaatctggaggattaagaaacgaatctaaacaaggtaaacaaactcttatttgttgtcccttgccggtgaatttgatgaatccgactctatcatcaccgaacattttttttgatttggtttttttctgagatgaataataggagatgagagatgcagagatagtgaatttacaaacccgagcctcccttgccgtttgatgcctccagcggagttcccggatggggacgccttaacatacactcaaagccggagtatttgggaactctggtggaattactagagggttcagaggcgtgggatgagcttattgcgtcccaattcaaaaaattgtttgaacttccagttgctaggtgtcatcactctgcaaaactcattcatgggatgcttacaagacagcttctgacgaagaacaaacatgaattgtggacagtgtatggagggttcccactccggttctctctccgagaattccaaatgaccacagggctgatttgtgataagcttccatctgaatctgaggtagaagattaccacgacccagcatacctgtctgtttggaaccggctgtttggtgcgaaaagtatagtcacggtaatggatgtgatagatatgctaagggaggatgctaaagcggagactcggaagcgattctcaacatggaagaagctgagtcttgcattggtagtgctgattgatgggttgttgtatgcagcaataggaaacaacatcgggttacacgagactttgtagaaatgctgcatgatatagaattcttcttgtcttacccatgggggcgagtttcttttgaatcaacaatggaacggtttggcccttctgctggagaagaagatccaattgcggagctgaaggcccggctgtctcagaaaagcagtgtctgttatgggttccctcttgcactccagctcctggtactcaagtccgttcctgccctatgcagtatgataaaagacactgttgacttcagaaattttatccaaaagctttttgttgtccttggtcccacaattcttctgcgggaatcagatgttcttgacgctgagcaaactgctaatgtaagtaatgttgactattggcttttattctaacattatagcgactgttttgaacttatagatttagggaattgtacagaacaccttaaatccaaaagatgcatcaatagtaagctaatgtgcttttcttttaatcatgtagctgtctgtggaatatacactatatcagtcagaaactgtgaagggggatctgtcgtggccggatgaagaagaggatgaaggggtggagttgataatctctctgatcaagcagaagcaccacttcaaggctgaaacatggcccatacacagcatacaatgctcttccaaagatgctccagcagcagacgccgagtatgttggcgtagcgcttgatactgatgatgtagagttcgtagggacacgaactgttgggccagaagacaaatgtgaaccaagtaaagctgtgaaacgggcaaagaaagaatactaccccatccgtctcaagcctttcacgcgttcaagtaagaaagaaggattgaatgttgaacccctgcctactcaggataaagctgctacacccgttggaaagactgtccataaaaagacagcaaagcaagatgcaacgcagactgatcaagcaagctcctcttctcagtttgttactcatggtgaattggctgaatgaagaaatggtttactcaacaacttgaagacctccgctacaacataagtaaggatcttttgaaaaatttgaaggagaaggccaccgaaactgctgcaggggctcctgagacccctaaatcgaaaagcaagaagaagaaggagacaaagcaacctgttacacggaaaaggaaaagagaggaggttacttctttatcttctggaagctcatcctcggggctgaaccatggaccagctgtggacactgacataggtgtagatggtggaggaactgtaaatctagaaggctctgttgatccatgggaactttatggatcagcaaaaaatatttcagaggtaatacttacatatacaaaagcaaaacatggttttatgtagatttttgcttatttaattatgcaattctccatgatgatacttttatgttgggactttatagaagatagctacagagatccttacatctcccattctaaaagacgggctaaatgaggaagaatcagaaacagcccagaatgaaaaatgtgcagaggtattaatttcgcgagcacatgttgctgcttgtgtgttaaccataaagctaacccttttagtttaatgttattgcataactttggtttttttttgtaagccacaagaaatgggaagagagagcc

SEQ ID NO: 3115 - DNA, 447 bp, Arabidopsis thaliana landsberg
gaaaaggatggcgcagatcttactagcatctgttatatgccttagatacgagttatgataggtggatgtctgtttatatccggcgtaccctattaccacttttggtgatgattatacttttacctccagattagctgcaatgtgcctgatattcctacacgtttatgagatctcgcctccctctatccaggtgaatgaagaggttccatcgacatgattaatgactacgaaagataaaataagtcagaatttaatccatggatactatctacatcctgaactgaatcatccgggagaattcaagattggcacaacgctgagactgacttctttggataagcctgcgtcattgaacactatggatgaatctcgcgtttaccatgaaaggtctgcactgaggttggactgaagtctggttggatgctataaaagagtgtatacttgcag

SEQ ID NO: 3116 - DNA, 751 bp, Arabidopsis thaliana landsberg
aggcaaacgtatcctcatcgatccaatcgacgaccggatcagtaaactccccgacgatgtgttggtcatgatcctagcaagtttgtccactgaagatgctttgaagacaagtgtgttgtctacacgatggaagaatgtatggaaacaagtgccttacctccacttcgatttgctaagtgctacatacgagagtggacttatcgctgctctttccaatagtgttgcggaatcgataacccaggtttctctccatttttccttattctgctcttatgagtttccagtcaaatgttttgttttttatctgtctcgtttcccttaacttaactgattagattgcattacattttgattcgtagaagaaatgttatacgtgaaccaattgaaatcaaatgcacttgcttatataaatatgaaagtcacatgtttaactttgtggttaggtgattatctggttttatcttattttcccgcaataataaatggtaagcataacggtatttcaagcgaaaacatagattatttctttaaattagttttcatttaagatttttcacgagtattaagaaaacattcattgttttcattctaattactgtattattttagttgatatcatcaattaataagcttaaagaatagagatagaattagaaaatctatcaagtgcattgaaaaccgagaatgacaactaattcaaataaaatttaactttaaaacgacagctaatacgaaatggagggagtatttt

SEQ ID NO: 3117 - DNA, 211 bp, Arabidopsis thaliana landsberg
atggggaaatccaggggaagagagtccatttccataattcagtttttgcctctcgcgtcagagatcagggctggggaatcctcagacttcatcagagcagatgcatttcccatcacctattcaagtaaaaagttgttgaaaaaacccatcaacatataatatcaaacaaaatgtgtgcgagcagagagatagagagaaaccttccccacag

SEQ ID NO: 3118 - DNA, 615 bp, Arabidopsis thaliana landsberg
  unsure (1)..(615): unsure at all n locations
ctctactatcttactttcatgttttaaaactttgcacttatattttctttcttgtaacttgtattttcaatccaggcgagagagtaagtttaatcatctaatttttcttactactctactacttaccgaatttatatgcttttatctttgaattatttcaaaagttataattttacttagtagttacttatatttatcaacctgggatttaaaacgtatttttgttacttatttttatcaacctgggatttataacgtgtggtatcaaaaccaccgaatatttgtctattatatgttacatgtttttatgtttccactaaatctactaaaactaaagattttatgtgtaaactaaacttgaggttttgttaaatctaagcttccagaaccttgtcaagagtgttgatagcataggtgttccaggcagtaagtcccgaagcaaggagtccgttggtaagccagtgcattatccgtcgaaataagatcgggttagttgcatgttagcatgagattaagttaactttaagcatgttatctaanggtaggaagtgggttaagtctaagcatgcatcttcttttgcctctcaaaaacaattatttcaatagtaattatgt

SEQ ID NO: 3119 - DNA, 402 bp, Arabidopsis thaliana landsberg
gagttgctctaaatgttggagacatcttatgatgacggaggctttttaggaagtcctcgaacagtgggtgacatcttaaaagacggcggtggaggagagaaaaaattgttgcacccaaacttactacaatcaacagagcgtgaggctggagaagaacactctctagatgatctttgacgttctttaccggcaatacaattcatcgagccattaaccaccacattgtctcccgaaagagccacacatctcggggcatcaccggtgaagaagttggacgagtaagtgaagttctcaaggttagagagctgacaaatgctgcttgaataactccggtgaatctattgttagcaacattgagctgttccaaactcttcatgtttcctatgcttgatggcaatggac

SEQ ID NO: 3120 - DNA, 449 bp, Arabidopsis thaliana landsberg
aacctaaacttatgttccaatctcatgcaacgactcgagaacgtcgtcgtattgatgagacgatagaagatgtcgacgaaccattggtgctgtggtcacgaccactcgtcattagattattgtaagcttgtttttgtgcgcttgtttgctttttgtatattcgacataaaacccaatcatcaagctgaacataaaaacagtttaaaatatgttattcgttgaacagtataattacaattactatatacttatctttttggatacatcatgtatttaactaaatttataccttggtgcttccatttcgacgagagggttcgatgagacggtactcatgcataatccaattggttttggttccttttggagcttttccaatgtaaaacaccaaagctttcttgataccaactcttcttccctccgtcgagataactttatccggaccggtg

SEQ ID NO: 3121 - DNA, 574 bp, Arabidopsis thaliana landsberg
  unsure (1)..(574): unsure at all n locations
caaagatgaatcaatccattagtcaagagctcttagttccattatcacatattatatatttgtctgattcaaatgttctcaagatcaacaaataacacaaatgcatgaactcatcaaacacatttctttttcatgtcccagtttctatatttgtatgcatcaaaatgttctcaagatacacaaaatgcaagaatccatcaaagactagaaaaaggttngatctaatttcttgttcatatcccaaaatcaaacaagatgcaaattcaaaacctaaatgattatttacaacaatatttctaaattcttcaattcatatccagataggtatacttttaatgaagctgaaagaagaaagatcagttgttacaattgtagccaaatctgttttttttagctaaatctagatgaatattgaataataatcactatcaaatttagtggttttggttgtaaattcaactaanaaattttgtggacatatttattttgctgtttttacgtaaagatttgttaagtccttctaaatcctaaaacaatgttctgccttagttaaagtgatcttgtcctcaaattc

SEQ ID NO: 3122 - DNA, 584 bp, Arabidopsis thaliana landsberg
acaaaacccaggaaggtttgaatgaaatttttatttatgaaagccttcctgaattatttgacatccttccggaatttggtagttaccgggttgaattttttttgcgggaatattttacggaaatttttttgacgggaaaaatttggcagaaaaaagttttggcgagaaaatttttatggaattctttttggcggaaaaaattggtacggaaatttcttggcggaaaaattttgacaaaaaaaattggcggaaaatatttactttgatttatttatttaattaaactatttatttatatttaatatctaattaaagttttgagtgctatttgtggaatttttcaaaagagatgctattcttgaaaaaaaaactttttaatgccatttttgtaaatccctttttttatattggtgattttgttgaatttagtatttcataacggctaaaaatccaaaattatttatagaaaaattttcttagtgtaactctaatgattaacttggaccgtattgcatagtcttaaaataaacattcattaaaatacattcgaagatggataaaataggctttggaaaaataatgtc

SEQ ID NO: 3123 - DNA, 634 bp, Arabidopsis thaliana landsberg
cctaagaactaatggaaacggaagcttctgggtgtacaacagatcggaaagcaaaacaattattgcaaaatgctattatggttcttgataaaagacattaagtatttgatggaacatccaaagatgactatcttacgtacaaacatccaactaactacacgttgggcaaatacgaaagaataaacactcatcgagcaaagactatagtctctatcaactagtaaattttcaaaagttcgtgaagaacacggcgaaaatcgaaaacaaaaaaaactcccctattttcgagaaaattcaatggatagtgaaagatgttaaaagtctctgatgaggaaattgctctgtattcattctaatataaaggcaatgtagttacaacgtattgagaggtttcttagatagtcggaaaaacggcgaaaatcaacccaacctttttgctggcggtttttttcaacccgaactttaaaaccctgtatttatccacctaaactacaacctatttcaaattccaaacctcaactacataattgttagccgatgtcaacataactcgtgacggcgttatgaaaccgcttaaccgtgctgagtcagcgacaccgtggcatcagagctgttcaaaacgacatcatttaac

SEQ ID NO: 3124 - DNA, 529 bp, Arabidopsis thaliana landsberg
ccctcgttttgacgtagcatataaacccgtgacgctctggtgtcggaggctattacatagtaagaacacaatatgcatgtgaagttaactccaacagaaacggtatacaataggagcatgcttaaaccaacaataacaaagaaaaaatttcggatgatagtaagaacgaaccttgattccagatatcgttctcaatatctccatggaaggcattttaagaagatgaatttgattatcttcacaaatcacctgaaagtttttgatcttagtagagttattgaaacacttcatttcctttctacggttgttgtaagcggaaaaactcttacagaagaaagagttgaatctgaagagaagatgaaatacaacaagggagatccaatctttggcaaaagttgcttcttccctgtacctagctgccaaacaacaaaatcacctgcctttacccctaaaagagtcacaagcaaaggaaatatagcataagaactcaatatatatatataagaaacatgaattccttatcaacaca

SEQ ID NO: 3125 - DNA, 192 bp, Arabidopsis thaliana landsberg
acatacccgttgagactcttttcttttaagtgctttttacaatcgctctcttctgtgtgatgaggctttatactctgatggaagaatacacgatcttggtacactctcatagcgtctcatcgggatctgacagaaattcgttttcggtatcacactatcagaaagtactctctgtcattaattatccgaact

SEQ ID NO: 3126 - DNA, 570 bp, Arabidopsis thaliana landsberg
  unsure (1)..(570): unsure at all n locations
ggggaacacatgcaccgggtcgatgttcttcttggcttaataaagattgttatcgccggagattctggaagagaaccttatatcgttgcacataaccagcttcttgctcatgccaaagtcgtccatctttaccggaaaaaatataaggtgagttctctggttgaaaaaaatataatctgacatctgattccaaataattttatgtaaccatatgcaatgtttcctcacaacagccaaaacaaagaggagagattggagttgtgatgattactagatggtttgttccatatgatagcactcaagccaacatagatgcgactgagaggaacaaagaattcttcttgggatggtatatctctcaatatatccaaaaataaataatagatgtacatttatagaaacttattaaggcatgtgtataaaataggttcatggagccactaacaaaaggtaaataccctgatatcatgagaaaacttgtgggtcgacgccttncaaagttcaatgagaaagaagccaaacttgtaaagggttcatatgattttcttgggatcaactactacccaactc

SEQ ID NO: 3127 - DNA, 571 bp, Arabidopsis thaliana landsberg
aagtctatccatacccagggtggggttttgtttttccgaaacacaatccaccctgaagatataccagttcgagaaaaaacaaaacataaaactgatcaccggtaacgacggagagagatactgttgttcttcttccaggttgccctgcgggaaggtctgttcttgtggttgttgtgaccctttccacgaagaccacgattcttctttccttcggaggtgagacctctgagttctctgtgcttgtgcacagggttgcagatccagttgatccttggatcatttcggacggcattgtgtgcagggtctacaaggataatctcgtagtacttgtaggtagagtcctgagaaaaccagagaaccaaaccattactcacttgattccatactattaacacatttacaggatggcatagcaactagtaactaaaaacagtgtgatgcatacctcattgagccagtaggagttaacaaccctaaggcctcccagtttgcgacccgcacgttcctcagcaacagatctttttcttaccttgaatttgagctgggtcactccctggttggtgggtttacc

SEQ ID NO: 3128 - DNA, 717 bp, Arabidopsis thaliana landsberg
gccgcgtagcgatcatagaagcagaagaaatgttgataacgttgatgtcttcctcttcttctaatggatcgagcatgatgagttttcacaagctggacaagaagctttgcaagaagctgaaagaggttcaggagataaagagcagaggaacattcgatgtggtggttgagaatagtggcattggtagtggatcgatgatgatttcgaatgttgatagagatgatcagacggttgggttggaggcggtttccgggctagtgtggaggtgtatgacggtggataacaccgggattattgggttgtacggcgtggaaggtgttgggaagacgacggtgttgactcaggtaaacaacaggttgcttcagcacaagttaaatgggtttgactttgtgatttgggtgtttgtgtccaagaatgtgaatcttgaaaagattcaggacacgatccgagagaagatagggtttcttgataggtcgtggatgagcaagacagaggaagagaaagccggttagatcttcgagatacttagcaagagacgattcgctttattcctcgatgacctttgggaagaaagtcgatctaaggaaccaaaaaaattactttgggattcaaagaaatcctggcgttattatttggaccttggggaattcaaaggtcttcttttgggggtaaccccttggggcccttaaattcttttaagggaattttgaaaatttt

SEQ ID NO: 3129 - DNA, 533 bp, Arabidopsis thaliana landsberg
ttaacaattatgacttgtgagctaactagcttgtaagtcgtattttaacattgtagcacttaacacgattgagtcttattctaacattctaaacgtcaaaccttgaagctttgaactagaattaagaaatcaacaaacgcgtttattcttcatcaggatcataaatccacaaacacgttgacacttcaagatcataatactaagtttccaaacacgttgatatataaaaacaaacatcgtaattatttgcgaagagtaacaatggtggctaggttcgagaatcaagctcctgaaaatcttcacgtaagtatccacaaaactcaaaacttaaatcagaaaatctttcatcgtttctcctcaagttcttgttggtttatgtctaaaaacaaaacaggggaagtatcaagcaatggttgtttgttgtattcttggaatcggatctcttgtttcttggaacagcctgctcagtgtcggagattactactaccaagtttttcctgtttggttcacacacttctattagaaattgtctt

SEQ ID NO: 3130 - DNA, 503 bp, Arabidopsis thaliana landsberg
ggtgttattgtttcgttaaaaacttggtagaattcaattttgaaaccatctagtcctgggtttagctttgttgggatactttttcttactcgttcaatcttcttactcattatagacttgttgaggctttgtctcttcccagttgaatcttctttctttctttctctttctttctttttctctctttctttctctctctctctctttctctttccttccttccttccttccttcctttctctctctttctttctttctttcttcttctctctttcttctttttgagatggagtctcagtctgtcacccaggctggagtgcagtggtgcaatctcagctcactgcaacctctgcctcccaggttcaagcgattctcatgccttagcctcccaggtagctgggactacaggcgtgtgccaccacacctgactaatttttgttagtagagacagggtttcaccatgttgggcaggctggtctcgaactctgacctaagtaatccgc

SEQ ID NO: 3131 - DNA, 206 bp, Arabidopsis thaliana landsberg
tataagaaaaggttagatcaatactcaaatcgtttcaaacgcaactaattaatattccccattttcaaattattattgatagggaacttgtgaacgcaatgcaaaactctaaagaaaaaaatagcgctttgcatttgcagtttatacactcattttcgcgtttataattaataatttacactcgctaatatgattgtcaacacaaa

SEQ ID NO: 3132 - DNA, 1809 bp, Arabidopsis thaliana landsberg
taatctagaattgaaatttctaaacttgaattacgagacaatcattggagctagatgcattcaatttcacctctagtgatatggaatctactacttgtcttttagagcaagttgcagcaaattttcccttcttatgacatctataacatgttggttcattttattttaaagaatcataggactcacctttctttagtccagcatgcggttcaacatatagttcaagtaccggtacggggcttgtgttttcttttgcacatgtaacgatctcattcttcttagtgggatcttgattcgcaatttgattggaactaacacatagatttgtacagttttctcggcttggttcctttggatagtaagtgtgttgactaggttggggaagactgtgtggtgcgtttaatgccccacgttttgagagatggttccttataccacagtctacctttttcttctagactccaccaacgttttgcccttcccatgagttgttcaagagaatagtggagcttctattctttaggaatggaatagtacttaaagtacttatccattttgagttcccattgtagactaattcttccccttctcatgtcttgcaaaatcaaaagattcaggtccaaaatacttataaccattttctagaaataaccttagttttgtttggtaggttcgggtggggttggatagtagtgggtcttgtcgagtgccatgtttcagctcacctcctaataaattactaatccttgagtctctcttagctaggtaatcacgtctaccatggatatggtttacgccacattgatgttctctgagtcacttctttagtcacttccggtactactcgtggatatgtgtgaaagaacttgtgtctcggttttgcttgacgtgaggcaacaaagtgtgatggtcgaccttctcttcactccttggaggacgttggcagccatgacttctctctgcttaatataattcgcttttcctgaaaagaaatatctcgagtcaattgatatttcaaactatggctgcaaaaatcatcattaaatttattgcatggtttacaatagcctttattggtattatatgagtcaggcggttctggttccggtacttcatggcaagattcatcctcaaaatctgatttagagtactattcatgccatagtttttcataactctcattgaaacacctctcctggttggtttcttccttctccacatagtattatgtcattgttgctcttttgttttcgtggaattccttgcacaacaagagaatgatgtatcaaaagtaaataaacaaaataaggtaaagatgacaaaatatggaaactttttattttctaaaatcaatgtaaaactaaaattcgaaaatctaaaatatcaaaagagaaaacgaattttaatttttcttttgtagcttcatttgtgcggaacatcaaaaggtatttcaagaagtagatcaacaagtagttcaacgagtagatcaccaagtagttcagcaagtagttcagcgagtagtttagccagtctgtcaataagtacatcatctatatgaacttgtgatatctttgaatccactgtttggtaaattatccttgatgacttgatgttgcctcgttcaaaacctttcttggtaaacccattgggacaaaccctagataagagaaaaagagtgcaacggtcatattcccaaaatatggtgtctcttcttgttggtctttgactccactagaacaataatttgtattcttagggttaatttgctggtgaataattaatcataggccttgtgcttgattgagactc

SEQ ID NO: 3133 - DNA, 244 bp, Arabidopsis thaliana landsberg
  unsure (1)..(244): unsure at all n locations
aatctaagtcttgcgagaatcgatttctttagaaagaatatgtacctttcggagagaagagcgaagggtgcgatagcggctgtggcaaaagcgttgcggtatgcaacaagaacgtaatggctcataccgcggtctaggacggttttagttactaagttcatacctgcgtatcctaattgatgacagaccattgcaaaataaggnttagctgattctgacatccttcatcccatcttaatatttt

SEQ ID NO: 3134 - DNA, 531 bp, Arabidopsis thaliana landsberg
gaaccaaagacggcatgttgtggaagcggaccactgagaggaatcaatacttgtgttatacagaataggaccgtcgcaaggttaggacctgggcgaaaacgttaccgattatttgttctttgattcctctcatttgacggaaaaggctcatcgacaaatcgcagagctgatttggaacgggccgcctaatgtcactagaccttataatctcaaagctttatttgaacttaattaggcttacataaaaatcgcatatataactgacgaggtcactatatattgtctaataattttgcgagttaggataataataaaatcgattacttttttttttttttgaaaaggagaacaattttatggtggaagtaaataaaattgatgaaattctgagttacaaagacaattagatagacacaagaaacaagcatgtcatagcagaaaccttattattagggcttatttgcgttgatctttcttgcaccggaagattagtcgccagcgcgagaaaaaccattaataaccctacaatga

SEQ ID NO: 3135 - DNA, 232 bp, Arabidopsis thaliana landsberg
tatcacttcatcaagaaatgcaaagtggtggtactctgcttttcacaatgtcaccgccatggtcggtgccggagttcttggactcccttacgccatgtctcagctcggatggtaaattcccctaaaccaaaaccggtttattttacctaaaccggatttatcaaatcttaaccggttttaatttgtttttttttcaggggacccggaattgcagtgttggttttgtcatggg

SEQ ID NO: 3136 - DNA, 516 bp, Arabidopsis thaliana landsberg
ctgccaaaaacaaaaacacgataaacaatattaagacactagatcttggtttgtaaaagattgataagaaaaaagtgaaagttgtttaccatctccaaaggaacccattgtcaaaggctttgaaataaccttgctggtgaagtctgcaatgtctttcaaggttagttggtctactgacttcaagaattgatcaactggtttcctgcaagattttgtaaaaaccacaaattatgatgtgtctggaattgaagaaaactatggagatctagtgaacttcttcgggttttcaaatgaagttctgcgtatacatacctctctccgtatgtaagtatctgtctaccaatgtcttctgctgcaatcatctggcacaggaaaaccgtttgaacacattcataacatataatggtttggatcaagttaaacaaattggcaacatttaagtatttttatgtaagtagagggtgcgagagttaaaaatatacccgagattccaaattcatcagaactgcagatttt

SEQ ID NO: 3137 - DNA, 3890 bp, Arabidopsis thaliana landsberg
tgatgttctttgaagatgttgtatgtagcttccatcatagttacattttatccatcctgcttcaggccgtctccagtgaagaatgcgtcgactaccattcgcaataggagagttaaattccctaagacgacgtgtatctccaagagtactccattcttcgacatcgtgatgtgcgcttgatagatctttctcccacgtgtttgcctcgcccccgaatattagtttgtttctgctcttccagattcgccttaaaatccagaagggaagttgtgcctgtagctggttgttcgagctttgcttgtgccattcgaatattatagtcatctttgtttctaagcttacttgtgagtctgtaaggtcttgaatcggaatggttgatgctctccagatttgcattgcgtgaggacaggtgaaaaataggtgatctgtagtttctgtctctgtgaagcaacgtttgcagtacttatccggattgatgtgtcttcgctcgagttcttctcctgtagcaagtgcctttgagagcattctccagaggaaatgtttaatcttcggtgccgttgtcgttttctagatactttttttcaggtgtggatcccctgctgggggtagtgctcgtggttcgacacccgggaggtgtgttgcaagccaataacccgatttaactgtgtaaagccctgtatctgtgtaatgccatcccaaataatcctttgattgtgactggctaatctttaaagccaagatgtgcggaatatcctctggtgctattcgttcctgtactaatcgttcattccatccagttttgtgtgggaggaaaaagtcctgaagcgtttgaaactgtggttgagtgtgatcaagttggcgcggaggtcggggggggggtgtagtggcagccatggatccacccaaggctgaatcgaatttccatctcctactatgtagcgcattcctttttttaatagatctctgcccttcagtagggattgccatccgaaggagctttgtgagccaattgaagcgactaaaacatttgaattaggaaagtacctcccccgcaacatacggtgccattaagcattcaggattatgaagaagtctccaagcctgtttagcgagtagtgcatcattgaatttgccaatatcccgaaatccgagtcctccttcttcttttgaaaatttcattcgctcccaagccacccaatggattgcgtttctttccggttgagtacaccaccaatactgtgaaatgatgcgttcaatctcctcacatatgtgtttgggaagcttgtaacagttcatcgaatataccggcatagcaagggttatagcttttagcaagacttctttacctccatgagaaagaaatttattcctccatccctttgggttctgtctgaccttttcaactatgtactggaacaactcaatcttctttcttccaaattgctcaggcaatcccagatacttgttacatcccccgtcattatgaatgtcaagagttctgcgtatagccgtcttcgtcgtatcttgtaccttttttccaaaatgaagagatgatttactggtattgaccttttgtcccggagctctttcatactgtgttagaatatccttgatagcaagacacgatttcatgttggcttgacagaaaaacagggagtcacctgcgaacagcatcactgaacccatcacgctcaaccattcttccatcaaaacagaattggttatgcttctgctcaaagtcgctcgtaattgttgtgatcactggtcgatgatctgattctattaactcaaagaattccatgtggggggcggggtgttgatttaaccattcgttattcaccaaagatcgatccaagcagcaggcaacatcatgagtgtgttcgttttccgacccaagagaaagggtctcctgtaaacttgagatcatggaagtcacagatttgtatcattttcctgaaatcaaagaaagagctttctggcctcaagttgcctccttttttctcatggttgcctcgtatttcattgaagtcccctatagccatccaaggacctgttctttgtgttgctgttcgttctaatctttcccaaaccaagtgtctatggataggatttgggtgaccatatacacaagataaatagaacccaaatccattaatattaacaaaagtatctacaaggtatggggattgataaagaacagaaacagaaatactacttttccacattaaagcaattccaccacttagaccatttggaggaaccattacaaccctatcataacctacatcgctgcaaatatctctgacgatgtcattcctttgcttcgtttccatgagaacaatgatgtctggagagaatttcttctttatctcctttagacgtcgaactgcgaggtcattgcccagtcctctgcagctccaagcggctgtcctcatggaggaagaggtggttctgggcccaccgcgcctctccccacgtcatttggctgaaccgtctctccagagcaaccactgctttccccagcctcacggatcaccatcttagtaggctcgtgttcttcatcttcttcgatggtgtcctctctcttgcgtttgcccctatccgctgccacatcctcacgaacatagtctctgttcactccattatttgtttccatctctccatggtacgtggagtaacgacatggctccaaatcctggaaatcttccacggcttcatgatgggcatccatatcctctgccccctcattagcattgtggacattctgatctggaactccgttttcctcatcttcattgatctcacgaattatgactccttggttgtggtgctccgcagggggaagatcgtcttcatcattgtcatcatcagagtgatgttcctctcctccgttctgagtcacacaggcgccggtgtcgtgagttaacaaaccacaaacttcacagaaacctcacagccgttcataccggaacctgagcagagtgttttctccagcctgaaactggaaatgcctttggaagcgaagagggagttgagtgtcccaatcaattcgaactctgacaaattccacacgcgccgcagattcagcatcataatccacctccatgaggtttccaagcgatctcccaatgtgagagatgacttcacggttaaggtaatgatatgggatccctcggatctggacccagaaagggatgaaatcgattagaggttggttgtaaagaggattacattgttgaaggataagcattctgtcgttgaaggcccacaatcctcttctcataaccagatccagtgactcttctctcgggaaaatgaattggaattggtttcccccaacgatccgaccgtgaaacagaccgaattgtccccacacgcgaggcatcgacgcaatgattgatctcaggttctgtcttcgtggcatgaccggtcgtcccatgatgaggaaccggagttccgcctctgcattcgccactacctccagtggtagtgctacctatgcatcatccacccccagattgatatcctgaacagcccttctcagattgtcagccatttttgcaattactttgtagaatcaaataggaaattggatactgtgatttgcgacaaagcagagcgaggataactggttcttccgattggatatatgacgcagagtgtccactggaatcctgagagttgcatcccaatgcggggagatcccaggcatggcgataaccgtcgcgcctttggagaggacgactgcccgatcgtcgacaaaagcgtcagcatcactcgggtaacgttacggcagatccatagctagctgtgtatcgcactcacgatggcctttgcaatcggcaccattccttggccatgagtatgaccctatgagattcgttttattc

SEQ ID NO: 3138 - DNA, 357 bp, Arabidopsis thaliana landsberg
ctagaatatattcaatacttgtcatcttttacattatatatttttatgagtattctattctaattagaggtattaattcgttaaggttttagagttttatgttacaaattcacaatattcaagcgttacgttattagcaaagcttgtcttcatttccggtagattgattaaacaagcacatcgaatcccaaaaaaaatggtcattcaggtattttaaattaatcgagttccttgaatcgacgttacgtccgctctgaacactcaattcagtaccttccaaaggaaatgtgtctcatgatctcatgatcaagctgcatctgatagacactgtactatttagcacatatcctgcgactc

SEQ ID NO: 3139 - DNA, 589 bp, Arabidopsis thaliana landsberg
gccacccaatcgccacgaataacactgcaacaataactaatatcactataatccataggtccattgtaatttgtaaaacaactaaaagatatcacgttttttttttgttagaaacggagtttgaagttggcaaaacgtttcctgcttctatctcttcttacaacatttatttatatatacaacaaagtggattttataggtaattaattgaaagaatcacaattaattgataatttgatattgtgtcttacaataattgggtacgcatgatgtttatccataaaactcaaagcacattaatcttttgaattaatttaagtaaaaggaaacagattttcatcaaaacataacaagaaaattaagctattttttagcaattcacctttcttcttaaataagtttacaaatataatttcatttttaaatttagatttccaattgaattccatcacataataatttagtggatgattggttagactatagatgtagattatttgctgtagaatatcggctataagtgtgtaagctctagatctaaatatgattgtaaatcttggctatactttttgacttgtagatttaaaga

SEQ ID NO: 3140 - DNA, 575 bp, Arabidopsis thaliana landsberg
gggaaacccatctcttatccctcaaaatcagtcactttccatccgttttagcattttcatcttaattgcatttcatgcctcatcactttgcacacttggacatgcctctgcaatggagaaggctctctattttcattcatatccccgtctgacttccacattttcagttgttccttgacatattaattccataatgcaaggtctgtaactgcttcactggtcatttggagtttttttaaggttctaggaatgttcaaaatttaatatgttctaggagttaagttaggcgtcgaaggagggaggacagtgttcgtgtatgttgaaggttcttaatctggtccacttcctcactgttaatgtactcagatctttgcttttggctttttcttttttctccagggtttgctttcgtatacatggaagatgaaagggatgcggaagatgccatccgagcacttgaccgctttgaatctgggcgtgagggacgcagacttcgtgttgaatggacaaaggtaggatacttaccccaggatttatttctgtccagacttagttatgaggtttgaaatactgat

SEQ ID NO: 3141 - DNA, 488 bp, Arabidopsis thaliana landsberg
aacaacaatgttattaatttttggttgtacattcatttgtggtccaacatcatacagttggttttcaaagataaatcaccaagaagtattaattgctctctataatgcaagctcaaataacagggcctacacatttgtatcatctaatagaaactaaagattcctaagcagactaaataaaacaagataaagacgattttgtttacctcggttcttcccggcataacgggcttgccagcaagtaactcagccataatacaaccagcactccaaagatcaacaccagttccataactggtagctccaagaagaagctcgggaggacggtaccaaagtgtgacaacaccactagtcattgtttgcttttgcttagggtcataaaacgcagccaacccgaaaacaggaatctttagtattccatcattatctgtaagaagattagaacctgtgatatcgccgaggcccacagctcgcctatggcaatgctc

SEQ ID NO: 3142 - DNA, 265 bp, Arabidopsis thaliana landsberg
tatgcgtctgagtttgtgttctacaggacagcggtctggtgccgattgtggagccagagattatgttttacggagttcacggcattgacaggacatacgacgttgcagagaaggtttgggctgaggtcttcttctacctcgctcagaacaacgtcatgttcgaaggtattctcctgaagccaagcatggttactccaggtgctgaggccacagacagagctactcctgagcaggttgctttctcactctaaagcttcttaaaaca

SEQ ID NO: 3143 - DNA, 762 bp, Arabidopsis thaliana landsberg
taaataattcagatgattttttgtgtaatcagacatatacaacccgtacatgtggatgcccctttaaagtagtacgttattatataactacgcgatggaagatatacttatccatgattgatttatatagttaatataacacatctgtttattggttatgttatgccatacctgtccatataatcctatccatatatagtataaaaatatatagaatatttaagtttgttatatttatttaaccaattttattggtttgatttttttaatactagccgaaagcaactatattataatattattcaagcgtacctttttggaagagagtaggtaatatcttaactacatgttcgccttcatgtgtcgtttgtataaatttcgtttagttagtactatttgctagataaatatttaagatggatttctgggtaatcagatatatatagtccttaattgatttatataggtaatctaaaatatttttatattggtcatgttatgcaatacatgtccatatgttcctatccatataaagtataaaaatatagttattatagtcatggttatatttttttctaattttattggtttgatgttctaatactaaccgaaagcaactacattataatattattcaagcgtacttcttgggaagagagttaatcattttacttggggaaattaactccctttcacgtcattttgaaatttaaaaaggtcgcggccatgcagtaataacaaagaggaagtataattacacct

SEQ ID NO: 3144 - DNA, 724 bp, Arabidopsis thaliana landsberg
tctcctccttcggtttaccattccccaccaccaccaaagaaacactacgtgtacaaatctcctcctcctccagttaagcactactctcctcctccggtttaccattccccacccccaccaaagaaacactacgtgtacaaatctccaccaccaccggtgaagcactactctccccctccagtttaccattccccaccaccaccaaagaaacattacgtatacaagtcccctcctcctccggttaagcactactctccccctccagtctactattccccaccaccaccaaagaaacattacgtatacaagtcccctcctcctccggttaagcactactctcctcctccggtttaccactctccaccaccaccaaaagaaaagtacgtgtacaaatcacctcctcctcctccagtacaccactactctccaccacaccatccttacctctacaaatctcctcctcctccataccactattagatatctctatcacggtaattactctctcaatacttacatctacacaccttgttaactcaataattaaaagcctatatggatgcatgcatgtcaataattatattgtatatttaatatacttgcaggagaacacgatgtacacaagaagacaaagacaagacgaaaccagtactggtgattgtcataagagaaaccaaagatgaaagagagaatccaagcagagaaagctttctcatcattttca

SEQ ID NO: 3145 - DNA, 1704 bp, Arabidopsis thaliana landsberg
  unsure (1)..(1704): unsure at all n locations
gtcgtcgtcgataatatcaatcatatcaaccatcattttgttgttcgcagcctcgttctggggattttgtactcttctcgaactcgggactttgatctcggctgggataactgcttccattccatgaaagagagcgaagggggtctcaccggtagctctcctaggagttgtacggattgcccataacacgttttgtaactctccgaaccaagctcccttatactcatttagtttttttttgaggttcgagatgatcgttttattcatcgcctcggcctgaccattcccttgcgggttnnnnnnnnnnnnnnnnnnnnnnnnnnnttgccaccctgcacaaaaaacttcgtactgttcggagattaactgaggcccattgtcggttactatttcatacggcatgccgtgcctacagatgatttccttccagatgaactggcggacttgtacctgagttatgtttgagtaggttgcagcttcaacccacttcgagaaatagtcggttagaacaagtaggaatctgactccccgagttgaaatgtgaagtggtccagtgttgtccatagaccatttcatgaatggataaggtgacgataccgaagtgagaagttcggcgggttgaaggatatacggtgcgtgcttctgacactacgcacagcggcgtgcatacgcttcgcaatccgctaccattgtgggcaagaactaaccgtacttttttactttaaaggccaaagagcgacctccagagtggtttccacaagttccatcgtggatttcttttatgacagtctgagtttgttccccgaaaatacaaatagcatccggagccgagatgattcttctgtataaaatgccatatgctacgcagaaacgagcacaagtggccttcagctttcgagcctcccacttgtcggtagggagtaccccgttgaggatgtagtctcggatcagttctctccagtctgccccccagtcgtgaggtgtctgattatcagggacttcgggactatttggaccagacgattcttcggtaattggaggcgggacaacctttggaacgtcgttttcgtcatcgagctactgctggtcgggattgtttgcttgtgcttcgagctgcctacgtattgcccgagtaacaaaattcacttcctcaagtcaaatactgggttgagctattgtttcaacggggattatccttgttatagttacttcggacgtagaagccaaagcggctagggcatcagcagctgaattttctgcacgagggactttgattaactcgaacctttcaaatttgtcgggcagggggggggggagatccatgtaagtttccatgcgattatcttttgcctcctaatctcaagaatactgactagcaaagagttgtgagtcaaagtgagcctgcaggttacgtacacccactccaattatgaggcgaagtccagctagcaaagattcatactctgtttcattgttggaggcgttgaaagcgagtcggaannnnnnnnnnnnnnnnnnnnnnnnnnnnnnnntaaggcgaactccggctccagaaccgtgtcttgaagaggcaccgtctacatgaagaatccaaggttgacttgggacatcagatgcagaagtagccaatgggagttcgatcaggaaatctgcgagaacttgagactctaagcttgtacgcgcacggaactcaagatcaaactc

SEQ ID NO: 3146 - DNA, 2406 bp, Arabidopsis thaliana landsberg
ttctttgcagaagatcaagaatctccacctctctgtttttgataccaaatccatttataaaacaaactttgaaacaagatcgatctgattaagaatttaggttaggattaggaatatatcataccttgagtaagaagctaccattggactctgtgtgggacaacgaggaccttcatcgtatccttcacatataacctctccattatcatctgtgtaacagatgatcccttgtatcggatcttcaaaaacctgttccaagaaaaacaatttcaacattcatatttttaccaaatggttgtgtctgaattttcaagaaaattatgatccactctaaggagaaacaaaaagagagagatgatcttacaatgttcttggtggagtatctgatcggctgaggctgtgaaactgtggctttcttgactttaacatgaacttgactctgttgaagcatcaaagtctttgctcttactgtctttggaacaaaacatggtgttttaagaggaagataaagtttagttgaatatgccatagcttttgtgtttctttctttcttcaagaagaaactttgatctcttctttttggacaactcgtttggtttatagttctcagagaagaaaattataaattccgatgattgattgaatctgagtttaattaagatttttttttaagtcaattatatatagacgcaaggtgaagataaaataatagccaataagagtggcaatctcattaacaagtttggttgtctttttcgtggggtttggttagttcttctaatggtttcgtttttcttcttacgtttgatttttgatgaacgtcaatgtgaaatcgttgaatatatctacacatatacatgtgtatgtctagtcaggtgtatttttattacataaatttttataaaactattattgggatttcttactccgttaatgtttaaaaaatattactaagaaaactacttagattctgtaacacttatatttgagaaacaaaatgagttttataacccgattctttgacaaaataatatgagacaaaaacaaataattccccaactgaaatagtttatagacttaagacattttaccttccttctgacctaaaaaggtaaaaaagacattttaccttccatcgaaacaatgaatctgtcattacattaatttcaaaaacttgcgtgctattagatgcacttgcatttcaccaattttttcgttatgttgagataatattaatattagagtaaaagaaaaactaaacatcgagcaaattagttgttacagtgcttatctgccgtccaatgacgaattaactcctacttaattaaaccgtggcacgtgtcgatatatcaagcgtcatgataagcttttaggagcatttttaattgcaaaatgacaataattggtgttatattattgctatgatttagacaagagactaattgtaggctaaacatggagacatcgtcgtacagtttctcgggaaaaaagctgtctcatcttaaccacaataaggtacgttcgagtcagaggctccgagcaatgatatttatttcgctggttttattactaaagaaatgcaaaacaatactataataacaacgaatattcctccaccaaattaattaaactcttgcgaatctttattttgttttgttaaaagaataatacaacagatttatacaagtttctgagtcatcagcaactttgtagtcatcatcttcaataagagatggcttagccactcccatataccaaatatcacctcctattgatcctagacactgtgtcacctttgcgtgatgtgtgatcttgaaaaaccctaagggtgtttctttcagcctaagtatatagagcctgccgtcaaattatatcacacattgagaacaaaccaatctgaaacctattaacctaaaagctaggactttgttataaatctcacaacttggaactaatcaatacaactatttttggaaccaacaccaacacatatcacatagaatgataaattagcgtcaaagatgtggaatttaaacgcagattaacaaagaatctgagttttagagattcgggaaagagtaccgtgggattcctttagagagatccaattgagcgtcgttgggaccgtaaccggccccatcacgagaggcttcgatgacttgaccatactctgcgaaggtctcaggtgtaccttcgattggtatcagattcacttccaccggagatttcgccatcgttgacttgacacgcaccacaagaaaatgaaagtgattatctgagcttttttattcacgcaaaatgtttttaaaataatcagaaaactccaataatgggttccgttgtgaattttaaaaaagtatggaattaaaaaggaaataacagaaaatataaagggcttaaccgggg

SEQ ID NO: 3147 - DNA, 201 bp, Arabidopsis thaliana landsberg
actttccgtttttcttaacaacttttgacacggaccgtgagtctggcaacaaggcggaatcttagctgcttgcgctggtaaagacaacatatcccagatactcacggcaatctctgtgcgttaatcttgattgcgaaactagcctcatatctgggaacctagcttacccatattatctttacaaacacattgacgctttaa

SEQ ID NO: 3148 - DNA, 1561 bp, Arabidopsis thaliana landsberg
acatcatcatcagagttttagcaaaagtagtcatcattgttcgaaatgcagcggaataaaactaacgataaataaacagagagatggggaagcatgtcccatcactcctcatgctcctcctcagccgaggtagggtcccactcgactgtccaacctggtggcaagatagacgcccaagtcactccagcaaccatgtcctccagagaacctgtaaaaattataccacaagcaaggctgagtatactaatattcagctagacttacccggtgtgaggagtctactcctctacctctagacatgcagttgtttggctgaggggtttggtttgccaaaaacactagctgagtctaaaatcaagtttagcttttcaagttttagtgtgactctcttaagactaaatgtgcacctaactaatcatacatggtatcaaacattttagcaatcaacatcttttgccaagtcatctcatttccacttgttactcaatgtagcagcatggatcaagcagtctcattagctgcaagaagcagacgattcgaatcgagtttttatccttgcaaggtaaacctaaacacacgacgtggcgaggctatccgtccccacacacatcaaccttcccccatcgattcctcgtcagcagagaggggctcaccgccttggcgtacaatgcctcactgaccccgactgccgtcgtgcagtgtcctgcacttgtacccaccataaccggaatgggagaccacatctcaggtcgcgtgaggagggcaatctgctgccaggttcaatcaggtactaggcttaccgatttaccatatttctcggcatatgtttagtacgttcaaacgcttgactcacggtaccacaccataatccttattcaaatttttatctcgtagacaactaatccccatggattgttgtccacaaaccaacatcattatgatatgaaagtgggcacaaccaattcctgacctcgcgcgagtgctagaaaaatcactcgacttctatcgagatcctaattaataaagcagctactcggcctagcatactagtattcatttcaataggattcctgagatcatgcaactagggtttcaaacaattcctacacctaagtgcacaatcaatcctactgttggggacttgttctcaaatgctatgaattaagaacaaggcaacataaaatgttaaatttcaatgcccttcgtccactgaagcattatttccccaaggatgtacttcagacgaaggttataatgtcagaattacgaaggttatgccttcataattcaactcacaaagataatataaaataacgtaagacataaggcattaaagacaagtaaattggagataaatagcatcatttatatactataaatttaagatgttcaaacataatatttagacacatttatacctctgccttgacaaagggtaatttccgagtgatgcaattgcaattacagggatccgtgaacagtaaaggaatgttgttcactatttataggcacaggacacagcccgtgaggaattacaatcgtacccctcggtaaaagttta

SEQ ID NO: 3149 - DNA, 586 bp, Arabidopsis thaliana landsberg
  unsure (1)..(586): unsure at all n locations
aaacagaaacgtctataaaattttgatattgattttattaagttcacatgttctattttattagaagcgtttatgttctcagggttagaatgctaacttctacaaaatttagaatacctattctatactttgttctttcatctataaaattagaatttattttctaacatttacctatgttctaaaattgttagcaaacacattcttatttttttcttttatattctacagaaaantagaaaacaaattctatgtactttataatgtatttttaaaaaagaataaataaatctttaaataaggtaatcaaatattttagcaatatgatataattatgtgtgatcaaattaaatatagaagttaagattgcgtcttaatttttgagaacttgtattctaattagtctataattctcctctttatacctaagtgaattagattacacttatatgttcttctaattgntttctcctttttcttcttccttcgactctttntttttctatcattcttctttcaaacatgttgcagatttacgttacttgtggtatatgaagatcttttgctaataaagagtggaaagtta

SEQ ID NO: 3150 - DNA, 569 bp, Arabidopsis thaliana landsberg
tccgcattttgttaccattcatataaaagtattgttttagttgtgctgcggtttaagtcctaatacagatttatttgtagtgtcatgtttataaaccacattggaacccaaactctaagagtatataagatcaatgtgtaattaataaattttatagtcattcggataaaacttagaaagataacaaaagtaagaacgagtatttttaagcgaatactctttagatattctttgtattgatcattattgacaaaccattaaacatttttgtagaccctaaaatccgatatccaaaaaacaattcttattcataaactcataactcgtaaaacaatgcattagagcatcttaattttttcttgtaaatatctatatattattattttaatataatttacttagataattaaattttaatttttttaaaaaaaaattgaaccaatataaaagagacatgtgtctcattagtctcttatataaatcctaagtcttttagataagagttcttcttattctctctcttcttattctacttttatatgcataagatcaccattattggtagtatt

SEQ ID NO: 3151 - DNA, 741 bp, Arabidopsis thaliana landsberg
acatggttgatagcaaaccggacagaacaaattattaaataaaacccgtattataaaacttctaacgaaaatccgtaattctaatcaagccataaccaaaatagaagtcacataatcctaatccaggtcgtctatgtcttttttttatgacttggtctgttaaatacaagcacaacaaatttaaagttcgaaatattatgttaatagtcaactctaatattccccaagtcacaaaacaatgacgaaaataaaagtcacaaaataaaaatattccccaagtcataaacaatgaatgacgtaaattctagaggcattaaaatgaaaaaaaatgaaaaaaataaaaaaaataaagacattttcaaactctaaaacatacagtcacattcattgtacaaaagcttttgattgaataaaattttgcattcaattcaaaaaaataaaataaagacattgctataattaacaacttcttaaaatgcgtgacttttgcacccttgactttacagggtcataatattacttataaataattaacaaaaagaccaacaactgcaataatcaatttcttcctattattgaatgttacttttctataaacctgaatctgatgatagaaagtacatgaattgtgtcccactgcataagaacttaaagcatatgcagtaggagattttcaaaaaggtacaacaatataaaaaaaaagtaggatagagataaaaatcgggtattattcaagaactt

SEQ ID NO: 3152 - DNA, 151 bp, Arabidopsis thaliana landsberg
aaaggggcctgatgctgtaagtctttgtacattggctgatttttattcctgttttcattaggctaaaattgggttgatggatgtcacaggccgcccaattgctaaaactcagagaaaggatggttaacagccgcgagcttttccgtgacac

SEQ ID NO: 3153 - DNA, 4936 bp, Arabidopsis thaliana landsberg
  unsure (1)..(4936): unsure at all n locations
caaatgttttttgaaaatattttcaagattatatcattgttacgacagttgtggccggacattcattgaggaaaaagaaatagaagttaagctagtatcaagtcatgtgactcaagtttcttttcttatttatgttttcatttgttttatagttgttctcgtacttgttatgttgtggagaatatttggattttacttctctgctttatcctcatgtttgaagactaaccaagctctgtcaaagtattctttcaactgaaggatatttgataatcttcatgtggggcacaaacagagtttactgaagttgaagagacaaataggtcaaacatagttggcatgatatagattgatttgctgaagttgaagaaacagacttcaaacagagtttgctgaagttgaagagacaaatcaagctatatcatgcaaactctgtttagcttggacgattaggtgaccaaataggtcgaggttaagagacaacgatgttggcaaaaactaaaaagtaaaggaaaggatggtgcttaagcaacaaaaaacaaacaagctccctctcgccgagcaggagaaatgttggagagctcgtataaactcttagctcgtataaaattattaaaaggcccataattttttaaacaaaaacttttattataaaaaaccacagatttagtaatttgtcttttttattctttaacagctctcgagagttgagacaaggatatgctctttctccttatctctttgttatatgcatgaacttattgtcgcacatgattgatgaagtaccagtaaaccaaattgatataccatgatttttaccatttttagttatgaattaggtattggttttagagttcttttgttatttctagagtcttttttagttgttttaaagtttttacacgtttgagatgcatttggagattatggagcattatagagtaaaaccgagaacttatgatgcaaaagtaatctggagactaaaattagtatatgtgtcgattgacactaaccctggtgtctgtcgacaccaatatctgacaggaattcaatttcgaatcttattgaagttttgaagatttccaaatttgccgcagaacttctctttattttcaaagaagtccctgcacgttttatgaacttatatatggatttttaaaatcattgtttagacctaacacttattatctattctatttttgggaacaaaaccctgtggagcttcttctagagaagatctttctaaactctatactcatcttgtttcttacattgatttctacgttaatcatgttttgttccttgataatcatgtctgagtagttctattgatgggtttagggattctcaattagggatttagatgaattagtacatcaaaaaccctgttaggataatatatttagaatttttcatctttgattgttctaaatgctagttctaaagtaattaactagttattgattntatgataataggtatacccaccataggtacctgttaccagaactatcttaaatgagcctagtatctagatgcatgctagcgtcggtttagatacttaggtgaacttatcaaacctgattagaatgcttgcttaattctagggatttacaagagagttgggatcaatactattaagcataatgagtagcacgacacatcaccggttactctatattagtgatttgaattatagaatggttcgataataatcctactttactgctagaactactattctgatatttcctaagaatttctctaaacctgacgttttaatcatttgaatctacgaccaatttttattgcttttttgtcttttattttataatattttctgtttagcttaattcgaaactattagtctattgtgtgatctgagaactttgtgggattcgatctctaagtgttataacaacgtctttatttgagagagtagtcattagtgtaatttgactcacatcaacaccaaaaacaagagatgcatatgttcatttaatttaatagacaaattgcatgcgtagctgtcggttaacaaaactgagtcaaagctatgtcttaatcatgggcatgaccggttctaaaccatcatctcccactcgcacattatagtaaaaattcacgactagaataatctcacttggaatcattttgctggtattggggagaatatctactagaaaaagtcacgactgatttggctccaccttagtgatcacaactcatcattttttcatcgcacaactatggctcgtgcgtcgaaaaattctatcaagaaactcgtttctacaaatggggcagttctaacagattttgtagagaataaaaaagatgcagctcacatccaacagtgtgtccaagcaaagccataaaatatcaaagaggtattagaatagtatctagcatagattttggattacaaatgtccggaaagtactgctgcatcattagttcgcgacattacacctaaagagataaaatgtgcactataagaaataaggacattaatagcacacggaaaatgctactgaagacctttcgtagcgtatttataaacgctgttacatgcggagctatagtagagccccccctatcatagcagtttttagtagctatagtatattgacatattatagcattgaccttccgctatttattaattataactagcgcttttttcctgctactatgttcgtttttatggcaattttgctatgttgtatatttggtaatgatgacacattatatgtgctgttggatattgttttgtgacattatgattctcgaattgtacactattgtagcgtaaaactatgctataagaaagtgatttgtagccctttggttttgctactgtgtagtatttaatagctattataaattgtcataatatcatttacaatagcatctattaattgcgatttaataatgttttagcctttttatcgtgctatacgtgctataatatatgatttattggcttttatattgtactatctaatatttattttgacagtgagaaaatgctgtgtatatatattgcaagatatatacttttaacatatattgaatctattttgcaatgaatcaaatataattggttgtttgaaatattgaattgcacaaaatataattagctttaatttatgaaagacaatgaatcataaaatatcatattacataaagttaacttaacaaagtcaagatattacatgaactaaagacacattaaccattaaaacatgaactcatggattcctgcgccttgactctcctctttcctctcttgggcgtttcttagcagtgttgttgtgtgcatcctttttcatgtttctgaaccattgcttgtagagtggatcaatgtcttcttcctctagttcgatccatattaagtagccaaggtgaggacaagactgcctaaactctagctctgttatctccttcagttcatcatccacctttttttgttgattgttatttgcctgctgttgtggctgttgtctgagccttggtataacgttcttagctgggaggccgcatatgagtcctttagcttccattgaactagcggtttctgcagtaccaatgagaaagacaacaccacaaatctcaaacttctccgaattagaatagaattaacctaagaaaagcttgaatcttaagtattgcaaatacaaactgaaactagcaacatacaagttcaaggagacagttccaattttgaagccaatgagatcatacatctcaagttctctaaattatcatctactcattactcaacctacgaacagcttcaatattaactcgaaaggcgtacaagcatatcaatacagatgcagtatgagtcaggatccatcgtggactaacctcaagaatcaaacaagtttctattgactggctataaccagtgctttgttctgtagtaacagaacacaactatcaatgtcaacaaatcattttcgtttctatggctcaacttccacaatcaaacagagactataatacagagatattgacagtcctaatgcattgaagctctcctaaagttaacataaccaaatcgatttccaataaacaaagtgaggaatatcaacaattcatgcttatcatgcttcaatatcacataatccatagctaaaaaaaagtgtctgcaatagaaaaaatgttaacttacagtgattcttccttcaatccttaaatctttctacttgaacagccaaatctggatccagagaccagcgaacacatcaaaagacgaactaataaactaaaacgtcagagagaagttgaggaactcaaaggtttgtagattcaaccttttgattcggatgattatttacccttagatgtatagtaatcaacggttgatatgaataattaggtgatcggcaccttaatcaattagccaatgagataattgttcgtacaaataatctgtgacccttagatgtatactaatcaacggttgatatgaataattaggtgatccacaccttaatctattagccaatgagataattttcttacgatttgtatgttaatagcataatattaagttaattttctttgtattaattttggaatatggtgtaaatattaaataaaattaaagtttcatattttcgagttttaaaaattttaaaattatattatccttaatcaacaattttatacactaaactgactaaatatgtaagattagtgactaaatgtaatattgtattttttcaatactttaatatgtatactttatatctatgaaatgaatacgcataaaatttaatttgttataagttttacattgttaattttatgtttcatatattagtgtaaaatgctttcaactaagagatataagtataaagtatagagttcagggtttagggtttctatattatattactatatgatataaaatttattattttagaag

SEQ ID NO: 3154 - DNA, 549 bp, Arabidopsis thaliana landsberg
atacattgattgtaaagtttattgtttctgtaaactttgatatgtacaagtttttcttttatccattgtaggatatggaggtgtcttagttaaagccaatctcacttgtggttgcttgaggaaagatttatttactcggtcccaagatggtaagacattgacttttcacctctcaggatctaagaaaccacttgtttagaaacttaaccaaacgtgcaatgatgaaggaaataatactagtccgtagctagtttcgtcaacagtgatcatgttctttggttttaaaaggtatagacgcaatgaaccccagcattatttttacaccaacaactaacaaacccaattatacgtctacatggtaacatgcttcatgttttaggcttgtgaaacatatgtgaatttataatttatacatatctgacctttctctgaagactgaccaatgagaaataagagcctgtgggaccttttgctaacaaggaagcgtgtgtcccactttctacaacttttcctttgtctaaaacagcaatcgtgttgcagttctggatc

SEQ ID NO: 3155 - DNA, 540 bp, Arabidopsis thaliana landsberg
cgcgcctgggagaacggctgggtgaagccgcgcgtggcgcgcatcattaccggttagaaggtggccgtggtgggctccggcccggccggcatggccgccgcccagcagctcgcgcgcgccggccacgacgtgacgctgttcgagaagaacgaccgcgtcggcggactgctgcgctacggcatccccgacttcaagatggagaagcatcacatcgaccgccgcgtcgagcagatgcaggccgagggcgtcacggtgcgcaccggggtgatggtgggcgagctgcccaaggactccaaggtcaccaactgggccaaggagaccatctccccgaagcaactgcaggagcagttcgatgccgtgcttctcacgggcggcgccgagcagtcgcgcgacctgccggtgccgggccgcgacctgtacggcatccatttcgcgatggagttcctgccgcagcagaacaagatcaacgccggcgacaaggtgaagggccagatccgggccgacggcagcacgtatcgtgatcggcgcggcgacaccgca

SEQ ID NO: 3156 - DNA, 603 bp, Arabidopsis thaliana landsberg
ggttaccgtgcatcaggggtcacttcagcggtgaaactggtggacagttcaatggaactttttgagtctacttctgatcgtccttcttttcttgagttctcataaataagacattctttaagttcacttataacctgagacatggttggtcttccccctgaagaggggttcacacatgacatagctagctcaagagccttccaaacggaacttgagtcatattccccattcagctttggatccattatacttttaatatctcctttagtaagcatcaaccccacccattcggctatatgaggcttttcacgaacttgctgaatcacaggctggtttgtgataatctctaacaggacaatgcccatactatatacatcacttttttcagttagccaatttgttcgataatatctgcaaaataagcgtcattttaactatcataaccattgagaaagtaataattttttagtataaacaacaaatctacttactcaggatcaagatatccaagagtgccagcagcatttgttgaaacgtgaaattcaattccaactggaaaagatctagaaagtccaaaatcagcaagtttaacgtggaaatgct

SEQ ID NO: 3157 - DNA, 552 bp, Arabidopsis thaliana landsberg
atccaactatatcgaacgatttattacgtcaattattctctcagatgaatattttgtcaactttttaagaacagtaaaaaaatcaaaaaaaaaaagtttaaacaaaacaaatctgtcaatgatccaaagattttggtatttcttgtggatcatcgttgtaagcattaataagatttattttttggagaaaagaaactagtgaaaaaataagaagaaataaatcttattaatgcttacaatgatgagttataagaaataccgaaatctttggattattgacagatttgttttgtttaaaccattgtttttttttttttttttaagaagttgacgaaatgttcatctgcgagaataattaacgtaagaaattgttcgatataattcggattaagttaactataatggactgatttagattgagcaggaattaacgttgaaatattcacattggctaattacattaatccatttttgcgttgaataaatgacgacactttcttttcttcaactatttaagatataattgattactcctactactattgttatcac

SEQ ID NO: 3158 - DNA, 1152 bp, Arabidopsis thaliana landsberg
aactaccctattgtccatcttgtaacgccctgatatacagaattatttaataagtccatttgcgattacaaaaacaattatcacatgaaaatgaaatcataactttgtctttgtgtgagagttaagtatattaaattatgtttttaaaataatggttttatataagtcttccccgtgacaaacgggtttgttgaaggggcataagaaatgttcacatggccaacgtgaaagaataaagaacaattgttcctttttcgatatccttagttatgtacatattgggtaaccgaatgttaacacaaatctctatatactatatagacttaacatttggattctgtgccaagaaaacctttatacttgtcaatttttgaaattttaatcatcgtgaaggcccgtacatatatattgatagaattcataaatttgggagtaatgtctaacaaacttataccaccaaattgttgttagagtaaatattttgattttcgatatgcagttaccaactaagttgttaattagaacgatatattcttagaaattgccacctaatttgaaccatttaagtgttctcaaataatcaaatcatatctataaaaaaattagtcaactaaacccctattaagaaaaatcaacaattaaaaccttctcatttttctcctaatgaatatcctataaatacccactaaacacttatatttctctccaccaatctcaaagcaaattatatacactactacttcttgatcttttgtactatacaaacatatggctccaagaacctctcttgcactcttcgtttctctcaacctcctcttcttcacttgcacctctgcaaccacagggacttgtcctatacagatcagtacttgtgccaatgtgctcaatctagtggacctaacattgggaaaccacctgtaaagccatgttgctcgctcatccaaggcttggctgaccttgaggctgcgattggtgtctgccctgaccttagggctaacgttctcggaatctacccttacgttcctatatctctcagtaggactctctccgacgctgcaacagacggctactcgtctgcattcctatgagcctacgcggaatcagcggatatgcatactctacacgcgcgccagagtgtttttataatcatta

SEQ ID NO: 3159 - DNA, 345 bp, Arabidopsis thaliana landsberg
tgtttttgcttcaatttttgtcactcatttggcttcggttcctccttaagaaactgtatgtttaaccatgaaactggtcaagtttgtttgattatccaatacttgtcgttctgaattcgcaactgattgcccttttcttgttttttcaacaggacgactcttctattgggaatcggtcaacgtcctcaagtttatcatacatcttacggtttctaatcagatctttgattcatcaaaatcacctactagggttgacaaagtgcatgcttttcgatcattgatcagagagctttcacgatatatttgcacgataatggccatggctccagtaatacagctggtctt

SEQ ID NO: 3160 - DNA, 497 bp, Arabidopsis thaliana landsberg
attctcaaatctacattatgtgattcttgatgtacctgtatgtacaatttgtattcaactactaaataaaattgtgagcaagaataggctaagaaataatactaatacagtatccttagaatacataattgtatattattaaggataacacatgtaatgtttaggaaagatggccaatgataaatcttataagaaacctaacaaatattaacaccggtaagatttgttctcttaaaacaaatcctatataaacaaaaatgaagaacaaggacccaacatatgtctctcatgtgaccgaccaacacatcctcagttgacctgtctttggtctaaccttgtcttcctccacaaagctaacagaaataattatgaatgttagtctcttccatgtgtcagtatattattggatcttgttggagcaacttgacaacatataaaagcacgaggcagctcaatactatcattccaacaagagaagtgcttgagagaaaaaaaaa

SEQ ID NO: 3161 - DNA, 756 bp, Arabidopsis thaliana landsberg
aaccatccgacattgagtgaagaggcaaaggcttggttgattgagaaattgaccaaatgttatgtataacagagatctttgggaagcaaaagaaaatggtgaaacagagatccggacgccggcaaaaccttctattacttgatttttttttcagaaaaagaaggtaggggattggtttcggtaatcaggactaggagagaaagcttaatgtatttatttttcctaaagcaacaagcaccttctattgctcatcttttgttttcctcattggtttaactattatatcagtagataaggttcacataaatacgtgtagttaaaaataaattaaaaaactaataatgttatttgaattctaagtagtactccacacattttttataatatttactctgtattttttgttttagtcttatacattacattttttcaatacaattttacggttttatcaataaactggattttaattatatgtattccatattaacaaaaaattctccaaatatttattaattaaaaattacaagaaattacataattaaactttattaattaaaaattataaaatatttatttttaaaatatcatgacatgccaggaaattctttaaaaagggccaaggggcataaaaaatgctccatataaaaagggatacgaaaaatgaagtttcattatagcgttacgtcaaagtgtttgtgatcctactttatttgtatgtagtggagatgaggtagctttgaaaatgttaaattt

SEQ ID NO: 3162 - DNA, 380 bp, Arabidopsis thaliana landsberg
ttttcattcctttgtttattaatttcaatgaacttgtctgttatctaattagctttatcattccatcattccatgtacagttcatccagaaagctggaatccaatgtggtcagtgtcaaggtataagatctgatgtacattcaaattgtgttcaagttattaaaataaacagagtaatggatccttatttgaccaatttgtttccctgaacgcagcatacttacaggacttctctcatttatggtaagcttatggaacgtttcatcttgcagagcctctcagtttatccttggtcattagatctttactgatttaacatggcaatgtcttttttagtttttactgtgatattttattctccattgcgttcattaaatttc

SEQ ID NO: 3163 - DNA, 598 bp, Arabidopsis thaliana landsberg
  unsure (1)..(598): unsure at all n locations
tcttgttaatctcgttggtgatatggatttgcattacaaagttgctgtgcctatgttcttcctatcgatggaggggcctcagaattttgacccggttctaggctcaatggtatataagtcagaaccagcttcgctaaactcttctttgagtttgtattcnnnnnnnnnnnnnnnnnnnnnnnnnnnnnnnnnnnnnnnnnnncaagatttcattaaattggtgagggagatggcggaaggtgatccgctattgatggaattggtataatgatgagtcaaaacaagagtaagtagctgcagcgatgaaaggatgtttagaaacagatttaccatttgtgttatacaaaaaaatgcttcattgattttttggttctcttgatgtaatttctccatgtaattcgtgatgtttataactttctcagctaaaatgttttgaagaagaaaggtcacttgcaatcgtgaaaaataatcactttgaactagaccgtgttattgtgacgcttatactatgcgcattgctctgacggccaaacattgtttcatccaacacacaacaaatggtcaacgaagggaattaaggtttttttttttggataca

SEQ ID NO: 3164 - DNA, 1213 bp, Arabidopsis thaliana landsberg
  unsure (1)..(1213): unsure at all n locations
gcgaacatgccagggatcgacatgataaaaaatgggtaagattcgattatctatagatgatttcatcttgcagagcatggctaattcatcaaggcaccagcgagagccagagtagttacgcgatatgacgatgacagaggccgcagagtcctccatgcctgccttaagacttgaactgatctcatctccgcgttccataccttcgttgtcgcggaagacccgaactttatccttgagcgctttatagagatggtctccgaagttatcgcgcgtgtctgcgccacggaaactgaggaatacgtcatacttgagcctatgcggcttcgaaacaacgccagattccatctccgatctcccccctccttcttagtcaactctgacaagacgacaagttgtagcagaaagccagaaactctccgtgaagtctgtgttgctttttgttcaactccgatttcttgtaatcactccaatttctccggctcaagggtggtcagagaagaactcacgcacacatgtctgcagtccaatcgatagcttaatttcgcgatcactgtcgacgaattcaccaaaaagtggtttacaaacttttgactacacacgacgaagacgaagcttgcgaattgcgattttgagaaatgcctaaatttgagaaagttctagtttttggcttttcagatattttttagttaaaaagctactttctgttttcttctctcatgtaaaacaaaagtctcgcatttgacatttttaatacggtggcaaacactaattctgaaacgtcacacagtttttaattttttatgtccttattgattagaacgacacgcagtctcaaattccttatagttcattttcttcttctttcaatgtaaatactaattgacttagtgttgataagcaaggtcaacaatcttctttagtgttgaagaccaggtcttactcaaaataataaccgcatgaaatgaatgatttaatgcagaggttacgtgaggaataagtctagagatgaaggataatggtgtcctacctgtaaacaaattcaagggttatttccgatcatattcaaagctctcctgcatctatgcatcttctcttcgctaaatgttntcgaatgttcttcacaatccatcttgtaaggaccgctctgtttacgtaacatacacgtgttcaacctcttaaaagatcggtaacacccgacgacctacagacgact

SEQ ID NO: 3165 - DNA, 607 bp, Arabidopsis thaliana landsberg
cccccaagaaatcgaaactagagacactaaaacaaagaaatccggttccggtgctgaaaaagccaccggaatctttaaccctaggcggcggcggagctttgtagagagaaaaaaaaaatttgttttaagagagagaaggagttgtcgtcagtatgttttcatttctattgcagtcaaaaaaaataaaaaaaaattcatttctattcatccatataaataaaaaccggtggtgttggtttaggtgatctatagttttattaatcaatgtgaacatatattttaattatttcatgaaaataaaaatgaatacaaattctaccttatggagtctgaaacatacgttggacccatagtagaattcgttttctaccttacacattccactagatcaaccggtactaagaatcttccaaacatggccattggaatctaaagcgacaacgaccttgttgcagaaaaagtcgtcaatctaagtacaatcgctaatacattttgactttttcttttgatggtcattttcgcaatttcttcattttcccaaccagttctggccacctacacttatttcttgggaaattatttgtttttcaatccgtatgtatataga

SEQ ID NO: 3166 - DNA, 2668 bp, Arabidopsis thaliana landsberg
ttgattggtttacggaatcatcaattggcgcgccaggtaggggaatataaagaaattctctttacgctcttttcgaaactcccgcaagaagaaacgttgctaccgatcgatgaccccatcatccctccaatcaacggcgacggtacagagtcaaccctccttaacggagaagatccctcttcgccgcagctgaattagctgccaaggcagccgaagatcgaatggctcaggaggcgaatcctgtcaccccaaccatcgctccaccaactttctctctggaggacctcaaagccatcttcgccaccgtgactaaagatctctccgatgctgtcatataaaccaaccgccgattcaccttcgacttcacggacgcacagtccaacagggtcaacaccatgttcccagggctacaccatcatgtcagtcagcacgggagaccacccatgccccccccatgtcgaccggtcacacctctagacctgcaaacttggaccacggtgggcagataaacgatatctttttgaaactccgagagattgggtctcaagtccataaggctgtcagcttggccccgaagatcgatcggatgattgaagaaacccagaagacttctttcacagatgggattacacgcacacgaattcctcaggtaaaactcaggattccgatctatgagggaggaagcgacccaaacagttcatgacttctttcatgacaacaatcgctaaagctcacttcttggatgaataaagagacatcggctgttgccaactctttgtggaaggtcttgttgggaacgccttaacctggttctccagattagaggcaaattccatcgacaacttcacccagttgtcgactgctttcttaaagcaatatcgggtgtttttcggcttggagcctctagttctgatctctggagtatgactcaggagaacggcgaaccactgaacgcctatttaggtcgattcaaggaaatactgtccaaagtcaccatcacggacaaagctgcagtggccgctttcaggaagggattactacaaggatcccaattaaggaaagatctggcgattagagaactactggatcttgacgatgctttgcatagagcatcacgatacgccttccttgaagaggaagatgctaagttggcggggaagtctcaaccacccaaaataaaagacagagcgcgggaagacttccaggagccacgtcagcattatgacccgaaggtgacttccaggagccacgtcagcattatgcctcaacagttggccaaaccgaccaactcaaaaaattcgtattgtcctaagaatggggagatttcaaacatgcccaaggcgaacacgcgaacaaaggacaacacttgctggagaatcatccaaaccaagaggaagatcatgtggaggaattcaggaccccagagaacgaactcccggggcctccaaaaagatggaggggacagcaaccccagcgagctccagaccacccatggaagaatttccatgaatatggccggtctgtccgacgatgaagattcagtgtcagctctaaagaaaagaacacgacaagtatgcagcgttagggtcgtcctagagtcaggaacccatcatcttcacttgagaagacgtgaatggcattcagcatcctcacaacgatgcactagtcgtcgagctggtaatggaggacttcgacgtagaacaggtcttgatcgacactggcagcccggtcaacctaatgttcttgaagaccctcttgaagatggggatctccgaatggaagataacacccaaggtccgtcctttgacaggatacgacggagaggctaaaatgtccataggggaaatcaagcttcaagttcaagcacgcggaatcacccaaaaaactaagttcattgttatcgactcggagccgatctacaacgcaatcttggggagtccctggattttactcgatgaaggcgattccctcaacataccatctgtgcctgaagttcccgataaccacaggaattttcaccctgtacagaaacctaaaggtctcccgaacttgttacgtgatcgaaaagaaacaacgaagaaaggagatcttatagcagttaaagaacgaagagcgagctgcaccctctaaatgctaggctcgccaatcaataaaggcgccaagttgcaagatagtctatgtgaacattgtcgagtcggatccgtctcgaaccgtcagtattggaagcgaactggaaggggagataaaggaggaacatatcaccttcttgaaatcgagaacatccactttcgtttggtccacaaaggatatgacgggaatcccactggaggtgacctgccacaagttccacacagatccgacctttcagccagtttgtcagaagcgcaggcgtatggggaccgatcgtactaaggccgtccaatacgaggtcgaaagactgctaaaggccggtctgatcaaagaagttcaatatcctgagtggctagctaatccagttgaagtcaaaaagaaaaacggtaagtggagggtttgcgtcgactacaccgatctgaatcgagcctgcccaaaagacagttatcctcttccgcacatagatcgcctagtcgaggcgaccgtcgacaacgagcttctgtccctcatgaacgccctctcaggatacaatcagatc

SEQ ID NO: 3167 - DNA, 543 bp, Arabidopsis thaliana landsberg
ttcctccttatttatacacctattgatcaatgtcaaatccttaaatctttcctacaaaacaaaaccaagaatcatacaaaacaagcatcctccaatatgatgaaacaatcaccattctcacttttaacatcaatctttctcatagttgctctttttactgcaactaccgcactcgatcctgcacccgaagacccgatttttgaattgtacatgcacgatatacttggcggaacagtcccacagcaagacccattacgggtttgcttggaaacatctacaacggtcaagtaccgtttgctaagcagatcggttttgttccacgcaaaacggtgtagccatacccaacgcaaatggggcaatgccacggttaacggtatcaacggtattccattaggtactggtttgtctggaacagcgttttctggtcagaatctaaatgggattcagactcagttgggtcctgatggtctgagtcttgggtttggacaatcacggtgattgacgcataatacatccggtctgacttggggtcacacacttggt

SEQ ID NO: 3168 - DNA, 602 bp, Arabidopsis thaliana landsberg
  unsure (1)..(602): unsure at all n locations
tattgaaatcatnngatcgtaaaatggcagaaagacccccagaagaacatccnnnnnnnnnnnnnnnnnnnnnnnnnnnanattagnnattacattaacaacttaaaattaacttgggaaccaagattcaaatgcaaagcaatattatatgaaatatatatgtatgtgtacctgttttgcctgacgcattcccttttccatcaaatcttccatgacagctaaaaatatacgctttcctctaaactgaagttgtgccgcctaattgcataaacaacatatacatatgaatcccaagttaattactagtgaaatatataatgatcatcttcatggttttaattaactaaccttgttttcgctgtcaccatcaaaggatgcaccatcacaataccggacttttactttgttccaattgtaaaagtctgccaataatgatttgaaatcaaagaagaggagaatattccttaaccatttcaccaacacatcacatttctgttctcaataagggatcttgagaaacacctggattttcaagcggtttattggttagtattcctaaaaatgctaactctttctccattaaggtagatgatccataacca

SEQ ID NO: 3169 - DNA, 534 bp, Arabidopsis thaliana landsberg
  unsure (1)..(534): unsure at all n locations
gatttacattgtaagaagaacagagctaaacaaatgagaaagaagaagatttactaaaacagataatcctaacttttttaagacgaaggataatcatcaaagttgcatatgtaaaccgaaaaaaactgtcttttaaagactaatataagaaatgatcataagtttaaagcacatatttgacatcctaatgaagaaacattggcattctcaaatacaaaaaactcaactttgatgatcacccattacagcaaacttatccagtaatcatagttccagctccttcatcagacataatctcatgaagcaaagaatgttgtctccttccatcaataatactagcagtcttaactccttgagctagagaccttatacaacacttcactttaggaatcatcccaccagcaactttcccatcttcaatcatcttcttcactccttttatatcaatctcctttatcaaactacttggatcctctntattctncaagattccagccacatcagtcagcagaaatcagttctcagctccaagcg

SEQ ID NO: 3170 - DNA, 339 bp, Arabidopsis thaliana landsberg
aacaaccattacaaaccacgagaggtaattttccaaaaaatatacatgatcgaaatacattggaagttatcggacctagggtcttatatatagcataaacgcataactaaaacaaaaggactaataccatagctaaagatttgaaattacgttaatcttacaacaccatgcatctatatccgatatgcatataaatggagacacaccaactaagaaactattacagaccaataaactacatgctataatcatttagacattaatattgatgctactcaaatgcctaaagtcatatgaacccgagacggtgacgaattatcactacgtatagcttatgat

SEQ ID NO: 3171 - DNA, 563 bp, Arabidopsis thaliana landsberg
  unsure (1)..(563): unsure at all n locations
gggnngcagcatctgtccttggattcgtgaagctcctcaatatttttctccagcttggccttccaccattcacttatttcttggctggccttcgtgacttcgcaattttctttggcttcggccagttgtttccgaaggtcttcaacctcggctttttgggcttcggcctgagcattgtacttagctttgtcttctttcattttgctcaccaatgaaattaaaattttgtctttctctagaccttcgtttctcagctcaatttcctctgagcgaaggttgctgagagctattgtacaactttcgtcttcggcgcccttttgtgccctcaaggcattgctaagaatcaagccttgcaaagaaaaagaaagaattaagcatggcaataaaatacttcatttccaactttaaagttaacaacttgtgtacctttatattgttgtatgcaaggctatcagcaagatcatccttcgacatggccgaaagtccttcctcaagctttggaaatccatacttgtggctatctccggcaaacggatattctttgtatctgggagcaatatagg

SEQ ID NO: 3172 - DNA, 601 bp, Arabidopsis thaliana landsberg
caaaatcttaatttcattggtgaacaaagtaaaggaatacgaagttaatttcaaagctcaagccaaagcccagaaaactaaaattgaagatcttcggagacaactggctgaagctaaggaaaactgcgcgcttgcataggctaatcaagaaatcagcgaatattggaagaatcatctagagaaaaatgttgaagagcttcgcgaatccaaggaaaggtgcttcgagaaatccttggattgcatgaaaaaattgaaaactagcttcgccaaagtgggtgcctactcttctgaagaaaacttcatacgaggcgaccccgaaggcgtcattgaatggataaatggagaagtcgaagccttcgaagaaattttgagtgattgcggggatgtttacgcgttttccgatgcgcgtggaatttcagccatcttggagaaggctggatgcgatcagattaaagccatggcccagcccgaaaccgccttctccatggatgatacgaaggatacttcagctgaagcaacttgatgggcgggaaattttgcaatgatgtctgggtgaatggtggctgagagatggccacgagattattaaaagagtgaaaag

SEQ ID NO: 3173 - DNA, 565 bp, Arabidopsis thaliana landsberg
  unsure (1)..(565): unsure at all n locations
tcgatcagtaagtctaatcagtacgcatcatctgatttggcttgttatctcagttattctgatttggtcatgatttatagtcggaatttagattggaatttgtctaattattcaacaagaactccaccgcgccatcatcgtcatttcgagctctccgtcgtcagcgattctgtgcggcgagtcgtcgcacgctggcaagcccctgctatgtgcgcaatccctggccctgctcccttttggcgccgacatcgagccccagccgcctcgccggcgagcagccgcgctcccatcctctttgtcgtgcgccctccacccctgctgcttggctaagcaccggcgccccgcttccannnnnnnnnnnnnnnnnnnnnnnnggctggctcgtccttgcaggcgtcgcgccgtcgcccctggccgaccccctctcccttccccatagcagttactgcgtggaagaagaacgtgaggaaggagatgacaatttcttaaaaagaagctcaagcctgatggtacaattgaaaagtacaaggctaggcttgtggctaaaggctatantcagaaagaa

SEQ ID NO: 3174 - DNA, 558 bp, Arabidopsis thaliana landsberg
ctccttacttcctcccaccaattctccaattgaaacttgcacccacacgaagaaggtccgacgaggaagaacgacacttggagaagaggagatgggggggggggggtggcggctagggttgaggagatggctgctgcaaaaaacttgagaatggagagggggcggctgcagcacttggggaagagagaagagggaagagggggggagggtgacggccaaagggaggaagggggcggctccacaaggggccttaagagagggggcggctagggttttgggggggggggaagtgggcttcccaccgccggatcgcgatcaacggcccaaaaccatttctacgccagagctctcgaccccctcgcacacatcgaacataaatttttactgttttacagatgtttcctcctaaaattccaaacctcccatagcacgggacccgcaagagaaaacaaagaaaaaaagagtaaacttcaatttctcttctttttttgaaaattgggtatccaagaacactagccattctcgttcttcctaggagtcattgttgcagtaaatgat

SEQ ID NO: 3175 - DNA, 484 bp, Arabidopsis thaliana landsberg
cttgtttggtcactagtaacacacataaatgtgaattgttgagagaaacatcgatttggtgtatggaggaggaagcgtggggctaatgggtctcatttctcaagctgttcatgatggtggtcgtcatgttcttgggtatctatctatctctatacattttttattattaaaaattattaaacaataaacaaactagaggtgttaatttatctatacattcaaagcgacaatgcatcattctttttttgttcttcccatgttcttgtcctgtctttcaaatgagtaacattatcataaatagcaattggactgcttcaaaatatatacttgtaaatgaataagataaaatacttttatcaaatatttcttggaaaatcaatatttgaaacaatgctctggactcgcttttcaatttgttagtttctttgccaaaatctaaggcctaaggggaacaaggcagctgtctttagttctacttaaacat

SEQ ID NO: 3176 - DNA, 449 bp, Arabidopsis thaliana landsberg
cctaaatttgttaccgccaaaacttattttttgttgttccatataatgagtttatcttgatattcttcttgttaacgtgtatatgtgacgaaggatatttttgtcattaatttgagtcagatgaaaaataactaaaagcaaattttcatgcatagatacctaattatttattcatttgagcatagatttttaattcaccctaaccattatcttattgtagggctagttttaaacaaatttttatagcccacgtgggatgggcctagttttaagaaaaatttacgcatatttaattttatagaattcttatacttggatagtaataatttctgaagatttggctataattatgttcttatagctactaattaggcttaagcaagcttgagttaaagtcatgctctttgtgatgaccatcgaaaccaaacacacaatttgattaagtttta

SEQ ID NO: 3177 - DNA, 495 bp, Arabidopsis thaliana landsberg
ggggaaagattgatcagagctggagaatcatctcatgaggatcatcatcaggtttcagatgatgctgttcttggtgcttccccagttggtaaaagaaggctacctgaagccgaatcacaatggaacaaggtattaacttatagaattggattttgctagaattaggttcaagtgatggtttagggctaaactaagcgagtgttgttaaattggcagaaagctgtggaggaatttcaagaagaccctcaaaggggaaatgatcagagccagaagaagcataagaatgatcagagtaaagagacggtgtacaaggagagctcacaaagtgaagaagcaccgaaagaaaactacattcatatgagggcaacaagaggtcaagccactaatagtcacagtcttgcagagcgggtaaggactctttacctgtatatagattatgagaatctgctctttgttttgcaatactggtgctagaagttgctatttttttgttgt

SEQ ID NO: 3178 - DNA, 619 bp, Arabidopsis thaliana landsberg
aactaactagtagtctacttggccgaatttgtcaatgaatttcaataattaggtcgtataaatagcaaacaaaacatggactcttacccaaccaaatatgcataaataatttacattacagtttcatataaaatacaaactaatggtgggttcttgagagagctaacaagagctgtgtgtgggtgaagaaccaacttgtcaacgaaaccaatttaatggaaatcaaccctaaatttaatgaaaccttggacgaaacttacattttgttaaccagtttatccttttaaatcaaacctgcatagattttgatttaagacttgaaagtcttaaatgatatggttggattgaaataatgagtgggccttatagaacagattaaattatgaacaccacaagtttctttttttgtgcgagtaataaaacagttgcttagaaatttgttgtgtttataaatagacactattattaacacacaaatttttgaatttttggcagatggttacagagaataccaattgtggatttcatccaaactttaggtaattaaatctttattttttttattatgaacacatttgtcaaaaggtctccactatcaaatcttaaattaaactatttg

SEQ ID NO: 3179 - DNA, 548 bp, Arabidopsis thaliana landsberg
aatcctggattcccaacaatgtaacattcaaacatttattttcctaactaattcatataaccccctgggcaggaaatgtataatgtttactccattgtcaatcaaacctgtgcaccagaccctggtctgtcaagaggaatgtcaacagtacgaccataaccaaaaccagcaggttccggaggcaaaggtgatagtctggaattcgaagcagcaggaacactcccaggattctaagaatgtagacaaaaattaacaatcattaggcaccaaatggtcttcagaatattaaaaaaagagcacatagcaagaaatcattgaatagagataccaatagaaaacatcaaagagccaaaataaagaactcgagcacaactctaaagcgatctactcgtgctcatttacgttaatccttagtaacagcagtaaagtaacaaacttttaacgaatttggattatattctcgtcaactatcaacattatcctcaacagacatagcgaaagacagaggcacgttaagcaaacacagaaccaggaacaacccccaaaat

SEQ ID NO: 3180 - DNA, 4743 bp, Arabidopsis thaliana landsberg
ccctttgcctcttctatcctcttgttcatccttacgggcttaactgcctccgctgctcgacattactgattttcttacattgtatatcatacaattcaatcccttctactccaagataatcgcagtctttgttatatataatcaggatttcatgagatgcaaaattgatttgatataatgaaaagaaattgtctgattacttgcatgtatttatctttgagacttcttatgttctttgctgtgcttaattagtctcctatttgtttttcttggagaaaatctaagaaacaacaaagtattgacaagaaagaaaacgaaattaagatcttggtaatcggaagagcatttttctaaaacgtataattgtacaataatccttctgccaccaaaagagtgataacatgtttcaaacatgcatagataaaacataatcttattaatgttacatatctcttcacaaaatctattcttccacatatttctcctaaatagggttttagcagagccaacagaaaataaaatgcatacgatctcatcatcactgtatgatggatttccaaaagagaatgttacatatatacatcatcataattcataacatttgcatcagaccaggctcaactagatgcaaaagaaccaagatgggcccgttgaagtaacttatattttggactgggcctgtcacttggcaactgtgggacccacatgaacatgtgccgaagataggcctgaatctccgagaacaaacctccgcacaaaaacagaagacttgttgcttgcgtatcataatacgacgccgaatctttacttgctcgaacaaacccaaaaagatacatatcacgagattaaaccttatccaactaagagaagccatttttattttttttgggtctctgagttgtgtattgagcttcatctccttcaaatggcttccttatcaaccacttccctaagcttcaaagctccgtccaccacaatttcacaggtaatttaacaaattcttctcataaatctcagtgtacagtttgttctcattctttttttttggaaggagtcttaatctcaacatatatagtttctttgtcgtaaacatttctcttaactataattaagggtggatcctgttatttatcaggttttaaggaaagcctcaagttctcagtctgtgacctttggtcgtttcacgtcttcaacaaagagccttcgtcttcaaatcagttgtgccgtaagtaatcattttgactgaagctaaaatttaaattatatgagaaatgcgataagttaattgtagtatcgtgtgagtgtacctacaggcgaaagcagagacggtgcagaaagtgagtgacattgtaaaagaacaattggctttagctgctgatgttccgctcactgctgaatccaagttctctgctcttggtgccgattctctcgacaccgtatgttacactctctctgtttcatatcattgtcatgttatatttcctctgtttcataatgatctgatgtttgagaattaagcaaaaatatcattacctcaatgcaaaaatatgaattttctgttctgattggttacttttgtgttataagttagtagttactctttaagattgttgggtgaatatggatgcaggtggagatagtgatggcgttggaggaaaagtttaacataagtgtggaggaatctgatgctcaaaacattacgaccatccaagaggcggctgatttgatagaggaccttgttcaaaagaaacccgcggcggaaacttcctgaaccggctgtcttttctttcctgacctattcttgccttcagagcgttttattacggtatattagaccgtttgttatttttatttatttcggaagctaagattgggtgttgacaatgagacaactttggtacgttgagattgattctttgtggtgattggtcttatgacgaattcataaatgtgtattgtttcactaccacctggtcttttctgtatttgagttatgacatcgttttgttagtcgtggttaggttaagttaactaccctcaaagaatgaaaacgagagttgatcttaggtgagttgggtagtatcaagtagggtaaagcagatgtatactgtctactcaaatagaatgggtgtgaaaaaaacattacctgaaaatatgtatgaatgtaatttgactaggatattgttggttttttggacattcttattgggtaatctcaaatatatatgaggtaatttcaaaagtactaataatatggatatccttaaacttttgagtaattgatttttattttattttgtaatgaacgtatttatgtacttattaaacctaattaatttaaactttatatcaatgaaatcatgcaaaagattctaggtctttaattttcttgcagaacaagtcaccccttctcttcttaaactgtaaattttttatcagcactacaattgcaattgcatagatgatggtagtgtaagcaatcttctagccgcttccgggttgcaaagttaccaaatcttggtagattttatagacgatgtagacaatcaatacatatctccgagatgataccacctccaatattttttatacttactgatttttgtccaatcttactttgaaaacaaatatgttcaaaccccctaaaacaacccaatcatgatatgagtagtatttctcatccttgtatgttttgccatatagattaatgtttctaatcctccaatttcgtaatggtacagttgcttgagaatctcaagcaatcatcataaaactatcacttaaatcgatacagaatatcacctaaatcatgttagacatgaagaatcaaagacaagagttcattacaatattaatcacaagctttacattcataaatctaccaaaagccaacactacttcacacataaatatttttctcttgattcatatgtaattcaaaattgaatcgataactaattattagtaatctgtattaatgtacccagttgttatttgtggttccataattaatttaaaaggttttaaaaataaaacaattactaatgattttaaaattgcacaaatgggtttagttgaggaaaaaatatattaaagaaatgggtcccacgttctctcaacttcctctcccgccgcgaggcggtccacgcgtacctcgtttacatcttctcccttcttcttcctcagcagctcaatcgaaaagtctttcccaccttgttgactccgtcgatggcgcggagaccaggaacctccgcttcttcttcacccacgatgtctccgtctcatcggatgagcggcggcggaggaggaatctccggcaaaagcacgctccggaaacaaaacgccgccgagctactcgcgaaggtcatggagaagcgcgaatatgattatgattacgacgatgaagatggaggtgaagatctgtaccaggtacatcttcctcctcttactcagtctcgaagacgagatgataagcgtattggtaagggctcagtcaacgagaaaaaggctccggcgaagaaaccgatcatacttccggcgcctaaatttgatgatgaatccgaagatgatgaaactagagctaattttcgcccaaatccagtgataattcctaaaaagaatgctagggaaccgagaaaagctccggcgacgaaaccggtcgttcttccgccactctaaattttccaatgtgcgccggattccagtggagatttctggaaggaatgctaggggttcgaaagaagcttcgacggtgaaacaagtcgttagtacgcctaaatttgacgatgaatacgacagtgatgaaattacagaggatgttccccggaatccagtggagattaggggtccggtcagaggaaaagtagctccggcggtcaaacccgtagtcgttcttccgactaaatttgacgatgaatacgacagtgatgaaattacagaggatgttccccggaatccagtggagattaggggtaccgtcagaggaaaagtagctccggcggtcaaacccgtagtcgttcttccgactaaatttgacgatgaatacgatagtgatgaaattacagccgatgtgtcccggaatccagtggaggttagggatccagtcagagggaagttagctccggtggtgaaacccgtcgttcttccgactaaatttgacgatgaatacgatagtgacgaaattgcagctgatgtctcccggaaggcagtggagattcctcaaaagaatgaaaagagtacactcagggttagagtcccggcatattcacgtcggaatccgttggaggaatttgagcagaacggagaagacaagcaaaatgttcaatgtgatgtgcctgctaaacaatcggaagctcaattaaagtataagaaaaggtaaagcaaatttttctcaagtcaaagcttcttttgtatatgttgtgtttgacgaaatgactgggaacgaacgattagtttcaggtaccatcctgcaaatattttagcacctaataactctaaccagcaggaagatgatcgagaagcttcagccctgcgtgatgaagtaggtgtttcccaaaatacaagaaaactattttggttacatcactgatctctcatttgaatccaactcattatcattgcagttagacatgcttcaagaagaaaacgataatataatggataaggtcagtgtgaacgctctctttatctctaatgtaggttatttgtttgtgtttgctgcctttttgtacttgatgtgtatat

SEQ ID NO: 3181 - DNA, 3784 bp, Arabidopsis thaliana landsberg
  unsure (1)..(3784): unsure at all n locations
ctgatttaatgtaacaaatactcatatataaagcaaactgaaactaagaaaacaaaaaacctcaaattgaagaagaatcttagtatataataaaatagggtttggttatggtcaatttgagtccaatattcttttcagaaaaaccaagtgagaatctaaccgaattatttcccgactttattcggtacctcgaactcgtaaaccgaataaaccgattcggctacaggctctgtttcgctttcttgttggtcaattataattgaactagagtcaatcaatatcaatgtttgtggtcaaataattgaaaatgggcttttgtatcaacaactgttggcccaatttaaaaatggaaacccaaacatctttaccaaaatatccaatccataaacttggatcgttaagtagattttacatactttattgttatgatttattcacatgttgtcacggcccagtgttccctatagtttgattggattgtgtctaagctattgatttcctttaccaatttcattagccggtccatctattggaggaaaccttaagctacaatttattttctttaccaattccacatatacagtttaggataaaagcgaaattgtcttttttcaaacacgttctcttccttttgttaacaagcaaaataacatgtgctcttccaattttcattttctgcaacccttcatgaatgggcccaaagcctgccacaaacatgtgcacaatattacaaactctaaaaacaaaaacaaaataaaacattcttttttgccaatttgtattttaatatcaatttgaatcaaactcatagttttaaaactcaattttgtaatcgaaaacaatattttttttttttttaaggaaacttacacagtagagaaagaaacggaccattttaaaattttgaatttcgtaaacaaacaaaatagtagcccttattagataattgggaaaaaaaaacaagaaacaaacacagagaggagtgagcaataataaaagctcactcactcacacttttattcatttctctgaaaacccttaaatctccggatttcgattcccgaggctcgaaaaaccctaaatctcttctccgaattcactcatccaaccgaagatgcgtgagattcttcacatccagggtggtcaatgcggtaaccagatcggcgccaagttctgggaagtggtttgcgnnnnnnnnnnnnnnnnnnnnnccggaaggtacaccggagactcagatctgcaacttgagcgcatcaacgtttactacaatgaagcgagttgcggtagattcgttcctcgtgcagtgctcatggatttggagcctgggactatggatagtctcagatctggaccgtacggtcagacctttcgacctgataacttcgtctttggtcaatccggtgcgggtaacaactgggccaagggacactacacggaaggagctgaactaatcgattccgttctcgatgttgttcgtaaggaagctgagaactgtgactgtctccaaggttattcttcttcttcttatagatctgtttgattttagtgttgataatgctttactagtgttttgaactgtgagatttccttgtgtagggttccaggtttgtcactcgttgggaggaggaactggatctggtatgggaacattgttgatctctaagatccgtgaagagtacccagatcgcatgatgcttaccttctcggtgtcccttcaccaaaggtttctgatactgtggttgagccttacaacgctactctgtctgtccatcagcttgttgagaatgctgatgagtgcatggttcttgataatgaggccttgtacgatatttgcttcaggactctcaaactcactacccccagctgtaagatttcatttcccaattatgctctccaccaatgttaagatgagttaaactatgcttgaaatgcttggtctacatggtgtttatgttaataattggtatcaagttcagatctgcaagcatctatgtaaagcttatagtattgttactgtttccattggtttgctctttgactatgtcactgttttatatcagaattctgatttgcaagtctctgtgcagaacttatacttttgttactgtttccagtcgttttgtacatatctttagcctcttgttttgtgtgatattgcttctgtttacctattttgatctcatcaccgaagtaggtccttaaactactcttattggaacaatactttctggttaagttgcaagtagaaatctgatacttattgatgatcatcagtttgttgagtttactgtctgctttgattcttttctcatcgtactgtttggatatgtctaaagcttacacatacttggattttcttctgtgtgcagttggtgatttgaaccacttgatttctgctactatgtctggtgtgacttgctgtctgaggttccctggtcaactcaactctgacctccgaaagcttgctgtgaatctcatcccattcccccgtcttcacttcttcatggtgggttttgctcctctcacctcaagaggttctcagcagtaccgttccctcacagtccctgagctcacccagcaaatgtgggactccaagaacatgatgtgtgctgcagacccaaggcacggacgctacctcacagcctctgccatgttccgtggcaagatgagcacaaaggaagttgacgagcagatgctgaatgtgcagaacaagaactcgtcctactttgtggagtggatccccaacaacgtgaaatcaacagtctgtgatatcccacctactggtctgaagatggcttccactttcattggaaactcaacatcgatccaagagatgttcaggcgagtgagtgagcagttcacagctatgttcaggaggaaggctttcttgcattggtacacaggtgagggaatggacgagatggagttcacagaagcagagagcaacatgaacgatcttgtgtcagagtaccagcaataccaagatgcaacggctgatgaagaaggtgactacgaggatgaggaagaaggtgaataccaacaggaagaagagtactgagagtaatttagttataaaaaccgcttgaaaaaatcaatttagtcgtttgctactttttttcttaaaaaaaaaaatgagaacctcaactaccagttgcaggtttatttctatgcttgtatttgacttatctggatgatgtttatgtactttgttcttaaatttggttcggtctttagtttgaatcttcgtttaagctattattgactgtattgttcctaatctcgttaaagactttgggcttatgattgactaacctttgggctttggatctcttcatttattttaagagctcggcccattttcgtggtgactaaattacactcttcgagataaaacagataagaaatttacttttgatgtaataaatattgttgctacgaagtaatttacttttggaaataaatagggacgacattagtgttaatactcttgtaaattttgtcagattacacattattttacagatctctcagacaaagtaaatacaaaaacgacacagtttcgtaactttcactcgcgtctcaagtacaatctctaaattactcgctttctgtgaaagacacgtgtattttgacttaaataacagcgagtagattttagaaccatagtcgcgagtgtttttataggcacagatatatttgaattatgtctcctcgcaacgggtcgctctctctctctcctctgcaccagtctccaagggtacagattttgaaaaaccactccttt

SEQ ID NO: 3182 - DNA, 530 bp, Arabidopsis thaliana landsberg
aaacatattttaaaacctatgaattaaaacctatggtttttgtgatcatcatcatgttagcgtttgttcttaggtcagttgtagttgagtttcgtcttgttaattgggatatttacattgatcttttgtctttttattgatgactgtttgtttatgttcatatatattatatagtgttgtcggctttgcctcgtgttgcttagtgtttcatgtctttaatgttcatgtagtctctctgttttgattttttttgtaatactctcttttcttgtaatccaagtcaacgacatcaataatatttctaaagtggacgaagaactcatcttgcaacaagtgagcactgaacttgaaatcagaaaagatgtaagttagagatcaatttatatgcaaagtattcactagtagcccatcgaggataactaaaatctgagatccgtgaacatgaaagattaaacatacatgtgtaaaaaggcacctacaccataatttgattgtcctgatcccttcttaccagtgacattaataaaaca

SEQ ID NO: 3183 - DNA, 1144 bp, Arabidopsis thaliana landsberg
ctcctttggagtccaaaccaagtttcctctcaggttcttgcgttttttatctaggcaaagagagtctcgggttgagagagggtgcaatgtcacttgtgatagaaatgataccaacaacagtgccgttatcatcataaaagggagaacacgtagtgacagctgaaaagatctttcctgatttggtcttgacaggaaactcccctgtccagctttctccattggcacaacgtcgagcaacattcaaggcaaaggcagcattctgatcatctacaataacatgtactgggttccgcccaactacttctgcagcagagtacccataaagcttttccgacatggcattcctgagaacaatcatgtcaccagaatcataacgattgactatacaattccaaaacaaaaaaagaagtactaaccaaaagataattcgcgtattgagatctaagacatgaacagactgagccaacgactgcaaaatattcaaatactgtttatcagtgaacttcccgggcgatggattcgaattcatcgatccctggatacgtctcaacggccgacgcggcaacaccggatgcgacggctgcctaagctccgtggagagcttgagcctagacatctcctgctttagaagctcctgactttgctctagctcaagcatcttcttgagcagctcctcctccattgcgctccaggaaaaaaccggaaaccctcaggtggatttcgaaatctgaagagctaataaccgagttgaaccgggaatcgtatggtcgaaaaagagagtgattagatttgactatggagaaggattgatgactcatgactgtctctctcgctcccaaccaaagtttcctctctcgagaaaagtgtaatttaagaaaaaaattgactcccgagaaaccatgagtccatgatactgactgtagtgtaacgtatgaaagatgctagtattctacatccttcctttttgtttgtatgtattgttccctcataatccgatctcgccgctacaccgcttccaacttctaatattgtactttaatgtacatcggctgcaatatcagtgtactaactcactcacctcttttttaattgaaaccatatttattttctcgtggatgtcctggtttctatacaagaaaaaaga

SEQ ID NO: 3184 - DNA, 485 bp, Arabidopsis thaliana landsberg
  unsure (1)..(485): unsure at all n locations
cgacaaactgattttgctacaaaaactatctggccactaaagcggagaacattctttctaaaactctaccttttttaccagctcacaggtataacattgatatctatgccaaggtcttttgtatggttacgaaccggaatcgtgaatagacctncaagaagattatctgtacactggtacgaacctcccagagttacaatttatgaactataaaaacgttggaagcgaattctgccattcttcaaccgacaacctagcnnnnnnnnnnnnnnnnnnnnnnnnnnnnnnnnnnnnnnnnnnnnacatcttataaaggaggcacattagatccctgatctatccgatcctttaaacatatatatattgctaacacaaaagctgatcatggcgaaagctcttagtgtacatcggtcacaattgagcaacatgctcatacttagcctctaacaccatttagaaagaaaatgtctctgaccctaataatg

SEQ ID NO: 3185 - DNA, 582 bp, Arabidopsis thaliana landsberg
  unsure (1)..(582): unsure at all n locations
acatccgtgccgattcggttgttttctctctgaatcttgcagtttccactcatgtcaaaatgtgggtttatcaagaaacttgtgtcggaatcaagcaaagattcagattccactgttatcaagataccagatattccaggaggctctgaagcatttgagctagcggctaagttctgctacggcattaactttgatatgagcacagagaacattgccatgttgcgatgtgcagcggagtatctagagatgacagaggaacactctgtggaaaatctcgttgtaagagccgaagcttacttgaatnnnnnnnnnnnnnnnnnnnnnnnnagttcgatcacagtcttgcacaaatcagagaagttgttgcccattgctgaaagagtcaaacttgtaagccgttgcatcgatgcaattgcttatatgacttgtcaagagagccatttttgcagtccttcttcaagtaatagcggtaacaatgagggtgtggttcagcagcagagcaagcagcctgttgttgattggtgggctgaagacttaacggttcttaggattggttcgtttcacgtgttctgatcgcgatga

SEQ ID NO: 3186 - DNA, 532 bp, Arabidopsis thaliana landsberg
tggttttgaaatgtttatagatagcttgtgttcctggagtttcagaggcactatttggggctagacaagctgctatagctcaagagaaggttaaagctgttgaagcaccgatgctttatagttgtggaatctgtaacaaaggttacaggagttccaaggctcatgagcagcatcttaagtcgaagagtcatgttttgaaggcttcgacgagtaccggagaggaggataaagcgatcatcaagcagcttccgcctcgtcgtgttgagaagaataacactgctcaattgaagggttcgattgaggaggaagagagtgaagagagtgaagatgaatggattgaggttgattcggatgaggatttggatgcggaaatgaatgaggatggtgaagaagaagatatggatgaagatggtattgaatttgagttgcatccggcttgctgtttgatgtgtgataagaagcataagactatagagacatgtatggttcatatgcataagtttcatgggttcttcattcctgatattgagta

SEQ ID NO: 3187 - DNA, 549 bp, Arabidopsis thaliana landsberg
cagactaatatcttactggatgagtattttaaccatgaaaggatgtgtgcatatcgatagtaaatcgtagctcgattgctttgcagattattaaccctagtggcttgattcttaacgaatgaatgaacaacacaaagttaagacgacgccgcaatataccaagttatatcaagatgaaaccagattttggtacatctcggtgagtactagaggaatccactatcttaagctccggtgaattggagaatcgtgagaagaaaaaaagaaagagaagataacaaacttttcttattgtttattaagtgttcgttacaagagtttaatctaattaatgtcttatataaacacatataattacattaaaccaacatttagttaaccgaagttaaccagacattgaaccaagtcaccaacctcttacgcaccgctttcaaaggctcttcctcactgtgagatacctcaacgttgccacaacaaacagtctatcaacaatcaactcatgtcgaatgagtaatctttgcttttaaactgggtatcgaactttcaaag

SEQ ID NO: 3188 - DNA, 271 bp, Arabidopsis thaliana landsberg
  unsure (1)..(271): unsure at all n locations
atgttataaattcgagcgaaagatattgattttctaccaaagcggacccacattcgcgggatgtgttggtgtcaaaagactatcatataatcgggctccgaaagactctatcttaaaagactctatcatagaaagaagatgnnnnnnnnnnnnnnnnnnnnnnnnngagagagcgggtgagcgaagatggagaccacacaagtcttacaatgagatggcttctcagagctggggctcttgttcatgggcagacactcaagagaacatacta

SEQ ID NO: 3189 - DNA, 525 bp, Arabidopsis thaliana landsberg
agggtggggttgtcttactaatccaaccatttttgacacaacatttgtcgtcattgatgttccgggcgtgatcttaggcgcaccacatactgcataaagaacattaacacccggtgctgatatgtctggctgtatatattacacaacatatttccacatgtcattaacacttggatcagtgtctcaatgtgagagaataaactaacaagcaatggttactctctcttaattctacacttacctcaaaagtcgctggtgaaaccgatctaagtcctacacaataaaaacgaggcactatacaaccactaggtcggccaatcagcgtctaggaaaggcttagttatgctttaagcactctgcaaaatcaaaacgttcgcatgcgttagaaaccaaacatacaacaccatagtgttgaggactaaacaaagctggtgaatatcagtgacactgcggactgcatgatcaataagatgtctgacccatattcataacctaccacggcgcaaggatcatcaacgcttcttc

SEQ ID NO: 3190 - DNA, 372 bp, Arabidopsis thaliana landsberg
ttgttataaaatattttgatttcataccatctattgtccattatcatagattgcaattttagtgcgttttcaatacaaaagaatatatttatgaaggtaatttgtatcatatggattggaaatgaaaaattcatatgacttatatagtaggatatatttctctttcttttctaagaatactaaatagattactaggcatacaaaggtttttgttattaaaatgttttgatttcatatcctttattatccattatcatagattgccttttagtgtgttgccaatacaaaaaacatatgaaggtaataaatattacatggatttgaaatgaaaaatccatatgacttatatagtaggatatatttctctttctt

SEQ ID NO: 3191 - DNA, 485 bp, Arabidopsis thaliana landsberg
tcctttgcatttaaaataaaacattatctttcttttttttgtctagctcgaccccaaaaataataatagtaaaagaagaaaaaaaaaagattcaaactttacgaaaatttggacgacccgaatcacgcaaagtctgttacctttattcagcattcattgaaacaccacagagacttcgtcttcttcggttggtgcaggaagattaagatctatcatcctctgtttcacagactcgtttctatgaactcgacgttgttgattcacagataaattccctaccccgtgagatcttttgtgacctccaagtgcttgtcccgatgcgaaaactcttagacaaatcggacattcatggattctcttagcaacaacaacaacattatcatactctgtttcgcttcgttgctctgttttgttgttacttactctggtcttcttaagacttgctctatgcccacctaatgcttgataagatttgaacactttcc

SEQ ID NO: 3192 - DNA, 1443 bp, Arabidopsis thaliana landsberg
gatcccctccttgatatattatgcatatatataaatacgtgaattggtacttgattgtgctatacttgtttggcgtatggtaaactacttatattaggtactggatgaggttattgtgtctaagtggtattcagggtttaccagataccatcatgcttagagtaagctgttgcctccctttttgtgttgtgattgttttagtaagtcttgaccttgagtggtcacttacatgatggcacaagactaggagcgtatgccgggtaatgcatgacgatgcattagagtgatgttccgtttataagcctttgtggctatagctcgggtgttcacagttgtgtacgtacgtgtggtgtgggtgtgcacgtacgtgtgtgtggtagcatacgtgtggagaacatgtatacatgtatgcgggagtttgtgctgatgttgtggtgcatgtttttggtacagctggaatcagtatgttgggcccaaggttcattcatgtatctagttcggctgcatcttctggtattattataagtatatgataatacgtttgctgcatgttccgtgatctctgatggttaggtttacttaatgagttgattcaaccttagagatttatttgtgcatagacccagctcactgagtaatgttagattactcatgattctacttgtcttacaggtaaccatagagggatgaccttagcagggagacgaacactaggaattgtcagaaataggatatttgcgttgcctctgcaaaaattacttgttattatgtaaattttaacaaggatccgacataaagatatattttttgctaactctttgcaaagtataagctatatactatgtataaagtgttttcttaaaagcagccgagtgttaaatgatataagacctagtctaggtcactcaacactagaatatcacgagggtcagcaagcctaagtgatgttcctagtgagaagagggtccattataatttggttaaggaaccaaattcatctggaatctctaataagttgtggtcgatcatcttcattatagcgtaactgggtcgcctatggcttgtctgaccatatgatgattcagggacgttatagtagtgaccatccttcttgattttgagcgctagagctcgtccaccagaatgattccctccgtccccgtcgtgcgtttccttcatgattatggcggcttcctctttgtttacgcatgtgaggaacgccttggtcgcgcctttgcctttaggcgacgagcttcccaccgatctgccggaatttcgccatcagcaatgtagagtttgatgggatctctccaattagtaggctgcgggtctactttaatatccggcttgtcggatgtctcggcatctatgtccatagttgttatgggtttgacaatgatgcaggtcgactgggaggttgatgcttcggttgcttatgctctc

SEQ ID NO: 3193 - DNA, 599 bp, Arabidopsis thaliana landsberg
  unsure (1)..(599): unsure at all n locations
tactcgaggatcccccgtgaagggctcgttgtttnnnnnnnnnnnnnnnnnnnnnnnnnnnnnnnnnnnnnnnnnnnnnnnnnnnnnnnnnnnnnnnnnnntaaagtgcaacggctgtggcacacgtttcgtggaacgtcattgtgatctcactgtggaggagtggctccgtgtaccggaccggtccgttgatgagtctttggtttaccatcaaccagttggaccagatttggcattctctcctttgctctatattcaggtacatatatatctctagttctctactaatctacgttaagcacgttgcaaaaaagaacaaattaagaagtccactcatagaaagtcggtttaatacgattttgttgcgtagatgacgcggtttagctgcggtggattagctttgggcttaagctgggctcatatcatgggagatccattctctctttctcatttcttcaacttatgggctcaagcctttgctggtgagaatatatactccccaaaacctctgatttcaaagagtcttcaaaaccgacctcacggtcaacaacggatcaacaaacgggttgccggttggagatcctgggcgctcgaataca

SEQ ID NO: 3194 - DNA, 1928 bp, Arabidopsis thaliana landsberg
agttatgattaaattttattgataaccgtcttaaatataatatcaaaatatttgaaaacatcttatttaaaacttaattgaaaacaagttgataataataaaataccgttgaaatttaataaaactaagtttcctgaaatacaccgtacaaaagatagctactcaacattctcatcctcacctggggaaaaggagaaaagggggatgagtaattaattactcagtgaggcggtcaaaactgcccattgaagcacaatatcacatttatactttcacacaacttccattcataagcatagaatcaaacaacaagcatatagcttacgttttcgtagcaagctataacagtcaagcttccgtcttgctcaccgcaagatcttttactttcttttcttagtttttaacgtacgttaattaatggctcctcaagcctatttatggaagaccacggcccgtagctcgatccttcctctcattgctcgtcagcgattaatgacctgtaatgaacccgtcggttccattacagtccaacatcctcaatcttatcctttctttaatatcattattctcttttatttatctttatatatttatttaaaaatacgtcttaaagacgtcaagcaaatcaacatgtatatcacgctaacacctaacacataacatcacacaacacatcttataatgtttataacaattaattcctaataattaacaatcaacacccaatgtctaatcctatacaaatgaacttcaaaagtacaaaagtagaaaggtgatactatgtttccacagatcccgccctcaccttagcaactcggttggataacacggtttcgaaataacagcaacaagaaaaggtctaataacgatctcaatctgcgacggtttaaataatcgatcaaagattatttttcattaataatctataattaatttcataatcaacccaaactatatatccttcaataaattaactagacttaatttaataaaataattcaatcaaatctagtaattaaatattgattcattcactacacgtaacactacgtccataattggatccatgcattcacgtgaatgatagcttccggtttggcaattaaccggtactctaacaactaaactaatgaatgaagtcaacttcttcttcctcacaacacaatttcacgtaacttctaactaaacaaacgtttcattggttttaactggtttaatttagatcatggtttaataaccaaataacacaatcacataacaacacgagaagattcccgattacctttctcggtggcttttctcgacgagtctcccttacggtttgcttggcggttggaacggcggagtggcacagatctacgatggttccattcactagttagattggttcaacaatcctaaagaaaaacaatcctaaagaaactaagagatcaaaaccagaatcgattctcgtgcgttacctctccggtgaggatgattcacgcggtgactccggctcaacacaacaacgatctctggtggtctgagtggtgcgaggttgccggcttagggtttttgtgacttgatttagagtttgcgttctccttttataatcacgtgggatcattaggttttcacttgggttcaaattattagcgggttggacttgggcctcatggtctaattgtaaaataggggtgttacaattctcccccactacaatggatttcgtccttgaattcgatccatcaccatgatcctcctcttcgtccttaaaaagttctgagtagtcttcccgcatcattctttctgattcccatgacaactcttgaattccatccctttcccagcaaacttgaatcgacttagctttcttccaacgtgaaccattttctctatgactcacaattgataccggttttccttgtaccgataagtcaaactcaaga

SEQ ID NO: 3195 - DNA, 1248 bp, Arabidopsis thaliana landsberg
attaacagtagaatcgagaggtgactatttttttaactgtgtgaatgattcttgtatttgctgtgtattgctaatctcctgtacatatgtttttgcgatgattttgtatcgctttgcttttgagagatacattttttactatttacattgccattcttaatctaagctctctgttttctgaccgttaaccaaccgtaacagctgtaagccatttctttgtgcttctaatagcctgactggtttaaacgcagcgggtgcggttgcggttgcgggagtttgcgaaaacgggcggttgcggtttcaagcgttatcaagcgttttgaacgactggttgagcgtttgataatgagtgcatttgcgcgagttttatgactggtaaaccagcgggtgcgatagtaattaaataaaaaataactaaaataaatataatatattactattaaaagaaataaaaatataatatattaagataaattgataatattagaaaacttgattttctgaccaaataaaaatacaatatatcatctcgtccgaccaaatgatttctaatcgagaaaacaaatcgaaacatgtattcaatcaaaaaactaaaaagaatacaaaataaaataaaaacaacgatgctatgaaatagttaaagaattacactagctaatgaatgaataaaaggttagatgatacttatgtttgattcttgattttgattttcatcggatgccataattgagacaatagggttataatatattgattaaggttttctaataaaaataagatatataaaagattagattattttaattataatgattagagtttgggtgaaagccacaattatttaatttaattaaaaaaagttttctttttaacctaaccgctaccgcccgcaaccgcaaacgcttgcgggaaggagcttttgaaaacgggcgatttcgagcggtccaaagcgatgtctagcggtttttatgattggtgtcaatcgctaacaaccgctaccaaccgcaaacgctgcgtttgcgggtggtagagagaaaaccaatcaagcgctaagtcatttaaaatgtcccacatcgataaatgagacatttctattctaatatgtaatggtcatggacaaatttagttaattttgaattggaagtgtatgggtcttttgaacattattctaatacaatatttagaaatcatagccctagaatgagaagaagattttcaaaattaaataaattaaattaaaaataaaaa

SEQ ID NO: 3196 - DNA, 578 bp, Arabidopsis thaliana landsberg
tataggattaaatttaaaaaaaaaaaaagcaaaaaatccgtaattgtaactgaatttgtcatcattaatataaaagtggtattttagtattctttcaaattcttatttatgttgttagataaattatttttggtaattacgtaagttactaatgtttggctttttggtattaaacaaagggtctagtgggattgacatttacggcatttgctgggtcacgttcgactacaaaaacaatctctctttacttcctctacacttcactttccctcgtcgctctaggccttggcgtcttaaacccatctctacaagcctttggtgctgaccagctcgactacgaccttgaccatgacaatgaccacgagccatcctcagagaacaaagaagtcaaatcgaaccgcaagactcagtttttccaatggtggtattttggtgtctgcgccggtagtcttctaggagtcaccgcatggcttacatccaagacacgtttggatgggttatcggttttgcatcccaccagcttcgatgttgttgtagacatcatgtcttgagtggctcggggtttaggctatgctgat

SEQ ID NO: 3197 - DNA, 620 bp, Arabidopsis thaliana landsberg
gaacgacgaaccctaagtcaccccttacatatataactgttgatggtttaacatatgcatattttttaaatctagaatattacttttgacaagcatatatctattgttgtatctagaatatcacttttgacaagcatatatctatagttgtacttaaaattatattaaaatatttaacattatgttaatacaaaacatcgtaacatcaatatctgtgaacaagcaaaacagagagaaaataatcgccctaattaaaaaaaaaatcaattatagatttgccatttttgaatagtttgcagattttttttttttttttttttccagattacagaaatattatttaacatatatcttattcgttatgtttgagtttagtcggttgtagtttttcttatgtttaaagttttcggtataaaatacgtatttttattaaaaaaacttaaatatgtatatctttaagtgttataaaatggtaaaatttgtaagtttttagtaaaaatagcaatttcaaaagattttgatgaaaaagacaaaaaatcgacaataatctaaaaagaaatgccgactaattatatcgaaaaataaaaaagtgtctggttatgtcataggtcaactaaaat

SEQ ID NO: 3198 - DNA, 997 bp, Arabidopsis thaliana landsberg
ccttctgaggggccggccttcgaacctctgaccagtagtgggtgtggagcccacgcgctctgaggcggctgttaaacccctctgaggggccagcctttgaacctctgatcagtagggaggctcggagcctgtttccttcacagagaaggatccttttcggggtaccccctttcccggtccctgttgtaagagagagaaagaggaaaaggaaaagtatacgaaatcgaatgacgtggcgtaccttttttgatgcggtcgttatggcgaaggcgaacggtcgctcgcctcccctgccagagggccgcctgtcccgccgcggagttaatgcgacggggcgagtggttcgcggggcggccgttgcgcgtgccggagccgttcgaggaacggaacacgagtgctccttcttcacgccgtgagagaggttctctcactgtcccaggatgggacgtaagcttggctgacgacgtgactgctgctcctgcccgcctgccaccgccattactgccggcccattttttgtcgtattgaccgtcgcacctggctggcactgccgggtcgtacgcagggttgcctcgagtcgtggtactggttccgcagtcgaggaggcatggtagtggtgcgagtggcggtgcagttgctcgcacgtagcaaccggcgcgctggttgcatgacgcgtgggcctgggcctccatgctgggtgcgttggaagtcggaggggtgcgcccacttggcgcggttgcgtgccgcctgcatggctgcccgccctttcacccgctggtctgggcgaaagtggaggaatgcttgtaaccactgggcggttgcatgcaccgcgcgcggtgttttggcttcttctgccctgggccagtttgcatgacgcatgggacccagcccccgcgccgtagggggaggaccttggagcgtgttggagaagactcagcccacgacggctggggacgcaagtagggagagtgcctttaaaaggagggtgacccctttg

SEQ ID NO: 3199 - DNA, 552 bp, Arabidopsis thaliana landsberg
cggcgctggacccgtgctgttaatgttctcggtttgcctatgcggcaggtaagattacatcgttgcatatagcctgcttttcatccaccagtttcatacttgatagaaaactttatatgtttcttctctctccagggtgagaagccatgtccatattacatgcagacaggattgtgtcgattcgcacttgcctgcaaattccatcatcctcatcctcattctcagccttctaatggccactctgcatatacaatgtccagctttccgtctgccgggtgcccttatgccagtggaatgacaatggtgtctttgcctcctgcaacatatggagctattccacgtcctcaagttcctcagtctcaggcctatatgccctacatggttgcaccctcccaaggcctattacctcctcaaggctgggccacttacatggtaagtcttaaatatagtttctcagtgcatagaccttgctttctctctgtgaagttacaataaatagacagagattctgctttaacaaattcacttttttacaacatcctatttgcatag

SEQ ID NO: 3200 - DNA, 650 bp, Arabidopsis thaliana landsberg
gggagaagatcagctccttaaggagaggatactgaatcataacaaataacagcgccgggaaacaagcgaagaagatcgtcggagcaacgatccaagggtcgttaaagatcgtgaataaggccgacgagaatgccacaagcatcgccgctatcgagacaaacaatgtcgaaagtccagcgatcatattcgctggcagcgagaacaagaaatcgtcgaaagcgtatctcgcggtgagtatcccgaggaatatgaggacggaagtgcaggcggcgaagcaggagatcagatcggagacgatgaatatgacgaatattcgttcatgtcggtgaaagggtctaccgcctgagttgtcgcccgtgccgccggggacggtgaagattgccgcgaaggtgaccgagacgattatgagctcgcatacctagagcatgtcaaggactattcgccggtaatcttttttcaatctccaaccttttttacgtttaaggggggtcccctttttttctagtcgcattgcttcgagctcctttctgaatatctcgatcggtgtcagattttctgtgtttactctctcattttcgatcgccggcacgattctttgcatctggtacattatcaagactttatattttttagaaatccgttttagttat

SEQ ID NO: 3201 - DNA, 483 bp, Arabidopsis thaliana landsberg
  unsure (1)..(483): unsure at all n locations
tgcaaagatgtaattaagtgtgtgtagatacttacaaaggattgaagcattgaacatgtagtcgagagttgtgatcaaatcatgatatccattaaaagataaaagaacgatctttctcccaataggaactccttccatgttcactttcacgtagangcttccgacactattacactcgttttgctcttcttcttccatgatcatcatttcctctgccgcaccgactccatcatattcatggttatctccaccgttgtaatattgtccggaagatgatccgaagctgagcccgagtctcaggtccgtgcttaggttccgagtattactcgaagacacaccaaatgggttgcttttgcagctgctctctatcgatgaagacgatgagcttctccctcttcccatttaaattaatttcttttactatttctctctctctatgattttatctancaccggtgattaatgatttgaacgtgtgtgtat

SEQ ID NO: 3202 - DNA, 536 bp, Arabidopsis thaliana landsberg
  unsure (1)..(536): unsure at all n locations
aacgtactacttttctggaagatgctgagagagtaaaactttatatcgatgcaagagctctcttcgctaatggagatcacatcaaagccttggagataatcgaagatataattttagtccataaggaagacgagaaatcgtggattcttcatagcgaacaaggtgagatgttcaatgatctagcgggaaaagcagagaacccttacgttgatttcacatacatgttgggttctgtaggatgttattcgaaagatgtgttgttatcacgaccttgggcacatggactccactatttggctcaagagtctgggtcagtcatgtattacaagaaatgtgtgaatgtagcaaaacagggtttatctgttactttcccagatgcctctgaatcntttgctcaattgcttttggaaaacctaaagaatgatatgaaggaaaacctggagactctaatcaaagatgcagagtccaatatcgctgattccagactgtagaactaaagggttactacaactgacttgagccagaagtttggagtc

SEQ ID NO: 3203 - DNA, 748 bp, Arabidopsis thaliana landsberg
cacatgtgttctgtaaagctcgtttgattggtttctccgcgtccctgggaaaagtcacctgcccgacattctcgaaactactgactgtggattggactaccaaagctgacacagagcataaggcgagcaagacaacacttaaaggatttagagcctcaagcattttaaatcgtataaagcttgatgattttcagacaagtacaaagattgaggctttggtatgtgctctttaatatctacagcctctgtctccccccccaaatagtaccccttaaagtttctttgtagttttgagtcttttccttcctttctctaaccagtttgtgatgatttttgtatgcagagagaagaaattaggttcatggttgaaagagatgggtctgccaaagcaatagttttcagccagttcacatcatttttggaccttataaattatacccttgggaaggtaatttcaggagaaactcactagaacactactagttttggttttttatagaatgagacgagcagaaaatgacttttgtttacaacacagtgtggggttaggtgtgttcaaatggggggaagcatgaccatggcaggctagagatacctgctttttaacaaaatttcaaagaaagaacccaacatttgcaagaaagttttctttaaatgaagcttttgcaaaagccccgaaaggggggctggcctcttttaaattttaaacctgggtatggctttttaacaaattgttaaaggttgcttt

SEQ ID NO: 3204 - DNA, 451 bp, Arabidopsis thaliana landsberg
tgattttcataaactccaattcttactttgaaggacattcataataaactaagaattccctactacttctgagtgaaggtgcagagtcgtcagtcgtcccaatcatatttgaggatgcggaataaagatggaaagtataacatcacgtttgaggttaaagccttcagaattttccttaatatgacttttcatttatcatctgattttgtaatatatatgtttaagattgcttaaactgatgcattgaataaggtcctggttttgaaatacatgaatgatttgttttttcatacctccttaacaaatggaccattatctaatgacgtaagctatatctcctcatagaggacaactctagttatcaattagaacatctgttccttgacattcaatttccaagaaatccataaggatgactttgtcattccgtccataatcagtagatattttt

SEQ ID NO: 3205 - DNA, 533 bp, Arabidopsis thaliana landsberg
  unsure (1)..(533): unsure at all n locations
ctcattatcaacagtcttcaacttctcatctctttcttcctccatgagagacttgagtaaataatacatagttttaaatttccccttttctaatcttatctcgcccatatacataaattcatcccaaagatttcgagtttacaatttaaaaacagtgttgtgtagtgcaatctttaccttatccttactgcgatcatctattcggcttcttcctccatctctagaaaattataatacttcgtgattcttaaatcttatgtgtatgacaataaccataacccaagtttacaaaacatttcttctactggtttttcgtaaccctaaatgttttgagttggcatggatgtaatagctactacatctactatagtatccgacttggattcacgacaatccgaaatcgaagctccgatccggatccagcccgcgaacgcgatttctttctctaatnnnnnnnnnnnnnnnnnnnnnnntcttgcatctgaagcggttgcggttgcgacttataaagaatgttaaagatacacgcagca

SEQ ID NO: 3206 - DNA, 1431 bp, Arabidopsis thaliana landsberg
attctggtggttatttgtttcctttttcctctggatactgcaatgtttcagctgtcttgcctcatggaaggaatttgcaaaaccagccacctgtttccaccgtgcctagagacagattggctatgcaggattgtcctttgatagctcaatcctcgttgattaatcatcaccctcaagagttcatagatccacttcatgagttctttgatttctctgatcatgttcctgttcagaatctacaagcagagagtagtggagtaagggtggactcatccgtggaacttcataagaaaagtgaatggcaagattgggcacatcagctgatttctgttgacgatggttctgagccaaattggtctgaacttcttggagattcaagttcccacaatccaaattcagaggttcagtttctctagccatatatggtctctatgtttgttggttgtccttatgttatttaatcagtgttttgcataattggtatcagatacctacaccatttttggatgtaccaaggctagatataacagctaaccagcagcaacagatggttttcatcagaggaccagctcaacggcagaaacttaatatctagtgtagcaacatctaaacaacgtatgcgttggacaccagaacttcacgaggcattcgttgaagctgttaatcagcttggtggtagtgaacgtgcgtaagctttctccttctattgttcctgaaaataattgctcaaggatgttaaccgtacactgattcttctataatttccatcataggagccacccctaaggctgttttgaagctcttgaataaccctggcttgaccatttatcatgtaaaaagccatttgcaggtttgttcttatccatatactattttgttattgtatctcatactgcttctctgctaagctaatttctcatttctcaccgtctttctgttgaacttcttttctacagaaatatagaacggcaaggtataaaccggagacttcggaagttacaggtaaggagttaaaatactttaacataatactactgcactttttctaagctttaaagtattggtcactctctagaagaacctaaactctcgacaaacagcttacgaatgtatgaactttgtttatttcttgcacaggagaacctcaagagaagaagatgacatctattgaagatatcaaatctcttgacatgaaaacgtaagaatcttcagtcttctgactgcataacaaaccagtaatctttcttcgtattcttcagatattcttgtatgtatattttgctagatgattatgttactatttcttttccaggagcgttgagatcacacaagctctacggttacaaatggaagtgcagaaacgtctccacgagcagctcgaggtaatgatttttacatgcctaactgctaaaaactattctttcttacctg

SEQ ID NO: 3207 - DNA, 1265 bp, Arabidopsis thaliana landsberg
aaaaagccacacgtagtgtagctacatacactttcttaaaataaaactataactgctcaagggggattaataataaaggttgttttcacaaaaatattacaaaattatgaatcattggtacgaaaaagactaaaaatatgcttggaataacgaatgtacttattggcaaggcaattaatagagcaatagtatttatcaggcacgccatcgtcaacaactttcaagatggtagggtatatgcaatgggtcgtgcattggctgcaaaatggccgagacatactattgttgcgtactgcaaaagatgttacgtaatcgtagcggagatttgtcacttttgttcctggctcgatagctcggaaatctcctaacacgcaatcaatatgcaatgtaactccacaatctttacatgtgtaaaaccattttgttggatctgtttctttctcacaaatatcacaccaatatttaccacttgcactttcaccatagcaaaaagatagaaaatgatcgtcgactctatgctttacctcatatggtaatagagcgcacttgaagtccaatacgtatccacagttatcttcgacgcatctgagcacatgagttgcctctttattgcaagcactacagactccttgtggtgttgtataaaataagggatgttcaggatgacttttatgaaagaatggctcatgaactgaagcacatcgcacatctaatatatttggccactcaccgtacttgaaaccatgaaaatgtactccacaagcctcacatctagaacatccagggggaataaggggttgtagttcatacggtttattgcttaccatatgccttttccgtttaggcatattagcacagctctcatgaagcacaaaatcacatatcatgcatttgtagaaggaatggtgatagataggataagcgcatgccttgcaagtcctctccttagtgaagataccagacttgtcgagtcttaggtagtggtagtgaatgaagtgttcaaccgtgttctcatctatcacctcaagtggttcaatatcttcatcttcttcaggttcgtctttcatctccataccgtcccatacatcttctctagtagcgcatttggtatgaaacgtagaattgggacatttctgacaagaaaaacccccacaactccaatccattttcttacgacaaactccacataccgaattcaccacaccaagaagagcagtacgagaaacgcgatgatcatgacggttgatgtttatcagcccatggaa

SEQ ID NO: 3208 - DNA, 597 bp, Arabidopsis thaliana landsberg
  unsure (1)..(597): unsure at all n locations
gaaaaaaaagggcaagaaaatcaaaaaaaacctttaatatcctttccattctaaatttcactaagtgagagggttttccttttatatagatgagacaagggatgagataagctaacaacaagtaacaaggtaaagaggcaaccaatttacaaaataaaaaaaattgaattctgtttagacattaacactgaccctttccttctcgaatttcagcaaacaacaccaacaaaacaaaaagggactgtgttatttgattgtaaagtactaaagatctcaaaacaaaatgaaaaagaggatcttggccattctctgcatcaaaaccaagagtttcactggttacatatctgcaaaaccatttagagttccactgacaatgggtgtgtgttggcataggcaaagttaccttgttaatgttttcagaaaagggctcattgaacacatattattcgatatttggaagccataatttgaaatgtactacataatctggtccacatcttcaaaccaaagccaaccaataaaaaaaattcttagctattacaacaacattcgnnnnnnnnnnnnnnnnnnnnnnnnnnnnnnnnnnaaccactgatg

SEQ ID NO: 3209 - DNA, 632 bp, Arabidopsis thaliana landsberg
caagaccgtaattcgttttttcaaccgacgaggcagcgtagatcttttactcttgaaacttttttttgcattttctcatgcatgcctttgattggtgtgttgccattgaacttttacataatcttccagaaatgtttactgttgttctttgatgtttggtccgtacacgtaactttaggagtcacgatcatgactcacgacaaagtacgcccgtttgaaaaagtgaacaaagcaataattaaaagatttattcaaattgatattccaattaaaagttgaattaggcttcgatataacatcatgcattaaataatatagcgattccaaattcaaatgaacaatataagcatttttgtttttgaacaatataagcattagttcatatgcaatgacttttatatctagggtatccaaaacaatgtgacatggcatactaatcttgataacacaaattaataattaaagtatggattctataaaaatattttgtttggaatataacacttcacgataaacaaaatctatatgaaagaaaccacattacgagttagcaccgcgtaaacattgtctaatccttcaccgactaacattctatcatgtcgatgtacattccattaacatacactcataat

SEQ ID NO: 3210 - DNA, 510 bp, Arabidopsis thaliana landsberg
  unsure (1)..(510): unsure at all n locations
cgtgtcgtttgcgagtgtcgatgcgttgtcgcgcgtatcgtatngtccgcacgcgagattaaactgttcgcttataatcactcatgttaataaggttaattcgtcaagtcatatattttagataattaacttaaggtttgctcgactaatgtttattaaattaaaactgtgcgatacgtctagcttctttttaaataatatcgattaatataatcaggtcaaactaatgttatgattaatactcgtttagtgtagacgcgataacttctcgaccgtagctccaactgtcgcgtttctttttcctcgcgtgatcgtagtaacacgctctattttgttttgcattatattttatttgaatggtgtaatgttcttatgcatatatatatatgtttatttgtttgtgcctgtttatattcgttgcgcgtcgcgaatagactattttgagcttcgacgaatctacggtcatgcttcggctactaagagatcaaactcttcgagttctacgaggct

SEQ ID NO: 3211 - DNA, 4001 bp, Arabidopsis thaliana landsberg
  unsure (1)..(4001): unsure at all n locations
acgaaaaactgagtgctttgcatatagatcaagaagttggggaaagcatacttggctatctcgaaatgggcacgcgcaagtcacgtgccaacctttgaggagtacatggagtttggtatgcagacgtcaatggatcattttgcagcctatagctttatcgcgatggaagattgtgatgagaatcaaacgtgcgagtggtacaaatccagacctaaaatgatggaagctctgaatggtgtgtttcgtattaagaacgacataaacacctttgaggtaattgatacatacaaaagcatgacaataagcgatcacatcatcaaccggttttgtcttacacattaacgtaactaagtgtaatggatgagcagcaagagatgagcagaggagaagtggctaaagggctgaattgttacatgaagcaacatggtgtttccaaagaagaggcgattggagagatgaacaagatttatagtaattattacaaaataataatggaggagtacttgacgacaaccgctgtgccacgtccgattctggtgcgatgcctcaacgtttcacgacccatccatcatttttacaaggagagagatgaattcacagatccttatttcggaatgcttaaagaagtcatcacttctttgttcatccatccaattcctctttgatatttgtgaaaacactttaagattaaatacttgtatgtgcacggacgggtcatgtatcaacctttgacgagtacatgaaggttggggtattgacagccgggatggctgattatgcagcttattgctttataggaatggaagatatcaacgagaaggaagcttttgagtggctcaattctaatcccttaatcatcaaacatctgactgcaatgttccgtctagcaaatgacgtaggaacctacgaggtacactgcatatcaaagggatctcttggttcttttctttctatttcccacttcttttagtccttcatgaagaaatgatatttttgtagactgagataaacagaggagaggtggctaatgggctcaactgttacatgaaacaatatggagttaccaaggaggaagcatcccgagagttgcgtaaaatgtacgtataccgcaaaaaagtggttgtggaggagttcatgaactcacatgatcatgtgccgcgtcaagttcttctgcgatgcctcaacattgcacgtatcttcgatgtgttctacacggaaggtgatggatacagtgaacccaagggcaaaatcgaacactttatgacatccttgtacctccaccctatacccctttcataatgacgtggaacacacaccaatctaggtctattcggggatgctttgaaattaaaaaacaaaacaaaagtagtcctttgttctctgtttgttcactgttactctaaggcatgactactgtcactctggtatctgtctaaactcttaagaactttgaacacaaccaaactaatttaactaaacatcgagaagtaaaaagagatggtaccttgagttttctatctgtaatttcatggagcctccaaagtgcttgtccatgaccatgatctcagattactctgcattgttaagtttcagaacatcaatagctctttttatagtagcattataagcactcaataggctaacaaattaactccttctcatcacgaattaaaaagagaatatgattaaaatgttctcttttctcagcagtaaattgtataattctccggcggaaacaaaacacaaagctcgaaactttaccattatattggtttccctccgtcgtctacggcaaaggagaacaaaagcaggagcaatccgatcagatggaaacgatcatttcagtctcttatcatgtcctaacgacggcgtctccggcgaggcacatcggtgagataagtgagaaaaatgggtctgtttggatatggatgtaaggctaataagcccattgggttttagatcaatcttttgtttattacaatttgcacccttttattttctatatttgatgaaaaatattaaggtttttatgtatcagcgacaaaatcaaaatacacataagcacaactacatttacctccatgtttgatgacacataaacaactcaaaattccatctgaaaattcatcaatttcgcaattaaagctctattatgttatttgtgaagaaccaaacatgagaactgatcatcaaaactaacctcaatttgacttctaatcgtcgaatgattttaatcatcaatttgaatcttcgtttgtgctccttgcaagtcttataatgccaataacattggtaacaccatcgtcacccatctcgttattgtagaaatcatttacaacagaagtggtcatagcgttggatgtttctacagagtgaaattgcataacaccattagaaccttcaacaccagcgtcatcaaagaactttctccttacaccagtcggattgttgaggtaactccggttggtttgttccgttaccatagtagaccttttgaagccactggtataaaggagttgtgcattgcctacgattcctttgcctttatccacccaactagagcagtcctttttactcagtgtgttttagttgtcatcaacaatgggatcaagggacaaaaataaattcagatgcatcgttgtacacttcacatccaaaaattgccttacactcatattgctagtaacaatcacatgcagttttgttgtaacgccccgatcgtccgtaccagtgagccccacatcctctctcgggtctatggacccacccctatccgacgatcggtgagtcacgtacggaaagctttaaagacttgttaccgaccctacaaatcaccacatgatctttcaccatgttttgtcttcacttgcatcgttccgacaatcattttccggaaggtcacccatccggaaaattactccagcccaagaacgcttaactttggagttctctcacgacctttgactaaaaagataattgcactttggtgacataggtggccaaattatttattttaaacctctttgcatagactaccatattcctgaaatctgtgtgttacaattcaccctcaataatagatcgcaacgagttgcacaccaagatcgttacccccaatggtgcaatctttcttgactccacacacatctgagtttggctctgataccacttgtaacgccctaaccagtgggccccacatcctctttcgggcccatgggtctacccatgtccgactaagtgtgccacgtttgggaggctttaaagacttgttactgatcctataaatcaccacatgatgctttgttctcactcgcatggttccgacaatcacatcccggaaggtcacctatcgtgaaactactctagcccaagcacgcttaactatggagttctctcaggacatttgtccgaaaagataagtgcaatttggtcacataggtggccaaatcaattctttcaacttctccgcatgcaccaccatattcctgaaatcgaggtgttacagtttttttttcaaaataaccaatgtaagcaatcttgtcattcaaaatcggaaatcaaactcaagtatgttgaagcataatcaaatctcgcatcatatcacatttacagaaatcagctatttgatcaagaaacacaagttgttctgttttacaggtatgtctttacatcaaagagtcatgtcttttcttattacacaaacacaatgttttgtttcatataagtatagatcgagtcnnnnnnnnnnnnnnnnnnnnncgaaagtgtaatacaatcaagtcaataagattgattaaatccataccctgtttttctttcattatcgcaaacacattcaaaacattaacaaaaaaactatgcaaatccaacggaatcaagcttagtatgttaatccttaacatcaatgaaatgcaaaaattgtggtgtgtactaacgaatttcgcatcagaatcctcaaatacatggttgaagaaaagaaacacataagtgtgagtaatacc

SEQ ID NO: 3212 - DNA, 586 bp, Arabidopsis thaliana landsberg
gcatagtttggattaggtgaccacattaacaattcttagttaaataagtaatttaaataacgacaatgactctaagcggaaacgaattagcggagcgagacaaaatacgcaacgcgcgaaacagcacgatatcgtgcaaatgacgcgcggacacacgcgatataacatgctgacgatacacgaaacagcacgcgcgaccaacgcgagtaacgcacgaatcagcacgcgatcagaacgagaaaaactaaataggtgacatgtttatactaaacgaatgttaaataaatagaaagtaattaaattaatattatccatgttaatatttattataaaagcccaagttaaacactacacatttaatctaattagaatattaatctaataaatattattcgagcgagccttaagttaagtatctaaaatatatgacccgacagattaacattattaatgtgaatgttcgtaagtgataacattttattatcacgagtagacatcgtgcgactcgtgccaccgacacgtgagatacgtgcgaacgatgcgcgggtatgcgaacgacatgagtatgtggcacacgcgacacacg

SEQ ID NO: 3213 - DNA, 350 bp, Arabidopsis thaliana landsberg
aaaacaaaacccgatagtaaagtacacaaacatatagaaatcttgatcttatttaaacttttacattttcaccagcgatgagaagttggtatgagaacaagagggactttcttggcgatacgaatccctccgtcttcttccatgtcaatatcttcaatagtcattccattgggtaaactccaatcgaagaagtaaagaaggttaagaagtccgagctcgaccatggtgatcccggtggccatcccaggacagatcctacgtccagctccaaacggtaatagctcaaaagttggaccctaatatcgaaagggctttccagaaacctctcggggatgagctcaccaggttgt

SEQ ID NO: 3214 - DNA, 636 bp, Arabidopsis thaliana landsberg
cggtcaaaaaatgccattatagattttgtgggcaaagcatgtaataggtgtgcatgctaatatactccacaaatgtagcaattgtaagaccagacaaactacgatgcagattcaagagaattggttttcagcagagcatatatatgattagaaggttaccaggtcatgtggcaattgtaaaacagaggattaaggtactaggacctacctactgtaagtgaagtttggtttttcaaagtcctttgatttgagtgtgatctatacatgtgaaaactcggatttatctaacccttgtaaactgttgataacacataaggattctttgcatattcttagcattgaccggtttgggaaagctttgttggaagcatggttgtaagagaggtcagattcttctatagagggtggttgcagccagtgtgagtcactagctaatgaactttgcgctcatgaatctaaaagacagcaacaccatgaagaggtcaacgaaagtaccttttgtccagctcaagcaaatgctgataggctatagaagattgagtgcaaaccactatcattgatgttttgtttctaggcttgtagccacgactcgagaagagtgtaccttgccacatttgattggggctggcccggtct

SEQ ID NO: 3215 - DNA, 341 bp, Arabidopsis thaliana landsberg
cataactagaaataagttcataaacatgcatgatatataagtaatcagcacaaaacaaaaccaatattcatatagataatattttgaaatgacataccatcatcttgatttgtttccaattcggggaaatcgatcacggtgaaaacctcgagggcactacaaagcggaggaagagtagactttgacgtttttaataactctatgatgcattgccctccttcacatatttgtggtttaataacgtatatagttcctgtggcaaacgtaataggtctataccgaaccacggtaaggtttccattcaatatcatttctaatttttgggttttcatttgccttgt

SEQ ID NO: 3216 - DNA, 497 bp, Arabidopsis thaliana landsberg
aaagatcaaagcttacaacaaagtgaggaactgatctcaccatatagcttcattcagtgccaaaagatgcctctggagatagtatttcctgttgtggtcgttgagagcaacgctaagatctgtatctttatcgccaaggtcctccccgtagcctataaaaataagattccgaaaatcaacaaaagtagaaaaacggtatattataataaaagaagattttgaattctttagtaaccattctcagtgattatgatctcagggctgttgtatctgtccttaatgtatttcatgagcttcctcaaacccttagcgtagacagccatcttagcagtgttgggctacaagaaatgatagttgtaaagtaattaaatcataaattaaaaaaaaaaaactttttggttaaggaaagttgtttacctggctaccaattttaatggatccatccacagtcttcgctgaaatgtttttaagaatttagttttagtagattactaaag

SEQ ID NO: 3217 - DNA, 551 bp, Arabidopsis thaliana landsberg
gtttttagtaagtgacgcttgctaataaaattggtatacttatcttttatgtcttcacagttttaatttataattccaaagtatttattttcttggtcggaggaccccctcaaaatgtaggacacgttttgatagtaattagaccctataccacaatatttcttgcttatttgtttcccatagatccataaatgataattagatatgatgcatatatgataggtctaaattcaattgtttagcttgagaagatggatgctgcttctagacaatttgggtttaatagacagttgttgagacttgagatcgacaaattttcttaaatgtgcttattattatataggaaatttaggtaccacaataaataagagttagttgaaattaagtttaaaacaatcagaaatggtccggatgtaatgaattaggtttttgtggtgaattagttcaaccaatgcaatgtctcactcaaatctcgtaaaaaatgatatcctaaacaaacaaaaaatgaattaaatagttatattaggatcagggattagtatacaaaaact

SEQ ID NO: 3218 - DNA, 146 bp, Arabidopsis thaliana landsberg
cttaattgatctagttaacgacgcattcgtgattaaattgaaagtcaacataaaattaggaatctaatgtactatctctagagttcatcctttaaaccaacaaaaatggtaaactgatgatttaaatgatatttttcccaattgta

SEQ ID NO: 3219 - DNA, 681 bp, Arabidopsis thaliana landsberg
aacttgcattatatatagtttaagaaaaaatgaattactcagaagtttcgagtttaataatggggactaatttaagaaaaaatatagtactagatgatataatggtgacataacatctacatttcgaacaatcatgctttgaaaaccagatgtataacatatgccacacccattggacattaagatttcaagaaactaatcttactttgagactatgccacaatcctagtaattctaaattgcctaattgccaagatgatgtacctggacaaacgtggaaagagatagtagaggtttctctccaactttttggtgcctggcctacaaatattaccacaaaaaacttgaagtattaaaagggcggccaattttgtatgggaaagcaagacacgcgtggaaaaagcaatcagactttaaaccaagaaactttctctatgcacaaaaaaatgaatatgagatccgtctcattccattactagttaatcaaaactcagcacgccaccataaagatacataaaagaaacggaatatgatattatccctctaaaacaaccttagcaattggtttaagtcacctccacaaacggaatatagtgcagaagaaacatcaccaagtagttttaaatgcaagaatgaaacccatatggccctcaaacaaaactgatatttcgaaagaactga

SEQ ID NO: 3220 - DNA, 2262 bp, Arabidopsis thaliana landsberg
gatctctgaatttattggtattccctgccattttttgcacaaaaagttcttgactgccagttttatatctctttagtttaactctaaattttttatatattttctttggcagggctgcaacttggttttttctggtcaaacgggtccaccaataataacttctgtgccaaatcaaaattctgagctggtatgtaaacttggttccacatggcttgaaatggttctttagaagttctatatgatattcgtggaaggctttaaattactttatagtccagaaatgttactgttaagtttcagaattgattgtctttatttcttaaagtaatgaaagacagaagcagaactaaaaaccaaacctgggatcaattctatttatagtgcatcctctactttcccaaacccccaatggcactaaaccagtccccagatacttgaaacttctcagtacttaatgcttctcttgtttgtaatgatactggtttgactaacttgctgatatggcacctatagttgacgacactcttacagctgcccgtctttaataatcttattccatatgtacttccgttgcgttgaacaggttcttacccctaatgttccggatatcactgttgttacccctgaggacgagcacctcagacatgtgattgatacattggctctctatgttctggatggtgaatgtgcttttgaacaagctatcatggagaggggccgtgggaatccactgttcaagtttatgttcgagcttggctcaaaggagcatacttactacgtctggagactctattccttcgctcaggtacattttgattgccttattactagacatatctttgcattgtcataagctgattgaatatttttgcattgtttagggtgatacacttcaaaggtggagaacagagccgtatatcatgataactggtagtggaaggtattgaaccttgccaactttgaaactaatccgggtgttcggttgggtttacctttgcatatgacatttgttgtattaacactgtctatttgctcttattgcagatggataccgccaccactgcctgtaactaggacccaagagcacgaaaaagagtctgccagcacatatgcggcgggaagaaccagagtaatcttcttgcagtctcacttctgatttatttatttctttttcttttgttagctaagttgttcttttggtgtgccggatacctgacactggtaaatcttacagcgtgcggaagttgagaggactctaaccgatcctcagagggatgagttcgaggacatgttgcgtgctcttactttagaaaggagtcagataaaagaagctatgggtttcgctttagataatgcagatgcagctggagaggtataatacgttctgacttatatatttcggtacattttagtttacagaagatcctatacttcatagatatcatttagaagcttcagcatatgttttaatcctgatttgttatggaaatatctgaagattggttcgtttgtatgcagtagtaaaaaatgcattatacgcctaaagcatatttagaaagataacttgttattagaccaaaatcagatgcttttcctcgctgtttattatattttcagatggttttttctagacaccacaaaatttgaacagatggttaataaaatagatattcatatgcctcttcctacttatatatgtgtacttattccacaggttgttgaagttttaacggagtccctgactctaaaagagacatcaattcctactaaagttgctagactcatgcttgtgtctgatattcttcataatagcagtgcacgtgtcaaaaatgcatctgcataccgaaccaaattcgaagcaactctacctgatataatggaaagcttcaatgatctgtaccgaagcataactggaagaattactgctgaggctctaaaagtactgtcagaaagaaaattgatctttgatggttttcattcccttaaaaatatactgttctaaactctttctgactttttgcaggaacgggttctcaaagtactgcaagtatgggcagattggtttctcttttcagacgcatacatatatggactacgttccacatttctccgatcaggagtctctggtgttacctcatttcattctatctgcggtgatgcacctgaaatagagaacaaaagttacgctgacaatatgagtgatattggaaagatcaatccagatgctgcactggcaataggcaaaggagctgcaaggcaaga

SEQ ID NO: 3221 - DNA, 401 bp, Arabidopsis thaliana landsberg
gcaaagatatagatagtttttatgacccaaacaaaataatttctatagactaaactgactcgcaaagtcgtactaggggattttgcacagttaacaatacaatattcaattggttagtatcgatcttgaaagttaagataactaccccaaatatcgaaccttcttctatggagcatgcatgtcatttttcttgacttgatgtcaattttataaaaatttagcactgcttaccgtttcaattttgtgatagagaagaaaataaatctattcgttattgcaataataatatcaaaatttagtcattgttatgggaatttattcatgatcgttcccttagtcacttatggactcaaaaaaaacttatttccgtatttgaacggttatattggtatatatatact

SEQ ID NO: 3222 - DNA, 517 bp, Arabidopsis thaliana landsberg
gttcttgaagggtttgctaatttttgtgtgcttttatcgattttgatctgaaagaaattagcattgttttctttaattcttgcttttgttatgattgcgaatttgcacgaggaagtcaaagagagcgtgaccgtgaaagggctctagctcgaacggagcaaaggaaagaacaaagatgatggattaaatcctgagcaacgtcgtgaaaggtaaccaaatttgtatatgttcttgaatctgattacaacgttaatctctatggattgatcgatttcattgtgctttagagatgcaaaagcattgcaagagaagactgcaaagaaagctgctcaagccgctgctgcagctagttccggaggaggaggaggcaaaggaaacagtaagtgagaaaaaatgatctatgcttcgatgtttgtaactgtgcttttgaatatgaaagtttggtgtttgtgttgagaatgttttggcttcgtttggtttgagtttgtacaaaacttagacttggtgatgtactttg

SEQ ID NO: 3223 - DNA, 2125 bp, Arabidopsis thaliana landsberg
  unsure (1)..(2125): unsure at all n locations
attaaacatagcaaacttgtgtccctttaaaactcaatcagaaaaattacatatcatggaagtcacagtttgagtctttcttatctggtcaagatctacttgggttcgtgaatggtgcatctccagcttcgttagctactctgcaagttccacaagtcggaggtcaagctctagcagttccaaatccagactacaatgagtggtttagggcagatcagattgttcgtgcttggttacttggctccttgtctgaaaaaatccttgcagaagttacaggcaccacaactgccaaagatctctgggttgctcttgccaaacatttcaataaggtatcgtcttctagattgtttgaactacaaagtaaacttcaaacaacagaaaagttagatagacctatggatgagtacttaagagatattaagagtatttgcgagcagttagcttctatagagagtccagttccagaaaaaatgaagatatttgctgtgttaaaaggtctaggaagagagtatgaacctattaatttgattattgaagggatgatagatatgtatgcggggcccactcttgaacttctagactcaaaagtttctctgatagacttgctagctacaatgttggtatggaagtctcacctcacatggctttctatactaactactctggtataggaaaagggaatcagtatggcaaacctggtggtggaaatcatggaaagagtgggaactactcaacaaaaggcaggggctctactaagcaaatatgctaaagctcctcaagctcgtcaggtccctgcagcagcacagataatcgagctttgtgtcagatatgtggaaaaccaggtcatcctgctttgaaatgctggcatactattcaacaacagctatcagtatgaggaactacctgctgctctaactgcaatgaggatcacagatgtgactgatcataatggaagtgagtgggtaggtgacagtggtgcaacagctcatattacaaactctcatcacaacctgcaacagtcacaaccatatggaggatcagacacagttatggtaggaaatggagactttctacctattactcacactggatcagccatcttgccaggaagctcaggtaatttacctcttaatgatgttttggtttgtcctaacattggaaaatctctcttataagtttcaaaactcacccgagactatccttgctctgttgactttgattgtgactatgttcgtgttactgataaggccacaaagaagcttctggctcagggaaacaacagtaatggattgtatgttctgaaggactcacctgttcatgccttctactcgtctcgtcaacagacaacctctgaagacatctggcatatgaggctaggacatccaaatcaacaagtccttcagtacctgcaaaagaataaggctgtcagtataaacaaaannnnnnnnnnnnnnnnnnnnnnnnnnnnatttggaaaaagctcaagattaccattttcaagttcttgctctactacctccaggcctctacaaaagatacactctgatctatggggacctgcaccaacaaagtcagtacaaggctttagttattatgtcatttttgtagacgactactctcggttttgctggttctatccattaaagaataaatcagatttcttgtcaatcttcactatatttcaagctttagtggaaaatcagtttcaaagtaaaattggcagttttcagtgtgatgggggaggagaattcacaagtactaagtttttgaatcagctacaacaacatggcattcaacaactcatatcttgtccctatacacctcaacaaaatggattagcagagagaaagcacaggcaccttattgagttaggcttggctatgatgtgtcacagtagaatgcctctgaaatattgggttgaaggcttcgccacagccaactttcttatcaacctcctgccttcttctactctgtcagaaaacaagagtccttatgaggtattatatggtcattaacctacctatacttcactaagagtttttggctgatcttgctatcctactctaagagactatgcaagaaacaaatttgattcaagatcgttgaaatgcgtttctgagtccat

SEQ ID NO: 3224 - DNA, 577 bp, Arabidopsis thaliana landsberg
  unsure (1)..(577): unsure at all n locations
tatcgaatatgtgatcattaaaatcaagatatcccaatccaaaacaatttttggatgaattaaaaagttaattatctaaaagttagattatattttttagaaaatatattaaaatttgtgctaggacaatatatcaaaaataaaattttaatttcaccatatgtgtagccgtgtaggatttttatttttagtttagcctttttattagtgttttaatgagaaaataatttaaaaatctttttgaccaaaaataacaaaaaaaatggaagaaaataataaattccctctaagtggaaggagggaaatttggctcccaaatgaaaaactaaatttcaaaaccccgccaaataggctttggtattataaagaaaacgctctctccactcctgatgataatctcaaaatcgttcaaagcaccgctcaaattctccgtcaaatcttnnnnnnnnnnnnnnnnnnnnaaccatccgccaatggagaaccatcccaagcgccagcgaacaacacgcctcgccgtcagatacttgaagcgaaaactcagtcacaacacagatggagcgccaatcgtcacacaact

SEQ ID NO: 3225 - DNA, 707 bp, Arabidopsis thaliana landsberg
ctgcaacaaaattatacaacacatcatggtctactcaggaagtcagtggaggtttgagtaactgttagaagaaccctaagcactgtactttccccattttgcaaataacaagaaatctagaaaaaacatgaatccatatttgaatgaagaagatctttaccagacataacgaattgttcatattacattgccttaaatttgctgcatggtctgccaatggatccctaagtgccagaaataaatgtcggatatgattcacaaaattcacatcttcattaacctgctccaaacaaatacacaataagaccagatatgtatatatgtgccatctattataagtgtgcaggtgttcttcctggctattattttgtaactgcgaacaccgcatgcaattttaagatcttacttactttacacaaagagcctagctgaacaactgcacatggaccaacagctactacaagaatggtctgcggagaaggaagaatagatattttaaaaaggaaagtctccagtggcaaactttgaggaagttcttgacaagtatgtataataaagcagacagaaagagcactagagaaaaatgcaaataccttaatttcagcagaaatttgactgtgccaacgttatgaaactgtaattaaaaaaagacatctggtttaaaaacacgaagaaaacaaatttaatttcagatagaaagtccctaa

SEQ ID NO: 3226 - DNA, 1122 bp, Arabidopsis thaliana landsberg
ataccatgtatcattattttataattagatctttatttaatctatgttggttagtcttgttaatctacttatcattataatctaatagaataaatctatggtcaagttataacttagattaagttgaggtatttatttatagaataatctctcatatttataatatagtttaatattttaatcacacaaatcttttataaaatcataaccccttaatcgactccgattttagtgattctcgttcccacgatctcgtagcaacacgtagattattattattcagtttgtacttatgtttggtgtgatgttaattttatctataccatgtttgtttgtattgctacgactagcgcgaggacacgtgtcatctgaaaagcaagttggtacctggaacctcaagtgccaggcaagttgtgcccttgattcacttttgttacccaataatgttctttaatatcacttattcatgcataggttaattttgatgggacccgatagtcaccctagattgtttatctcattaccttgtttacccctgaatcacttgggtagtttgctattgttttacatggttttgggataatcatttattatatctatgttccaattattcttgtgattctatttatgttcatgtcaagttcattaatgttaattggaacatagagcttaacttgagaaacacgtgccaccacaagggtttaatgggacgcccttggacaactaattaggatagctagtggcagactaccttacccgaaaggggcaagggcagtaggggagttgcatgcaaggaggttcttgggttgattttgctgcgattgcggtcagacggggattcttgcaagtgctcttcccataaactgtagcgggttttcggaagctagtggaactttgtaaaggcctcgtagtggatccctagccattcacctcggtagtgtctaagggtctagctaaccctggcgacatgggatacacgacttgtgggtacaaggtacaacctctacagagtgtaaaacttgtatactagccgtgctcgcggtcatgagcagctcaggactctctgattattaaattacggaacttaaactcaatttatcatttgcatttgcatgggcttta

SEQ ID NO: 3227 - DNA, 736 bp, Arabidopsis thaliana landsberg
acccaataaaaattagttggggttcttttattagattatgtgcaatggggtgttgaataaattattcaactgatgaactcttacaatgagggtgttgaaaaggcaaaaaatcatacgtggattcaacggagttgaatagattcaacatgttgaaaaccaaaaatggagaccacatagacatgtgtcttctttttattagatgttaaaattctaaagatttagatatttcaccataactatttaagatcaattttggtataataaactaatttattttttataaattttctatcaaaattaatcatttttttttctataaaaaaagagacttacttcatttgatttggacataaaaaagagagagtttattttactataattctttaaattatctttatatatattttttaaacttttaaacatttagaaaaatggatttcaacaataaaattataaaattaaaacaaaattatgttcaatttgtttttaacttttaattatcttaaattaaatttatttgataagagttattaatatgtagttaaaaacattaaaaaaatatatatatgagataaaattagtggggttggatgttgatattattaaacaaactattctatatgttaaaagataaatagatgttgaatgattaggtggaaagacagagaagatgatatgaagtataatgtatgatgttgaaagagtaaaccattgcacatagtgtagtaagagattt

SEQ ID NO: 3228 - DNA, 548 bp, Arabidopsis thaliana landsberg
ggcacaaacagccctgctggagcaacaatgccataactaaagatactgaggattattctaggtgacaaaaaatacgagaaccgaaaaagtggggaaactcgaagtcagtgtttttgctgaaaaggtttttgatggcatcatcatttgtgttgaaaataaggctagctagatcattgtagtgaccaggagggcattggtatttcttaaagtttccagaccgtccaattgtagggcactcctctaaagcatcgacaggacaaggttggcatgatgcaagaaatggtaagccgaaaagaaggcaggacgtgaaaattgatatcgcacaagcgaggaggattttccaagtaacccctaacctggacagaagacactgttagaaagcaagaaaacatttacttgtgtgtatgtgtctgtagacgttagcttactcatatatgtacttgtaagctcgcacaaccttatccaagaagaagttgtataagcttcctaaaataccaccaacaactccaagaagaagaacaggaagtacatcctctaaatgatatgat

SEQ ID NO: 3229 - DNA, 587 bp, Arabidopsis thaliana landsberg
tggtattaaagccggagtatttagtctctttaccgtttttggtatcccattggccgtaagtacacttttgttgtgtccttttgttttctttacaattttaggtttgtaaccgattcttttttcttttgtaattattatgacagattacttacagtattccatttgcactagcgtccattttctcaaccaattccggtgccggccaaggtaattttcatttatttaaaatgttaagttacaaatctaatggtcagattctgataatgtaggacatattagcatttattgagttcaaacgtttgatttgaataattaattgaaaagattatgtttccaattttgtggattattgtatctatctattcaaaagtaattctttcctttattgtataggagaaaaaagggagtaaatatttcctttgtaactattttcaaagtcttttcttgttaatgtggattatctaccaagtttatctatagcatttaatatggtgagatttattaacttaattatattaattaagatctctatgtaatctgctcttatattttcattatccataggtttcatcattcatgcacctaat

SEQ ID NO: 3230 - DNA, 5137 bp, Arabidopsis thaliana landsberg
tatatttcccgatgattgaatgaccaccaaagacttatgttttttgataagaaactgtcgtctagagatgttctaggtcaaacattgatgtttctttaatactttgtgtagctaaggttttctaaaatgcaggacattcaaagggacattttctagtttatatttggtccagttacgattatgggttacaagagctttaagcagttctgctcctggctaattcaatcagtttatatttgtttcattggctctttagacccactttggttccttctatgtcgcagcctctcccctacctttttgtacattaggttcttgaattggttttgagtttggcttttgctagataaactgaatatctcctgttaactggtttctttcaaaaaatttgcagggcggtgtctttaccagataattcggatttcatgatattcaatcaccgtggcagactgttcccaccgcagatcgacatgaagttttgaatttttatcacactgcttagtcaaacactgatctgtgtaatgttatgagatgtttccattgaaattctactctaagtaactactctgctttgcatcaatttttgattcttgaaacgagtcttgtgatgtttctgtgtgtcaggtctctacttagaatcttttagaatgaagaatcaacataacaacaagtgcacaggtcctcgcaggataggatactgtgtaaatagtcaaatacaaacaattaaaacaacataatttgctattttattaattccggttacaactttctgatacattagaaaaagcataaccgaacagaaccggtttagattctcttggcactgttctggaaggtccaactccaaatgtcatgacgttcaacgccacggcccatggcaccagaaaaaccggggtacatattttgaagaaaaaccttagagagatctaaatgggcaacgatcaaaggcttcttaggtttcttaacggtttctggcgcgagagtaactgtaaccttggagtttctatactcaatccaagccttgtacctctctccattactcagcttgaactctttaaacgaccagtgtttcattttcccaattcctgtctgaacccaataaccagctttctcagcaaaaacggaagtaacagagttgatattaatcccgacatggttatcattaatgtctccaaaacctttgtcctgaaaaacgtcgaattcgacagcaaagatgtggtttttggggttgccattgttggttttgttgaatatcccgaggtatccagcgggtccaggaccgtcactttcaatggaagggacgacaacaaaagcaaggccgtgaccaggggcgggtttgatgcgagtagagatggagaaagtgaaagaagtttcaaatggataaggagaagaagagtttgaagaaggcttgaaagggactggagtggaccaaagactttggccgtgagagaatgggttctcgtctcgtgtcatggagagagctccggagcggctgacgccatcagaagcaggaccgagctcagcgtctccaaggaagaccaactctgaggttttgaggttgaggttgacggcggaagtggtgtgagctaagagcagagcaagaaaacagagtttatgaatcttcattgcgttttcgtaactgctgtttactcaagtgagagtttgaaagagtgaaattattaacgtggtgatttataaagagtaaaacataagcccatgtacatgacgtcacattgtatgatgtcaagtaaacgcatcacctacaagatttccttatcctttccataaattgaactcgaccaataaaaaacgtgattgttaataatggaaagaaaaaaactttaaaacaaaatcatcgaatggtcacatcagcacatgacattttgtcaagtaaacgcgtgaagacactgttgtgaatacactcattcagcagagtatgtgtacagtgtacgcatatctcgtatattagattgtacttgtcttttgcgatgtgaaagcatagtatacggtatcattatgtggatgaatgaatagaaaacactacgtcaaaaggataaggaaaatctagtgggttctttaattctttacccaccacatagacaatactacgtcgtatagaaatttacttagagagtattgaagaggaacatagacaaccttgtgtttctttggtgtaattggtctagaaaaggaccaatgcaatgcaaagatcgattgctgtttatttttctacgagagatattttcaaagaaaattcactcaggaaaaagtaatttgctttgcatcccaaattctcatcagtttatcacacatatgaaatgttcaacaatcttaccattgatttcttagtaaatcgatctctgatttttcatttgaacgatttttaaatagtaatcgtaatattgtagtttaacccaaaaatatttggcacaattggttaaaaagttcaaattttttagagagatcaaaggttcatattttctcaacaaataaatattgtgaacttacaaaaaaagatagaaaatggagggttcttttgcaaaaaggagcaaaaacggattgagctgtgtagttgaggctttaaatatggcccatgagtcgttgtggcccacaacttaatatagaaaaaggtgcaagttgcataggccaacgccaatgtaaccctcattaacttcattattagtctaagaaaaactcttaggcacgatccgcaagctacgggggtagactaaaatgatcgttgactttgaattcggacagcttgagattgtcttgtgattcattaattattttcatatactccatgttatgttgtaaatgctcaaaatctctgcctatcattcattactcatataatctctcttggcaactctatggattcgtcggattcagagtcgtcgaagccctcatcactcattactcaatttatgtctctcgacatgcaagctacggaggtaagatgatcgttgactttgaattcggacagcttgagattgtcttgtgattcattaattattttcatatactccatgttctgttgtaatttgcattcatactcaaaatctctgcctatcattcattactcagataatctctcttggcaactctatggattcgtcggattcagagtcgaagctcatatcactcgttactcaatttatatctctcgacacgactcgtttcggttgggggatcccgtcacatatctttgaaataatctctctgctgagctcaatggatttggattcgatgccgaagccggagtcggagctcatgtcagtcacaagtcaaataatctctgtcttcaactcaatggatctgaattcccagccggaggcactgtcccagggccatatcactcattactgatcgcgtgaatgatccagaatccggtttccgatatctatttggattcagattttgaagactatattgcggttatattgaatctcgagccggagccggagctcctatcactcatctatcaagtattcacccttgtcagctctatgaattcaaagtgggagaagcttatttctgtacgccctcaagtagtacacagattgggaagagacaaagtttatatgaatgatgaacaagtctcgtgtagaaggtataacaagtgggcgtgtctccctaaaaactggtttatgttgtggtttataggagaagacgacgaaacgcactttctttgcagagcttgcgaaggccataaccataaagaacataacaacgctccagttgagatcaaacaccatcttcatcccaagcactcacttctgcttgtcaatattgaaatatatcctagagagaggaaatgctattgttgcgacgaagatctcggaactttcttttatcattgctcggcttgcgatttcactctgaatatagcttgtgtggagaaaccaccggtcttatctatagaccatcccaagtggcatgagcatacacttgttctgttttcaagaacaacttctttaacttgcgacgtctgtgccttggcctattcaacatctcctttctatatatgtccaccttgtggctttgtggtccatggaagatgcatagacttaccacgtgtcataaagatatcccgccatctccaccgtatatcatttacattttcttttgaccgaggagatttgtcttgtagtgtttgtcgcagaaaaatagacgaagattacgggggctatacttgcatcaaggacggctgttcgtatgcggctcattcgaaatgtgcaacacaaaaaaatgtgtgggatggcatcgaacttgagggagagcctgaagaagttgaagaagaagtagttgacccgtttgtgacaataagcgacggagtcatacaacatttcggtcacccacaacatcatttgagacttgacgagaacacgagcagagattacgacgaggataagttgtgtcaagcttgcgtcatgccaatctattttggtaacttctactcctgtacgcaatgcaattatatactccacgaagcatgtgccaatttctctcgcaaaatgcatcatccggtacatccacatgtgctcactttagtgaactctgacggtgctatcaacgttagaaaaaaatgttcagcttgtccttggatgtgcacaactggtttcttctatgagtgcagtaaagaagatttccagctacatgtgcagtgtgccaacgtttctgagccactagtccatgaaagtcatatgcatcctttattcctaacaaccaaaccagaagagtggagagtatgttccgcttgcaaagagtcagattgtactgtgacaaatgaaacattcaactgcatagagtgtgattttgctttgtgctttagatgtgctactttacctcaaaagttgaggtataagcatgacaagcatacgctcactctttcgtatggcgaggagacaagtaccatgccatcttggtgtgaaatttgcgagagaaatataaatccacaggagcgattttatatgtgtgatgagtactgctgtgtcaccctacacattgaatgtatgcttggggtggctttatacatcaagcctggtttatagtggatcagcttcaacaataaaaagatgtatgctctggccaacaatcatcatatgtctcgacctctttgcttcagttgcaagga

SEQ ID NO: 3231 - DNA, 578 bp, Arabidopsis thaliana landsberg
gatttatacacgttcttgcagtaaaaataaaccgacctgaagttgaaccatattccatctcgccagtctttgcgcttgtgctagaggaacatgattcaagacgtttctgcattttctcttcatcatcctgcatttctttctgcctcatccttattttggcttctattacccgttgctcttcctgcaaaaagatacagtgacagaatataccacttgagtaaagcaccatttcatcaaagcttatctagaaaaaagttatgttgtgtggaaattttaagacttacaacttgttcaatgcccttttcctcctttgacttgactccacgatactcgacagcatagttgggagttttacaaaaagggcacctcatacatgtccaggaggacacaaaagggaaaaaacccatcaaattaataagaaattttctcaaacattaagccaaatgttaaagaagcccctaaaagcttatgcaaaggatttaaaatgaaggatactgagtaggccgagctgaattaagattcttcatttgcaaaaaacactctgcaacaaatgaacaaagaatgccatgtcaaatgaa

SEQ ID NO: 3232 - DNA, 669 bp, Arabidopsis thaliana landsberg
gggagtcaatggctgggctgtatctttatgatacagctccaaaaaaacttaaagctctaatttttaaccaatcaaactttagctttcctaaaaaatctcacagcccaaaacaacttttttagcttttttagctgtaacttttaaaatttttacaacacatttttttgtgctttaacaggtgtagacattttttttatataacaatatttaattctctatttacaatatttttattaatataaataacataaataaaaagtgacagaataatatatatttcatttagttaatataaaatttaatattataatatatattttcatcaaaaattgtataataaatatatgaaacttattattattattaaatatttcatttgtaatcatattttatattgcaaaattttaaaattcataatattgaactatctttaccaattaggcattactatcaaaatacctatagaaaaaaacttacaggtacagcaaacatacttacagcaaacatagttacagcaaaacaactacagcaaaaattctatatctacagtccaaccaatcaccttgaaactgtagattttaaaaaaaacttaaagcttgattgacacattttaagattgtagaaaactttaatactgtaaatgctttttacagcccaacccatttatgc

SEQ ID NO: 3233 - DNA, 310 bp, Arabidopsis thaliana landsberg
  unsure (1)..(310): unsure at all n locations
cgactgaagggnnnnnnnnnnnnnnnnnnnnnnnnnnnnnnnnnnnnnnnnnnnnnnnnnnnnnnnnnnnnnnnnnnnnnnnnnnnnnnnnnnnnnnnnnnnnnnnnnnnnnnnnnnnnnnnnnnnnnnnnnnnnnnnnnnnnnnnnnnnnnnnnnnnnnnnggctagtttaaacagcgtttgtcggcaaaaagtaaacctctatctcacatcctatccgtgcggccaccatcaatatgaagcttcctcagcagcttacatctgttagctacatcgatcagaccaaagtttgaacattccgtagccatta

SEQ ID NO: 3234 - DNA, 651 bp, Arabidopsis thaliana landsberg
tttgaaaataattaattaaaaaaatgaaaaacaaaaaggggccatctgtggatctctctctacaaaaagggctatctatttgaccatgtttgaccatctgaataaaaaggagatttgtggaaaaaaactcttgtagtcgtctatttttataactttatccttcatcttaaaagaatacagaataattttttgaagtaaaaaataattcacaatatttgcagaataattttataaagtaaaaaataatacataatattgctattgttaagttttctcacattttaaaaatttgataagtaatatatcaattcgaagaactcgagacgaggagttcaactctacctttctaattttgaaaatcaaatgtatgtgaacgcaaaaacgtttataatatatgtataaagcctaaattgcatattattttttactttgaaaaattatttcgcatttttcaaaaatagagagtaatgttacaaaaataaacgactttaaagctttttttgcaccaaaccctaaagaaaatcattgtattgtatctaaatgaattccttgagaactaccaagataataagaatattgtatgtggtccatcactctatgttattgtaagtgtctatacatataatttgcaaaaagtggtcctcgtatgat

SEQ ID NO: 3235 - DNA, 447 bp, Arabidopsis thaliana landsberg
  unsure (1)..(447): unsure at all n locations
tcacataatgaagtctaagttgggctaatagttaggctcattttgctatatataaaaagcctttttnnnnnnnnnnnnnnnnnnnnnnnnnnnnnnnnnnnnnnnnnctcactcgtctcttccgtttcgatctctgagacttttgtagcgaaaaaaatggagaaaaaggaagaagatgacacgccactcgtagggatattctgtctgaaaacaagacaagacatgaaaaggttcgaagaaacagaggattgctttatcctcgatttcgatccttttgattcgttcgacgctaaaaaactcacctttaccgatgatgttcgtgaaggtgacaaagatttatccatcatccatgaaacaggccaggtttgagatttgaaattcaaggttttgaaattagggtttatttcaaaaatttatgttttaatggaatttgatatgattcaatag

SEQ ID NO: 3236 - DNA, 455 bp, Arabidopsis thaliana landsberg
  unsure (1)..(455): unsure at all n locations
tgcgacgctagatcatgaggatccgcggcattctattcttcttcagtgtagcttgctctccatttacggtttgaaatcgacatggtggctcgattcatctaaggtactacggaggaagtgtcacagaacagagagagtcggattcacaagcgacataatcactttccatctctttcaacttaaaccagaagaacacagtcggttgatactactgcacactcatgcgtccctgtagtcgattctgagcctcatttgctctgctggtgtcgctgagcagtcttcagactctgatctgaggctgtatagaggacagaaggacattagtgactaggatccgaagaagccgtagcttatgcacgctgctctcgagcttcaaccgcgaaacacgaagatctgcgtagctggtgcagacatctatnnnnnnnnnnnnnnnnnnnnnnnnnnnactagcttat

SEQ ID NO: 3237 - DNA, 616 bp, Arabidopsis thaliana landsberg
agtccctggagctggtgttcctattcgtctctctaatggagaatctcttgttcaatattatgttccttatctctctgctattcagattttcacctctcgttcttccttgatccgcttaaggtaccattcattgctttttatattgccgctttgatacgtttagattttaaagtttgatcctttgatgaatctattgtgaagatgatgtgtgactgactcttttttttgggttgttcttgattagggatgactctgaagatggggaaagcagagattcgtttagtgattcatatagtgatgagagtgaaagtgataaactttcgagatgtgcttctgatgaaggacttgaacatgacgctctcttgcatcctaatgatcggttgggatatctttatctgcaatactttgagagatcagctccttatgctcgagttcctctcatggataaggtaactcaatgcagcttcagaagatcagcttctttgattactaggattagtcacttggttgatcctcattagcaataggcgaaaaagtatgtatgtagattagaatatattatcattcaagacttgaattgagacatgatgattttggttgattcagatcaatgaat

SEQ ID NO: 3238 - DNA, 637 bp, Arabidopsis thaliana landsberg
attttttctatgtctataaccatttacactgtatatacagttgctgagaatgatgctacacaagaaagttaacactcaagcttcatcaaagcaaacatcgacaaaaaaatacttgcaagacaagcaacagctctcgttgaagaacgaggaagaagaaggacgaagcagtaacgatggggggaaatgggtcaaaacagattctgattgtgagtttctgatctttggatttcttagaaagattaaactagaaaaattaatacatcaactgattccatttgcttcttctttaatttgcagtcattgttcttgagatctgaatatatggtccacttttcctttttcatgttctttcaagaaaatacaggtaaaataattgacctgatcagtgaatctttgttatattagctttgctcatagtactgaatctgatactaaatattctatgttttggcagatagagaatcttcacaatatcgagacaatttctttttctctctgatgaaagtttttgggtctctctatctatctgcagagagcccatgagtcccttttttttgcatgggtggggccataaaaccaaaacatgttttgggaactaaacatcagacatcggacatgagatatgtatatgcataca

SEQ ID NO: 3239 - DNA, 1480 bp, Arabidopsis thaliana landsberg
atactaggaggggttttattgtaagagataaacatgaaagaactagtacatacggtacaagtacaaggtacatacataataacacttaacaaaattccaaaatacttaaaaatgaagcaatagttcagacggcacaagtacacggtacagacataacaacacaatacttaaaaaaaattccaaagtacttaaaaatgaaaacataatacatgaagtaatagtacatacagcacaagtacacggtacaaacattcaactcctcataattaacaccaactgaacttcttccctttacccttgaaatttgtttcaccctctcagattctttatttactacctccacgttcaaagctggtctaattcccttagcattcactaccattagataacctaaaaagtcatcatcatctacaatagatgtctctctctgagatgtgcatagaatataactcaatttcaccttccttgaggtttcatctattccaatcttcttgcatatcttttctactaacatagagtatgttacctttgacgtcctcaacaatacaccgcttaaagaattgtttgaaatccactcatgctcttctgaataatacccattgtcaaattgtatgaatgtgtgcttgttcttcatcgtctcctgtaattacaaataaattataaaaacacaattacgtaatcattcagatgtagacataattgtacctatattataactcactaataccatttgtaccacctgtcatattgtatctcaataaaacacttgtaccgcttatactattatatctcagttttaccatttgtcccagttcgtcaattctgggtttcacaaatcgtaaatttcgattgaatactcactaaattctctgattcaaaacgataaaacaacccaaaatgaacaatacaacaattttatgttattaacaactaactccaacaagaaattcacattaatctacatatcaaaacgagatcggatttacttttgccgtagaagaggaagctcactttgggagcagactatcggcttgaaagctacggcgatctcggaagctaactcgccggtgaaattagagctcaaatcgccggcgaaatcggagctcaagtcgccggcggcgaagtcggagaaaatcacgtcggagagtaggttcgcgattttggagacgaccgttattcttttttttttttactaaatcatttactctttattttgaaaattcacctcagttattcattaaggagagagatataattgcatatcaaagagtggtactcagaataaaagatggtatgtcagaattgtttttcaaaaatagtggcaaaatagaacgtggctcaactggtacagaggttttactcgaaagaagaacctctggttgattggagacggttatatccgcccgggacaaaataaccggaatcgaataccggaaatgaatcaatccaaaattagggtatagattagaaattcagtttc

SEQ ID NO: 3240 - DNA, 1488 bp, Arabidopsis thaliana landsberg
agtttgatgacgcctggtgattcgtaatggatgcgtccatttttcatggggattgtcccaaataaccagaacttaaagttattttttgaactaatctatttatcgcctaaggaggcttcattttcgaacaagtatttgcttgaggaggcttttaaaccttcataactatgatcccaagttttttttttatagaaagcggatttgcaaaatccgttcctttaagtatttgttggccatgtggctaagtttcaagattttcaggttgatcagacttttctctttaaacgtgagaaccaagctcatttttggttgcgaattccccacctcgggtttaatcaattaggtttatttactaggcttgggccttaactattcttctttatacttaatgagccttttgtatttaatgtgatggttgccacttcccttctcaagaaacaggaaaaagcttcacgcctttgaggcaataattgctttttctcgatttccaaaaatggtttaaaccatttggacacgccacaattattaaatttgtggttccaaagaaaaccctaactctctataaataagaatacaaactatcactaaatttttcaagcatgatctcaaaaatttacttggtaaatacttcaatgatggagaacgaaggagcttccaccgtttgtcctctcgaccccgacagcccgttgttcctgtccgacgacggctttgagccagccggcgttctcttccctcacgctgctttccatttcccatcggaggacgaaaaagaggcataagacttcatggacaaggtaaggtcttaaccttcttctttttttaaaaaaatcttcttcttaactctatgctgaacaattcccgtactaggtcgttgataaacatcaccgcttgtgcgacgagaggcagcgtttgggcctcaatagacagacgctcgagccccgagttgctcgagtgaaaaggaaggtgagagccaaggagagcgatccctttcaatgagaatggaggaactttgactgcgtggctaagatcccgaccatgctccggatgtatctccgtgcgcagggtcaagttcccggtcccgtgaacactcctgtcaaggtgatcccatgcgagagcgaagacgacgacgaggaagagcccaacaactcctagaagcgggtaaaaaattacttcgaggcggaagtcaagaatgaggcatcgacttcgaaccgtgaactggcgataaaggagccttaaatgtcccccgaactcgaatattctctttttctttcctcttttttttttatcttgtttggatttagtacgagcttcggcccatttttatttaaggaaactttcctatttttcttgatttggaaaatattcgtttcagagatacgttttaaatatcctttcaacgctatactgggaaggccatggttacacgccatgaaagccgtcccatcgacctaccacctatgcatttaactcccctccgatatggggatc

SEQ ID NO: 3241 - DNA, 461 bp, Arabidopsis thaliana landsberg
ttatcgcatatgatttcggcatcatacggttgtgaaatcacagttgtcccatcgacatggccagctgcagaggcgcttaaaatgaaaccagacgggattctattcagcaacggtccaggagatccttctgcagtgccttatgcagttgagacggttaaagagcttctaggaaaagttcctgtctatggaatctgtatgggtcatcagttacttggacaagctcttggaggtaaaacctttaagatgaaatttggtcatcatggaggaaaccatccagttcgtaacaacagaaccggccatgtcgagatcagtgctcaggtatgctccatttactatctatagattataaccacacaagattaaacagtctaatctttcagttctaatatagtttacaaatatgatgggaaaataaaaattattaatcaaaacttagttatatacttatatatgtaactctg

SEQ ID NO: 3242 - DNA, 1028 bp, Arabidopsis thaliana landsberg
acgtttttaagtagaattcgatcttgcagcttagaactttcaacttggacattgatttcatctggtttatctggtgctttggctctgagtccccgctttcaaacctcacctccagcttgttcttgatggtttgcttgagggcaagcaaagactaagtttgggggagttgataagtgtgtattttgcatgttttgagcatccatttgtcatcagtttaacatcatatcatcactgtttaataccatttctcatcatttgtcatgactttatatgtttaggatagatttgcatgcatgttgcatatttgcgttgatttcaggtgatttggagctattgacgagctatctggaagaagcggacctggtcatgtcaaaccactcgaccccgaagtcgagtaggagtttcaagatctcaacagatcactcgacccccaggtcgagtagaggacatcactacttcaccacatcacttgaccctgaggtcgagtgtcttcatccccatcacttgaccatcactcgatcacatcactcgatcccgtggtcgagtgtcttcacctccattacctgatcatcactcgaccacatcactctaccaggaagtcgagtatcaccatcaccaccactcgactacatactcgatggcaagcttcagagtcttcttcattctgcactcaaccagacactcaagcacaaggaagaaaagaagactccagctattcactcgacctcccactcgactccatgggtccagtacagttcttaatccgtcccaatactgtgtcgttttaagtattaggattttggaatatttggctataagtagcatgtacttcacattttcgaaaacaagtttttttctagttttattccgcaaacactgtgttctagacctttgtaatccggatttctctttgtctattcagtatccaacattcgttcttgatttcttttactgttcttcattctgttatcaccctgctgttatcatgtttttaacctgttcaacgtttatgctttctactatgatgt

SEQ ID NO: 3243 - DNA, 554 bp, Arabidopsis thaliana landsberg
  unsure (1)..(554): unsure at all n locations
tctgtttaatgttccttactccgtaaaggcttatgcaaggtttgtataaaaatatttgtttgtgttaagggtatatatagtgacaataagttgtacttatgtacgtggttaattgtaattaagagcttataccaatagagagatactatgttttcaagttagattaaaattaattaattgaatatgttttgtcttacccaaataacactaattttgtttgatacatagtttcataatattatgacatatatagttttgtagttattgaattctaacacgtgttaaagtgaaataaattttgacaggctgacttaacatcaaaaagttttgaagtaaatgtcatttaagtatttgacatttttttggctcatgtagttgtgagcttgcaaatttaactctataagattctgtaagattttttttttacttaagacaataaatagtttttctttttgaccaaactattgtggcacataaactntaattacattcattagaaatatgggtnatatgttaatcagtcaattatatgttagaatatatatacacaatat

SEQ ID NO: 3244 - DNA, 2635 bp, Arabidopsis thaliana landsberg
  unsure (1)..(2635): unsure at all n locations
aaagattcatcaaatgtccacagctacaaaatctctattgttttcaatcaattacaacaagcttcttatactcatctctagctatagcagcctccatgatcattacgggatcaatctctccatcgtaatccaagaacattttttggaaaacccacttaccaaagccactcctttcttgtttccaagcacaggcgttgacctcgaatccctcagattccaaaacacaatctccggcacagcctctccgtaccctttctctctatactttctcacaatcaccttgtaatccgtttgccaagcatcattctcttcatcttcatcatcctctgaatatgatagcgtatcccatctattactcggagtcggaggcgaacttctccatttattatacgaagaagtcgaagtcgacgcttcatcaaactccatgtcactgaacacaaacaccctcttgatcatggcttgcggcttaagcttgctttccacggccacttcaagaatcaaatcaaacactttctgaaaatcagtgttcatatcccattgcattctctccacaaactctgtttttgatctcaaatcgtctccttgcaccaaatgcagttcagggtttgcgctgaatgttataagctttcctctccatggctcttctgatagctcagagactagcaatccaagggcgactgaaacctccattggctcaccatacatagatcccgaaacgtcacatatagccatgcaattggtcaaagaacctttctctttaaggtcgtcaaccattnnnnnnnnnnnnnnnnnnnnnnnttgtccaccgtctccgccgtttaactctctgattatctcgtgaggtaacacagcaccggcggctatcttcgttttccccgtcttggcatcgttaagatattgttgaaacctctctgcgtcacggtacaagaaaatctccttgtatgacttcatggccactgatgcaacacggttgtaagggagagatgtccaagctctagctcccatgtatacttcagggagttgcagagtcttccggagaggaacaaggacgtgtttccttagccggtcacgaactctatacgcatagtgagcatcttccacgccttcatattccgggaatgattcttggggaaagatgttcctagctatgctctcgcagataagagttgctttgtcgaacgaagaatcaagggatggacaccatttagccgctaaagagattttgtttggttggccggatgtcaaaaactcaaggtctctctttagttgatttgcgaatagttcagagacacgttcgtggagaaacctatagttttgatcgttagaataccttgtagatgcaaccttccccattgaaaccttcttttgcttgcgattcaaggttgctctggctttctcttcttggttcttcctctccgcgttcgctacccttagctccctcgtggctgccgacctttttaaaaaatgacgacccctaccccgaccacctctagagaaacgggatcttctacgtagagatgctgcagctattgtatcgtacctttgcgttttatgtatactgcggatttcaggtccttgtagaatccggtaaagaacctccggaaaatctttaaaatagcaaaatttggagagggactcgaggttacaagctagggttttgggatggtgaccatggagccacaacgccgccgtgaaaacccttccttgtcagatattccagtgccacggactccacgaaggttacagataagcttgagagtggttaaagaatcatggtcccaagcctcctctagccgctgctccagagatttcttgggcgtggaaggaacaatgtgaaagaagaagtcgaggcaggggttgcctgaggagaggtaggtggcggatctattctcagtgtagcccatcgcaggtgaagatttgtttaaatctactcttcgtcgtctaacaggtctaaccggtctaataggtcgaacaggtctaacaggattgacgttgactttagttgatttcttgacgtttgagacctttgggacgctgggacgacaagtgttgatgttcttgaggagagcggcgaggtacgtgtggggtctttcctcggtctgtcccatcggaggtgaagtattgactggattggtgggaccagaagatgtgaggggagcgttagagtcttggatctcggatggaccagggaactgagaagccatggttattttaaaatataaaaagcacaagagacggtcgaaaatggagaacacaaatctatcgagagaaaattaaagtgttgaaaattggaattgagaaacaaggagcgatattgaatcaaggagcaatacacctaatatttatacaaatacatatgcaccgactaacctagctagagtttcctaaagttgttacaaaatataaggtggtttctatttaacaaagatacgaggttgtttagatctttgtgcaaaaaacttgagtcagtagcttggggttcaagtttagaaagacgatcattaaagtctcatatatagtataatcaataaatagttatttaaaatcttttaaaaatggtgaataatgtttatttgatatattatactgtataatttatcttaaaataatccttaaaaataaataaaggtcattg

SEQ ID NO: 3245 - DNA, 462 bp, Arabidopsis thaliana landsberg
aaagaagagagtatggatgataaggaagatgaaaagtgtagatagctatgatgatgataaggaagatgaggaagaggagagcaatgatgataaggaagacaaaaaagaagatatcaagaagtctaacaagcgagggaaagggaagactgagaagactcgcgggaagacaaagagtgatgaagaaaagaaggatatagaacctaagactccttttttctctgatcgccctgtccgtgagcgaaagtctgttgaaaggcttgttgcggtggttgataaagattcttcaagggaattccatgttgaaaaggtttgccaatagtttactttgtttggtttatatatagtgtttcacggttagatctattagtaatttgcttttgataatacagggaaaagggacacctctcaaagatattcccaatggtatgttcatattctacatattatccttagtccctctca

SEQ ID NO: 3246 - DNA, 3539 bp, Arabidopsis thaliana landsberg
tttttccgtctgaacaactatctataaaatggttacgtataacaacaaaaatgcgttcatttatttataacgatgcaggtggtcgttacccgaccgacttaaattcatttctcgaatttcgtggagcattgcatgcaaatatttctcatcaaaaagaaaaaaaagaaaagaaacagttgacatttattttattaaaattctattcctagagtataattttatcgtcaatgtctttcataaccagcttgaaatttttggcacgccttagacttttagataatgcttccttttataaataaaatctatcaataacataaatacctaataaatattagtaaccttgaatatatacattaatacatatggaaatgtcatcaataaaaatactataaaaatagattcttaaatttattttgtatctaaaataatataaatacattaaactaatatgtattgtttgatagtatcgtaaaataaatataaatgtagttgaggttaagtagaagataagtcaaactaggagagctttacataaatacaagaaattaaaggttcatcaacaagacaatgaaatctttagtattactattgaataaattatgagaaaaatgttaagaaatgtgattgaatgtacaacatttaaaatgtatacatgtatatatagttatacacacacacacacacacacacacacacacacttatatccttaccatacactagatcacttaaatttgtttgatagaatacatttactagatttataacaactacattttaatttatatatatatatatatatatatagagagagagagagagtaaaagtgatatttctattcactctttaagtgtttttattttattttaataattcatcaatccatttaaatcatttactaaaaatttatgcatgtactgataattgatttatcacttgattatattttccagcaacatgcaatatatctatctgaactcgggtgttgacccaacgaaaacactaacacgacctttgtactacatgtacttgtcaaaagatcaaacttcttagactgcattattatagttgttaactttatatatataactatataaggagaactctgttggcaaataaattaacatatttacattagatgttgaatcatagtcaattcatgcactattgatactagagtagatagtaatccaccaggccaattgggatttttagataataaaaatactatgaataaatgcatcaatccacctgtcaatgattctacactataaattacagtgtgaataatttgttagtcaatattattttctttacaaagtaatctaataatgcaagataagaaaggttgatcaaaacaaggaaataaatatccatatatagtgaattaattgaccatgattttactatttatttgcagatactattctctttttatacaaatcctccctaaaatgttgaatttaatctgaagaaatcttagtgaaatatattttgccacctagtcattaggaagtgatgctcacgacgatgaaacgaatagtcaatccgatggctaaataattaattatttagaatttactcgttgacttatttaataaaatgacatattcaagattaacttgacatacatacatatgtaaatgtgagtatgcgtgtgggtctatataaatacatgagagtaatcgtgtgaatacaaccattacaattgtgtgactatcatttaaagaataaagcaaacacatgatccaaagaagatagatagggagacaaaaaaaaatcaaggcaaaaaatgggtttctctccatcctcttcatggtttcttcatcctcagcttcatcatgttgtttccaagatgtcttactttgatgcttttttgttctatgtaaatacatctctctctttaacaagaaaataaatacatctctgatctctctatctctctaaatatatgaactatgcttttcttctcttaagaaaataagtaatcatatcgcttttataatttttttcttatcattttgttaaaattatatacagattgtgcacttagtggacaagctaggattgtggcatagatttccagtgttattaggagtggcttacttggggttacgaagacatctacatcaacgttacaatctggtacatgtcggtccgatcaacggtcagggttacgacaccgatgagttctgttatcgtacggctgacggcaagtgtaaccatccctccgataacaccatcggcagccaaggcagcttcgtctgccggaatatgcctccctctacttctcagtacggcgtaagtttttttcttgctctccttcatattcacaatcactttttcacaacatgcaaattaattttgtacttttgattaaatctataaaataaagcgaagtgatatataatatagcaaaagtaaatagtagtggaatgagacactagaaccaaattttgtgacgcatttctttttaatcactacttaccggtggttgaaaattgaaatcatgatgtaatgttcctctgctttttattttattttgtcagcttttgattgattttatgtgtttgttgatgcaataaagtttttttgtcaatacttttttttccctgaaaatttagaaaaaaaaatgttggagttttgttattattggagtggatgcacctcatgatagccaccctaattgtattagtgttggttttgcatgatacgtaattcatctacgaaattatgttatggattgaattacatcagtatgagtaaatgcacaactgcatgatacatatttttttttgtctgttttaggatcacaatgtattttatataatatatgatatgattgtgtgtattatgacagattttggatccacatccaagtgtagtggcgacaaagttgttagcgagaaaaagattcatagacaatggggaccaattcaacgtgatagcttgttcttggatccagttcatgatccatgattgggttgatcacttagaagacacccaccaggttttgatattttcaaatttaacccctttaatcttgaaaatttacatttctttccctcaactttaagattatagattaataaagatattgaaatcacctaaaccagattgagcttgaagctccagaagaagtagcaagtggatgtccattgaagtcattcaagttcctcagaacgaagaaagttcccaccgatgatcaccacaaatttggcgctgtcaacactagaaccccttggtggttagtatctcaatcatttagttactgcttatttgttgtttaattactatccgagtttgattttatataacattattttggggatagggatgggagtgtaatatatggaaatgacgagactggaatgagaagagttagggttttcaaggacggaaagctaaaaatctctggggatggcttgttggagagggactaaagaggtgttccgatctcccgtgaccataagaaaacaggctggccaaggcttccttttcttgttggcaaagcctccttcttttgtccaaaaggaaac

SEQ ID NO: 3247 - DNA, 2738 bp, Arabidopsis thaliana landsberg
  unsure (1)..(2738): unsure at all n locations
ctagtctcatgcttgatatgttcttagtttggttttagtttttgtaattagttttgtgatgtgaaatggagtaaatctgacaatgcaagaaaaagaaccaaaacatttaagtttgtatcgtttcatgtttcaatatctattgattgtcaactctctcatgacacaaaagaagaggaaacttctgtttgactcttcctttcgtacgacgtcttcatctcttttgatcgtgttctcttctcaagctgagttccattttaccaatttgaggattgaacaatgactagattccaacatccggatcccttaacattaaaggcatgactctgaatctcttgatgcgttaggttatttggttagtttgaagttggagaagaaaaaaacgtttaaaagcatgagaattgtattacagggcccaatcgaactagcaccacaggaaaatagttttttttttgtttttatggtatgaaccaaacgagaacagttgtacaccaacttgatgacgattattgatgggatacaccaaccacccaatttatgtagatcataaatataaaataaagtcttccgtcttcacttggagatctcatcaaactaattaacaaacccctttgattcattcatttgtacccgatcaaaagaatggctacagaagcagtagacctaccaattcatgagcaccctctttttccttcagctcgatgtattgatgatgaatgtggcggctgccatgtaaatggttacatctacaacggctacttttgcaatgaacctttctgctttatttggttccataaagagtgtgctgaggccccagcggagatcagccatagttcccaccgtcaacatcctctcctgctcaccaatgactcgaatgatggccgtccttgtgatctgtgtggacagaagctattgcctccttgttataggtattccacatgtgagttcaaggtggatttgacttgtgcgatgaaaccatcaccgcctgctattgaacatccgctgtgtcatcaccattcacttgtcttcttgaagaaacgagaggagaaggtctcatgtgaattgtgcaaggattctattgcccgaccatcctattcgtgtcttgaatgcgatgtgtacttccacgtaaattgcatccagctctccaaagaggtaaatcatccttgtcattctgctcatcctctcaagttaatcccatctgagtcacttacggatgatgccgagacaacttgtcttttatgtggagatataccagctgaaaatatgctttatcattgttcggtttgcaatttcacatcgtgccttggttgtaccaaaaacccaccactccttgttattgagcatatcaagacccacaaacacccacttattctctttcctagaagaatcccaaatatctgtgacatttgtgggaagaaatgcgagtttgcggtgtatgtatgtcctcagtgtgattttgttactgcaagagggtgtatcgacttagctcgtgtcatcaatatcaatcgccatgatcatcgcatttctttaactcatcatctcggtactgggtattcgaaatgcggagtttgtcacgaaaatgtaaatcagtacaagggtgcttattcttgctctgtttgccctaactatgctgttcattctacatgtgccgtgagaaatgacgtatgggacggggtagaactggaagggacccgtgagatcacagaagacaattcaccattcaaggtggtgggtgataacttgatatgccattttagtcatgaagagcatcctttaaggctccacaaggacgaagtcttcattcatgatgagcacaaacgatgtgcagcatnnnnnnnnnnnnnnnnnnttggctccatctactgctgtgaaacgtgtccattcattctccatgaaaaatgtgctaatcttcctatgaagaaaagacttgtcttcggcaccagaccatacacattaatgaaagaaactaccaaacttacaaactgcaagttgtgtggaatattatctgacggttttgcgtacagctcccatgagtggttggatgtagatgtgcattgtggttcccttaatgagccgctcgttcatgatggccatatacatcccttaaattttgcaaaaaaagaggaacacacttgcgatggatgccaaaagagtatagaagattatatgcttcgttgtaaagcttgtgactttgatttgtgtttgtattgtgctactttaccagaaaagatttggcataggaacgatgggcaccctctcactttatgttgtggtgagaaggaagaggcgagcggtaaatattggtgcgacatttgtgagaaggaattagatccaagtatatggttctatacatgttatgattgtggagtcaccttgcatgctcagtgcgtactaggagatttctcacgtctcgtgctaggacaaatctactcctttggggaaaaagaaatcgagtttgaggcggttcctaacaatatcaacactcggccattttgcatccagtgtaactctcgatgcaaggtctccgtcatcctaaagatcctaaaggattctgaagatggttctgatgatggttctgatgatgtttctgatgatccttctaatgatgtttctgatgatacttctgatgatgattctgatgttgtttctgatggtgtttctgatgatgcttctaatgatgattctgatgatacgtcggatgatcacaatgggtatattctgctcccgatcatgtttatcga

SEQ ID NO: 3248 - DNA, 604 bp, Arabidopsis thaliana landsberg
  unsure (1)..(604): unsure at all n locations
aaagcgaagctcaaaatggaatcgagaaactgaaacaaaaaggctttacttttgatttgagttgagaaaactaaaatgacgggagcgagttttagttgcactgtcttggatttattgaaccggattctcctgcatgagtttgcggttataatgaatgttagagaggagatatgtgatggggaataatcgcgactatagttatagaagtgttgctctcagttcctttctatgctccaaaagactgcgaattgcaaagaggaaatgcatatctcaggagttgagtggaggaacatatccaagtgcatgtagtccaaaggatatgaagaagaaatgtaagttaactcaagctccgaaacctttttacgtagatatttgtgaaaagctcagatggatccggaacagggctctcctgaaacaaaataaataacgcatagactaagttttggtggtgattggtacacaattgtagttagagatgtaaaaatctcgctttctttatcttggctttagctacataaacctctataaattaatattattgaaaccatgatttttattattttttaaaaaatactctcattcatanaatttagaaagaatcatt

SEQ ID NO: 3249 - DNA, 777 bp, Arabidopsis thaliana landsberg
acattgaataaagacttattttgtctgcctattggaagattttttcttgtgaatttgtattgtaaggtatttattatttgaaaaacgcaaaaaataaatatgttttgcttactaagttttaaacagttttgacaagccattgtccattgaatccactcggaataagacaaataaaatttgaaatttgagattttgcatttgctagcaaagaacagcttaaaacaaacactcataaacactacaaactgttaaccacattcgcaaccctaaaacactttagagccatgatctaagaacatttagctatgagaaaaaataatatttgcaacaataaaataatatgtatttttatatataagtcgacccaaatctatcgtataacatcaactaaaagaaaattatgtaaaatgtaaaatatccatctaaggaggagccataccactcacgttggctttatgcagccaagaagcatcaaaatagcaaaaatacttcctcaattagtgtcattaatatattgaagtgtctgatcaattaatgtttcaagaaaaaagataaaaccttttttatcaaaggaaaataatataacctttttttgtggacaaataaaaagtttaataacttataacacaaaaatgcatacaaatattatgagaatgctgaaatatatttggtttttggtatttcgggcccaagcccgtaccacaaaacgaaaatttaaatgcagggttttattttgtcccaggttaattattaataaaaataaatgggttaacattt

SEQ ID NO: 3250 - DNA, 516 bp, Arabidopsis thaliana landsberg
  unsure (1)..(516): unsure at all n locations
tgtatataanatttttttcaattgactcaaagaaaagaaaaaagtgtgaatggtgaagaagggaggtttggcagggaatggggcgggtcgacaaataagagtaaatgataggagacatgaaccatcttaatgtcccctaagtactcaaagtacattgtacctttctatatgcatcctagaaattcgatctttgtttcacaatcttctaagattcaggtaataatactataactgtatgcatctttaatgagctacgtataaattctacgacgtggcgacaaatttcacgttaatctaacgtaattaccattttaatgaagagtatttttggatatttcaggcttgtaaggaaaatctaatgatacgtgatgggactaatataaattgaaacggtggctataattcaaagggcacgataactaaggtataaaacatgatctcaacaagaccaagattgtataattaatgcgacaagtgaatcataaaaaccgtaacgtgaaattttccaaggaaaaa

SEQ ID NO: 3251 - DNA, 612 bp, Arabidopsis thaliana landsberg
  unsure (1)..(612): unsure at all n locations
aaaactcataagagtaagtgaatcttgatgagatacaaagtatgtttaagaacattttaattctcacaaagacttgaaattgattatgaagagatatactctcttgtggtgaatgcaactatttatatcacttatgtgtttgaataagagaaaggcttctaatagtcctgtaaagatttaaattgctaaaagcaggcaagacggattttattgccagaagcaataaattctagttctcgagaacgaaggactatacatatgtaattaaatcgatgttgttatgaattgaaatatcgggcgaatacaagataatagccttagtttttacttgttaaaagatagtttcaagaatagcaaaatatgttgatgatttaaatattatcagatctcttctaaagattttatatacaatgaaatatttaatgaaagaatttgagataaaatcgttcttatgaaagatgtagaaataaaattatgtatgaatccgagtctttatgaaattcttcggaaatatttaggaagagagatgttatttctaaaannnnnnnnnnnnnnnnnnnnnnnnnnnttcacatatatttggtccagaagaatcataatangaatgaaagc

SEQ ID NO: 3252 - DNA, 672 bp, Arabidopsis thaliana landsberg
caatttttaatcatgtcaccactctacaaaaaaatgtgaatctcccattgaattttttttacaataccttgttacatcccggcacaagatcctgcaagattttcatccgctcacttattttctctcttctcgcctaccaaaaacacaaagcaaattgtcttttactcattcaaccaaataaaagaagctttttatatgatcatgtgaaatcattactctttcagctaaactgtgactatcagtagcttgacctcttctagctcgaacatgaatataatctttcgttggctccatctgttgcttcttttgttccgtctctgttactagcgattctgcttccgctttcccatcacacacttcatctatcttctgtcttttgttctcaccttcactctaatcaaacacacaaaaatagtattatgagcggcctaaccaaataattagaagtcgaaccattaaaccggtaaaaaccggatcaaaccggacaaaaaaaaagaaagagagaaaatacgtacagcgccaatggtggagacgatcttcgccgacttagactcatcttccctccgtttccaagcgccggagataccttcaataaccgcctgagacaacgcgtgactcatacgcgccggatcaccgttcgcagcagtggttagatcagtatctccgaactga

SEQ ID NO: 3253 - DNA, 591 bp, Arabidopsis thaliana landsberg
  unsure (1)..(591): unsure at all n locations
agctgttgagtacaatttcaaaactctataaccctggaaattttcaaatgcagaatggtatactggtgccaagtccaaatgatatgtattgagaaaattgtagaaaagtttaaccaagtaaaagcacttaatgtttgcaacagagatggaatcaatttcaactggtttaggaagcaaatccaagccatgcactaaatttttcaggttataaatctatttttttcctgattggattatgaaattaagaagtaatattgtataaagtgtgctaatgaagtggatagttgttatacaggtacgtagcactgttcatccttaaacgagttaaaaagtcaatgtaacaaaatgtgattcctcctaagaatggatgatatgcttatatggagtataattttggaactgaactctactggtgaatctaatatacaaaatcaaccaaaacttgtttttgtggctgtcgttataaacaatttgtttattcttcttctgtttgatggtaaggaaactgtaattntgcatatgcagcataaaaccattgttctcaagtaagggtcttcttgcattatncttgaactatnnctgagtctttcg

SEQ ID NO: 3254 - DNA, 599 bp, Arabidopsis thaliana landsberg
  unsure (1)..(599): unsure at all n locations
agcttaggtgaggggaagcttctagttaagggtaaatgtgaaacactttgattataaaaccattaatatatatatatatatagtagaaactctataaataaataatattaagaccatgaaattttgttaatttatactgatattaacttatcctataaattaatttatcaatttatagaaataattaagcaaaatataatactatattctttcgatatagaataaatattaatagtcgattattcgggtgaaaatgaaacatactcaaaaattcagagtttttagaagaaattgtgatttctgtctataatgttggtgaagaacttgaaaacgtcaatgtgaatcttttggaaatagtgacacgtaaggaaacaattatcacgtttagaactcttcacaacttttggatgcatgtcgagaagacaacaccaaaagtttgatgcaataaagaatattatagatggacttcaacangattcttattttaagaaaagacaaacaacactagatcatatcatactagattatcttaaaaagtatgcttaagatttgcgataattaaattatgatatcgttgggacccatgtgttacatagaga

SEQ ID NO: 3255 - DNA, 265 bp, Arabidopsis thaliana landsberg
taaaatatattgtgcgaaaaatcaacacaagggttagttaaaatttataacactttgccggaatatcaaggtttatacaatcacatatattgtttattcattgcattttcttctataacataaatgcataattttttgtgataaaagagtgaatcataaaaaaaaagctgtactttggagtggttaaaattggttggtgtttagaaacccatccaatcaagatttaaaaaaaactgtttttgagttttaattttaacattatggc

SEQ ID NO: 3256 - DNA, 1342 bp, Arabidopsis thaliana landsberg
ctgaataatgaaatacacatatcttaaaatatattttcactagtagtagtaattagtaaatatcataatatcagttggtggagtattttagaaagaattcgaacataatatattttcgattttttcctaaatgtaaactttcgaattttttctagtatgttcttaatgaaaaaatgtaaacttaccaaatgttgctgatatatttacaaaaatgtaaagttagtgtcgacgatacatgtatataaatataatcagtacacgaaaaaaaaggttaagaaagatgagagattggtggtgtggtgaacaagaagatggacatgtatcatttgacagaatacatcggcgtggtatcgggcgtccttatggtagctcttgcttcgtgcttgtatggccattacctacgtcgcatggtatgtccatgttgtgaacctagactacctagtgactctaatgcctaactattatcattttgctattgattatatttatatacatgtattgtcgaaaattgtgcgtccgtttatcctctacgctaaacggactctagatgaataattatttgtttcaaaatattgtaactctattctattgatatttatgagattttacaaatttcttttcaaatagtttgtacttggaagctgtcattttcttaggctttgtttttctttttcgtcgagttcaatattccatccatctcatcgatttatttcttatatattacatgtactacgttatgtgcaaaactttgatgatatcacaattaatatatcacatccaagttttgcaaagcatgtcgtcaaattataaacttatcaaaacatatgcaaccccattaatatcaaacgtatgtaaacatcgctagataaccaatcagacccctacgactaatattttcgaattcgatacgttatggtaagatttaaaatcgatgatattttagtgacatttcaaatgattaaacatataacaaaaaaaaaaaaataacacgaacccgagcatggggttaagatttgcgttttgctcaacggattagcgttagcgtttgcaaaaaaaaaaaaaaaaaaaaaaggtttgcatcaacagctggcaaaaaagaaaaagaaaaatcaaaaccggcgagacggaaaatttcagcgtttccgaactttccattagagtcgcgagacgatagatgagactcgttccagagatttaatcgttgcttctcttcccagctgatctgcgtccaacatcactgtttccaggatcttcagaatcagcgaaggaagaagataagaggacgacgaagtaattgaagttggagaatcgcacatttggctctcgatatttgctcaatgac

SEQ ID NO: 3257 - DNA, 604 bp, Arabidopsis thaliana landsberg
gactgcaagccctgctccatgcctgtcgacactcaggcgaacgtctctgaggacgacaggccctacggtcgccgacgcgacatcttacaggagcttgacgggcgcactccagtacctcaccttctcccggttggacatctcctacgccgttcagcaggtgtgccttcatatgcacacaccacgggagccccacgtcaccgctctcaagcgcattctacgctacctccggggctccctcgactacagcctcctccgaccatcctcgacgtcggaccttgtggtctacaccgacgtcgactgggctggctgccccgacacgcgccgctccaccttcggctatgcgtatttatgggcacaacctcgtctcttggctgccaagcgtcagtgcgtcgtctcccgctccagcgtcgaggccgagtaccgcgctgtggctaacggcgtgccgaggcatcttggatgcgcactcctccacgagctctacacccccttcagcgcgcacccttgtctactgcgacaacgtcagcgcgtctacatctctacaactcgtaaacattagtgacgaacatgtggagatcgactcacttcgtcgggacgtgtccagtag

SEQ ID NO: 3258 - DNA, 624 bp, Arabidopsis thaliana landsberg
ctctatcctgtacagatgttgagactagatcgaaactcggtgaatacattcgacggtagccccttagtgatgatgtcggcgaactgcagcgtggtggggtcgctgagaacccgaacgtcaccgatagtgacacgctcacggacgaagtacatgtcgatctccacgtgcttcgtacgttgatgctgcacggagttgctggagaggtagaccgcgctgacgttgtcgcagtagacgcgggtggcgcgctagagggggctgtggagctcctggagaagctggtgcagccaggaggcctatgccacgccattggccacaacgcagtactcggcctcggcgctggagcgggagacgatggactgccgtttggcggcccaggagacgaggttagcgcccaagaacacagcataaccggagtggaccgacgcgtgtcgggacaaccagcccagtcagcgtcggtgtagaccacgagcttcgatgtcggggaggggcggagtaggagtccgtagttgagggaccacagaggtagtgtagaatccgcttgagagcggtgaggtggggttccgcggggtgtgcatatgcagcaccctgctagatgacgtagcgatgtcagactaggctagagag

SEQ ID NO: 3259 - DNA, 394 bp, Arabidopsis thaliana landsberg
gacacagctttaagacgattatagtttatctaaaaccagcaaccagcacactgttccccacttcgacatgtggatcaagttcgccatgtcccgcaacgtggagaatctatcattcagtagtactttttttcatagttataatcttcctgatttcttctacatcaattcctctattaagcaactcagctttgagttatttaatatgattcctagatgttccgtatcttggacgtccctgaagaagctgtccctgcgtttttgtgagctctctgatgaatgtattgcgaagattctatctggttgtccgattctcgaaagcttaacattgtcccactgcatctaccttacggttcttgatcttagcaaatcgctgcgcttgagaacattagaaata

SEQ ID NO: 3260 - DNA, 4456 bp, Arabidopsis thaliana landsberg
gggcatcacccgttggcgaagtgaggcggtttcctactttcgagccttgttttgatgacgagccgtctggatgtaggagccaagttgtgtcgagcgggtttttccgagcctccttggtgggtatctcgacgataaaatcagctaggacctgtgattttgcacatgttttgttccgatactcgatgtcgtactcgctgagctcgattgcccacttagctagacgtcctgattggtttggactgtgtaagatggcgcagagtggcatggatcccattaccacgatggaatgtgattgaaaatagggtcgtagcttccgagccgacattacaaccgctaaagcaagtttctccatttgcggatagcgagactccgcgccggtgaaagtctgtgagacgtagaaaatcggcttctggtcgctcctgtcttctcggactaacactccgctgactgcagtatctgatacggccatatacaaatacaatggctctccgattacgggtttggcgaggatgggcggtgttgctaggcactttttgagtttctgaaaagcttcttcacataggattgtccactcgaactttttgcttccccgaagcacatcgtaaaaggctaagcatttgtctgtcgatcgagagatgaaacggttgaaggccgcaactcttccggttaggggctgcacttctctcttgttctgaggtgacgccattcccaacaatgcctcgatttgctttggatttgccttgatgccgtggtgcgtgactaggtacccaaggaactcgccggatcttactccgaagcggcactttacaagattgagtttgacgttgtagatgttaagctgcctgaaacattcgcgtaaatggggtatgtgatctttctctgccatagatttcactaacatgtcgtcgatgtagacttccatttgtcttcccgatctataatgcgaagattttgttgacgaagcgttgataggttgccctggcgttcttgagtccgaaaggcatcactcggtaacaaaaaatgccttgttctatgtaaaaagcggttttttcttgatcttcggggttcatgatgatctggttgtaaccggcgaaagcgtccatgaatgacagtagcttgtttccagaagttgattccacgaggcgatcgatgtgtggtaatgggaagctgtcttttgggcaagctttgttaaggtctgtgaaatctacgcagactctccatttgccgtttttcttttttactacgaccgggtttgcaatccaatcgggatatttcgcctcggtgatggatccgatcctcaataatttctctacctcggctttcacggcttctgctcgctcccgacccaattttctccttttctgcttgatgggtttgaaagttggatcgatgttgagctcatgtgatacgacgtcaacacttactccaggcagatcttctggggaccaggcgaatgtactaacgttttctttaaggaaagctgtgagttcagctgttagttcttctcccagatctccgccgatttctacgcatcgctcgggcttttcgtcgtcaaggcagattaagaataccggatcgggagttggtgttgcagattcccgagcctcctcgatccttagctgttataactgctcggagattgacttctcttcagctcggccaagcttggctttcttatgattcgcgtcagccgtcgattcagtgacggggttcctgagcttgtgtgctgccatgaagcagatgcgagcatttttctgatttccccagatggttttcacgctgtcgcttgtgggaaatttcaggcagagatgatacgtggaggcgaaagctcggaattgatttaaccatggtgtgccgataattgcgttgtacacggtcggctggtcggtaacagagaaatcgacgatttttgttacccctttggcttggactggtaatttgatggtcccgagagtcatagtggtttccccagagaatccgagcactggtcgtggagttggcacgatttgcgtcatgtcgatcttcatttctcgcagagttgtaaggaaaatgatgtccagtgtgcttcccgtgtcgactaggactcgttcgacgttgaaatcaccgatggtcagtgtaatgactaaaggatcgttgtgcggacggtctaaatcgttggtatcgctttcgtgaaaggttacttcgtcatttggcccattaaatggccgcgcctagttatgattcgcgtcggcctttctttgataagccttgattgatgccgccgtgtcttgacagaaagccgaatcccctaaaattgtgaagattcttccccgagcagcttctggcttatcgtcgtctgcttcgcgattacctcggcctcttttgggtccttcggaattcgccgcgggggctgcctgctcgggattggccacagcgttgacctgctcggtttttcctttttccgcttctaagtcttcgatggtcaaacctccaccgatctctccggctaggaattttgctgacaaccttgctctgaggctacgacatctggaagtatgatggccattgcttttatgtaatttgcagtattcctgctcgtttcccgcgggttggtcctttttccaggtgtaggattcttgtctgcgacctcgacggtgtcctcgtcctcgaggtgtatcagcttgataattgtgggctccgcagaagtttcgtccttcatggtgtacgaacgttccgccttgagcgccttttttgtggttcggagcgctaggttgggatttttcgccacgaggcatttgcttcggcggctcgtgcctttttgatagcagtttcatttcctcatcatgggaaacataatccgaggctcggtgcatggcgtctcggatcgtttgtggttttgacagatttaattcttttcgaaattctaacttgtaccacaatgccttcttcaagggagagagctctgcgacgtcgttgattccctcgaccttggctagggtgaacctaaacttcgtgaggaatcctttgagtggatcatttggctgctaagatagcgatcaaaggtcagcgtctgatgtgcctggatcaatcaacactgagtattgcttgaggaaaagcgttgacagctcttggaaactgtcaacagaattcccttcaagttttgagaactaatccaaggccggccccttcaggtgctcgacaatacatgatagagaccagcgtccctctcctctggcttgaacttggctcgggccatagagattataaatgactttaaatgcccctttgtgtcggacaacccattgaagtactcgatattgagcttcctcgggtctaaaattattgcgttggagatcttacgagtgaaaggtgtgttgtgggactcttctagaatgcgatcgatgtttagagccgaggagactgcgctatgcagctgcgatcgaacaagcttcatctcggttttttccttggttagggagagtttgatggcgtttatttcttgttcctatcatattcctcagcccatcgaacgttctcttctgaatcttcatcgtccgagaccccgatctgattggcctcgacattttgtgctcggggaggagggagctgcggatcgtttccttctgttcgattcgtgtctcgatttcccaagattgccggctcggctcgatctcttccagtttccggtgcggttcggcggataggcctcatcgtgttgccaggtgtgtgtaacaggagccatgttggactgagatctgctgctgttcgtcgatcgtgaagatgccttgcgccgaaacgagtagtcttgatctgtccttgggaggtagctgcttcgagttgttgcgccaaagaccgatttgcctgttcttgatcttttactttcttctgaagttgagccatcatgctcctcaattctgctaggaccgcaggagcggtggcttcaggaacgtctgtttggtttggagggatcgggtttccctctacgtcaactgtgttaccggggatttgaatgttgaccattgtggattggttggttggttctgtgttctgggagtaagagaaatctcaatcccctccttctagcgccaaattgtgagagtcgaaacttgcacaagagaaattgtactaagggtttcttcaaagaacgaatctttgtgagtttctcaaagaacaacagaattgttgattaccgcggacggtgttcttgcttgtattattgaaatagtaaggatttgatcgtacaagtgttttagaatatgaaaataagtgttttgccttcaaagtcagagcgtttttgatagcctgaagttgagagcgtttttgtgcgtatctgccatttacttgtcccttgaggtgctttatataaggctttgagccgcccctcgcgatattcttgggagattcgttgttatctttgaggcggcagtgataaatctttatcttctggagatctttgcgggattttctctttgttgtt

SEQ ID NO: 3261 - DNA, 748 bp, Arabidopsis thaliana landsberg
aagagactataatgaatctgtatgctgcttgtatctctcttttaatgctcctagtttccttagttttaccaacctctctatttactaactccttcaattaaggcttagcaagttcttatggtttatctttctagtgttgtgtttatgagatctatatgaatacttgaagggcctcttttagcttattgatttacacaaactgagtagttatttgcaattttttaagctgcattatcaatcttgttgttacaaattgacagattagattagatcatgtaaatgggtttgttgtcctcatctcagaatttatactttttgtggcactgacttgcaggaggtagctgataacagctgtgtgtacagaaacgaggttcatcactctgtaagtgagcgaactcagatcttaacagacgtggcttctgaccctactcttccccgaaccaaggctgtgcgttgctctaagtgtcagcatagggaggccgttttcttccaggtataactctcttaagctccattatttatttaactacttggttatgctgtatcttcactgtttgcttccccaaaacattatgctcatattctgtacaccgcttgaggatttaatgtagctatcattgaatgtgcaggctacggctagaggtgaagaatgaatgacactgttctttgtctgttgcaacccgaattgtggtcatcgctggagaagataaagagcttttcggtttcattggtgaggtctaaaagttta

SEQ ID NO: 3262 - DNA, 601 bp, Arabidopsis thaliana landsberg
tccgagtatacgacagccattgatgtctggtctgcaggatgtgttctagctgaactattgcttggacaggtaatgcattaaatcttattcaaacatttttgttctacttaacctggaattttgtgattgacaaactctattctctgctcatgacagcccttgttccctggtgagagcggtgttgatcaacttgtagagattatcaaggtataagctttgcacttgttcactttgataacaagttcttgttttcaataatactgagagaagatttgatgtaatgttttttgttatgctttggggtaggtcttgggaacgcctactagagaagaaatcaagtgcatgaacccaaactacacggaattcaaattccctcagattaaagctcatccatggcacaaggtagaaataaacttatattcatcaaatcaacttgtcaatgtgttattcagtagcagttacagtcaatgtgacaatatctactcgtcataatatattcacagattttccacaaacgcatgcctcctgaagctgttgatttggtctcaagacttcttcaatactctcctaatctacgaagtgccgctgtgagttttactta

SEQ ID NO: 3263 - DNA, 3284 bp, Arabidopsis thaliana landsberg
ttatgccgcaagaggagatccttccaatatgggatttgccaaaagaaactttgtttgtgccaattgtgagtgcttccatattcatcaggcatattcgttgtagtatgttaattacccctcacgtttgcatatttcatgagcaccataataatcgatctgctcaaacaaatcatttccaaaaacatagcggaggaatacgaactactttattcttcctaaacaatttcttgttcctttgatacagatgatgtaggggaagaaaccgacgatgacaatcaaaccaacatgatttctgcctttctttagctgaaacgcatcggtacgacccatacagtagggacaagataatcttccatgcgttgtccatcccgataacattcaatatgccgggaagtcactaatcgtccacattagcactgcccgcatattgaaattttgtttgctcgagtaatcaaacgtgtgtacaccttcataccacaacttcttgagttcatgaatcagcggttgcaagaagacatcaagcgctcgtttcggatgctttggaccacgcactagaatacttaagaatagaaattcgctttacatacacatatccggaggaagattgtatggcgtcaagataacaggccaaagagaatattgtcgcccagacaaaccaaatggactaaatccatctgtgtttaagctaagatacacatttctgcactcgttagcaaagtcagaatataccgtttgaaagtgtttccatgcctttgcatctgatgggtgcgttatttctccgtctgcagttgtatgttgagcatgccatctcattttcgccgtagttctttccgattgatataagcgtttcaatctatcggttattgacaagtaccacatacgtttatatggtactcgcgtccttccaccagtagtctgatatctcggcttcccgcaaaattgacattcctgcagattttcatcatctttccagaaaatcatacaatagtcaatgcatacatcaatcatttctgatggtaacccaagacttgaaaccaacttctgtatttcatagtaactctcagccgatatattatctgctggtaaatattctttaataagttcagcccaagaatccatgcaattttcacttaagttattatcagctttaattgtcatcatcctagatgccaaagataacttaaattgcccttctctacatccctcgtagataggttgattagcagcatctaacatatcataaaagcgttgtgcatctacgttgggttcttcgataatattttcatgaaatgcagtagtagtttcatgaaatgcatctgtaaccatatcatgaaatctattttcatggttatacccttgatcagattcttgatgatgaccataattttcataataatcagtaggttcaacaacaccataattcatattactactgcccgcactatctctacaaccttccccatgacgcaaccataaataatagttcggcataaatcctctattatatagatgcttcttcactagattaaattccaaatatttatcgttgagacacttacgacatgggcatattgaaccatttgcacgagcaaatgattcatttgttgcttggtacatgaacccgcgcaatccatcggtaaactccttcgtgacatcaccggtaactgaatctctatgattatacatccactgtcggagtgaatatatatcatgttctccaccgcttccaaacattttttttttgtgtttgtttttatattttttctttgtgtttgtatttgtttgagttgtgattttccgtcaactaacatatggtatttataggggaaaaaccaaaaatattgcgaaggaattgcatgaaatttgcgagggatttcacctaccaatctacctaccacccacctactaatttttatttaaaacgtgcgtacctaactattccttgcaattccatcgtaaattatgctaggacaacgttcgttgtaaattcgtcgcaaatttgctacggagatgcgaaaaacacgtgtccgtaacaaattccttgccatttcccgcagtttcctcgcaaatttgcgacgaccgcttccattgcaaatttgcgacgactttacgttaactgcaatgtccctcgcaatatacttgcaatattgttgcaaatttgagtaaaggtcagctctgatgtgaacaaatgaattcagatacaatttattgtatgatattttttccaatgaaaatgtatttatttattgattttcatcatttttattaggatggagattgaaaaatattaattagtgaataaatccaaaaggaaatgtaaaagttcttaaattttaaatttattggtttcaaaatagataattattgaaatgtaacttacattcgttctctcttctaaacattgtttgttatcactaaagatgttaaagaatctatagttacatttattactcaattaaaataaattttgttttgagaaaatctttattggagtaaaagaatggaatatagaaaatttccattttttcaaaaataagttttttctctccgcgtttttgctgacagaaaaaaaaactcacaatccgatagcttggacttcacgaagctaagttgttatacatataaacggcggccactcttctataaaagacttgttctgatcaaacattctgcgaagtgcgaattcaacaacacagcgagcgaaacaaaacatgagtcacgaagagaatatgtaatgttttcttcttcttcttcttcttccttttgttttctatgaaatctacggtttatgcaaagaactagggttttcaagtttcgtttctgtatcgtagaagcggttctgtagatttcgtctctttatgttcgagtacaatactgagaattaggtttttttgatcatcaatacttcattcgatccatagaaacatcaaacatagctacttttatgtttgatctacacgatacatcgaattttttagttcttcattacaatatctagggttttaacgttttccttgttgtttctctacttatgtgcaggatgcaagagttagactcttctaacgatgaatgggggaaagaacttgaaggagagaacgaggaatcgaaattcacagggaggagattagttaaaaagtcgatttctgttcctgaattggtagacgaagttgaagaagatctcgacgattttacagaacctgcggatgattttaatgacaaagtaggaaagaagagacagaggaagaagaaagatgagtctggtcttgagaagacaaagaagaaca

SEQ ID NO: 3264 - DNA, 1999 bp, Arabidopsis thaliana landsberg
  unsure (1)..(1999): unsure at all n locations
tgtaacacctgccccgccttataggccaagacggcatgttattcatatgatcttgccaaaaatgttttctttaaacttcatacacgaacaaattatttcacataactcttcacgcttactaacctgagaaaaaagggaaaaaggagggtgagtaaagaatactcagtgaaggaaatcaactctgcccactgaaacatagaacactttctaaagctatacaaccatcatcataacatataaactttgacacaagcaatcaacctaacatgctttaccatctaataacacattcattacaaccatcttatatataataatataaacatacacatcgttaggtccagtcatcctcgtgacgactagaacctcataggtggagtgaaaggccccgatccggacgatcctattgaggatcgcgggtgttacatggaagctggccctcgtggctcagacactctcattccgggctcgtcagccgttcttgactagctgttaacccgtcggtccatcactgtccacatcactagggagaccatggcccatacctcctccccagtcatacattcatcatacatacatactcataatcatatttaacatacacacacttataatatcatacataacatcacattatcaaacatcatactcaacaatcataacgtcatatcatcatgtaatcttatcctatacaataagatctaagcctacatatcatgcgtcaaggagcataacaacagaacatgatcatatatttcacaaataccacccttaccttagcctagttgatgatgaagattcacttctcctttcttttcacttaggcgatattacctgcaaccacatgctcataggttctaaattatttctccttcaacaaggacctgattacatgagtcatgaaagttcctacaaagcttcagctcaagccaagctcaatttcccaataaaacaataaaaactcgtcatgatttactccatccaaaactgtctccaaaacataaagatatgtcaagaactaaccgttacaaatgcaatcccaccgttgaatatgtagatagtggtatcatgaataactacacaaaatgacagaatgatcagaattgattacaagctccaaatgttgtcgtcaacaagtcatctcgaactgtcatttagaaatttctggatttgacagactttgtagttacttgtcatgaaagaaacgtgcataacttctcgaatataaccttgattccatctctatcagcggctatggattcaggacatcgagatcattgtattaacaccttacgcatcacctgattctctctaattcaacgggaaattgatcgtcaaatcgtctacctgaaactacaatgtttctcgatactttagaaaaagctgggctctgaaagctgtgactattcaccaactttaaacgcgatttcccgattgatcttacctctgattttggatnnnnnnnnnnnnnnnnnnncttgggaaagagatctatttagaaccgttaagaacttgcccaaacttcttcggacgtgacgggaaacggatcaccaataccaccacttgaactgtttccttctttcacatattcacacaaaaccccaaaagttaacttgatatatctgccccaaattcaatggctaagagagacaattccagtataaagaaggcataaatagattaggttttccttacccaatcaagccgttgtttaacgatgatgatccgtgacgttcactttcactccacacttgttcgtgatcaaagacaaaaccacatgctccaacaactccaatctcaacgtcaatggtgatggtagctgatttagtttagggcttaagataccccaatatatatgacacttacaaaacccttgttgttttgtcatcagaaagagattgggccattttatgggctatatcataatatcaaaacacattggcccatctatgtcggagtggggtgttacacttcggatttgaatgcccactgggacagt

SEQ ID NO: 3265 - DNA, 532 bp, Arabidopsis thaliana landsberg
  unsure (1)..(532): unsure at all n locations
cactccttgtgaaatgattggtttttttactattacagtcataagaagattatgaatgatgggtgctatgattccaggctgtgttagctctatatgcagcacggcggacatctggaattggcgtcaacattggtttccaagtcatcaccattcttccgagtcagtttatttctctctactattaaactctttttgtatcttcacagatgttgtttaacaacatggtagactttctagctttagtcactcatgatgtgattctttttgtggaactgaacttgatgaaagatnnnnnnnnnnnnnnnnnnnnnnnnnnnnnnnnnnnnnnnnnnnnnnnnnnnnnnnnnnnnnnnnnnnnnactgttgtcttaacaattactcttgctgtgttctgcagttttacatggtaaggtgatgcgcccggtatgtgtagaagtcattgggtttggagcattgaaactcacgggcttccttaagagaaaatgcagaaacaacatttctttcataactctacactgtcggactctaaaga

SEQ ID NO: 3266 - DNA, 141 bp, Arabidopsis thaliana landsberg
  unsure (1)..(141): unsure at all n locations
atcgaatgttattcacacgtttacaactcgatccactgacgattagtccaacctatatttgatttttcgnnnnnnnnnnnnnnnnnnnnagatcaatagctaaaaaaagacatcatctggtaatggagtcaagagcttata

SEQ ID NO: 3267 - DNA, 129 bp, Arabidopsis thaliana landsberg
actactttgaaaaaatggctttcttgaattgattctctagttaaagaacactgctctttcaggaactgtttgttacaattaaacttcgtctacagctaacgaattctattgacctctgacatacatgct

SEQ ID NO: 3268 - DNA, 2946 bp, Arabidopsis thaliana landsberg
cacgtggccgagccaacggtcggaagggggctacggactgtccggtggccaacggtccaaagcgccaacggtcggcttcaccaaagtaggaaagaaatccgcaccggacagtgtccgtgagtgcaccggactgtccggtggccagacgacagaaggcaagaattgccttcctggaatgctctcaacggctcctagctgccttggggctataaaagggagccctaggtgcatgaaggagtacaccaagcattctccaagcattcctaagcactaagacatcgattccgcgcttttgattccttgcgatacaagttagagctctagttgagttgtgaactcattaagttgtgttgtgagctcttgttgcgacttgtgtgcgtggtgttgctgtgatttcttgtcttgtgtgtgttgcttccctcccttactccgtgcttctttgtgaacttcaagtgtaagggcgagagactccaagttgtggagattcctcgcgaacgcgataagaaaagaaaagcataacactgtggtattcaagttgatcattggatcacttgagaggagttgagtgcaactctcgtccgttgggacgccacaacgtggagtaggcaagttttgtacttggccgaaccacgggataaatcactgtgtcttctctgtgttgaattctttgtgattatcgtattgtgcaagatcttctctctagccacttggtatcaactgtgctaacgtttaaccaagttttgtggctatacgtttaagtttttacaggatcacctattcaccccctctctctaggtgctctcaattggtatcagagccgttctcttcaagaaagggactaaccgcccgaagagatggatcctaaggggaagggaatcgtgatcaacgataaggagaaggagtccttcgtcaacgagcccaaagatgacaagcctaccgacaccggctcgggccatagacggaaggaagggaagaagaagaagacaaggcgcatcaaggagatcatctactacgacgacagcgacgaatcttcctcttcccaaaaggacaacaacgacaacgactatgacaaacaaaagacggttaactcaaacttttcttttgattattcgcgtattccgcatagctcaaatgctcatttgctccccattccacttggcaagcctcctcactttgatggagaggactacggattttggagtcacaaaatgcgtactcacctattttctctccatccaagcatttgggagattgtggaaagtggaatgaaatttgattgctcggatagcccttcgtttattaatgaacagatccataaaaatgcacaagctactactgtgttgctagcctctttgtgcagggacgagtatcacaaggtgagcggcttggacaatgccaagcagatttgggacaccctcaagatctctcatgaggggaatgatgtcaccttactcaccaagatggagttggtggagggcgagctcggacgattcgcgatgataaggggcgaggagcgacacaaacatacaaccggctcaagatccttatcaacaaaataaggagctacggaagcacgcgatggacggatcacgacgtcgtccgcctaatgctaaggtcatttaccgttcttgatcctcacttggtaaacaatattcgtgaaaatcctaggtacatcaagatgtcgcccaaagaaattcttggaaaatttgtaagcgggcgaatgatgatcaaagaggcaaggtacgtggacgacgcgttgaatggcccaatccatgagcctcaacccattgctctcaaggcaacaaggagcaaggaggcgctacccagcaaggtggcgcaaattgaggcggtcggtcttaatgatgaagagatggccctcgtcatcaaaagattcaagacggcgcttaagggtcgcaagggacagccaagcaagactaagaccaagggaaagcgatcatgcttcaaatgcggtaagcttggtcattttattgctaattgtcccgataatgatagtgaccaggaacaagggaacaagagggaaaagaagaaggcttacaagaaggctaaggacgaggcacaccttggaaaggagtgggacttggattgttcgtcgtccgactccgacaacgaaggactcgccaccaccgccttcaacaagtcagccctcttcccaaacgagcatcacacctgcctcatggcaagggaaaagaaggtaagcactcataatactagtacttacgcttcctcaagtgatgaagaatctagtgatgatgaaatagactattcatgtttattcaagggcctagatagaactaaggttgataagattaatgaattaattgatgcattgaatgataagaataggttattagaaaagcaagaggatcttttgtatgaagaacatgataagtttatagaggcacaaaaatcccttgttttagaaattaaaagaaatgaaatgctttcttgtgaattgactacatgccatgactctatttctagcttaaagagcataaatgatgatttgaatgctaagttagaaatagctagtaaatcaacatcttgtgtagaacatgttgcaacttgtaataggtgtaaagattttgacattgatgcttgtagtgaacacctagtttcgatttccaaacttaatgatgaattggctagtcttaatgctcaacttaagactagcaagagcgaatttgataagctaaaatttgcgagggatgcctacacgattggtagacacccctcaattaaggatggacttggcttcaagagggaagccaagaacttaacaagccataaggttccattcccggcaaggagaaagggaaggctcctatggcaagtagtactaaaaagaaccatgcttttatgtatcataataggagacatgctagaaatgactatataagttatgattcacatgcttatgattcacat

SEQ ID NO: 3269 - DNA, 466 bp, Arabidopsis thaliana landsberg
acttgttgatttgatactagtaacattttctctttgttatattaaaattttgaaaatttaacgagcttctgtttagaatttttgatttctgtagttacaatagaattttttgaacttacattatagtttcgaaattttacttgtgttatttcggtattaacagaaatgccacttgacagtgaaatgaaaaaaaatgattatgcaaattagttaattattatttattggagaattgttgggagtggttgaatatttgttagagccgacagaaattgaaccaaaacgatttggaatattggaggggtcaagccttttctcattatccatttgaaattttaaaatcaacactatcatgttttatgatctgaaagcactgaatctagatgaccttatgaatttataattggacttgggccttaatctaagatatagtaaggttttaatcacttttcctgtaagggatttt

SEQ ID NO: 3270 - DNA, 606 bp, Arabidopsis thaliana landsberg
  unsure (1)..(606): unsure at all n locations
cttgttctattcaattgaaaagtctgaaaatcccaaatccgattcagtctcattgcattaaaagcatgagaaaagaaatcattaacttgttgaacaaaaaaataaggaataaaaagaattgagaacctggattggtgctttgcttgccacccaagataccggagaaaccaaagtctttgttcataagcttagaagaacccttcattgtacttttacgttgaacgcatgtagctatatcagtgcaccatcctcctccctaatgtattcacataattatatacatatttagttaatatcattacattttgtaaataattatttatgataatacatatctaattaaatgagaaaataaaaacaatactaacttccatatgaacgatccaattgttcactcctgagccagatcccttatcgaaatggtatgctggcgcgctaccatccaaacacactacagaaaatataaaatatatatacagtattagttttttcttcttgtcaacatagtaggtaattagttatacaatggttntatcaaccaaattaaaatncagttattctatgagtancacaganaagattttaattgaaatatcaaatataaca

SEQ ID NO: 3271 - DNA, 561 bp, Arabidopsis thaliana landsberg
cttacagtcatctttggcattctgtccacctccttctatacatatatgcatgtgtatatatatatatgcgtttcgtgtgaaagaaggaggtgggtatactgccaatagagatctgttagggcttcttcgtaaaaccctcttgatctatatacaagtttatcaatgtcttgaatttgacgatcttgatttgtttcttggcgatgaagagcctctatctagggtaattttacgattaaccattttcttgattctcacatctttgattctctggattctttttgtttgatttcatatataaagttcgtttctaatattgatccttcactgtttctttatgttgagctcttcatttcgttacttgattatgatacatgtttttttttcttttttttaaagccatgtataaccttaccttctcctcatttatagtgtgtagcctatggactatatggtcttctaaacaaaggtgaaccagttagaaaaagataacgtcccagaatcacaaaatggtaacaaatggaacatattactttgataaatggaaaagggggaatggagact

SEQ ID NO: 3272 - DNA, 1380 bp, Arabidopsis thaliana landsberg
gtttgactagtcaatacaacaaacacacaaattcaataatattttttacaacttacaaccatagcaatgaccatcaagctactttggcacctctatcagctgaatcacggatacaagatgctctgatctatttttctctcacattcttcacaccaatgtgtcttggtacttatcttctccccataagaaagagtgagctcatgctcatcatcgatatacctcaccttttgaggtaaagtaacacacctgaaacacatagcgaagtcacactgaatgcaattgaatgtttcatttgtggaacaatgtcctgactctttgcaaacatgacatgttctttgctcctttcgattggatgttaggaataaaggatgtgcatggctttcatggactaatggctcttgaattgtggcacactggacgtgtagcttaaaacgacattgttctttgaagcacttatagaagagaccagctgtgcacatccaaggacaaactgaacatttattctcttcagtccttacaccgccattttctaccaccagattgagccaatgtggatggaacttgtgatgtattgtgcgaggaaattccgcacatactttgtggagaatgaactcacattccatacacgagtagaagttgccgaaatagattggtatcttgcatgcttggcacatcttattctcgtcgtagtctataccactgttctcatccaatttcaaatgatgatgttgatgactgaaatgatgtatgattccttcgcttagcgtcacaaacggctcaatttcattgatgtcttcttctggctcaccctcaagttcttaccatcccacacattgctctgtgtggcacattttgaatgtgctacatacgaacaaccatcctttttgcaagaataacccccataatcattgtcgatctttctacgacaaacaccacaacatcgaactccttggtcaaaagaaagagtaaaatagatacgatggaaatggcgagatatccttatgacacgtggtaagctgagacacttttggtgaaccacaaagtcgcaagggggacatatataaaaaggacagcttgaatatgccaaggaacaaacgttgcaagttacagaagtctttcttggaaattgagtaagtgtatgctcatgccactttggttggtccaaagacaagactcttggtttctctacacaagcaatattcatagcataatcgcaagttgagcaataataaaatacctcttccagatcattatcgcaacagtaacattccctggttgtgtccccattcaacaagacaagttggagagaatggtttggatgaagagcgtgtttgatcattactggagccttttcatattccccatggctgtcgacattgg

SEQ ID NO: 3273 - DNA, 3055 bp, Arabidopsis thaliana landsberg
gctgcccaggcctagctggagcatctgcctcctgcgcagatctccgactgggacgacctggtcaaggctttcgctggaaattttcaaggtacgtacgtgcgccctgggaactcgtgggatctccgaagctgccgctagcagccaggggaatccctgcgagagtacatctgacagttttcaaagcagcgcaccgagttgcccaacatcaccgactcggatgtcatcggggcattcctcgccggcaccacttgccgagacctggtgagcaaactgggatgcaagactcccaccaaggcgagcgaattgatggacatagccaccaagttcacctctggtcaggaggcggtcgaagccatcttccggaaggacaagcagccctagggaaggcagaaggaagacgtccccgaggcgtccatccagcgtggcacgaagaataagaccaggaagaaggcgcacgaaaacgcgacgtcgttgacacggatctcgtcgctactgccgagcacaggaaccctcggaaacctcccggaggccgaacatgttcgacaagatgctcaaggagtcgtgcccctatcacaggggtcccgtcaagcacacccttgaggagtgcgacatgctccggcgttacttcaacaaggccggaccctcggcagaaggtggcaaagaccaaggcaataacaagaaggggggcgacaaggaagaggagttcccggagtccacaactgcttcatgatctacggtgggcaagtggcgaacgcttcgactcggcaccgcaagcaagagcgccagggaggtctgctcggtgaaggtggcggcgccagtctacctagactggtccgacaagcccatcaccttcgacaaaggcgaccaccatgaccatgtgccgagcccggggaagtacccgctcgttgtcgatcccgtcatcggcaacgtcaggcttaccaaggtcctcatggacggaggcagcagcctcaacatcatctacgccgacaccctcgggctcctgcagatcgatctgtccacgatccgggccagcgcgacgccctttcacgggatcatccctgggaagcgcgtccaaccccttgggcaactcgatctgcccgtctgcttcggaactccctccaacttccgaaaggaaaccctcacgttcgaggtggtcgggttccgaggaacctaccacgcagtgctgcggagaccatgctatgccaagttcatggccgtccccaactactactacctcaagctcaagatgccaggccccaacggtgtcatcaccgtcggatccacataccgacacgcgtacgaatacgatgtggagtgcgtggagtacgatgaggccctcaccgagtccgaggccctcatcgccgacctggagtgcctctccaaggaggtgcctgatgcgaacgccacgtcggcaacttcgaaccggctgagacggttaagttcgtcgccctcgaccctagcaacgacgcctacaagcaagtccgaatcggctctgagcttaaccccaaataggaagcagtgctcgttgactttctccgtgcaaacgccgaagtttttgcgtggagtccctcggacatgcccggcataccgagggatgtcgccgagcactcgctagatatccgagccggtgcccgacccgtgaagcagcctctgcgccgtttcgacgaagaaaagcgcagagccataggtgaggagatccacaagctgatggctgcagggttcatcaaagaggtattccatcctgaatggttagccaatcctgtgcttgtcaaaaagaaaggtgggaaatggaggatgtgtgtagactacactggtctaaacaaagcatgttcgaaggttccctaccctctgcctcgcatcgatcaaattgtggactccactgctgggtgcgaaaccctgtcattcctcgacgcctactcagggtatcaccaaatcaagatgaaagagtccggccagctcgtgacttctttcatcacaccttttggcatgtactgctatactactatgccatttggtttgaggaatgcaggtgcgacataccaaaggtgcatgaaccacgtgttcggagagcacatcggccgaacgatcgaggcttacgtcgatgccatcgtagtcaagacaaggaaagcctccgacctcctctctgaccttgaaacgacattcaagtgtctgagggcgaagggcgtgaagcttaatcccgagaagtgtgtctttggggttccccgaggcatgctcttggggttcatcgtctctgagcggggcatcgaagccaacccggagaagatcgcggccatcaccagcatggggcccatcaaggacttgaaaggcgtacatagagtcatgggatgccttgcggctctgagtcgcttcatttcgcgcctcggcgaaagaggcctgcctctgtaccgcctcttaaggaaggccgagtgcttcacttggacccctgaggccgaggaagccctcgggaacctgaaggcgctcctcacgaacgcgcccatcttggtgccccccgctgccgaagaagccctcttgatctacgtcgccgcgaccactcaggtggttagcgccgcgatcgtggttgagaacccagaagaagggcatgcattgcccgtccagaggccagtctacttcatcagcgaggtactatccgaagccaagatccgctacccacaagttcagaagctgctgtacgcggtgatcctaacgcggcggaagctgcgacactacttcgagtctcatccggtaactgtggtgtcatccttccccctgggggagatcatccagtgccgggaggcctcgggtaggattgcaaagtgggcggtggaaatcatgggcgagacaatctcgttcgctcctcggaaggccaccaagtcccaggtcttggcggacttcgtacctgaatgggtcgacactcagctcccaacagctccgatccagccgaagctctggaccatgttcttcgacgggtcgctgatgaagacaggagccggcgcaggcctactcttcatctcgcccctcggcaagcacgtacgctatgtgctacgaaaccatttac

SEQ ID NO: 3274 - DNA, 1842 bp, Arabidopsis thaliana landsberg
taaaaaaaataaaaaaatttgcttgatcaagattcttctcaagatccaagctaaccattaaaagttggtgagcggttttcaagcgagggcggcccttgtagcaatactcattgtcccttacctttaaaatcatttcttttttagataaagaaaattaaacgtcgaaaactatactaaaatgatgataatcaaatatgttacctgttttcttatgtgggtttctttaaatgctacgtcaataatatcgttgctaggaactatcttccaagttggaataaaccgagttagctttgtgagaaatgagatcaccattggatgcggctttatgtcttctgctaactttactcaaaaaaaaaataaaaaaaaaatcaagtgattcatatctaattactaaaaatagtgaaatagacattatattacatgaaaaataactcaatttggtaaaaatctcaatcttaaagtttagaagtcaacacttatatagtaaggatatagtatactaagggctaccctaaaacttgaagaacacgagaccgatcgatcatacacataccttacacatgggagcgactaaaacggcaccgtcccaaaaattgggcttgtttctctccaagagtaacacaactgctcctcccatggattcttccattagaaacctcatcttccccttattctcttccaactcttcacattcatgattggcaaaatatattaataattaataacattttcaaacggaggaaaaaaaaagaagaagaagaagaagaagaagagaaattctcaaaagaccacaagatttaggtttacgatattttcaaaaatagtggtctagtcggaggtaaaacttatttttttttggtggttcttaaaaaaaaaaacattcttaccgcaaattgaagagtaatgagaagagacgtcttgaacaagatcatcaaactttttgacgtaaccatttaatcccccggatttaccatgcccttcatagtccattccatagaccgagaaacccgcattggccaacctcactgcagtgcctgatgaatatgttttaatatcaattaaaatgtaatcatgaatgtatatatattgacgattatatcataatcatgattttaaaagacggaactgctcatggtgatgcttgattccatggcgtagccatgacagagaaagattaaagcctttggttcttgctgctcctcttgtttccatgaacacgtgaaaagttgtatccctcgtgagttcgaaacataatcctaaacaacgacaaacgaaaccccaaatttttatataagcttaaaacaataattgtatcatgaatcttcgtttttagatacaaagcaaagagctttgcatgacaaaagagctaactcgtaattgaaaaaagagaaagattaagacatacctctttgtacataaccatgatgttctatttttgttatacgtttcaagaaagaaaactggattttgttttcaatatatagacgacgagggtcacgaggtaagagagatttatatctcaccaaaaaaaaaattagtaagagggagagatcaaagagtcaaatcagattaagattttaacgaaaaaccgcttaatgcgttttacttatgggaccagctgactaaaataaatttatcctgttaattaactaacttttctttaggggaagataacatttgacctcaaattaccaaattcgatatatatggaaaattgcaagacacattgccggcaaaagaaaaaatatatttgcaagacacacgaagtcaatgttgaatcaatcctacaaacacttttatacttaaagtgacatattacaatctgattaattttgcaaatac

SEQ ID NO: 3275 - DNA, 1169 bp, Arabidopsis thaliana landsberg
  unsure (1)..(1169): unsure at all n locations
tattttgttttagtaaaagatatttaatgaaaaaaaaaaatattgttgaacaaggaattgtaatttatatgtttctatgtatatgtgaataagatcaaatgtaaaaagagaagtatatgatttgtgtgatcaaaagacaccttgaaagtttggatagacgaaaacaagggttaaaaagataaaagatctcacaaacgacgctgttttggagcctgttccgtgtttttttgtggccatcatcatcaccttcggacacaacgtgatatctgaatctctccctctctctctctctctttcgctgtccgattccgacagatagacagagggcgcgaaacagagagaaaataagaagaagaaggacgatccagatatggaggatccttctaacccacaaccaaaccagagcaatctctcgcaatgcccgcctttagccacagctccgacacctgcgccagttcgtggtccgtaccaccggagagcacattcggaggtccaattccgtctccctgaagatctggatctctctgaaccattcggaggattcgatgagcttggatccgaagatgatctcttttgctcatacatggacattgagaaacttggatccggatccggatccgcatccgattcggctggtccttctgctcctaggtctgataacccgttttccgctgagaatggaggtgcggaggctgggaattcgagacctcgacacaggcatagcctctccgttgatggctcttcgactttggagtcaattgaggctaagaaagctatggctcctgataagctcgctgagctttgggtcgtcgaccctaaaagagctaaaaggtttcatctttaatccccaaacgtcgagaattttgtttgatatgattgaaatctagttccttgttttatgcttttgtttacaattcgtggggaagaaaggcagtttctttatgaccttttattgatgaatatgtaatcttttgatgttgatgtgatgcattagtcattaggtgttcttttggagatctttttgtttttcttggttacgtgagtacatcaccttttctttttgactatgatctcgaatctcaacgataactgatttttaactgaaattttagttatagcttctactatgctgcttttttattttaggtctttnctgctgagagagagag

SEQ ID NO: 3276 - DNA, 4582 bp, Arabidopsis thaliana landsberg
aaggtatgtgaatgccctctcaggctctcaatgataaattaattccattctatatgtattgtcttttttttatgtctcatatagttggttttgttctaaaatcttgaaatctacattgacatttttccttggatcattttccttctttgaattgcagatacttaatgaaaggagatggaaagaagtaactgctacatttgtctttcctccaactgcaacaaacgcatcatatgttctgcgcaaatactacttctcgctgctgaacaattatgagcaaatctatttcttcagatctaatggtcagattcctccaggtttgttcataaaaacctctttaactattttaccaaattttcaaatatttttcagtttcttctctgttttgtaacacacatatcttctgtagactctatgcagagtccatctgctagaccatgctttattcagggagccattagaccttcacaagaacttcaagctctaacctttaccccacagcccaagatcaatactgcagaattcctcggaggtctcaacttttttctctctttgcttctataaatgttccaactgagaaactgtgacttataaatctgagtaaaatcctttttccttttgatgttattgtttcaggatcacttgctggatcaaatgtggttggagtgatcgatggaaaattcgaaagtggttaccttgtaactgtaacaattggatcagagcagcttaaaggagttctgtatcagcttcttcctcagaacacagtttcttatcaaactccgcaacagagtcatggtgtcctcccgaacactctgaacatttctgccaatcctcagggggttgcaggaggagtaacaaaacgccgtaggagaagaaagaaatcagagatcaaaagacgtgatcctgatcatccaaaacccaacagaagtggttataacttctttttcgcagagcagcacgcgagacttaaaccgcttcatcctggtaaggatagggatatcagcaggatgattggtgagctatggaacaagctgaatgaagacgaaaaattggtatttcacacactgatctttgaattcttatcaaactctgttacgtatatcgagtttttgtctcatgatctgtttgattttcttttatttctagatttaccaagggaaggcaatggaggacaaagagcgatacagaactgaaatggaagattacagagagaaaaaaaagaatggacagctcataagcaacgctgttccgctgcaacagagacttccggagcaaaacgtagacatggctgaagctgaccttccaattgatgaagtcgaagaagatgacgaagaaggtgattcaagcggatcctcaggcgaaagcgagccacatgatgatcagagcatagaaactgatcctgaattggaagagccatctctgaatccctcaggtccaaacctaaaccctaatccgactgagatagtggtggctcctaaggagaaaaacggcgatgttgtgatggaaacatctccattgaagaaagccgatgagccaactgtggcggtgactgctgagcagaactgaagattcttctcttgtttcttactccccgttgccagtttcgtgttccataggtaaatgttagagagaggaaagggcttcagataccttgcttctggcccaagattatgtctttttggttttttttttggtttttttggatttttcttcggaaacaaggcaagtttatggttataacattttggcataagagaattttttactttcgttattaatgggatatcctgtaaattggtgattaaaatctgaaagggccttataaacttgggcttggaaagcaaatgggccgaagaagtaatccctgtaatatgattttgaaagcggaggagggagacttaaagactttgattgattgatttataaaaggaaccctaagtttccgaactttgtccgtcgccgtctgaaaactctgtagctctctcacttcagctttccaattaaagggaacaaagctttgatttttgccgcagtcagaagcattactttgcaagaacaagtgtgtaaacaaagatgaggagctcccaaaacggcggcgcaatgggtggacgagctgccggaaccggcggaggaggaccgtcggctccagttgacaaagaagttgactacgctcagtacttctgtacttactccttcctataccaccagaaggatatgctctccgaccgtgtccgtatggatgcttacttcaacgccgtcttccagaacaaacatcactttgagggcaaggtataataaagttcacatctttaagcttaacaagtgttggaagactttctatttgtttgtagtcgatgaaagattatctattgcgaagttgtacccattggtctctctgtctttcttgtggtattaatagtttgaattgttgtttctgtaatgtgatgaagactgttttagacgtgggcaccgggagtggaattcttgcaatttggtcagctcaagctggtgccaggaaggtttatgccgttgaagctactaagatggctgatcatgctcgtgcccttgtcaaagccaataaccttgaccatattgtagaagtcattgaaggatctgtcgaggatatttcattgcctgagaaaggtattattcactttcccttttcttctctttcactgcgattagaaaagagtagtaatcagggtttaacttagtggctattgattgagacattgcaatttggttgagttgaacatgtttcttttgataatttttactctactcgacattgcgctaatatctacatattcaatttaatgggcagttgatgtaattatctcggagtggatgggatacttccttctgcgggagtccatgtttgattctgtgattagtgctcgtgaccgatggttaaagccaacaggtgtcatgtaagtggattttctgttattttatttctattctttgttgtaacattaaaatttcatgatgcatgattgttacttatgagcctatggcacttgagagcttgatgctgtgtagctatactgttaatatcttgatagcataatcttttcctccagtgccagttatagaatttcttatcaaattccatgcataaattttgatatcatgtggcacatgttactaatattgaaaacaattgggtaaagatttggttgatgttggcactgtgtgtatctaagcattacaaataacctttgtatacaataggtaccctagtcatgctcgcatgtggcttgcacccatcaagtccaatatagcagatcggaagaggaatgatttcgatggggcaatggcagactggcataacttttcggatgagatcaaaagttactatggggttgatatgggagttttaacaaaaccttttgctgaagagcaagaaaagtattacatacaggtgatttcagaactctttttttctgcaatttaatttatctttagataagttcctcagctgacagttgaacaattaacaaattgacttacagaccttttgctctgacatttcatggaactcataaaattttgtcttttgtgcacagactgctatgtggaatgacttgaatccacaacaaatcataggcactcccacaattgtcaaggagatggattgtttgacagcatctgtcagtgaaatcgaggaagtcagatcaaatgtaacgtcagttatcaatatggagcatacaaggctatgtggttttggtggatggttcgatgttcagttctcggttagttcgtacagattactgtgttgcatcatgttgaagaaactcgtatacttactcgttgcttgtttgtttttgtaactaggggagaaaagaagaccccgcacagcaagaaatcgagttgaccacagctccaagtgagcagcactgcacgcactggggacaacaggtatattactccccaatttttggcctatgatggttaaggcttcgattgtttcaaacgctaatttccgcgtaatggtctgaaactggcaggttttcattatgtcgaatcctataaatgttgaggaaggtgataatctgaatcttggtttgttaatgagccggtccaaggaaaatcaccgactaatggagattgagcttaactgtgaaataaaagaagcatctggtaaccccaaagaatctttcaagaagacttacttcatagagtgattgattgattatagagaagctttccttggggcttgctggttcttgtatcccatgtatgaaccccaaatgtaatgttttattgcttcttgccttttttttctatgtaaacgagattgttataccaattttcaatagatttttatatgggtgatataatttattatttttggtatttgattaaacatccaaaaatttcttcggtattaattttgaagagattttttttctgtgaagattgtttaacttttttgaacatttttcagtggtttagaatatttgttaaagtctaaaaaaacatttttttggtttaattaatatcgaactaaatgtttaaagatttgttttggagtaattattaatatttacgaaccaaatatttggtcgatagagttgtgttg

SEQ ID NO: 3277 - DNA, 1358 bp, Arabidopsis thaliana landsberg
  unsure (1)..(1358): unsure at all n locations
aggggtaggtgtgtcgatcgacaccgttgctctgcaactctcgttggtgagctgagcgaatgggagcgttgtgtgtggctctgtggtgggattctgagcagtctgaggaggtgtgtctgtggtggaagcaatgnnnnnnnnnnnnnnnnnnnnnnnnnnnnnntccattccaaactccatctctaaatcacaaatcttgagagagattctccttctcttcacatcaaacctagcatcagctatagctaggaacgctctgccaaggataagaggatccttgggttccttctcataatctaggaccacaaaatcagcagggataacagagttaccaacctgaataggaacatctttaaggattccttcagggattcgctttgaacgatccgcaaagagaagagtgatgcgagtaggcctgtagtgagtcatgcctagtctctcagcaacagacttaggcatgagattgatgcttgatcccatatcacacaaagagcggcataatctgcttgtggagatagagcaatcaagaacaaagctacttggatctggaagcttctcagttgtctgaccatgagtaataatgaggatgtactcagctatgtctactctttgtgccttctccttcttggccttaggagcatgattgcactgatatctctggtaagcagcttagcttcatatgagctaattccattgtcaacaagtcgtttgacatacctgttgagtgaaggagaagatgtctcagaagcatccttaggaagagtatggagtatcttctccattatggttgtacacttagcagcatgaatctcctgcttggaacgatgcctcttcggatacgggacaggaggagtgtagacagactcgatctgcataggtatttgcacctcacagggtgcagtccggatccagtgtcgatcgacaccataggggtattgattgacaccgtcgtattgagtcgtctaagagaagagcatcccatatggtgtcgatcgacacatgagggtgtctgtcgacaccatctctgcaactacgatctccaactcgtcttcagtgtccaattcctcccacacatcatttccttctctgattaagatggcattgcagctctttcttgggttagcatcgggattaccaggaagaaaaccctcttgtctcttgataggttgtgcagtttgagctacctgtacatctagcttcttcaagtgagagctcagattgtcgatcttcccattaagatctgtgtagacagcatcaaacttgccattaaactccacaacaagctttgtttggctctccagaatctgctcaagcattgattccattcttgtctctgctgagggtggaggggggggggg

SEQ ID NO: 3278 - DNA, 558 bp, Arabidopsis thaliana landsberg
  unsure (1)..(558): unsure at all n locations
ggagagagagagagagagggaaaggggacaaaaatttatatttagaaaggagaggaaggcnnaacagagagggagaaaagagaggcnnacanacacacacacacananagagagagagagnncncaaaagacagcnnaaaanngacgcaggggacggggagaaaacgagggaccccgaaannngnnnaacaccnnccgctttccttattattttattaaggtaacttaattaattaatttgattcgaaactttattagtttactaagtttttatgctgttttttaattgttctgaggcctatttgtagaattgaaatttaataatttgttgagtttttctgctatttcttgatggggacataaggaacttaacaaaacaaaatagttttcaaagaatttaatttacatacataaaggaaaagttcatcttctacttcttctttttttttgattagaaagaaggttttttcttaatgcaaaattatttaatgcatcctttcttttcttcttaataactaagcggaattagaaaatcttgaaatctagtttcttgatatc

SEQ ID NO: 3279 - DNA, 614 bp, Arabidopsis thaliana landsberg
tatcctggtttttttgaattccgataatttgcaaattgctctctctaactctatgaaaaattgcttgaaattttcatgaggattgcattgaatctgtagattgctttcgacaacatggccatttttactatgttaatctggccaacccatggaaggtctttccatcttctgagatcttctttgatttctttcttcagagacttgaaattcttgtcttaaagatctttcaattgcttggttggagacacaccaaggtattttatattatttatgtctattgtgaagggtgttgtttgcctaatttctctctcagcctatttatcctctgagtagaggacagccactgatttgtttgagttaattttgtatccagccactttgttgaagtggtttatcaagtttaggagttctctggtggaattttggggatcatttaagtataatatcatatcatctgcaaatagtgatagtttgacttccttcttttcaatttgtatgtctttgttttctaattgttctggctaggacttcaagtactatattgaataggtagggggagagtgggcaaccttgtctagtccctgatttagtgagaatgtaaagtttttcccatt

SEQ ID NO: 3280 - DNA, 562 bp, Arabidopsis thaliana landsberg
  unsure (1)..(562): unsure at all n locations
gggatgcagggatggtttaatatacagaaatccatcaacgtattccattatataaacaaactcaaagagaaaaaccacatgatcatctcgttaaatgcggaaaaagcattagacaaattccaacagccattcatgataaaagtcttggaatgatcaggaattcaaggcccatacctaaacatgataaaagcaatctacagcaaaccagtagccaacatcaaagtaaatggtgagaagctggaagcaatccctctaaaaacagggactagacaaggctgcccactttctccctacctattcaacattgtacttgaagtcctagccagagcaattcgacaacaaaaggagatcaaggggatacaaattggaaaagatgaagtcaaaatatcactttttgcagatgatatgatagtatatataagtgaccctaaaaattccaccagagaactaagcctgataaacagcttcnggaagtagctggatataaaatcactcaaacacgtcaattgccttctctacacaaagaaaaacaggctgagaaagaaatagggaaacacaccct

SEQ ID NO: 3281 - DNA, 611 bp, Arabidopsis thaliana landsberg
  unsure (1)..(611): unsure at all n locations
ccacaaacaaaaagctgccccacccaaataatgcaatgagaccggtatccacagaaatacacacactcataaataataaatattagaataatgcatgggggcaaagacatttcgccgaagactaagaaatgatccaaaactcgaagacccttaagagactactaagtcgtcgatagcttcaacctctcttttcttatctctcaaatattttattcatattctctacaatatatcttcacctctctattctatataaatgcataaacctgagtcacgctgataagtaaattaagaaaggaatattaattaagatggcatcttctatagtctcttccatgtttctctttctccttcttcttcttgtatttccacatatagataatgtccttggcgcacgaatggaaccccgtgaacttggtgagtattttttattttgtctctaaatattcgtaagttattaatattttactttatcagttaggtttattaggggtgctgagttatatatgtatgtaaaccgtntaattggtactggtgcaggagagataaatcatgctgatccactaggttttcctgtgcccattcatgttccgnctcggtttataccgact

SEQ ID NO: 3282 - DNA, 2845 bp, Arabidopsis thaliana landsberg
aaaaccttgctgtctcttccaactgaactacctttttacggacaaggatatttcaagaatcataagagcatgtccattgcaggggccttggaagttttttaagaaaatccttatgaataatagcaaaaaattaaatcagaatggtgtaataaaccaaggtgcgaaccttgtttaaggtatttttgggtgtattaggtgcgctgacgtggctgtatattgtatattattggatgacaacttttcccgtgttttttttctttttcattcccaaactatttttttctttctctcctctctcctctcctgttttctccgaatttcgacttcgacggatcaaattcttcatcgtctcttttcttatcatgtctctcttctcatacgatccacaagattcgtgatcgaagaggtgtcagaaaatccaccagaagagctactcttaccggctttgctgaggtcaacgatgtggcgctgtttttcggtggattggttagaatgttgatgctcataggatcctgcttgtgggttcgtctgctggtaaggttcttatatgtgattgaagttttgatttttttgctccttttgatgcttaattgtttatctgggtttaggttgaatttgattgcaagttaaagtctggtgcttttgatctggtaattgcttcttacaagttgatctgtaacaattgatttcgaattcagtatatggattcgtatacagattctgggctttgctttatgttcaaatttgtgtttgatcttttggtttttaagataaaaatgtgactcttttgctgcttattcacttgtatgtcatgttatggtccatgttctctaagtggttttagcttagataacttgtatgtctgttttctttactttaagttcaatatgacttgtatcacttcggctttaatgatattgttgcttattcttgtgttaacggactaaacgagtgttcagcttaatgtgttcagttttaataaaacttgtcttaatgtgatatgttgtcttaatctttagtttaagtattctatgttttcttatttgtgaatgtttagtcttcagtgttagtgtgttgtgtttcaatatgacttgtgttcgtaagaagttccatatgacttgtcttcagttttagttccaatgtgacttgtgttcagtttaagttccatatgacttgtcttcagttttagttcgaataaagcttgtgtttagtttaagtagcaaacaagcttgtgttcagtttaagttccatatggttgtcttaatgttaatgttcttgtatgtctcttcttaatgttggtttcttgttttgttacagacttaaataatgcttccaccttctctaaatcactccagtgccgacattacttgtataaaagagaccacatgttttaagtcaccacaagtttgtactttggtttgaatgcttgtacaccacaaaataatattccgaaaacactagttcttattgtgtattctatgacatcacttgtatgctaaacaataattttgttttcattgttctaaattttgaagcctctgtatatgcataccaaaacactcttcttttatccactgttattgttttaagtatccacttttcttgttctctacaacaaacccaataaacattcttctttcaccaaataaacactcttctttaacctaatacacactcttccttttacccaattaacactctttttcacaaactaataaaaatttctcacttaaggattccaccattggacactaaaaattataaagattcaaccaaaaactctaaactctcatttactcaaaatttactattaaaaaattgtaaggagtccttaattaggattccccaatggggatgctctaagccgctaacaaaagaagagacaccatgggccttcccacaaaatattaagagtaatattagtggataaccaaatttgacatcataattaaaaaactaatgttggagttagttttctttgcaaactaactctttttatgtggggtagaggcaagataaataccaaattgtccttttagaccatagtaattacaagacaatatatttatttggagaggatgatggtgaacatggagggagagttcattgtaaaagataaaaaaaaaaaaaaaaaaaaaaaaaaaaaaaaaaaaaaataatattaataaataaataaagaattaattaaaaggtaccaaagttacaaatttggatggaattggtgttgtaaaaatttatgaatgcaatcccagaagttatagatgagatatagaaggaagacaaagaaatgatggtaattttaataaataacatgtcccaaataaaaattacctgatatctgaaacaaaaaaaacattgaaataatttgaaattggtgaaaactgtagtgtttttaaaaaatatagttcggtaataaaaaacaatagcatgccatgtcagaaaatataacttgttaaaatgatatatcatgctgaaaaaattgcatgctagtttaaaacaaaagacatgtcatattaaaaaatatctggttaaataaaataatatcgctatgattttttgtctgaacttatggagatgctgatgaaaaatagtttgatggttgttcattagtcattatgtgaagttgattgaaaatagtggagatgaaatagatgttaatattaacggtggagtgagagttttcaatatgttgagatcgaattatgataaaagaagaatatatggtaatgatattggttatggagatggtggtggttcgctacgaaaatgacaaaagatgaataaaagagaaataggtagcagttatttcaaatatggatggagactctgttgtcggcgaaaaatg

SEQ ID NO: 3283 - DNA, 418 bp, Arabidopsis thaliana landsberg
ttcttatacagaaactaaacaatcgaaaaaaggaaagaaaaaagagtggttccttccggcaaataactgcaaggtttgcatcatcaaaagggagacatcccgtaagaataacatacaagattactccacatgaccatatatctgatgctgcaccatcatagccctcattagctagaacctcaggcgcgacatagttaggactaccacaagttgtatgtagcaacccatcttcctatcatgtcaaaaccaaacaaaagtttgaaacacgttttgctgatgtatatacaaggttttgaatatatggtaagaaccctataatgttgagacagagcactaaggccaaaatcagtgatcttaatgtgaccctttgcatcaagaaaacattctctagctgcaaaacaggaaaccaatgatatca

SEQ ID NO: 3284 - DNA, 570 bp, Arabidopsis thaliana landsberg
acttcttatagttggattgtgtacatacaagaaactttattacatatgtttggagaataaaaatagattatctttcctaatggattaaactcgaatttagactaataatcaccagagaagcaactgataattgagaatcatagtcttattagcagtaattaacatttgtaaaacgccataaatgtacttcacattacaacgcaaacaaacatcatcattagctaattggcttagccagagatctcaatggacttaacttgagccttcatatttttgtaatcgttagatatagaaactatattcatccagcacatgataatgtgtgtatttgatatagaagaaaatatcaattgaaggtggcatgcaaatttgatttatgtttgatcattctaactgcacagtcttataaactaaactttataaacgtgacgttgtacaacatctcgatgcgtctgtagatgtcctttccgctcatttgtacttcgttttggacagaatgcttcttagtctgagcatccaagttaccttggatttgcaggccgtcatcgactcatcggctctcgatgatgc

SEQ ID NO: 3285 - DNA, 5045 bp, Arabidopsis thaliana landsberg
tcggccacaatcaatattgaaagcccataataaataggtaaaagagtgataggtttcctctttcctgtttatttgtgagattacttgcttataaagcaaataagcctctctgtatattcatcaacaaggactagtctgcaatcacaagtaatctcgaaaaaaacaacgctgctcgagaacggaatcgctgccccacgatgtggtagagtgcatcctagagagacttgctgtggattctctgctgagattcaaaggccgtgtctaaacaatggaaatcaattatcgaatctccattcttccaacaaagacagttgacagagcgtcagcaatcaggtgatccagatgttctcatggtctcccgttgtgctgatattaattcggaaatagaagctcttactacattggtgttgggttcatcatcatctgtcaagatccctactccttgggaggaggaggaggaggaggacaaagaatactctgtttcccaggatagctgtgacggtctcgtttgtctcttcgataacttcaaatccggttttgtgttcaatcccgccactagatggtatcaccctcttcctctctgccaattacaacaactccttattgccataggcgacggtttctacgatcttggatacagagtctctaggcttggattcggtaaagacaaactcacaggcacatacaagcccgtttggttatacaactctatagaaattggcctagaaaacgctactacatgcgaggttttcgactttagcaccaacgcttggaggtatgtttcaccagctgctccttatcggattgttggttgccccgcacctgtctgcgtagatgggtcgcttcattggttcaccgagtgcgaggaaaccaaaattctttcgttcgatcttcacaccgaaacctttcaagttgtctctaaagctccctttgccaatgtagatggattcggattcgatatagtcatgtgcaacctcgacaaccgcttgtgcgtttccgagatgaagctgcccaaccaagtgatatggtcattcaattcaggtaacaagacatggcacaaaatgtgttccattaatctggatataacttctcgttggtttggtcctactcaagtatgcgccctcttgccactagcacttttggatgggaagaagaagaagaagaagaagaagaaaaagttgttgttttactgtcgtgtacgaaaacgaacaatggtggtacatgataacgaaaccaaatcatatgatgttgctttcgaggctgactccatcggtcatcctgtttgttatttcccgagtttaatatctatttcataaagcttctttcaccatccgtttgtttgtccaagtttgcaactcttaaagctgcctatgattatgtttcagattcttgttttatgtaagaagggcttgtttcaacatgtaccaacaatttttgtcgtgcttttttatgcgcttgttatgcttctaatttatctcacacagtcggatgatgtcgtttttccttgcatactttcagtgaccacaatatgctctagaatctttaaggcaccttatagttttctcaactatagcccaaactaggatcttgtgctataatctccccgaaaacaaagtcttaaatctatgtatctattcaaattctgaagaaatgttaaagaaattgaaacaaggtaacgaatctctccgaaaccaccaatcaaataactcaaacaactatctgaagcttccaatgactttgttctgtaattcaattgaaataatctccttttacatggcatcagaatcagagccataatcaataaataattgagaaggagattacattttcataagcaccattattagtttattacacactggtcaatggtgaatctctttgttgtctaatagtttccgacatttgaatctgaaccttaaatctcaaaacaaactgataatgaatggtagatagacaaatggagaaatttcaaaacttaaaataaaggttacaatgattgagaaggagattacaatttcataaacaccattattagtttattacccactggttaatggtcatctcagctaaccaacaaaaataaagaataaagttaatgacaaaataaattaattcaagagtccaaacgttagaacttagcaaactcatgatcctgcccacaagacccatgcactagtggtttctcttgatcatatctctgtcttagcacgcttgctgttgaaaggggacatgctggggctcaaacaagggctcaagctcggactcggactctcctcccttagtgtaccattcaaagccgctaactccttcagctgttccctcttgtagtgatccattgactcgtcctgtagagagagaagaatcaaaaccatgtgaacaaaatagacatgtttggacttttgtgataagaatgtaccatcggcttcaggagtgattccaggaaatgcactgcatgctccaatcgagagtttattatgtcttctggaagctcggcctcgatcagtacatgtagtggctcgcagagatgctcgtaccctggcttaccttttaatttttcctcctgcagggaagtaaagaactaaatggataagctttcacaccgcatggtagattgtcagagaatatataagagtcagaaaaaaatgaatttcaaaactttctctatttacttctgatgatgtaagaacctaaaactttaacagtttatttcttatacaggctgccaaaatttacatatcttcaaatgtaaacaagagtagtagctgctgatgcagtaaaaaatgtatcattacttcaacaataagcttgatatgctaaaagacgtaagcttatacacaaaaggaaaacaaattgctcctaaaggccggaagaaaattgtgcgtattcaaaacatggttataaaactgattaacaggtaaaaacatgacataaagtgaagttttgaactgtaagaataaaacagagacaaaatggaatccttcagagaattaataaacaaggagccataccttgacagtatccttcacagatcctcgtcctctgataaacaccctgcagtgggttgctagctcaactctttttagggagtttccacgtggcccaagaatcctcccaacaaaattatactgcaacgctcaatggatttaaactctagaacaatccaattataataacctatttgggtaaagatttaagacatacgcttggatatttatccactgggacatcaagtctaatcacttttttcacaatgggtgggttagggagtcccggcatcccaatccagcccactggggaaggaccgcgaaatggagaagctctctggaggtgacagttttcctgaagaaagcaaaagcaatcaatatcggtaaagcccactcttgattataaaaattattagtatcaccattacaattcaacatgaatcagttaattgactacaactatcagcagtggcttacctcggcttgcatcatcgaccatccctctaaatcaagctttccatttgtcggctggccaagcgatctaaatggactgccatgctcatatctatcaagatcaggaaaactagagaccctcctgatttctgcacagacgtcagcaatgttggcagttaagcaaacgtataaaagaaactgtaagagttatacatcaggggcatcttcagtctcttatctttaatgccaataatgaaacaaaaggctcgggttctaataggttagaatgatgaaaacttcaaacacatctttgtcttttaaggttcacacatcccttaagggcatgatggacaactaaaagctaggtaaacaagtctggaaacaagcttctaatcaccatatgcatattttcggacaaataggcctcctagtataaattagttggtgatcatttgcttaacgatcattatcatttgcaaacacatagacttaattcattttcacataacataactcatcaaggatgatcatttagcaataagttgcaattaaaaactgtttctaaatgctaaaagtaacatagactttgattggctatatatatattaagaaggccataacaaagagaataaaaagttgcatgtagatacatttttgttactcaactatccttacccaatttctgtaaacctttaactggaaaaaagccagggtgatgcgcactaaggctttgttcacgtgggaaatttcttaagttcgtgtgcacacactctaaggaaatactaaattcaaaatcacatagcttaataagatagctcaccatgattaagcagtctgcagcaatttggcataacttgcaaaaagggacccaacttttgtctctcttgcaataattcagtcaagtacctgcacaaggttaaaaaaaaaaaaaaagtttcagtggatgctgcattggtgtgaatcgagtgggtcacattggaatcagtactcagtcacatgtaaactaagcttctaaaaatacatcagtacgttcatttctaaaacattgataaaatatagctatcttgttaaaatccttaagagtacattgtatagaatccaataataagtgagctaattgtgaaaaaggcgacatgttgaggtgagagagtatgatcgagaatttggatctgtgtaagcagttcatgaaaatacaaacttgacagaatcatttttaaacactgatccaatcaaaggcaacaatacccaccaatcacaaagagacacacttgaagttgtgctaaagcaacaagtccagaagaagaaacggatccacaacaatcaagctaacacagattcacaaatagcaaaaaggttgagaaagaagagtgaaaatagaaacctttcacgatcagagggaggacaaggggatcgattaggagaagcacggaatccagaaagaggatactggaagaaacttccaggagagatcctctcttccatggccacgaaaccagcgccagattccatcatctttaacactgtaaatccacttagaagacagattgagagtaaagtagagataaagaaaaacagagaaaaacgagttggtccggagaaagtgaagag

SEQ ID NO: 3286 - DNA, 4277 bp, Arabidopsis thaliana landsberg
acagcaaacaccggaagtaggaattcgtctgatgtaatgagagaagtaatgcaaagttctagtaatctgaaatctagttctcatcataggtttaacaatgccaactcaacaaatttagtatcatagtatcagaggaaggaactgtaggatgtctagtaatcataagttttgggtggtaaaagcagagatagaaacgtacttgcaaccacctttggaggttgagcaaacaaagtaatccccaccagggtgcactgaaacagccacaggatcaccatcactatccttaagcgtgtgtgttgcctttggtcaaagaaaaaagagaaaaaaggttggtttttttatttcattagtccgcagaagtaaactcctaaagaaaggggctttgctctgctgtctcagaatcagaaggtcacaccttgccgaaccctagttttattgcatgattcagaagcacacaagtttcgcaatccaaagaactatagtagatttcaccctaaacccaataagatttcgaagctctcgattgaaaaattcaaaagggtgtaagaaaaatttaccaaaggagaggaggaaagagaagcagtaatggggtcaaaagagaagatgttgaggagagcaggagaagaaacagatgagccacggcgtttggaagctttagcgataagaacccagtttactttcttcgggcgacgaatccatgatccgcacacaacatgtccactttcacgactcgcttcttcaatctccattcgttgttggattgattgttattaatttcctctttggtctctccctaatttggatccttaatatatatatagacagaaaattgtttttttttgtgtgtgtgtgtgtagttgttgttccagagtagagaagaggaaaacagaaagtaaaacaaaaaccaaaaaggagttgactttggaaattggacagagagattttgttgagttattatataatgggattgcaaaatctcagatttaacaaacggacatttgcggtggtgggaaaggatattccttaagatccatgttccgatgccgaatttaatacaaacaagttaggtcacatcgtgcttccgtaatctatagcagactttcccattggtgtcaatctcgttgtttaaaaaaaaaagtaatattagaaaagattgaacgtaatctgaatattaagaaaaaggataaatatgaaaagatatgatgtaaatatgtaatcgatgcatactcttaattatgcaatgtaattctttttttgtgacattaatacattatatatcctttatcttataaaacacaagtcacttggcaaatcatgttttgacatgtggcaaatttatcaaaaacaaaatccacaatgtaaaacaaaaatgaatttttcgacaaaactcaaaataaaattaaatgtgaaaacagtgtacaaaattaaaacattatcgtcaattttcccacgatcactctcaaaagaaaataaaaatcaacccacatattctccatactcccacaatttctttttcttctattcaaactatgtaactcttttttttcaattaaaacattcaaactaactattgggaaacaaagacagatacgatctcaaacctatatatacaaatctcggtatcatctttctattgttgatattggtttttaaaagaaggttgagagtaaaatcatttaggagcgagaccttctttgtaacaagagtcttcaatctctaatcagttcatataaggcaatatggccagcgtatgttatatttcttttattttattgattgcgtttagatgagtatattaatgctttctgtttttgaattatcttttattatgtatgtttaatatctttttgcttcatagatcaaccactaaaaataaacaagcaaacttgatcgatagaggataaaacacaaacaaagtagaagacttgagcaagaaaaacaccaatggcaaagtagtaggaggttgaagacgaagtataagtgtacaacattaagacataaatgatatcatctatgtattgagtcaacttcactctggtaacttttttttgtctatgactataatctatgtttgtattgagtctttgaataccatatgtaattttttattttatagcttttgtatgtattctagaaagcattgaagttggaagctaattctctatatttggaagactaataattttgtgatatcaacttcaattctccattatatatcaaattatcatctgaaaaaataaaatccacaaatacatgaaacgatatatttttccctacacgattatatactaatctatttataaaattaatttttcatgtataaatatcgataatatgtaacatatcataacatttaaattcaaaaaaagaatgtatcataacattaattttcggtgctatgcaccgggtataatactagttacaaataaagtataaaaggaattaaacttttatatagataattaacacaaacaaaatattagagacgatttcaaataagggatgaggatatagatgagaaaaatactatatagaataacaatagtaagaaattaaaaataaataaatcaatttgtacatataaattagaaagaaaaatatagataaataattaaacaatattaatagtatcacataggtcaattaaaattttatatacaatagttaaagagtattatatctcaaaactaagttttgatactgcgtagaacaaatcatgtttcaagcaaaaatgatcaaattcctatgatgctggaaatgcttgacgatccacatgagactggctatgtgcatgtatggagaaaaacgtgttgttcgacaacgcgtgcatgccttcttccacctaagtgacgacgcatcacaaaaagttatctagtagtgttaatagttcatgttccatctgccgaaattacacacaatataacgtattcgattatttgttatccaacaacttaaacgattcgaccaactcactcaaccttttgtcactagttccagtcatatatttcttataaatactcgttcactacatctgtacagatcgaaagaatctcttgatatattacaacacacccataattcataaagactagctcatatacctttgatatatgagatttgatctatatgtcgttctccttaactagatatcgctaattgggcttgcattcaacaagcaacatatatcgcttattacattcgacgatactcagcttctacatcttaagtctctctttttttctgagctcaccatcaagtataagaacacaattctacctcttatttgtctactcccaattttttgtttttggtttttcactattctgacatcttatcgtattatgattaacgttaagaatgtcgtctcgaaaatcacctacctagctattgtttcaagattcgactcccatgcgcgtcctttcaagaacaaaccatccagaagcatcaacctccaactattagagaataatgtcccattcgcccctcgctggtcaaatcgcttccatttgattcacataagtccaacaacaacgatgatctctggtgtactactaccaaaactcaaccttgagacagattctcaaaatactatatgttctattaactattttaacttgaatcaagttgataattgtagagagaaattttttgttcacttcttattaatttgtaaaacatttattttaaaacccattaccgttaagctttgatacaatgatacatgttattttctgattaaaaatggttataaacttgaacggtataagactttagtgtatagagaacaatttagagaatctgtatttatgtaaccgcgacctttcggaaacgtagaaggtggtcgcacaaacaaaccaatcaaacccttaatcgatggcactcttttaatgtctaataaacttcggttcgtcactcgaccggacaattaaatatgtgattaaaagtgtgaatttccggttcggtagagattactggtatttgttaatccgggccggaccgggccgtatctgaattatgaacactttcctaatgtcatagaatcgttcgtgccgtcgtcgctgcgatctgaccaaaatcaaaagtgttacgattcggtatcatcgtctctctcatttgtgattttgtcaaaccctgctctcttttctccaagtgctctcatggtgcttccgctcttccggcgcgctgcgatcgcccggacttcctcgcttctcagagctcgtcttttcgctcctgcctccgaattccattctacgtacgcttattctctctatctagtc

SEQ ID NO: 3287 - DNA, 559 bp, Arabidopsis thaliana landsberg
acccatacacgtgaagtacaaaaagaacatgattttataggtatttttcttgaatgatggaaattttaccttaaggaacggtggactaaccctggataatatggcgtgggaagcaagaaagcgtcaccgggatctgcaagacaaaacattagagtctcgtttgcggaagtggctccagcagtgagcacaaggttgtttgaatcaaaagaaactcgatttcctctattttctgacatgaaatcagcaaaggcctgaaaatcattcgagcaagatcagcaacctacaaataaatttgataaatacaattaataatcttacatttttgaaggaagagaggccatggtagtcttgaaagagagcgagttcccggaaaacagactggccatctctcttgaaacaggctgcgtctgtgttttgtgcaagccatgactctagtagatcaaagcatagctacagaaatccagtaaaattaaacatactttaaattagtctctctgtcatgatatacataagtatatatatatatatcacatgcagttgaataatatttgtttacctg

SEQ ID NO: 3288 - DNA, 377 bp, Arabidopsis thaliana landsberg
attggggttaaatccgacgcggctttattcattggttactctcaccatggcctgagaatcagattatcactgctctcattccaaattccgccttcaataattttgttccactctgtttcaagctgtcataaaaatgtcgtcttcttcttcttcctcgcttaaacccattaattcaatttcttcatagccagcaataagatctggcaaattaaaccattccactatgcttcgtatagttcaaatcacgcttctttgtttcgttctcgccgccgggatctcgatctccggcgtgatcgccgagaatgaatctatagacgagatccttttagcggatggattacctttggggctattttcctaaaggcgtgaagggatta

SEQ ID NO: 3289 - DNA, 559 bp, Arabidopsis thaliana landsberg
ctaaaccttaaccgtactttttaaactgaagccggcatttaaccttctttaattgtaaaatctaaactcatttataaaccgaatccgatatttaatcttgtttaagtgtaaaatctaaacccctttttcgacatataatttcatttaattataaaatctagaaccctaaccactttttcataaacccaaaccgacctataatttcgttttattgtgaaatctaaaatctaatttatatttataaatcccaaaccaccttttatatagtttaattattaattctaaatcctacataattaatcttgtctaacctaaatttaaaaacctaccgattttatttcattaattattggatgacctggcataatgattggcttaaactaaatggaatgaatataagagtttacacctagggatgaaatcaagtatttttaaaacttttacgtagatcttcagaaaattaaagcttttaactcttttgatttggatcggtgagtatatttttttaatttgttgccttatactgtactatatgtccaatattaaaaactttgaaaaa

SEQ ID NO: 3290 - DNA, 760 bp, Arabidopsis thaliana landsberg
aactttatcaagaaccctactttttcattactatgatggaaacctaatgatcaatctgcagaaataaaacttgatttgtcatcaaattgatcgaagtgtcttgtacaaactgacataaatagatacatatatagatactgttataaggatttgtggagaaaaagtgactggaacaaggtatgggggatgctaattaatgatcagagaagaccctcactgcttttttactaagagaaagaagttaaagtagggttccctagttttaaacaaaccctaattttggggatttttaaagagatttgagcttcagagaaactaaggaaaaaaactataaagagaccataaagattgaaaaacccaccagaagagtcgaaactttattctagaaaaaaaattcaagaaaatcaagatctagctaaaagatgtgtacctgttgttggcgtactcgtagagacggcctcgagtggagaagatgacaagagcaacctcagcgtcacacaagacagagagctcataagctttcttgagtaaaccattgcgtcgtttgcagaaagtgacttgacgattcgtagtgttctctatcctctttatctttatcttccctctccctatcttcttgctgctctctgctacttcattactcgcaccaccctccatttctataagccctagctgaagtataaacacaagagaaatagatcaaatccttttgcactcaaacaccttggattaaaaaaatggtttataaggattaactgaa

SEQ ID NO: 3291 - DNA, 661 bp, Arabidopsis thaliana landsberg
gagttctaaccccgaatcaagggatctagttggggtgtaaagttataattttcaagtttcgcctatccaccccccctctaggcgactttcactactctttttactaagacatgtgatgtgatctttttgtgtgccaaatttatgtcgatgacataatatttggttctactaatcaaaagtcttgtgaagagtttagcagggtgatgactcaaaagtttgagatgtcgatgatgggcgagttaagctatttccttgggttccaagtgaggcaactcaaggacgagaccttcatctcccaaacgaagtacacgcaagacttgatcaagcggtttgggatgaaggacgccaagcccgcaaagactccaatgggaaccgacggacacactaacctcaacaaaggaggtaagtccgttgatcaaaaggcataccggtctatgatagggtctctactttatttatgtgctagtagaccggatattatgcttagcgtatgcatgtgtgctagatttccatctgatccaagggaatgtcacttagtggcggtgaagcgaattcttagatatttagttgtacgccttgctccgggatctggtatccaaaggggtctacctttgacttgattggatattcagactccgactatgctggatgtaaggtcgat

SEQ ID NO: 3292 - DNA, 777 bp, Arabidopsis thaliana landsberg
aggtacatttattcaaaatcaaattaattattaataaaatatttatttaaaaaaaatgacagaagtttaggaccgttttagattgaatccctgataattggtcttaggattacatatatgaatgtattttctataaatattttacacctacattaatggtgagatgatgaaaataaaattattattaatgaaacggatcttaaaagaaagatagaaaattgatgatatttaatctatcaaaaatagtttgtgaaaaaacatatgtaaacttgtataaaatttttattatttaggggagaagataaaaaaatcttttaataattatttgtttgaaagtctcgtttatgaaacttttaaaaaagaaggaaaacaaaggggccgattagtagcgattgttagtttacgctttagaagctttgactttaaaaacttgagccgtagagaatttggctgtaaaactttgactgtagaaactttggctgttaaaatctgattggtagaacaaaggtgtagaaaatgtgactgttatgtattcatattaataacaaatacaaattatgttagaaataaatttagaaaattacagaaacttataaattaatgagtttagaaagatgacaaaaaaaaatgaatttaaaaatattctcaagagctaaactaaataattattattcatcattttttaataaccattcatttcattcagaaatgacatatgtttaggaaaagatcggagcgaaaccaaaataatttagtttatggctacatagatgaatg

SEQ ID NO: 3293 - DNA, 549 bp, Arabidopsis thaliana landsberg
  unsure (1)..(549): unsure at all n locations
gcgtcagcatgttgcgcccgaagtctctcgacttcggcagacacaaccgccgtaaggcccccgacgccacgcggtcagcgaagtcagccgcctacaagacacacataagaccacaatcccaacgaaactggtaaaagctgaagtctagctcaacttacctgacttaatgcctccttcagccggcgggacacagcgcccgcctcatccttgacggcagcgagtgtcggaatctcaccaccggcgctgacagcgtacccctcgccctaggcaccacggcagccgccgcggtcgccaccgcagtgannacaacaacaagttgcccttcgccctaccctgcaacgcatcaacagtcaaaaaaaagaagaagnnnnnnnnnnnnnnnnnnnnnnnnnnnnnnnnnnnnnnnnttccacgctaatctcggtggcgaagtcggcaacgcgcttgcccggcggaggcaattatcgggccttcgcagctccagccggggcaggcttggttccgcagcgctggccgcattacggcaccggaccctgctggcccaggggt

SEQ ID NO: 3294 - DNA, 463 bp, Arabidopsis thaliana landsberg
ccaatcttgtgtttcctgtcctccatttcccggcgcttcctttcagtcatgattgctctgtcgatcaagtgctggaaggtggggaaagtttggttcatcaactggtagtgaagggggtcaaccaaaacctctcataaaatggtactgcctcttagcatatgtgttgacatcttctggggcatagcgtgacagttgtagaaacttgtccctgtactgactgacagacaggggccttgcttcaatgcgagaaattcctccttccttactatcatcagtccttcaggcacatggtaacaatgaaagttgtccctgaactcctctcaagtgatggcttcaggatcggcatgggtggcaaggtaagactcctaataggaatgtgctgctccccattgcagacagggaccatacagaatcttttcacgatcattgcactgagcagtgtgaactcgcgctccacggtacg

SEQ ID NO: 3295 - DNA, 2443 bp, Arabidopsis thaliana landsberg
tcttgactgtactccagatattagtcatcatgaacaaatgacagtgatcattcggtgtgtatatgtttcagcaacttcaactaaggtcaaagaattttttttgacgtttttgaaagttgatgatacatctcgggaaggactttttcgtgagcttcaagatgtgttggctgcttttgacttaaaaattgatgatgtgagagggcaaggttatgataatggttctaatatgaagggaaagcataaaggagtacagaaaatgtttcttgaaataaacccaagggcgttttatacaccatgtagttgccacagtcttaaccttgcactttgtgatatggcaaccacttcttcaaaggcaatttcattctttgggattattcagcgtacttattgttttttctcagcttcaaacaagcggtggaaaatatttgaagatcatgtgagtggtctgactctcaagccattgtcacacactcgttgggaaagtcatgttgaaagtgttaaggcgataagattttaggctcctaaaatcatggacgctttagtttatattgctgaaaatagtgatgatccgaaagagcagagtgaagctgaatgtcttgcaacaagtgaaacacatggtattggaagttttgagttcttagtttccatggttatctggtacaatcttctctctgttgttaacatcgtcagtaaaagcttgcagtcagaagacatgaacattgatgttgccattgatcaactgaaaggattggtgtcttattttcaaaagtatagagattcaggctttgagaaagccaaattagaagctaaagaaattgcagagtctatggagattgaggctgtgttccccaaaaaagcaaagcgggtcattaaaagaaaaagacattatagtgaagaatcagaaaacgttataggaagtgttgtattatcaccagaggagagctttagaattgactacttcatccaaatcatggatcaagctctttactcgcttgagacaagattcgaacaattccaaaggtatgaacaaatatttgggtttttgtttgatttgaaaaagttgcagtcggcgagtgatgatagtttgatggcatcttgtaccaaccttaaagatgctttaactcatggaacacattcagatattcttgctagtgatctcttttatgaactaaaaattctaagagaagctttacccaaggaagttaggaggcctattgaagtgttagacttcttgcaaaaagttgaaggttgttatcctaattcatggattgcttatcgagtattgttgacaattccagtttcggttgcatctgcggaaagaagtttttcaaagctgaaattgataaaatcttatcttcgttcgagtatgtcacaagaaaggttaagtgacttgacgatcttatctatcgaaagagcattggttagagaagttgactttgaacgtttggctaatgattttgttgggaagaaaggaagaagaattacgctttagaactatttttatgttttgttttttttcgtattttcgtcatgtgacaatttatctttgtagacatttttacttctattattataagcattgttttttttagttggggaaaaaaaattttgaccgcctccgtcaaccattaaccttggcacggctctgcctacatctcccagaggcgaaaccctcaccaggttaaattcatctcttttagagaagagatcctttccagcgtgccttgaatccagcatctccaatgagtaatttaccagtggatcgacagttcgttggtgctaaaaaaaaatcaaatccgcaaattgtttttaactaagaaatcctcttaaatcttccaaaatcatgaaaattcaaatccacatattgttttcaataacagtggattttaaggtgaattttgaaatcattagttcaataacactgaattttatgagatttttcaaaatccatgtttgaataacatagaatttataaattttacacccatctcttaaaatttcactttcaatacatcctcctaaatgtgatataacatcacattaatgttagataatataatgttggtatacagtattactctaatcaaacactaaggttttatcgttccgaataaaaatgcgtcgttcaactacgaataaagtacggtgtgattcaaatgataatgaaccggaccgtattgtgcgatttacgatttagattttgtctctatttggaacctaaattttaactattattatacaacaataatttaagttttgataaatcactacaaaattacatgaataaaaaaaacactacaggtttagccgtaattatcgtcttaaatggaagaacatcaaatccattgatttgtttataattaaattcgtgtgaatcaatgtcatttttgatatttctcatcgcttttgccaataatttacgctggatctttctcctgtctag

SEQ ID NO: 3296 - DNA, 573 bp, Arabidopsis thaliana landsberg
  unsure (1)..(573): unsure at all n locations
atatattatttacatttatgtttatcatagattaagaacctaaaatcaatctcatctctatataatttaatctaatttgtaactttatttttatgaaagtttattatatttttttctaaacaaatttatgttctttattctcatcaaattcactatatatatgattatctttgctttcatggatgtcatcaaataaataaaaatattttgtataggatcgctacgacgctactagagctgatgagatagatattagttcatgatgaagacaaaggtaagggtattttccacaaaattttgctcatatactactcattttagatgctaaactataagtcatacaccgctattaccccattaatgaatggcctcattttgtattttaacataaactacatctaaaaatcgcaaaattgttacatttttatgtatatatatttaacaacaatcatgagataacaaataaaactaaattaagaaataaaatgaaaaaggacagatgacaatagntattaaaataaaataattatgtgatgtaaaacaaaaccagttaatagtgancctttaaatatg

SEQ ID NO: 3297 - DNA, 551 bp, Arabidopsis thaliana landsberg
gttttaggaacattttgtaatcttgagatcactgggtggctgatgtgtttttggtttgagcacttacttcatctcaattgaagtgaagtgtgatcattttcagtgtttgacaacaaaaaatagattgtcttctatccacccctctagtcgcctcaccagtctgtcaaaacaataggaggctttgttatattttggctctgcaatcttgtctcttgtagtgcaagaaaatagaccactatatcgagatcaaatagtaatgcagagtataagactttggcaaatgctacagcaaagatcaagtggattaagatcttattggaggagttgaagattgagttggacgatatagtggttgcttttcattttaagagagaaagagatacaaaaataagcttcttgcgaacgattctttacccttcacatatataatttaacccttcgcattttaagagagaggggttgggccgcagttggtgccggccagcagccgttggcgcacactaggcagtggtcacttgcggcaccatgcgcgcgcacgcaagcaacagcgc

SEQ ID NO: 3298 - DNA, 343 bp, Arabidopsis thaliana landsberg
cttatacatggcccaagaggatggtaatatggaacactatcatcatctttgcaaacaggtatagaagcttgcgagctacaacaagcaggaaaaagaaagaacggcatcagtgtgactgtgagttaaaaaccaagcttcaggactctgttcttttacttaccgagatgagtagcaatttgggtctgctgttttctgccaaagaaacgtctcatcttgctgacctgagagactccagcagattttcttagataactcatccactcggggtgagatacttgttttcttagtatcaggagaatttccctgggctttgcttgtaggagaggtcaaaacaaaataaccc

SEQ ID NO: 3299 - DNA, 446 bp, Arabidopsis thaliana landsberg
tttatcgttcttacaatagcagttattcttctttgagaactagggctgctgcttcgtttaacagttgagaaacagcttcatccataatagcttcggccatctttctaatttcatcttccttttttgcttcagggtcggctaatgactcaaaaggctccgggggaggagatagttcagctgcgatacaaaacatatataagtttgaagtcacagaaataaaacatatagtcaaaagcaattatgtaaaacctatccgcctttcaagctctgcagttttttcagctgcctttgctgcttctctagcatcgtgcgtatctttttcacttttctctataactttgtgagtcatccctcgaccaccattttcccagatgtcggtgaaaaactttctgccaaccaagcttgcctcggtcgaagggtcttgtgcatcttaatagagaacgcac

SEQ ID NO: 3300 - DNA, 4105 bp, Arabidopsis thaliana landsberg
cgaccttgaagtgacattccgatgtctcaaagcgaaaggcgtcaagctcaatcccgagaagtgtgtcttcggggtaccccggggcatgctcttggggttcatcgtctccgagcgggacatcgaagccaacccggagaagatcgcagccatcaccagcatgggacccatcaaggacttaaaaggcgtgcagagggtcatgggatgtctcgcggccctgagcccgttcatctcacgcctcggcgaaagaggcctgcctctgtaccgcctcttaaggaagaccgagtgcttcgcttggacccctgaggccgaggaagctctcgggaacctgaaggcgctcctcacaaaggcgcctatcttggtgcccccagctgccggagaagccctcctgatctacgtcgccgcaaccactcaggtggttagcgccgcgattgtggtcgagaggcaagaagaggggcatgcattgcccgttcagaggccagtctacttcgtcagcgaggtactgtccgagaccaagatccgctacccacaagttcagaagctgctgtacgcggtgatcctgacgcggcggaagtgcgacactacttcgagtctcatccggtaactgtggtgtcatccttccccctgggggagatcatccagtgccgagaggctcgggtagaatcgcgaagtgggcggtggaaatcatgggcgaaacgatctcgttcgcccctcggaaggccatcaagtcccaagtgttggcggatttcgtggccgaatgggtcgacacccagctgccaacgaccccgatccaaccggagctctggaccatgtttttcgacgggtcgctgatgaagacgggggccggcgtgggcctgctcttcatctcgcccctcggaaagcacttgcgctacgtgctgcgcctccatttcccggcgtccaacaatgtgtccgagtacgaagctctggtcaacggattgcggatcgccatcgagctaggggtcagacgcctcgacgcccgcggtgattcgcagctcgtcatcgaccaagtcatgaagaactcccactgccgcgacccgaagatggaggcctactgcgacgaggttcggcgcctggaagacaagttcttcgggctcgagctcaaccacatcgctcggcgctacaacgaaaccgcagacgagctggctaagatagcctcggggcgaacaacagtccccccggacgtcttctcccgggatctgcatcaaccctccgtcaagaccgacgacgcgcccgagcctaaggaggcctcggctcagcccgaggcaccctcggccgccgagggtgaggcactgcgcgtcgaggaagagcggaatggggtcacgcctaatcgaaactggcagaccccgtacctgcaatatctccatctaggagagctacccctcgacagagccgaagctcggcgatctcgcggcgcgccaagtcgttcgtcttactgggggacgagaaggagctctaccatcgcaaccccttaggcatccttcaacgatgcatatccatcaccgaaggtcaggagctattgcaagaaatacactcgggggttgcgaccatcacgcagcgcctcgagcccttgtcgggaatgctttccggcaaggcttctactggccaacgcggtggccgacgccactagaattgtccgcacctgcgaagggtgtcaattctatgcgaagcagacccacctgcccgctcaggctctgcagacaatacccatcacttggcccttcgctgtatggggtctggacctcgtcggtcccttgcagaaggcgcccgggggctacacgcacctgctggtcgccatcgacaaattctccaagtggatcgaggtccgacctctgaacagcatcaggtccgagcaggcggtggcgttcttcaccaacatcatccatcgcttcggggtcccgaactccatcatcaccgacaacggcacccagttcaccggcagaaagttcttggacttctgcgaggatcaccacatcagggtggattgggccgccgtggctcatcccatgtcgaatgggcaagtagagcgtgccaacggcatgattctacaagtgctcaagcctcggatttacaacgacctcaacaagttcggcaagcgatggatgaaggaactcccctcggtggtctggagcctgaggacaacaccgagccgagccacgggcttcacgccgttcttcctggtccatgggccgaggccgtcttgcccactgacctggagtacggctccccgaggacgagggcctacaacgatcaaagcaaccaagctagccgagaagaatcgctggaccagctggaggaagctcgggacagggccttactacactcggcgcggtaccaatagtccctgcgacgctaccacgcccgaggggtccggtccagagacctccaggtgggcgacctggtgcttcggctgcgacaagacgctcgagggaggcacaacgtcacgcccccctgggaagggccattcgtcatcgctaaagttctgaagcccggaacatacaagctggccaacaatcaaggcgagatctatggcaacgcttggaacatcaaacagctacgtcgcttctacccttaagatgtttccaagttgttcatatacctcgcacctacgcaaagtttagtcgtcaaggaagggtcggcctagcctcggcaaagcccgaccctccctcgggggctaaaaggggggagaccccctctgcgtcgaatttttcctcgaaaaaggatctctttttagcaggattactttcgtgcttcttgactacttcggaaagcggatcctggaaacgacggagtacacggaagcagccaaggctgaccgagccgagggactcctacgcctccgggatacggatacctcactcatcaccttctgcgataagtaactcgcgttcggataaagcgactccatggaccgaacaagtcttcacgttcggaagctctcctgccgaagcagtccttcaagctttctcgactaagtcggggacagggcctcatggacgggtgaaagtacgcgtaagccgcaaggccgaccgagccgagggattcccacgcctctgggatacggatacctcactcgtcccttccgcgaaaagcaactctcgctcacacaaacatccctgttaccgacagagtccagatgctcgaaacaagaggaaaaaagacgcagcttcgcaagcgcggcgagggtgtgtttttctggcctcggcggccgcagaaagcacacgctacaagatgatctgatcctgcaggctcgggtcttcacgctgaagggagccgtagcaccctcggcatcgacgacgtcttcagcaaagcccgacccagcctcgggcggcgccgcggtccagggactcctccgggaatccggcccgagcaggcggctcaaccggttacccctggggcctcggtcaaccggcttccaagggcgccagcccgacccgaggcctcgactgatcgacttcagcgtcggctccgctgacggacaacacggctaggctccggccaaccaggttcccattctcgagccaactccgcctctgttcatactgatatcgctacccctggcctcggtccaccgaagggcggccgaggggtctcttcaactaagctagaggagccccaaacaacaaggccgaacgggccgagggattcctacgcctccgggatacggatacctcacccgtcaccttgacacggggcaactcatgcttggtaaagcggttcagataatcaataggcgagacttaatgctcgaaaatgaggaaaaaacacggctccgtgccgaaattacatacacgttcaggcctcgacagccgcaatgaacgaaaaaacactggcattcgaagtgccattacgaacggaactccggttcccccctccgtaggtacgaacgaccccactccatggggaaggcccgcggagcacagaagaccgatggccggctcgccgccgcccatcctgactacggcgacagtgggtcggcgctgctgcgatcttaccctcgcccccgccgacgctcgaggggcgaggacaagcacgccggcgcggtggcccggggcgcgggttgttgcagtgatccgtcggtgacgaggac

SEQ ID NO: 3301 - DNA, 659 bp, Arabidopsis thaliana landsberg
tctaaggccgcggctcgttttcctgtccgagtccggcccgcaaaggcgtaaatgggtcggcctggcccgtttagcacgggaaaaagcgggccggtaagcacgttttagtgaaaagggtgggcttaacgggcttagagttaaacgggtcgtgtcggactagccctccgtgcctagtttcctgtccgagcccggcccggcctcgcatagaaccgggcttcgtgccgggctcggatcaggccaaaacagcgggcttcgtgccgggctcgcgggccttgtgcttattgaccatctatagtcaactggaactttgcacttagcctgtacaccttaccctcacaccatcaacaaccttatatatcttgtcaaaatcattccagacatcagatgtgtaagttctatttcttacccgagaactagtaggtgtgtctgtcccctcaacctctttccacagtagggttaggatctatattgttgggctccgttgaagaactgcagcctcactgccgccagtttgtccagccacggtgtcgtcgtcggccatcaagcacagatcataagcacatagcaccagattaataacttaccaaagcaggagcaccagatcggtccctcacggctacaaatcacatacaagaaggcaatactatagattagggttg

SEQ ID NO: 3302 - DNA, 402 bp, Arabidopsis thaliana landsberg
ggtatctgtcagcaaattgtccctgattaaggtaaagtaggaactagccgctcccccggtgccgtagctttgccgcggcccacggtttgtaactatatatggcaaataagcacgaggcccgcgagcccggcacgaagcccgctgtttgggcccggtccgagcccggcacggcccagttctatgtgggtccaggccggcccggcacgaataagcgggccgggttcggataggaaactaggcacagttgactagcgcggcacggcccgtttacccctaagcctgttaagccccttttttacactaaaacgtgcttaccgacccgtttagcccgcttttcggtccgcttttttcgtgctaaacgggtcggacccgctgcggactgggctccgatagaaaatcgag

SEQ ID NO: 3303 - DNA, 569 bp, Arabidopsis thaliana landsberg
ctgtttcgaatgcaactaatttgtctcacaataaatgaattaaaattccatctctcttctgtcacccaatgtcatattattttcagagatttgcgcactgaaatcatagtatatcattgtcaagacgggggtttttccgatacattaatttggaaattacaattttactctttatttattcatatagtaagttatcagtctttgtaaaccgaattggaaaatcacttgatgtgtgtctgcatctgacggcaggccccttgacgatcaattgttggagacttgacatatgattctttgcatcattgtttagctgttaacatctttagctatctaagcagcatgatagcattatatgatcagttggacctgtactcatgttgtagagttcctcatctaacaggtcagcattaagtagtattatatttacagaaactgggctactgtatcttgtccggacatgttttgttagcatattgtgactggatatagctacatgtttagcatcacttgatgcctttttgcactagttgaattaagtgggatacgtaacttgttacattcacagagtg

SEQ ID NO: 3304 - DNA, 559 bp, Arabidopsis thaliana landsberg
tgcacgatcaggatccccttttaactcgattgaacaatctatatcttccacaactagaatggaacgatttgcagtagacataagtaacctccgtagctcagcattgttgttaagtgatgtcaagtctaagtcatagatatcgaagttaagatgattagctatagctgcgatcaagcttgattttccagtaccgggaggaccatacaacaaataacctctcttccaagcttttccaactctcccgtaaaagcctttccgctgcacgaatcgatcaagatcctccaccaagtttttcttcacctcgggatccatagcgagagtgcgaaacgtggaaggatgatctagagtcacagaggtccacgtcacggagtaagaatcaacggtgaagatcttcaatgttttaaacttttgtttaatagaagcagcttgttccacaacaaacggtaaataagattcaagaaccatgttcttgaacttctttcggaaactaagctcgtaactacgcacttctgatttcaaagtggagttgagatctctcgggttacgaaaatccttttta

SEQ ID NO: 3305 - DNA, 615 bp, Arabidopsis thaliana landsberg
aaaaaaagataagtacaaagaccaacgagtatcaaatatgtcaaacataaatatttgttaatatcctaaaattttactatacaaatcgcaaagaaaatatatttttaaacacttcactatgaaaatagaaaaatattaaaaagacacacatttatatcaatcaaaaattattcactattggtaattaacgcggagagaggtaccaaaacttatgttaattcatattgccaaccaaaaaaaaactaagtttaattcttctttccatgatgtaatattgctaagaacaaaattattttctgataatgtgtatcagtgtatgttgttttaccattaactttgtttcttatttaaccatttaattaaagaagaagaactaaattacgtataatattatggatataaactgctataatttgtttagttgtgtatttttattgaaaatttcgacctaatggtactttaattttttcatgaagttaattaaagtcacaataatttttgacctaatggtagttgttgggatatataaaaatactttattcagctgaaaaagacaacatatggaagtaagatattagatatatgtaaatttttgttattgggaatacataaaaa

SEQ ID NO: 3306 - DNA, 604 bp, Arabidopsis thaliana landsberg
  unsure (1)..(604): unsure at all n locations
ttataaaaaatatgcaattagtttttacataagtgttctatttatctgaattttttgtaatatatcagttatgaagttaatatatatcaatgtaattataatgactttaactccatgatgattttaaattaccattatgtcaaaaacttgaatgaaaattcaaaactaaaaaagttatagcagtttagatctataaaatgaatttattaccaaggtgaataatttttatatgatagaaatgtgtgtctttttaatgtttttactattatcaatgtgtgagtgtttaaattatattttttgtaatatgtatagtaaaattttaggatattaacaaatatttgtgtttgacctatttgttactcaaagattgttgtccttaatttgtttaatattgtaaatatgtaacgtgaaattttttcagaatagaataacgcgatcagagcgaagaatctgaaaaaaaattgtatatacttttttcaaacgctacacttacttaaacccaaagagtgaaagaactgaataacacaatttagtgttaagatagggatttctagttaaaagagaaataaatnggttatctgatgattatgattatgatgattga

SEQ ID NO: 3307 - DNA, 359 bp, Arabidopsis thaliana landsberg
  unsure (1)..(359): unsure at all n locations
aacacctccacatctcaagctatgcatcaaagattaccttttggtggttctatgtcaccgcatcagcctcaacaacatcagtatcatcatcctcagcctcagcaacagatagatcagaagactcttgaatctcttggatttgatggatcgccttcttctgttgccgccactcaacaacattcgatgagatttgggatcgaccatcaacaggttaagaagaaacgaggtagacctaggaagtatgctgctgatggtggtggtggtggtggtggnnntnntnacattgctctaggtttggctcctacgttgcctcttgcttctgcttatcattcttacgaaggtggaactgatggaggtgg

SEQ ID NO: 3308 - DNA, 494 bp, Arabidopsis thaliana landsberg
aaagttaggagccctggtggttataagcctattgtgttttttaatggacctgtttttactttggataaagttgcttattacgcgatgtcggagtgtgttgtcgtgaatgctgtgagagatgggatgaatttggtgccttataagtacacagtgactcggcaagggagccctgctttggatgcagctttaggttttggggaggatgatgttaggaagagtgtgattattgtttctgagttcatcggttgttctccatctctgagtggtgcgatccgtgttaatccgtggaacatcgatgcagtcactaacgccatgagctctgcaatgacgatgtccgacaaagagaaaaatctgcgccaccagaagcatcataagtacataagctctcacaatgttgcctattgggcgcggagttatgaccaagatcttcaaagggcgtgcaaagatcattacaacaagagattctggggagtcggattcggtctttttttcaa

SEQ ID NO: 3309 - DNA, 481 bp, Arabidopsis thaliana landsberg
aggttctagaacttcaaacataactgcagcaagctgatttctcatttgtagaagacgatgaggctttgtttgcatcttgtttagtgatcttgatcccttggggctgtaaatcaacaaagacagtatttgattttcctcagcaatatctacagtttcataatccgagtatcaagcgaatagtagattccatgtgcttctttacctcggcttttgtatcgctttctgggagtctttgttttatgtctttagcgatagaaaggaaaacctgctcaacattctggtttgtttttgcactctgcaacattttccaatcatatttaagaaaatgaaaatcttcaaacaaacaatgaatgaggtgacacacatattgtatattttcgcactcaccgtctcaaagaatttgattccatactcatcagcaagagcttgtccttttgatgttgggacagcctgtagaataagatgcagcatcagtattcta

SEQ ID NO: 3310 - DNA, 448 bp, Arabidopsis thaliana landsberg
  unsure (1)..(448): unsure at all n locations
gggggcggtgaatggtagtagtatgggggaggaggggacttcaccggagaggaggagagctgtaaacataaggagggggaggggatttcactggcggcggcggtgaatgatagtaatacggtggtggaggagacttaaccggaggtggtggtgatttatattcataaggcggtggaggagatttaaccggaggaggtggagatttatactcatacggtggtggaggagagctatagtaataaggttcggtagccatagccgagccaacgagtaacgccaacatggcgactacccattgagccttggcatgactccatgccggagtcnnnnnnnnnnnnnnnnnnnnnnncagtcttagctaagacttttttctccaaattattaaagaagaccaaattggagaaaatgtttttaatttttgaggaaagatgaagaagaagtgattgat

SEQ ID NO: 3311 - DNA, 1436 bp, Arabidopsis thaliana landsberg
aaaactcaccttctgaggaggagattgaagaatgccttgcaggaaatttgtgtcgttgtactggttatagacccatcattgatgcgtttcgggtttttgcaaaatctgatgatgctctatacagtggtttatcttcacttagccttcaggacggttcaaatatttgtccatctactggcaaaccttgttcttgtggatcaaaaacaacaagtgaagcagctacttgtaatgaagatagatttcagtcaatctcttatagtgatatagatggagctaagtatacagataaggagcttatttttccccctgaacttctgctgaggaagttagctcccttaaagttagggggaaatgaggggattacctggtatagacccgtaagtcttcagaacttgcttgaactcaaagcaaattttcctgatgcaaaactactggttggtaacacggaggtgggaatcgaaatgagactaaagaggttacagtatccggtgctaatctctgctgctcaagtcccagaactcaacgcattgaatgtcaatgacaatgggatagaggttggttcagctttgagactttctgaactcctgaggttattcaggaaggtagtaaaggagcgtcctgcacatgaaacatcagcatgcaaggcttttatcgaacaactgaagtggtttgctgggacacaaatgagaaatgttgcttgcattggtggaaacatctgtacagctagtccaatatctgatttaaatcctctttggatggcttcaagagcagagtttcggataatcaactgcaatggagatgttagatctatacctgcaaaagatttcttccttggctatcgtaaagtggatatgggaagcaacgagatcttgttgtcggtattccttccatggacaaggcccttagagtatgtgaaagaatttaagcaggcccatcgcagggatgatgatatagctattgtcaatggtggaatgcgtgtgtttcttgaagagaaagggcaacaattgtttgtttctgatgcatctattgtttatggtggtgtggctcctctttcgttgcgtgcaagaaacactgaggaacttctaattggtaagaattggaataaatgtcttctgcaagacgcacttaaggtcatacagagtgatgtcttgattaaggaaggtgctcctgggggaatggtggagtttcgcaaatctctaaccctaagcttcttctttaaatttttcttatgggttactcatcatgtaaataatgtaaatcccactatagagacctttccaccctcgcatatgtcagctgtgcaacttgttcctcggttctctagaattggaaaacaagactatgagacagtaaaacagggaacatctgttggcttgccagaggtccatctttcggcaagaatgcaggtattttggtccatctgttggctcgccgcg

SEQ ID NO: 3312 - DNA, 654 bp, Arabidopsis thaliana landsberg
  unsure (1)..(654): unsure at all n locations
gtctacgctttcttctcttccttcttctcctctttcttttcctctttcttctcttccttcttctcttctttcttctcttcttttgccggtccaaccgatatcaaatcgactttaccaaccttcttcaacttcttcaccaccgcaacggcatccattaaaccgatcaccgtcaatttttgatccttnnnnnnnnnnnnnnnnnaatcaactcctgcttaacacaatcctcttagcatatgaactacattgtatcatcatctttggtcatacattcgtcgttttaaatctaaagcaaatggaacacttgctataacacattccataatacgttttcgaatttaccgagtcagccttaactaagcccaaactaaacctgctttttccggcccataaaatacgggctttcaaaatgttcagaatannnnnnnnnnnnnnnnnnnnnnnataaaggtcaaataatccaagctctcaagattctgacgcaattatactacaatcgagctagatttcataccgattgtttcatataactttagctaaaaatggtaatttagtgagtgaaaacaccaccagcaaactngattaatcctttcttttggtttttcaatcctaaaatctaaaagtccatataaacagaacaagaatgaattcatc

SEQ ID NO: 3313 - DNA, 870 bp, Arabidopsis thaliana landsberg
tcaaaaattccccctatttcccataatcaacacttctccccacaagaagccaacttttgacaatagagacaataagagacaataaaagcttttgacaaaacaaaaactctattgtactattttcaaaatctctcaagtggtagctgatccatttatcactttggcctttattttctccccctttggcatcaagcaccaaaacgggattaatcttggcctttttaaccccattgcctcaccaaagtcttcaattaagagcaaatggcaataagatttcaagagatgaacttggaattagttaccctctcatcggagtgcagtggaagtctttcatggtccaagtccaccttttccctttcaatcctccttcgagactaaatcatcaaactcaagcacatggttagtctcaaagggtcaagttgtaacacatctccccctaaacatgtgcatcactttgcaacggacttgtgaggtccagggagtgtttgtacaccttgagcaccacagcaagcaacaaaatgcataaggaaaatgatcaaaggcataaacacatgtatgctatacttcaatccaagttccgcgaatctaagacgtttagctcactacgcagcctgcaaaaggtcttctcatctagaggcttggtaaagatatcggctagctggttctcggtgctaacatgaaacacttcgatatctccgttttgctggtggtctctcaaaaagtgatgccggatgtctatgtgctttgtgcggctgtgctcaacaggattttccgccatgcggatagcactctcattatcacataggagtgggattttgctcagattgtagccaaagtcccggaggtttgcctcatccaaagtagttgcgc

SEQ ID NO: 3314 - DNA, 471 bp, Arabidopsis thaliana landsberg
gacaaggacgaatccggtttttcttattccccatcttgattataatgacgcagaggagaaaattactaaagggagaaataactatggaagatgggggaacaaagaagcaaaatgttgtaaatatgatactacagcatacacagaataatatagtttaaggataatgtaagaaactgcagcaaaaataaaccttgggatgttctccccggcctcgaaacaacccagggggctcaactctgaaatttccaatctggaattgttgcaaaatatggttagcaaattttaagaagctggaaatagatttctatcaacaacaaaaaaagaaattaccctctccctgacaccatcaagaacagcccacatatatctctcctcctgctttaatttttcctctttcaaaatccttttctcctgtacatcgttagcattattacattatcagcagcagcttcatgagaagagcgtactaat

SEQ ID NO: 3315 - DNA, 584 bp, Arabidopsis thaliana landsberg
tgaatacagagtagtcataaacctggatcagagtcttttttttattatgtgattacgacaaacagaaatgagacgacgaagaagaagataaactggcaatagagatgagaaccaaaaaatggatgaatatgaaaattctcagaaaataaaacgatggaaaaaagagaaaatactcaaatagagaagaagttgagttgattgggggtttaataggatatcaaacggtttgaaatcgtgacatacttcatattgaacgtcgttggtggtagtttgagcaaatttagggatctaggatttttgcagttttagaaatgtacagttatctttttagtttttttttcttaacgtactacaatctcgataataactgtttttaatggattttttttaaataaaatatagaaacaaaatctacgtggcaaatgtttagtggccaagtgacttgtactttataagataaaggatgagaaagacaagacacaagtttcttctcgggattggctatttcccgaaattaaagtaaaaaaatcagtccaaaacaaaatcgtctcccaatctccgcttcactctctcttaccatggac

SEQ ID NO: 3316 - DNA, 606 bp, Arabidopsis thaliana landsberg
ggatattttatttgaaggtccttctaagttcacgctccttgattgtttgaagctcttgaagtaatgcaatggtttggcttggagctgtggaagatgagaaagatccgccagcaaacaatctaccaaacctataacgctttcctttgactatggaaacttcctgaaaatgtaaagcaaagcataattagtattgaagcatctagtttaaaaacaacttgtatgaagtgaaactataacataatttcatacttgaaataaatatttttccacctacttaaacgaaatatgtttttttcatacttaaatatcctccacctacttgtcaaaattttgattttcacattttttaaaaatctctacgattttcctacgaacattttggtaggaaaggctcttgctcttttccttacgactctcttacaaaaatattttcgtgggaattaaactagaagaaacagttcatcgcttatcctacgaatctccattaataatattttccgaggaaattggaaggaaatgctttcgactactttcctaccactatattttttttgttttctaccatttcctacattacatatgtcgtagaaatcgatagaaattttt

SEQ ID NO: 3317 - DNA, 446 bp, Arabidopsis thaliana landsberg
tattttttttttttcccatttctgaacttcttaagtttcatcttttttgttaatcaggaatgggattggtgttaaaaaatattccttctttgattggtgttaaatcagtatctcttaacccacaagagattagggtatatttaaccaacttgtaagaatcaaccttaaaaagaaaagttagggcttttcactaatcttgattctcagtttcttttctattacaagatttttgctttgatttgattctcttcctgaaatgtgtggttctttttctgttctgtgctgtttcatcttaatttgcttggggtttggtgaaaaatggatactttgttttttcagatgtggcttcattgatttgagtgagctatggaaaacaattctctttctatggatccagctatggattcttcattcatggacggattacctctaaaaggttgctggtt

SEQ ID NO: 3318 - DNA, 597 bp, Arabidopsis thaliana landsberg
  unsure (1)..(597): unsure at all n locations
tgtcacacaccaaaaatttacagttaatgatatcaattcaaaatcatccaaactaagactgtggactttttcttacagaattcttttaaatgaaatttggttttttgttttcctcaataacttaaagttgtcttgttttaagagctatagtgggggatacttttaaactatagattccagacatacaaatgaatatgggtccttgcattgtcttgttggatgaaaataggcttttcccgatcttctattggccatctttcatggatttttggaatgacttttccaatcaaacatgattttatatcttctcttttcacggaagttaatgctttcatctctaaagttttagcatctctatgtttgtttcgtctcttaacaggttccacagtaacaaatagaaacattccaatttctctagaaaatatctcatttccttcatcataaaatctcggctgagccatcacggctaanaacatcaccttgccaatataattcttactttgacatgtatgatgttgcgcttcttcatccagaaaaaataatatttctggattttcttcatcttataaaccattttcatcaatatgacatatcaag

SEQ ID NO: 3319 - DNA, 1860 bp, Arabidopsis thaliana landsberg
tatgttacaaaccccttacattgctttccatttaaacctctcgtcttcttttttgttctctctctctcttcatggaagctcaacaccttcatgccaagcctcatgctgaaggagaatggtccacaggcttctgtgattgcttctctgactgcaaaaactgtaatcactcttttcacaatcacttataaatattatatatatatatatagtgtatgtgtaaaattctgaaaacaagtaatttatgcctgtaataagtatgctatttaaaccctttatctatatatctttatcagttaagacttaattatgataaaattaattaaaaagtacttattatttatcttgcaaaaattaatgaacaggttgtatcacattctggtgtccatgtatcacctttggccaagtcgccgagattgtagatcgaggatccacatgtaagtttcttataatacacgatgtcataaaaatgcctttgtcaaatttggcggcatagtgataaattattgctggttcaaaacatttcagcgtgtggtactgctggagctctatacgcgttgatagccgtagtaactggttgtgcatgtatatactcatgtttctatcgtggaaagatgagagctcaatataatattaaaggagatgattgtactgattgccttaaacatttctgctgtgagctttgttctttgacccaacaataccgtgaactcaagcaccgcggttacgatatgagtcttggtaatttatttcttcgttatactgttttttttttgtttcattttgttaataattgattgttaagtgtaatctcaaaacattgacattcgttaaaaattaatgtggtattttaggtaggacatcgaatcgacgtggcgtacctagtttcgacgcagtcattatcacgaatgcgaaggtctgcttgcttctcccgcctgagggccgcctatcccgccgcggagttaatgcgacgggacgagtggttcgcaaggcgaccgttgcacgtgcgcgggccgttcgaggaacggatcacgggcgcgtcgtcttcacgccgtgagagagggctcccctgctgctccaggatgggacatgagtctgcagacgatttgactacatcttccgctcgctttctgccgccattacagtcggcccacttttggccatatcaaccgtcgcgcctcctcccgcggctgactgacccgtgatcgatgtgctcgattggtgctgttgggccatgcgcagggttgcctcgagtcgcgacaccggttccgcagtcgaggaggcgcggtattggcgcaagtggcggtgcagtttctcgcatgcagtaacggcacgccggttacatgaagtgtgggcccgcttcccttgcgctggtccaccgggtgtggtcgaagccgaaagggcgctcagtcatggtgcggttggatgcctgtcgtgtggcagtccaccctttcggccaccggtttctgcgaagatgggagaacgcctgtaaccgtggggcggttgcatgactcgcgtgcggcggttcgccttcttcgcgcttcggatcagcttgtatgacgcgtgggacccagcccccgtgtcgtagggggagaaccctggagtatgtcagtggagactttgcccgtgacgctaaggggggcaagtgaggaggtctgcctataaaaggggatcgatcccccgggcagtggccatgccttcgttctcccctcatgcattgcgcccttccacctttcgagcccccggatggggtgcactagcgtcgccttcttcttgatgtcgttggaggagcgcgacctcgtggagatcagcgcccttcagccaccgctcggcttcaaggattttcgtcgtgcagcccggctg

SEQ ID NO: 3320 - DNA, 600 bp, Arabidopsis thaliana landsberg
ccaccacaacatctctaggttgtgatttcaatttaggaggtgtatagttgaaaacatattgacgataacaaaagtacataatgatattatgtaataatgtgtattaaagtttcagatacttatattgaagcaatatatatatataatttaaaaaaagagatactattgtatagataatgaatgtttatacagttcagttagctaatgtaattaaattgtaattgtataatattgatttttgatttttatattttactcttttatatacaaaagcccaaaactaaaatcacttaagaccgtcaaaacttagcaaaacttttacacttctattttttttagaaaaacttgtaaaatttataacctttggtcatcgaaaaatataaactaaaagaatagctagaaaaaagtatttttaaaaagagaaatataaaagaagcatttctaacaattcctctatattgtatcattttaatttagactatgtgaaaccatgaatacattccaacatattttaaactctaaaccatgttttttgttgaaaaaagatttaccttctttcttgcttgtgaacttcaaacttccatatctttttttttttaa

SEQ ID NO: 3321 - DNA, 2390 bp, Arabidopsis thaliana landsberg
cagaatctcagaatatgcttcttaagtctatagaatgttgaaattgtaccgccaaccaagagttttgctttgtctctctttaatttttattctttgcatatatgaagtaatagacaatacctttctttctttctcaaatcatttgatgtaggtcgcaaaccaatcaagcatctccttgtgagcttcttctgctgctttaaccgcctctggttcatcgatgttgtatctaactgtccatccgtgtgacactttcgggtgtatcttcacgtaactattcacctacaggatccgttttaaagttagataaaggtgattaaattacactgttgagttgcggtgataaagcagcttacctcgggtttggaagatagaatctcctcaaattgcttcaagagtgctggtggggacatttgatcaatttcagctcctaatatagcaattggagccttcccacctgcaataaacccgtgaaattgataaggatcatcaaagaccggtgaaagtaaagaaaccggaccaatcacagtgttttttatgtttgcaaatgtgaattagtattctttacagtaataatgatagtatctaatcatggcgagatcagttacgcaatcctataggtgactctaaatgttacaacgcattaggcaaggcatgacaactaatgttccttggttctatgtgaggaatcaagatggaagtagcaaagtcactaacctttgatatcatcaacattgacaaaagaaggatgaagcaacacagctgcttgaataagctcttctttagacagttccaccactacttttgctgaagatgaataacacaagagagaaaagttctatccattagacaaaaagagagcgtcacatctcttaggcatagatttctaacaaaaactcaccaccccaacacatccctgcggctccaatggcagttatgcctttgttctttatggtttcaagtactggtttcgtgttttcaaagcccttatcctgaaaaacaaaagaggatatgaactgattcagatggaatctatcaaaataacagaacaataacacatacattgagtcaaacttgttaacaaaacttcaaatagaagttgagaatgtatgggacagttattataaggaggagaggaggaggaacgaacacagccatggtctttgatccagacagggatgggtctgtcctggttagagggattataaggatctccaccaaagtaatcaggaaccacaacatagaatccagaagctgcaaccttgtccgcaagcgcccttaagacataaaattaagacttaacactccataaacattcctccatagttgtacaagataaacttgagataatgcaatgcaatcaaagcaatgattcaaattaaacatttagatcttatcaactgagttcagaaaagacaagtcaacttaaagacacatgataggtatgcttcatcttgtacataatccaaaaccaacaaaactatttgcaggctcaaatgaaaattctaactagacctcatatgtggctactaaatactatctaattccttcaaagaaacaaacccaagttaaagattccatttttaatggttgaatcgatgaagagggaagaattagtagtagtaccttaagtttggagcttcaaaacctgaagaacaaaaacgtacctaaagtcagagtcaacaatgatgcaatgatcaaatcaacaaaacggatccaaaaagagaaaaacaaaaaccctaattactccgatcatatttcaactaaaacaaagaaagtcaaaacagatcaaagcaaagaaagaagagtattttaccaaaaatatcagaaatgaggaggacgcagagcttggactcggcagagccggagacgtaggcatcaagcccacccagcttcttgacatgacccgacccggaaaccgggttaagagttggcgggttttcacagcactgaggtcccgacatgcgttagttcttcggaaaaacagagagatgagacaaagaaaccaaactcaatcattcgttttcttttaacatgttgttgtgacttgtgaccaactaatcaacggagagtcatctaacgattccaaatagaacactaatccatctaacggtctagaatagtacactaatattttctatacaagaaattttttttttttttttttttttttttttttttttttctgtttctctctatacatatgcgtgattgatttcatcacacaacactggagctagagaacacaagtcacaacaaggaagcaaacactcgaagaaaaacatctatcaaacaactatctgaaatctggagaagatcaaaactttttaagaagctatgaacgcaaatgaatgatgaaatcagctgcgtaatccattgttttagacctccca

SEQ ID NO: 3322 - DNA, 713 bp, Arabidopsis thaliana landsberg
  unsure (1)..(713): unsure at all n locations
ttttcaaccatggagcactaaatgtcaaagaatgctattcatgaaactgaccaatggcatcataacgtgcaaaacctatagatgaatacacaacgtactgagagaaggggtcactaagacatttacctgcagaaggtaacagaccaaagaatatccggccatactttccacgaaattcctctgcaaaagaagccaattcgctaggttatatacacaacatggcatccgacacaagtgggtagttatgcacataatcctcaaagtttgaaccaagcagcttctttccttagattaatccacaaagaaactatcttgaaagtccaatgcaaagtatattcccaagagaatgcaacttatgtattccccgtttcacaataacatgtttaacagacggaagtctagcaaattcctgaaacaaaaacatgctggttgaatgaaactatttagacctaccagcagtacattacctgggcgagcttaaaacttggagagttttctttatactttgcaacaaagaaatcacgtaggctcgttatgttgggatatctacttttgatagaatgaatagaagcctgcaggaagggtaaatggtacatttatcacatacgctntcaatgntagaagattgattacaggatacaacanagcaactaaacagatgtgcagaaactttgttgctagtacaacagaagagttctgtatatatcattacc

SEQ ID NO: 3323 - DNA, 486 bp, Arabidopsis thaliana landsberg
tctcacacacaaaattgcagaagaagaagagtcatgaaatggttgttgttttgctttgtagaagattgctctgtttttgttgagattgatccttctggaagatatggaagagtaatgtttcttctcaatcaaaagattttgacttttggtttacctaaaacatgattttgatttgttgttgtttgtgtagtacgatgaaatacttggcaaaggagcttcaaagacagtgtaattgcattcatcttctatctttgtctttctttaaaattttacactaaacaaaaataatcattttttattgtttaattagtttttttggttactttgttggtttggaattggttacttaataatccaaacactgttctttggttttatgaaatttcagatacagagcatttgatgagtatgaaggtatagaagtagcatggaaccaagtaaagcttcgaaatttcacaaggaatcctgaggaattagagaagtttt

SEQ ID NO: 3324 - DNA, 590 bp, Arabidopsis thaliana landsberg
  unsure (1)..(590): unsure at all n locations
atatcctcgagtgtatacttttaaattttgccttcaattccaaaatacaaaagaaccaatatttttattattaaaatgaaaatatataactatagattaagaatcttcacattctgcaaaacaacttaaactcttcaaaaagtatttggtggcacccatgggttaataaacacttggtagatgagttcatttggcactaagggtgtaaatggctgcggtggttgaggtggacaaatccgtctgcgaattagaccgcttttgatttaccattcatcaattagagtctgtagtagtacgaatcaagaaaaataaaagaaaatcgatgccgaccaactacaaaccgcttttacatacaaatagagcttgtacgtggtggtttattatccgccctaaaaatagagccgactaaacagccgacggatttgtccaccctgaccacggtaaccattcaaaccctaaataaaagttgaataaaattatatgagaattccaatctttatatttttatttaattaggtagataattaagtcctcaaaattataataaaactatatatgttntaacatatttggcataagtacctttcaca

SEQ ID NO: 3325 - DNA, 1961 bp, Arabidopsis thaliana landsberg
cgtgtctcgggtctgaatgtctaattaagctcaatggttcactgatccaaaaacataataacataagagagagctagcaacatgtatactatttcattttttttagagtttttcagccaatgagagagctctatttcagatccactcgcacaaagtgcgcgttgagcgagtgagagcgattctgtgggtgtacccctttccaaatcatgcctttttcaatcgacgcattcctctccgaaatacacatcgcgtgacttttgtttttttgctttcttctctaaaccaatgtaaaccgaaccaatatcgattttaattccaaaaccacataattttacattttctcctcttttcggatgtgataaatttttttcttttttccagattcggttcattaaaatgaaatattaattgtatgattcctttttttttttcttcttcataccttttcttcttgctttttagttctgtttctttgcatgtattgaattgacaaaacaagattttgaaattactttttgatattttatttagaaattttcattaatgtattgtttgtaaataaggaaacaaattttaagagttttttttttgttggaataatccaatatcatttatatgaatatctatcacagtaattatagatttaatgtatcttgaaaaattaatcatatattaaagtacttggaaattataacatgttatattttagacacatatgattctcctttcaaattttaaatataatcttgttatagcttttaagtatcactaattaattaggagagattagagtgtttccataaactcataaaagtagatagagtttctatttagaagttaattaataataataaagatattgctaagttgtacttatttttcagttaacttcaatttagaaacatcggtggctcaataaaccaaacttatatttttgatgattaaaattcgaacctgtacactaatccaatccgaatctacacatttgcataaaatgttataccatgataccaaaaccaaatgtggaaattttcaaaccgaagactcgatcgtgcgagttgttgtgctgcgaggttaaacaaagagcaatatgtgtgtgcttttgcattaataacacaacaaaacagagtgtctcaatgtttacaacaacgacaattttctaaattacaatcaatcacaaatattaataacaagagacacattgccaaaaataaaacacataaagctcttccttgttcccgaaatcaatctttatcgatcgccgatctcacaaactgatcacactgtgtaactccttcagacaaaacatcagccaaaacgccgacaatatcaaatgcttcttgtagatcagttgcagagttgatttcgtcgagccacgagatcaattccttggagaaaccaaccatttctttcacattcagcagcttctctttcattacaatctcccatggctcaagctctactccacttgatgtaccttctttcttgattggttcgatgtggaccggtttcttgggtttgaacaactgttgaagctgttcgatcataccggtgtagaccagcattggtttgacgatagagagaagttcatcgccggttaaggtttctgcgtcttgggttttgcctcctgaactggttggttctgcagcgcgagaagctacccgaccgtgagcgtgttgcatgaaagtatggtaaatcccccgctggagaaagaccctacggtgttggagccatgattcatatgattctgatagaagcgagtttaccatcatgaactgaaccgtttcctctgttccagttgatgatagctgggatccaggagttaaaggtcgcgagtccgaggatggcgctgttgctgtagatgtcgatgatgatgaaatgtacgatgaaacagatctagccatgtttgtgcgttgcacggggcatccttggtcgagaagatgacgggccatttggacatg

SEQ ID NO: 3326 - DNA, 578 bp, Arabidopsis thaliana landsberg
gcatgtatctcccactaaggcacaaattactaaccatataagtctcagtactctctgttctgcaaacttcatacacaaaaccaacattaagagatggcgagccactacagaaacacaagcgctattgcttatctattgctttgtctcttcattacatctgccactgcacattccttcatacgacaaatcactgatgacctcaaaacaaatctgcagcgtatgccaattttctatgttcttttagttgttataaatggaaaacagatcctttgtttttatttctcaaatgctctgtttttgtctggaaacagaggaggtaggagcagaaccaatccaaaacctggacgtgggacattacttacaagaaaataaggagatctcatcacgtgattataaagtatcagcttcaaacgcagcgaaaggtttgagagatcgtcctccatcgtcttactctctcaagatggagtctttcaacacgctccttaagtcaacttacaccgagaaatatgtatctcgtcccttttcagttggtggataccactggtatgttggtcatctgaactttatttgcttgaatc

SEQ ID NO: 3327 - DNA, 105 bp, Arabidopsis thaliana landsberg
ctgttgctgctgctgttgggagagctgctgctgctgctgctgctgctgagagagttgtcgctgttgctgttatgagcgctgccgcaacatctgcggctgcattaa

SEQ ID NO: 3328 - DNA, 548 bp, Arabidopsis thaliana landsberg
gcattccaaatctggattgttttgagaaaatataagtttttcgtgtaaattatcctcatgagtcatctttttggtttgcacagataaaaatcacatcgtaataaatatccgcagctctataaaagtttcttattgaatctacgaagaactcgtatagatttgtcacaaaatgattttgagtgtcacctaacatggtcaagtatgacattgggtggaaacaaaaattgagaaaaagttcataactctagagtcgaattaaaagttacgaacaatgtatgtgtgtgtgtttgtctatatatgtagagcacagtagatacatactaaaacataccgtgttgggcatatcacatcacatcattgtaatgtagttgtggagagatagagatatgaaaactgaaaagtatgtgaatcaaaattgaatgtggaatggtccttcctaaaaaaatagctgtaattgaactctatatgacatcgttttctagtggaccgttctatattcaacatatacactacttcgttttgtatctttggagcagtaaagttttcga

SEQ ID NO: 3329 - DNA, 532 bp, Arabidopsis thaliana landsberg
aaaagtaggggaaatgtcaagctccgatgctatatcggttgatttttcaacgacaaatattttaaagcagaggtattcagaatattagtcattggttaagaaaataataacaataactttttttttgattttaatgctttcaataaaataaacatgtataaatctttgtatatcggcaacttggattttgcgaagatgaagtaacagaagagtgagaaataatttgtgaagtaggattacgggcacaagtcacttatataggcaacttggatttggttctttctacggctacttttctttaacgtctatattttcttaccgttgtaaaatttgagtctaaaataagttatcgttcgtcaatgagttgacatctacgctaataaaacaataggccaaatgggcctagagacccaaacagctatttttctaacgtctatatttgttttaccgttgtagagttcgagtctcacagataaattaccgtttgtgaatgagttgacaccaacgtttgaaaaattaactacacaacagc

SEQ ID NO: 3330 - DNA, 707 bp, Arabidopsis thaliana landsberg
cctgcccaagacccatgaagccatttggccgtccgaatgcaacaactggaacaacctgtacctgtacaaccttaagaccggcaagatggagcacgccatcaccggtggcgacggcaatgtcgccgaagtgctgcatctggatcgcaagacgcgcgaactgtggttcgtcggcgtgggcaaggtgccgggcgtgaatccgtactacaagcagttctggaaggtgggtatcgacggcggcaagccggtgctgctcaccccggaaaacgccgaccacaccatcagcatgtcgcccgacggcaagaccttcgtcgacagctactccacgccgaccacgccgccggtgaccgtgctgcgctcgtccgccgatggccacgtcatcgccaccatcgccaaggccgacatcagccgcctgaaagccgccggctgggtgccgccgatcccgttcacggtgaaggcgcgcgacggcaagaccacgctgtacggcatcatgttcaagccgtccaatttcgatccggccaagaagtacccggtcatcgactacgtctatccgggcccgcagaccggctcggtgcgcggccgcagcttcaatccgtcgcgtggcgacaaccaggcgctggccgaactcggcttcgtcgtggtcgcgctcgacggcatgggcacgccgtggcgtagcaccaacttccaccacacctggtatggcgacatgg

SEQ ID NO: 3331 - DNA, 2141 bp, Arabidopsis thaliana landsberg
tcgttcacacttagaagtttaacactattcaattttataaactgctaattaataagtgctattaaaacagttcaaagacgttaatcaagataattaataccatagttttgttcccttccatttaaataggcaaggattttattgttgttcatcaatcaactactaaacatatattttgttatactaacaaagtttttagtctctattttttctcaatatctcagtatgtttattaaaaatgtgatttcacttttaatggtcatatgcattatagtctccgtaaatgcaaggccaccattttcgtctatttttactgatcaatatccgttacttaatagttttccagtattttctcgtatattcaaatgttattcatctgtgatgaaatttccaatatgcgttatagaaactactcaatccgtatctaataggcgatgggtgattagtccttattgttgcaaggcatatttacataccagagattactgcttgccaaaaattccatacatgccacattttccttctttcataagaaatcattgtttaaaagttgttagaaaatagaattttaatatatatatatatatatatatatatataaataagtcttttaacaaaaataaagttgatttgctaaatgttgtactcaaaaactacaattatacaataatagcattacaacattcacttttctgtgtttcatctttatttagttgacaatatgatactttacatggacatagacatataaacaaatagttacaaggttaatcttcataaaaaatttatgtatttataattacgaatattgaaattcaaatcagcaaacatggtgaacagattatgtctggatgatggaaatcacacattctaatacgtctgaactctcaagtctttgattttatagccggtaacactataggagaaaataataacatattaataatatctatatttttgaaaagataacaatcatgactcatgaaaccgtgtctccctggcctccagagacctccgtagcaaaagtaaaaaattattttgaaatttgtgagtcttcttctaacttgatcattttctttggttgcatgtgagtcttatatatcgtgatgaagtcacaaaggttcttttcataatatttatcttcatgtgaacatcagcacatgaatattatgagtcttatacatcagtacatgaagaaccctgaacccatcactataagcttttagtttatcgtcacacagtagttggaaaatatggaaaacgaaccgaattatatattaaaaatacctttataatttcggatgcctccgtagcatagtggtattgcgttcgcttcgtaagcgaaaggccgcgagttcgatcctcgccgggggcttcttttactcactcttttttatatctctttcttttttatgaaattagaatacaattcttcttagccacaactttccataactcaacaatatacataatcatcaaaaacaaacaattcaaggaaaacttccctccttaccataaataataatagtagtataattttagtgtaaaaatcttgaagaaagccctacaatacaaggctacaacaatcccaatttctcctcgtcggagatttctaagtaaaaccctagaactaaccattatatatattataatacaaatatattcatccctccctctccctgtgtcttactctgtcttctcttcgaactgatctgagatttttgattctgcttctcttctcatcttctcccaaggtatcgctttcgttcatagttcatacaccaattttcttactgttatcaattgtttgattgatatttgtagttcttcaatttgggtttcatgttctgtcttaaaagtcttttcctttctgttggaatcctctgtaaaagcttaatcttttcacattcttccaatatctagtagctgtatagagatctatgtagttctaacgtatattcaatttatagattctcaacttgcaagtcgcttaagtcaccaaataaatctcttgttaaagctataagagatctaatgagatttgtggattccttaatgttgatttgaatggcaatgtgagactaaaatcactacttgtggttcatccatatgagtatgttttaatttcgagacatttgttg

SEQ ID NO: 3332 - DNA, 621 bp, Arabidopsis thaliana landsberg
  unsure (1)..(621): unsure at all n locations
aattaattaaaatttagatatcaaatcttatatgttaatttttattggttattatttttggaaattaataatatatttcgttttttaattaaatttaattaattaaattagtatttgactttttaatctttaaagagataaattaatttactctttaaaattttatttctaatggtatacccatgtaattacttacaaaaattaaggttacattttaaaatgtacttcccaaataatatagtaggattttattaatttttatttgtctttaaacaataaagcttaaagcaaaagtgaaaccaattacaaatttacaacagttgcgatgtgtctagaaaagcgaaaaccgattttaaccctataaggccagaccagnnnnnnnnnnnnnnnnnnnnnnnnnnnnnnnnnnnntgaatttggacaaaatcgaaaccaccaatcagaaaatatatgtggttaaaactttgaacacatcaataaacacgaaaagggtaataacgtcatttccataaattcgtaatcattcgtcctcaaatctttattgtcacttttacaaaaaatactcccaattcagagaaacctgttgaaaaaaaattcagggaaaattgaaaaagtgatgat

SEQ ID NO: 3333 - DNA, 1092 bp, Arabidopsis thaliana landsberg
aatgatatcatggacaatgtcgcaagttaaggttcccactagttaagaagctcgggttctacgcagatgagaaaggaaaggcggagtaaagtggttttaaatggaagcgtaatggagggatgaaggctttggacccattgggccaaaacagaaacatggggccgcaaataagcctgctaggggattaatatttgggcctactaaagatgcaaactcagtaccagttggggaggatttgttatccaacgggaagcgactgcgtgtggaacaaagagatgttgggagaccaggtggtgtgtattcaagtgcgatgggttcgcatgcccatgaggctagtttggacttggattcatcgtcgactttgtctcagcggttccagcgggaggatttgatgtctgaaatagctgttgtgagtcatgaaggatcggaagtggggaattccagtgagggaatggcatgacgtttttccccggtagtttggtatttaactctacaatttttaatggattatctattctggaactgtagggggggcgaataaacccaattttcgaagagcaattcgatttatgttgaagaattataaaacagacctgcttgcaatgttcgaaactcatgctggagggaacagagcagagaggatctgtcgaggcctggggtttgataattcttatagagtggatgtgtaacgctcgtgaaccggaaaatcggttagggtttgttttttaaatcgtccggtttaattggttgggttaattggaaaccctagagtgtgcctataaaagaaggaaactcgaaattagggctttggttagccacttttcgttttataaaggagaaaaagagagaaaaagagaaagagcagaatcgttagggtttgggagaaatcattttcgtcatatcaaatcgtggtaaaagctaacgaaatttggtagagttattcccaaatcctttatcgttattctccagtttacagaattggatttggattaaaattggttgagttattcgcagtttcgtgagacacgttttctcatacgcgaattaggaccagaaaagattaaactagatgtggttcgtcgtttccgatgg

SEQ ID NO: 3334 - DNA, 440 bp, Arabidopsis thaliana landsberg
  unsure (1)..(440): unsure at all n locations
ataatataatgaaatatagtatttgttttagaattgtacaatgtccacagatattttgatagtcttatttagaaatgacccttcctctatttcttatttcttatagcttgtgatggaggctctcttcttgagttcttcttcttcctccattgtagcgtcaaacaagcttactaggttacacaaccattgtgtctggtctacagtgattagagataagaaaaggttcggtcccacttggtgccgtgtaggtggtggtggtgatggtggnagaaacagnaacgcatagaggcctattcaggtttcttcgcttttgaaatgacagaggtcatgcactgattacggaacagagtgcgcctgctttggatgctgacacattggttctgcctccaaacaggattgggacaaccattgaacccaatggagctacgactatgatgcct

SEQ ID NO: 3335 - DNA, 573 bp, Arabidopsis thaliana landsberg
gctaaatagagaccacaacgctgcgagagagatcaaaaatagctgaaacatttttacattgaattttgtttattttttcaccttggctttggttgagatgcaaacaaaggctggatgagtctatgatgatgcgatgtaccctgagatctgcgtaacatctcaaccattgatggagcttggtactaagcttggacaaagcttgaaccatctcctgattctcctcttgaagttgctctttgccatgagtgtgaactaaatgcacaaagaatgtaagctcttaccgatacctaggagacatgcctactcgccattctttcttgcatttactttaactgtctgtacaaagccacacaaaacccatgacccgacttcgctgacactgtatatgccaacgccactctgaaatcctggatggcagcgacacctgctgataaatcttctctttctgctaaagctctcgcctttaccattgactgcgcagctagaaatactgatctttgcctgtccactttgatggaaacaacaaccttttgaccaacgcgttgtggtctctgaatcttgagcatatgactt

SEQ ID NO: 3336 - DNA, 770 bp, Arabidopsis thaliana landsberg
  unsure (1)..(770): unsure at all n locations
tcacatccggtatgagaaagtgaaggtgattacagttttcttgatcacatctttagtttcattcttttttagaaccaagtgatatcttcatttgcattttcagccaattaatattaataacaactgactgatttcttaaatgaacttcaggttcttcaatctgtgattcccataaaagatgaagaggtggttcttggacaatatgaaggatatagagatgatccaactgttccaaatgactcaaacactccaacgtttgccacaacaattcttcgcattaacaatgaaagatgggaaggtactgtgtgcatgtgtccccttcactcttcatcttttcattttctagatcaagtttggaacatcatgtgccaaaatccctttttagttgtagtggttagtaacttgtgtattgatgtatctctcaggtgttccttttatactgaaggccggaaaggcaatgagttcaaagaaggcagatattcgcattcagtttaaagatgttcctggcgacatattcaaatgtttgtatcgagaccaaatcaaaccttcccaaatacttgaaatttggttggtctaacctctcatgcaatgcaacaggtcaaaaccaagggaggaacgagtttgttatacgcttgcagccttcagaggccatgtacatgaagctaactgtaagtacctgatgaaccaaccataatctacgatactataagaaaaaaggagagactcacttttgntcattcatttattcattcaatctgaaagtttttggc

SEQ ID NO: 3337 - DNA, 483 bp, Arabidopsis thaliana landsberg
agccgtaagatctaacatcgtcagtatcatcttgagtactatccaattcgaaatcgtagtcaaagtcagcgtgacgagcaatgcaaggcaagaggaacctcatggatgtagggcgatgcatcttaacgttaaatatgggagtctcatcgaaagagagctgtttctcgccgtaacgtgtgagataacggacgttgccaacgttgttatgatgatttagggctttgagatgcttggagaacaagttacggagctcgaacatgtgccatctcttgaagattccaccttttcttccccatagaagagccattctcacaagactccaagctctttgtgttgccattgatctgcttttcttctttgattcccccatggattcgtaaactctttttcgagatctgacttcacttcttgatttttttttgtttattttgctgctttggctcttcacgtgattgtggagatgaatgaagctgcggaggcact

SEQ ID NO: 3338 - DNA, 691 bp, Arabidopsis thaliana landsberg
gctctcagttatataatataaactttgaagattatttatgttctagatgttataagattacataccatgaaaatggtttggtaaaaaaagcctgagaataacggtgaggagagcgatccatttcccaaccccgttcctgcgaattcaaaatcgaaatatttaatccgatcattgttacatgcacaagaacaacaacatcaaaaaaagtactttgcgtgtattgattgttacctcaagacctgaaaaataacaataggaaggctagagaagaggtaaggagctaatagtgaagccattatattgtttgagtacttccatttcgtttgatccaatatcataagaaaactttacacacaaataaaagaagtaaaccaacattaaaaaaataaaaattaaacataaatccaaatgtttaaaatatgaaagacatgactgacactgcaacgatggacgcgagccatcttaggaacaacgtgatcataactgggactccatagctgtggattagcttccccgcaacggcttggatctcattcagatactcaatattttccatttttcaatatgaactaaaagaagccaaaatacaaaaaaaacagaagcagagcagaagaactcaagttataaaaaggaacaagaagacccaaaccgaagtcttcgtatttggggttactttttttttttttttgat

SEQ ID NO: 3339 - DNA, 5024 bp, Arabidopsis thaliana landsberg
gtgtatttttgtttttacgagttaatcactcacgccacaagatctccacttttacttgctcttctccactttttaacctcattccaactaggaagtaagatccatgtatctctttttaacccttaaaacattggaaacaagaattctcttacacatgtatcggtagttggaaatgccgacccaaaaggaccaaaactcaccattatctcaagtgatagagcttctcaagaaactactccaccatttccacaatctccttttgtatttcttcatcctctggatcggcgtgatagttggaatcattgtttatccctctctacaaggattatcttcgccttcttcgttaaccatccaaagtgtctcccaactcttctttgtaacgcctctgctcctattctttctccttcatttcaggacaatgggcttgacatgtttctgataccactgaagaacatcatgcacgatatggaagataatgaacttctgtggagagcttcaatggatcctaagatcagggattacccttatcctagaatcccgaaggttgctttcatgttcttgacttggggacctttacctttggctcctctatgggaaaggttctttcgaggtcatgaaggtcttttcactatctacgttcacaccaattcgtcttacgacgagttcatgccgcaaggctctgtgttttatggccgccgtattccaagcaaggtcagcttcccaaattattaagaaatttatttcgatacattaataggtttggaattaacgtgataaataaaatttatagatatattataaataatatatatatatatatatatatatataacggatcgaagtacatgaatacgatatttttcctatcttttttagtaaattacataaaaatataagaatatttggtatcttaaaagaaaacatattaattattacactataatacataaaataaaatcaatccaacgtcattaattataaacgtatgcagagagtggattggggaaacgcaaacatggtagaagcagaacgaaggttattagcaaacgctttattagacatcaacaacgaacgtttcattcttctctccgaatcatgcatccctctcttcaacttctccacagtttactctttcctcatcgactccactctaacccacgtcgactcctacgacctcacaatcggtcgcgtccgctatgaccgccgcatgtatcctcacatccgcatgcaccaatggcgaaaaggctctcagtggttcgagctagaccgagccatggccctcgaggtagtctctgatacgttctactggccaatctttaaagcttactctcgctgccccgacgagcactatatcccgacgctactcaacatgaggccaagcttgggttacgtaacgcgaataggacgcttacttggactgactggagcaagcgtagggctcacccgagattgtttggtgagtgggaggttaatgtggagttcttggagtggctaaggatgaagagtgttgatgattgtaagaaaaatggagaaaataagatgaaactttgctttctctttgctcgcaagttttcgtcgactgctttggatgagttactccggttagcatctatcgtcatgtatttctgatcactctcttcccccttcgtccaaaaacaaagatgcaatcggtttaactacaaatcttctttaagtaagtgaaatatacagtgtgtgcttaacaagttactttcagtactaggcatgtgagattaatcaaagtccttgataaagttaggaactagcctgtcatcaagttataaacagaagataacttgagaaacattgagaaaacacaaaagcctgaccccccaatctcatttggtttagtcctccattagcatttatgagaaggtatccattcatattagcacctaactctgcagacaatgtatactcatatggtaagaacttatagaagagaaaaataggaaaagaaaaaaaagaacaaattgctactaataggactaaaagttttgcctagacacctgaatactcaaagaagaataaagtcatgtcagatatttaatctccttctcccatcttcttaagcgagatagaagctaagccacaaatgtttaaccaaagaaacacttgaaaacactactaccaccaagaaatgtgaagaagatcttaattaagcagctaaatacacatccatttttgggcaacactcaaaacgcaatttatcaagttgtagaaacagaaacaaaggccaaacacatataaacaagaccttctcaagctagaagccacaaatgttcgaaaagagaaaaacaattaccaatagaaacgtgaagattttatcttaatcaagcatgttctagtacgagaaacacctaaaaatagatgataagtaggtttttacgcctacttatgtgctgaagtgtggttcagttcaattctccttaaacactaacatgtcgatgcagctatagggggtgtcaatccagtccactgttattgctagcagtcaagatgtatacagaagcaactaagccaagccagattataatgatggtgggtttctagtaacaatcctaaatcaagattcaaacaacaaaaatgagaacttttaagtgccctactcgatcacagggtcgagcagaaccatacatgcaacaaatttaagtactgaaatgcaataaaaggtaactcaacaagatgacacaaataacaggtgaatagaagtgcaatcagggggtgaatacaaataaatctaagaagaatagaagtcctaaggatggattcattgataagggcaactttagtgttcatcgggtggctaactgataacactgtattttactcattttaggtgtatgtttatcatcatttagctatgcatttgctcattgtataatatcattttgcatcattttatcttattttgcatacttaggcatttaggatcaccttgcattcgcattgcatgttttggtgtgttttcaggtgcagaaggagctaaaaaagactctactcgatccattcactcgatccaggcagcaacagaagaggcatcattctactcgacctccttactcgatccatgatgctacagaggaggctgcagtttactcgaccctcttactcgatcaacctcagatgaagcagcagattgatctactcgcccatcctacttgatccactactcgatccatttactcgaccaagggtgaccatctctacaagacttgttgagctatcaaagcgtcttcggatccttgataataggattttaagtcaattaatcctaaagcactatcatgtcgttgtagtacttagggtgtcaatccaaatgggtgtgatgcaaacagatgagatgtgatcagaagtcactaagtcaatccaagcaataacagttttggggtttctaacagtcctaagcgaacatgcagaaaagagaaacaataacagaattactaaaatcactcgaccacaacaggctgatgccagaagtagaatgtggtcgagtaacagacaggatatgatccagctttactcgattgcacagtctgttgccagacactgggtgtggtcgagtatactagtcgagtaggggacaggaaatgagacaactgtactcgactgcacagtctgttgccagacactgggtgtggtcgagtaagttggtcgagtattgcaaaaactaagaaacaagcaatgagaacgattaagcgataacgataaaacagagaaatcaaatagacgagaaattcctaaggatggggtaatcgaatagagtggtatcctagcctatccgaatggttaacaagcgcaatcaagctatccctagacaacaggttcgacaacagatcaattcactcccatgatagaaatcctcaagcaaagctagcccagactaattcccattaacggaatctaactatacaggcaataaaaattgactgataaagtcaataaacgctctaaacggccaatcccttgggatagagacaaatatctcaggaactagtggatcaagcattccatcgaacaccttctgggtgcgagaatgcttgggatcgaattccagtaaacacaactagtcctgaagggattcaatcaattctaaaacttaaccattctactgactaaggattccacaaccattctatcccatccttaagaactctatgtcactacttagacaacatgctcaaagacataaacgcaggtaaacaagtatattgcataagtaaatagataaagagtatagaaacaacatgacagatgaaatcaaatgcggaatctgaataacttggaaaaatctcgaattacaggttgcagaagcaaaagccacgtagccagagtaaaacagaaaataaaactgaagcaaaaactcaatgtcgattagatgtctccggataaaaccctcagacacctatttatacaaaacaaaataaaatgatagtagacgggccggtaacctaatcgcccggcccatagagtgataatggaccgagatgggcttcgtgatccgatggagctctaggtcgcttccaaacacttcttcttctccttttctcttccttgtgctcagcttgtctggttgagtgcggatttgagtagactatgaagatgtgatcgagtgcttggtcgagtgatggtgtttgtggtgagtgatgatactcgaccaggggtcgagtgatgtggttgagtgaacggaagagtgtgatcaggtggtgtggcgaagagatattcgaccagggggtcgagtggcgtcatcgagtggcctgagctgaggttactcgaccacggggtcgagtagatgggaagaatggctctaaagtcactcgaccagggtgtcgagtattttgctggatgtactcgacttgggggtcgagtatgtcctcttgttctggctcgcttctttcaatttgcccgcaaacagctccaaatcacctgaaaataactcagaaatgcaatatgtatgcaaagctatcctaatcatgcaaaatatgcaagaatgatgagaaatgata

SEQ ID NO: 3340 - DNA, 604 bp, Arabidopsis thaliana landsberg
cttctcatttctcaaccaaacaaaaacttaaacacaccaaatttttttaacacattatattatgagaacttaaagtgcagagttgacaatgtcaacatatggacacgtcacttccaaatagaaaatgagctaaattaatatcagtggctgaaaataataacagtctaaaataatatgtttaaaacctagttgttgtcatggaagtgtaataaattaatattagtttggaaagtttaatacgaagaaattagaagtgctttgatatttgatatttggtttaggttcaatatatacaaaaaaaaaaacattcataattgataaacacaatattttgtcccattagacggttagaaaataagatatttatgttaattaattacttatcaaagttcactatatattgtataattagactttatatattttcaatttttttaaaaacgtaaaaatatattttctattaaaataatagattttatagcttttcaaattctttcttaaaatgaaaaagtatatttgctgcttatgttttcaaatacttttttaagcagtaaacatacatgcatgattatattacgttcgtggtccaaccctgtatgtatgt

SEQ ID NO: 3341 - DNA, 1886 bp, Arabidopsis thaliana landsberg
tcaccaaaaaagacttataaaaccttccaactctaaattccacaaaaacaattgaaatgtttatttctgaattttcgcgggaggacgtcaaagttgaaaattcaacaagaatttgagtaccttaaaaatctaatcttattatccatttcgtttgcaaactcattgtgtgagttcttgaaaatactctctgctcatttgatttaaaactaaagtctttcttttataaaaaaaaaaacagaaaaaaaaacagtttaggtttagagatgggttggttgtggaggaagaggaataagaagctaaaattggagagaggaggcatcttgttaaaagatctcatcgaattaggccatggcaaatccaatcccatcaaattcttctctgctaatgagatcctcaaagccaccaacaatttcagcgtctctaatcttctttatggattagcttatcctttcaagtggtattaccacaaatggtattcaggtaagaacgagaaccatcccatgatactcatcaagaaatgtactagctggtgggatcgccggagagtagatagtttattgtgccgcgacatagcagtttcatcgatggtgagtggtcacaagaactttatgaaattggttggatgttgtcttgagttagattatccagtcatggtttaccacggtgtaaagaaacattacaaattagaaataagggaacagacgtggaaaaggagaatgaagatagcagaagatatcgctactgctttagcttaccttcacactgcgttccctaggccctttgtatataggattttgtctctttggaatatcttattggatgaagatggtgtcgcgaagctgactgatttctctcactgcgtctcaataccagaaggagaaacatttgtccgggttgagagaccagcagggggattatatagttactttgctgataattacgttaggagtggcctagtctcagataaaacagatgtctttgcctttggaatctttatgggtcataggcttctattaggagacgaagactttttggagcattatataggagatggatttggcagtaagatgaaaagacatgctcggaattttatgtcaaaattaaaggaagacagaccaatggaagagattgcagatccaaagatgatagaaaagatgggtcaaatttcagaacaagagcgttgtcaaatgaaagctttcctattgctctcactgagatgcaccggtcatgttgggaaagttccaactatggtggaagtggctaaagaactaaagagtattcaaagatgtcttcacaacgacactttttctccttcaggtgaaacccaatccgactctcaccaagacatttcttcctcggtaatcctctcaaaccaaactaaagacacaagggcattgctaagatatattgcctgccaggtatttgacgaaatgtttcaatgggttatgatgaattggtttcgttttttcagaagaaatcgaagaatatgctgaaaattacttcgattcttgtatttttattaagacattatcaatcgaaaagctttagtttctttacctttgtcagatcttgttgggaaaaatgaccaaagagatttaagatgggaatgagacaactagaaaggcaagcctaagtatttttgtgtatttgtgaagagaacagaacaagagtacttaacttggtaactcttttattgcttacttcttagatgattacaaatgccaagcacttctatttatacttggtgactaggtgtgacattattttagaacattctctaaatgctcttggttccatgatgatgatgaattttctagattcagatgtagagagaagatgggttaaaattgggttttattaagaaactaatggggacctctgaacag

SEQ ID NO: 3342 - DNA, 501 bp, Arabidopsis thaliana landsberg
ttcaccttcaatgataggttgggaagattatgtcaaccaattacaatatagggacattgaacaacataaaagcaaatgtcattgcaagtgtcctaaacatgaacctcctactccttcaccttcaatgatagattcagaacaaggagtcgaccaagaatatatggacattgaagaacataaaagcacgtgtcattgcaagtgtcataaacataaacctcctactgcttcaccttcaataatagattccgaagaagctaatgctcctacccccattgaacaacataaaagaaaatgtcattgcaaatgtcataaagctaaagctcctactcccatgaatgaatactattaataaaatagatgtaaaaatatatgtctttattaattaatatcaataaaaaggatcaaatgtctattttggatgatagtgatggaatcaatttctaaatgacaatgctcaatcttataacattaaacaattgcatattggattagacacataac

SEQ ID NO: 3343 - DNA, 582 bp, Arabidopsis thaliana landsberg
aagaaaattttaggaacttctctaagccaataaggaagtcctctgatcatcacaaagagatcatataaaatgtttaaatgaagatcttgagaacgccgaaaaagaagaagaagcaatgcattattacccatgagtccattcagcttggatgaacggtccaagccttaaggtcacatacattccattcttttgaatcaactttatgaacttcaccaaatcagctcgtcccgaaaagttgaactgatgaacgcaacacaaaatacattatgaatcctaaagattcatgcatgcgtgttttatatgttctatatatagatcagtttttggttatgaattacctttccttgttgaggctcatgtacattccagaagacgtatgtctgaatcgtgttcaaaccgccttgcttggctctcttgatgatacttggccacatctaaaccaaacccaaatgacacaataatctcaatatacaaaaaaaaaaaaaaaacgttttagaaaaacagagattatgtgattcaataaatacttccggagtgcttttcgggtaatgaatagagccagaataaagaagctctcttttg

SEQ ID NO: 3344 - DNA, 2807 bp, Arabidopsis thaliana landsberg
  unsure (1)..(2807): unsure at all n locations
aatcaggttatctttggttgacatggatcctttttctttcaagtaagttatctgtcgagaaactggaacaataagagagaatctgccatggaaatttcgccaatgcactaccattgcttgcaaagctagaatctaaattttaaaatacttatcttttatttttccctccacattatggggatgttacaggccggagctcttgttcatgtttacactgacgggactgttttagtgactcatggtggtgtggagatgggtcaaggattgcatacaaagnnnnnnnnnnnnnnnnnnnnnnnnnnnaacattccacttagctcagttttcgtgtcggaggcaagcactgacaaggtacatctaagctcacttacaaagctgcacactttgggccgagacataatcagacaaaaatgtttttcctctcttatcgttttgatggtctcttgataggttcctaatgcgtcaccaactgctgcttctgcgagctctgatatgtatggtgctgcagttttagacgcttgtgagcagattatagcaagaatggaacctgttgcatctaagcacaatttcaacacatttactgaggtattttttttatcttgcaacgtgatataaactcagaagagttagatgcctattttgatgaaaaaaatgtccttctctctgagtatatgtagctagtaagtgcctgctactttcaacggatagacctatcagctcatggttttcacatagttcctgatcttgggtttgactggatatctggaaaagggaacgcctttagatattacacatatggagctgcctttgcggaagttgagatagatacattgactggtgatttccacacaagagcagctgatataatgttggacctcggatattctcttaacccagccattgatgttggacaagtgcgtgttcttcccttaccctcctatactttcttatcttttagaagaatagtgttgtatctgaaatgactatttacagatagaaggagcgtttgtacaaggactgggttgggtagctttagaagaactcaaatggggagatgcagctcataaatggattaaaccaggaagtttactcacttgcggacccggaaactacaaaataccttccatcaacgacatgccgttcaacctcaatgtttcgcttctcaaggtttgtaactatgagaccaagctttaaattggtagtagcaacacatttgaaactgaacctgaggttatactgtattaaatcaggggaatccgaatacaaaggcaatacattcatctaaagcagtgggtgagccaccattctttcttgcatcatcggttttctttgcgataaaggaagctattaaagcggctaaaaccgaggtgggtctcacagactggttccctctagagagtccagccactccagagcgtatcaggatggcttgtttcgacgaattttcagctccttttgtaaattcagatttctaccctaatcttagtgtttgagctttgaacatcatcagaggggaaacagatcgatcaatctattgtgagaaagtcatatctgtaacttattttcagtctccatataaatgtaacatatctgtaaagatacatttaccaagcagtatacactatatatatttataaagatatgtttctcacaagcaacaactttatagactacaagtgcctcaagctctgaacttaggcaaaagcaatttcaaagagctttgatgcagagtatctcaatcctccaaagctattcccagaaaatattctaagaataagttggtttgcttttaacgtattatatattaatattaaatgtagttataatgtaatcattaaaaaggtaaaaacgatagggaaaagttacaacagtcaaatctcaaggtaaattattcgagtgactagaaccatttcatgatacaaaacttttgaaagcagaggataccctccaatggggactcaagctatgaacttgggtggctttctaataagagttgcttgttcaaaggcaaaagcaatctcaatgagctttggctctgagaatctcagtcctccaaaactaatcccatatggaactcctccactatcgtatcctgcagggacattgattcctggataccctccaatggctaggacagagctcaaatctgaaccaagtgtcactattgcatctaacttgttctcttcaattagcttttcgattccattcctcgatagttctttcattttctgcaacgctgttttctctttctcacccattccactagtggcttctgctgtaaggaacacctcttgtccccattctttcactttttcctgtgtttttttcagttcaatgatcacatttgttcagctaccaaacaagaaaaaatcgaaatcgtttgaagcttagtacttacttgttcagcgaattcctcgttgtaggcaataacatctgctaaggaccggactggtgatttcacaagctctttaagatatgcattgagagacatcttgaactcagccaaaagtgctatctcttcaccactatcagtcccacccacaatgacttcgatgtttggtatcgtcagattgttaatgacaatagcgccttctcgtctttatccaaggaaaaccagaactagaattagatatggtgttctcagatgatgaaaattttcttataacgcattttaccttaatgttttgatgtgatgatcaagaagagaagaatgcttcattacaatccctaatctcttacctttgaggccactagttgtcagaaactgcttgtaaccgccttcaggtttgaactcggacgcagctttc

SEQ ID NO: 3345 - DNA, 4097 bp, Arabidopsis thaliana landsberg
ggaacaaatatggctttttaacaaatgtacaacgagaataatggttgcaatttaatggtttattcgaatgagacatcaaaaacattggggtgttcaagctaaacaagcacttttgggtaggacagtactataattttttagtccatgtattatgcaatattattatttatattatttctattttttagaaatggtaatttagaattaaattgtgaaattgttttcattttccaaataaaaaggctattaacattaaaagaaaaatgaaaacatgttaacaaatgaaaaatcgaaactaaaactggataaaataagttttgtattagagagggaagatgcaactaccccaacgaagcttttaatgtttttagacagttgagatttgacacctaagagacggcgatgacttttatcccaattgggggcttttaatttggccgcgttctatgcaatttactcttttaccctttcgttgacccgttatcttcgaaactaccctctttatgtgcacaacttgaagacagttacattttacgtggccgtgtgaacttgtgtaaattaatcatattatatgattcatatatagatggaaaattaataagtgaaccgaaacagaagtttgttgaaccaaatatgagtaattgtgtgggttattgccattaaaactagtccatccatttcatgttattttgaatgaaattgagcagtcttataataccacttaaaaaggtttttgtaaattaaaaatggcatacatgttctaattggtctactaataccatttttaatccaatgtaacttaactaaccatcccttaagtgaaaattaatcagatagttaatgtcatattttttatgtttcaaattaaggatgttcaagatttttatacagttggatatcaattataaagagtcccatttcaaaacccgcgactagatgatgagcggaatcatcgaccggcacagtcccaattcaaaaccattttgcagatagagaatcatacattctctgtcactcttctatattaataccggttgacattgcagctgcaaacaaagaagaagtttgagttgtggtggatattttcagaaaaaccaattagatataagattgaggattttgctcatcataaaataatctataacttaaatgtagtcaaaggaaatacattgcattttctttatcgcctactactatatttattgtgaataaattttaagataatacaaaaaaaactattgaacctcatcagaaactgattcacacttgatttttcctttttgaccaaacgaatcaagaaaaacattgcattttcacatatgttatatcattatcaaagaggttgtaatttcataaacaaaagtctatatttttttacattcttttttcgttaaaaggcttataaaagtctattatttacactttacaacatagtattcacttaaatattttaattattctatctaaaactaatttgtatatgaaatcataacaaacaattaaaaatacagttcaaaacaccaaaatttgcccccaaaaaagaaatccaaaatttgataatcgtttccgatcgagttctatttgactttgtattgacttgctttggtctggtctcatctttaaataccacgttctaaccattcttcatgattttattcccgcggctttggtgaaaaacgtttaattttcttaaaatgatgttgtagacaagaaaactttgtgtcattatcaagaaaataagaaatgatgccattctaccaactctgaacttgaaagccgaagaatcgtcacagatagtttttgtcgtagatgtgtcataacgagagaaactacggatcatttgttctttacgtgtccacacgctcgccaaatatggagagcttcgaacattccccttccgagtctatcaaatccccaggtgcattatgaaacaaaaattaaagagatttatgaatttcataaaaatgcaggacaacatacaatgcaagggcagctacctatctcgatcctttggagaatatggaaaagccgtaataagctagtgttccaacgaaaacagaacgattggtggagagatatcagagatgctacaaatgaagcggaagaatggatcacaaatggcctatgtgcgcaagttcccactccgagtacgactaatggcacaactaggcagtttcagagtcagtggcaaaaaacacatatgggatggattaagtgtaattacgatggcagctttgtgaatcgagttcgtggctctacggcagcttggataatcagagatgataacggcgtgttcaaaggggctgctcaagcgacaggtgcgaccgtttcctcagcctttgaagcagaatgtcaaagcctaattcttaccatgcaacaattatggataagaggctttagaaaagtaatacttgaaggcgactgcaagctcctagtcaatgttctgaatggaagaggctcaagatttgatgctatcaattggatccatgaaatcaaagtttggagaaataagtttgacgcaatcaagttcacgtggtcacacagatcaacaaatcaacctgctgatattttagcgaaaaaccagagacatgctctgtcttcatacatagttcatagctttatcccattgtgtatctcaaatgctctgttttcagactacgtttcctaagtaataaaaatgaagttcgtgttaaaaaaaaaaaaaaaaaaatgatgccattaactcatatcataagttcataacccaaaactaaactatcgtttcatgtgtactaactacttgtgagattttcacaagtcaatatacatgcgtgtgaatctttaacgcgtgcgtgataagttttgtatttatatcatcatttggtatgtgtcaacacacaatttggggagagtttgtgtggtaagtaatgcaaaaatatatgtttgttatataacatagaactgattctaattgctaagaaaattcctaccaaacgaagcaattacgttcaacaattattcttagaagtttgaagaaaccattctctaccactccacaattctttcttcttcattggttttacaaattctaccttttcaagtcattcttaaatcttaaataaacaaaatcagtttgaatttttccaaaatgaattatgatttttaatctctctacacctttagttatatcggtaagatatctcaaattcttcaagcaaattatggtacatattttctatagataatattgaagaaaaaggagcttaactagtgttgatttcaactatcggaatcaaatatatatttgcatttcattagacactaaacctttcaacaaaaaaataacaataattcaataaacactacatgtgtaagtgcatgtcacatggattacaaatcattaagctaatatcttcgataaattaagaagataagtggataacaagtacctaaccgcaatagtccataaattaaaacattaatgtatttgtcgttgaaaatttggccgacttttatttgttattctagtttccacatcaaaaatgtttgtacttcgtagcaatccatccacctaaaccccaaatcttaatttatatttgttgcgtttaaatttgggtgagatttgattctaagtagttgagatacaatgatattctattcattagtaaaatgatagagaaattggtttataataattttaccctagaacatgacatgatattggtaaccattaatcaaagaaagagcaaagcatttaatttaccctactctccaaccactccagcctttattagttgcagttgggaatcatttctttatgattcttatgtcattgtctcctaaatcaatgaagtgccttgaccttgttactaattcgaacatagcaaagccaactacatagatcctttacaaagttctaaaaacaggttgtttaggcgtctagacaaacaaaaccattttgtacgattcaacaaattggtccatagaatgttattgatctttcttgtttaggcattcgataaatcggctaatacattatttttttgttttgctttttccttattaaaaatatgcaaagtattccgatgtttaacctgaactgaatctccacatttaaa

SEQ ID NO: 3346 - DNA, 650 bp, Arabidopsis thaliana landsberg
ggaagctgttgccgcttaccaagcttctagaagaccacgacaacaacaagaaactaaccttccaagtccacctcgaagtagtctaagttgtccaccaaggacaatcaactgagaatgatatattacaacacagaggtctcccgatccttgcttctcaagtatgtttaggagcctccggtttcccatttataacaaccatctccttttttgttgaacctaatcaaatcttttggcaggctctttcattttccaaaattttaagtcgccacccggactttgaagtagatttcgtgccaaagtaccaggagctactaccagtgtacttgactctcttcttctgcctcatcgagacactgagcaagtctccacagagcttgtctgcggatgaactaaccaatgctcaaaaccaactgtccgagctcacaaaagtaggcttcaagctagactggttgaagtctaagctcgaggagctttccttggagaggaagaaagcaggtcccgatgcttgacatgtcctccacgaacgggtcaaaaatgtggaactgactttggccaatctccaagttaaactggacaatgacaggatcaaatattctgctgctgctgctggagtttcttcctttgggatcattggtttttttatcaagaga

SEQ ID NO: 3347 - DNA, 639 bp, Arabidopsis thaliana landsberg
atgtcacggggcaacacaccacaactttggcatctatctaacccaagcaacaattgcttcgtgtaacgtttaatttagcaaaagcatatcaaatgttacaaaaactgattataactacaagcaaatataatacacacttgagaacggtttttacctgtgcctgagagaacttaatcccaggggtcgaagcaaggcctgcgacatcatgatccatatattcaaatataagatacatacttcccgaagcttttgaaatgatcagaccttcgagtttcataacgtttggatggttaagcctacctataatgataatttctcttgccataaacctgacactctcatgatccatattagcaaaccgaacctttttaagtgcaacaatctggtttgtttcgagatcacgagctctgtacacactactatacgtaccctgcccaatctgcattcagaaaaacaacaacagaactttagcatcatctataatccaagatcaaagacttcaatttcaatcaataagccactcaccattttcaacttcttgaacgaaatagcactacgaggaatccatccttaatagcttcaccagcaacttgaactaaccatgaatgcaaccagcaaaactttagctgtctatttcat

SEQ ID NO: 3348 - DNA, 568 bp, Arabidopsis thaliana landsberg
  unsure (1)..(568): unsure at all n locations
aggttgttnnnnnnnnnnnnnnnnnnnnnnnnnnnnnnnnnnnnnnnnnnnnnnnnnnnnnnnnnnnnnnnnnnnnnnnnnnnnnnnnnnnnnnnnnnnnnnnnnnnnnctagcccttccgcttcgatcagtcgagtataccagctcacgtcgtctcctgcgttcttttcagcctctccaaccttcaatgtgttttccattccatccagacactttaagatggtttttacatctggacaaaacaggatatcacataaaggtttgatgcagctctgctccaccatgtatctgaatcacaccaataaatggagattgtgactttgatgatcatctataagcatgttaagttgaaagtgcaaaaagaaagaaataagacagggacgtacttgatttgatcatgagaaccaagtaaggtcgcatttgaaattgcgcatacagattctttcttcatgtcaaattcagcattctgagccagtttgactcaaggttggaatcaaatttgcatcgattactgactgttatcaccaggggaaaacagtttagtttagtgagatagcaaatagacaaa

SEQ ID NO: 3349 - DNA, 1371 bp, Arabidopsis thaliana landsberg
  unsure (1)..(1371): unsure at all n locations
gagactctacttgctccttctcccctgtttttattttactttgtctgttttgttttgcaactttgctatttctcaaagacgattaaataaaaaaaatcaatatcaataagtctaattagctattgtttttaaaaagcattaaaattctataaaatactactccctctgtttctgaatatttgtaatttaaggtttttgcacacaaattaagaaaacatacaaatctcatttaatttatctctttcatataaaaacatcattaattacaactaatccaaccaataaaaaaatatgatataaaatataattggttaaaaactattaaatacatttaatgtttgcataaaaaaatgaaaacaacaaagtacacttaattagaaacagaaggagtaattaaaaccttaaatggtaattccacgatagatagaatatttactaaaataaataatagagttaaatgtaatgttgaagcaaaacaaataaaaatgaaattacatattactcgtccttatctaaaatctaccttcatccgtttcaggtggaatatagaagggcgcctctaaacaacaatttagcgaacaatcgtaaagagtaaattcttctgtagctctccttataaggaaggggaacttacaacgaagttcacaatggaagcagaaaggtcgagtaacaccattattgggaagtacttcatgagcgggatctctgggatctattagtcctagcttcgcattatataaatctccaagtacacactttaatgaaggctgaccccacaatcatcacaagtatagtaaaatacactcggatctgtcttggtctcacaaatatcacaccacaagtgaccagtatcgaagtcagaagcaccttgacgtagtgacagaagatgatcgtcacacctatgttttacttttcttggtaaagtagcgcacgtcatgcataatgagtaatcatcacacactatacagttgagatcataacctgctttggtgccacaagccttacactttttggaatgttccaaggtccagtataacgggtgtggatgcaaatcgtgtagaaagggttctgatatggaactacactgaagatcaaagacaaattcttcatcgccatggtcttcgtcacactcgtatctgaaaccattaggagtggtatcacaagtagaacataaaaatatagaagccttgtcaactcgtagagtgagtttatggttgtgcaaaaaatgtcgtctcttccgcggaagacttgcacatactntgtgaatgatgaaatcgcattccagacatttgtaggatagattgccattaatagcaagatgcacccccggcacgcgtagcgtcatttccatatgacaatctcatcaatcta

SEQ ID NO: 3350 - DNA, 542 bp, Arabidopsis thaliana landsberg
tgagcctgtggatatatcggatatgctctaggtgacatagggtatccgctattacatatagagacacttgccgttggtatggcaagacatgtcattttccatgacgatattgtggctttcatatcatccactatcacggatgatctcaaagagttatgtcctttattacagacccctgctaaacccgaggatgtgcctcttgagcaaacatgactctctgatgcacatccacatcaagatgtgtgatcctgcaaggctcagggtcctttccatccacaggctaaaagacaaaacaaacccccaaaacactatcaggagtttcattgttatcataacactagtactatatcatatcccataaaagactatatctcttatgcatatatagacgagccttttcatgcctttattaacactatcacagatgcgagtagtcccacaaagatattcagacgctaaagattatcaggcatggagcgatgcgatgaacgaggagataggtgctatcattcagactaatacctggagcgtggaaagtcttc

SEQ ID NO: 3351 - DNA, 2903 bp, Arabidopsis thaliana landsberg
  unsure (1)..(2903): unsure at all n locations
caatttggtcgagaaatccctgaaagcttcggagtcaaactgtgtcccattgtccacagtgatggcctttggaccccgaaacgacaaacaatattctgccagaaaaacttttggacggtggccgaagttattgtggctaaaggcttcgcatcaatccatttagaaaaatattccacagctactacaacatatctcaggttcccttgggccggtggtaacggacctaacaagtcaaggccccacctttgcaatggccaagtgggttgtatgagctgtgttagggacgaaggttgtttttgatctcttgcacatttctgacaaccttcgcacttttgaaccaattctgctgcatccgaagctgccttcggccaataaaacccttgacggaaaatttttccgagtaacggcctagatccaatgtgagatccacacaggcctgcatgtatttctttcattaactctataccatcggttctagataagcatttaagcagcggacacaaactccatgtttatacaactccccttctatcatgacatatgggcgagctcttgcttctatcctcttgttataagcttcgtcatctgaaagaaacttaccctgaaggtaagagatgatctcggttctccaatcttcgctaaaaacaggagatatattaagaactgctctttcaagaagttccaccgaaggcnattttattgtttcgaaaaatacatccgaaggtaaaggcagcccctgtgctgctgacttagctagcaaatcagcatgttcattttgtcctctagggatatttttgacagaaaacccttcgaaggaagcttcaactcttcgaaccatatccagatatttttcaagcttcggatccttagccttgcaactcttgtcaacatgacccgaaacaatctgggaatcagttttaagtatggcccttcttattcccattgcttttaacttccgaagacctaaaagcaaggcttcgtactcggcaatgttatttgtgcaactaaagtcaagctttgccgtataacaagttttaactttggaaggtgaaaccaacacagcagccgctcctgctccgaagttccccaagacccatcacaaaacgctgtccatgtttcggcgtctttatttgtttcttcctcctgagcccctggcgtccaatcagcaatgaagtctgctaatgcctgggactaaattgaagatctatgaacataatcaatacaaaattcattgagctctgcagcccattttccaatccttccagtagcttctcggttcctcataatatccttcagaggttgtgaagaaggaacaattatgttgtaagcttgaaaatagtgccgaagctttctggaggccatcaagacagcatacagtaccttctccaactctgtataatttttctttgataaactaagaacctcggatacaaaatatattggggcctgctcttaacctagccttcaagcttctcctgaacaagtgctgcacttaccgctgagtgcgaactgccacatataataacaaaggagcccctggcgtaggtggagttaatgttgttagatcaatcaggtattgcttcagctctttgaaggctttctattgagctgggccccactaaaaaacttcgactgactttagtatttaaaagaatggcaagtttctttctgctgatctagatataaatctattcaatgaagccaatcttcctgccaaccgttgggcccccttcttcgtacttggcggttccattcgaagtatggcttcaatcttgcttgggttagcttcaattccttttgttgataccagacagccaaggaacttacccttctttactccaaaaacacatttctctggatttaatttcaggccagcttgcctgaaattggcaaatgtttcttgcagatcagtgatatgattttcttgcttcgtgctttttactatgatgtcatcaacatatgttagcacatttctgcctatctgagaatgaaggaccttggctgtcattctgctgannnnnnnnnnnnnnnnnnnnnnnccctcaggcatccgaagataacaatatgtaccactgggggtaatgaagctggtctttggctcatcttccttcttcatccaaatttgatgatagcctgaataacaatctaacagactcatgagctctgatgaagctgctgcatctacaagggaatctatccttggcaatggaaactcatcctttggacaaaccttgttgagatctgtgaaatcaatgcacattctccatttaccattagccttcttcaccataacagtgttggctagccattctggatatgttacttctctgataacgccagcactgagaagtctttttactttgttccgagcaccttcaactttatcatcagacatctttcgaagtctttgcttccttggcctgaaggatggatccacattaagtgaatgctcgatgacatccctgttaactccgcacagatcattagctgaccaagcaaaaacatctttgttgttgaacaaaaatcttatcaaggttttctcctgctcttcggacaattgagatcccaatagcaccttctgctctgctatatcctcacacaagagcacgggtttcggctggtcagccgaagcagctttttcccttctgaacttgtactgctcacaagcttcagttccatctatattatggattgcttttgagtctgtccaatttccttcggcccttctggcagcttcttgacttccatgaatatcaatgggcccttggtccgaaggtatcttcatgcaaagataagctggatgcagaattgcttcgaaggcattaagagtaccacgaccaatgattgcattgtaagggtattccatgtcaacgatatcaaacataatttgttcagtccttgtg

SEQ ID NO: 3352 - DNA, 1489 bp, Arabidopsis thaliana landsberg
cccatacctataataaaacgctgtcggtttgaattcggatatatgggcccaaataagttcagtcaagtaatgggctcaaagcccataaatatattctctggcgccgccagaaatggaagaaaccgaaacaaagtttctctctctctctctctctctctcgcataaccttttcgccgaaactctcatcttctcttagccgagaaaattcagccaccaccaccgatcagtaagttcttcgtattcctccgtctctatcatcgaatcattatttattcaataaattaattccatttcttcaaacccatgttttttggttggtaaagttttcatttttatcgtctctctgtttttcaatctctctttcagtttcagattttggcatgggttgtactgtgagggagaagcacgtgaaaccgacccgtaggatcaaagccgctgcatttagatccgacccaccgttatgttgggtcgagaagattgctatgtcacaatcaattgttgagaaccttgtttatcatcctggtcttactgattccggttctgtcaatttgaattccgttactgagaatcctgaggagaatttttgggcatattgtacagaggagcatttggaagagattttgctgaaacatttggagtttttgtataatcaagctgtttctaagcttcttgaattgggctatgaggaacgtgttgcgttgaaagcggttttgagtaatggacactgttatggtgaattggatgtgttgactaatatagtgaataattcattatcttatttgaatagtggtggaggtggaggtgggagtaatgggaacggtgaggatcgaacggagactggttttacggatttgagagatttggaggagtattcgcttgcgggtatgatttacttgttgcaacaagttaagcctaatttgagtaaaggtgatgcaatgtggtgtttgttaatgagtgagctccatgttggtagggcaagtactctggatgtcccaacgaataggtctagttgttgtactaaggaagatagcaatgtagaagatgttggtacgggtggtactctagatattgctggttttatggcaccagcgttgtgtcgattccatggaggttggggttttgggaatgggggaggacctgagttttctggtaatgggttttctatgaaaggtgctgagttgaagttgcagagagagattgattgtcctaaaaggtttaatctttcgccatccatgaagtccttgttgaagcggaatgttgcagcgtttgctgctgggtatcgtgctagtatgaagcagaagcaaatacagtcgtctgatactattggtgatagcaaagcttgtaatgatcctgcaattgtgaagagttgtgggcagcaaccacgtaagtcagggagtgaagaaagtgttagtacggtgttggagaaatttcgtgatctgaaccttgatgataatctggaatcggtgggtgtggatgataaggattgtgt

SEQ ID NO: 3353 - DNA, 521 bp, Arabidopsis thaliana landsberg
tccctctctgtttcctatgttttgtactcgatttcttttgatattgtcttcttcttcccgacgaatcctaaacgatggagagcaattggatcaattattgtctagtttgagagtctatcaacgagattctttgttgaaattttgcttattgttctggcatcgtagctttgattctaatcgatttttagctagaaagccctaatttcgtttgaatcttctacatcgggatttcaaattgttgatgttatgtggtgagtttcaattgcagatatgaagatgagccagcagagcctgagatcgaagtaagctattatttgtagaagagagattgacattgtttattattattactaggctgattagaatgtgttggtgtgagtaggaaggagtagaggaagatgctgatatcaaggagaacgatgatgttaatgttgaccctttggaaacaagagataaggttgaaacagaacctgtgcaacgcccacgtaaaacctcttagtctatgactaagtatgaacgtg

SEQ ID NO: 3354 - DNA, 590 bp, Arabidopsis thaliana landsberg
  unsure (1)..(590): unsure at all n locations
aatatgtatcttagttggtgcatctcttaaaatatgttctgtttacatcgttagannnnnnnnnnnnnnnnnntttggaccactagtattatcatcttcatcacagtcgtcttcatcatcatcatgtaacctctcttttaggaaaactctcatgtacaccaggccaaagaaaaatgatatagctgcaacctaattattataattttcttatatatttttttgaatattgtgggtaggtaaccaatatataaaggtatgaaaaataacacttcagaaaatgagaaattgatttatttttttactttttcagtttggttaataggtatgaaattccgatacctgaaaaattgaagttatgggtaacaaacgagctgagaatgttgcacaaactcctgaaattgatctgacacctgctaaaactccaaacattgatattctttttctgccacaaacatttttcgcctgaaaataggattaagcgaaatgatatcgtataaatgctttgagttcaaaaactttctttaaatataataatggtggaaagaaaacataatttaccacataagcatgagcgagacagtcaacggtgc

SEQ ID NO: 3355 - DNA, 4124 bp, Arabidopsis thaliana landsberg
  unsure (1)..(4124): unsure at all n locations
ccacgtgttatgtatgacaatgacagttctactgaagggaaatctaagaatggaggtatgtgcctcttgcttctgtatcttcttcactctggactttctatttctgtatttctcgatttaggaaataatttagaattccattttactcttgttacgttattgttctgttttctactaatatagtaaggtttttgtcaacttctcaattgtatctctaatgctgttgcaggtttaagagtgggagaaatggaaagagattgtctaattgcttatggagccagcatgttgatctacgagcggctcatgatatctagtgatcctttcgaagttcaggtaattaaatcataatgcactgttttgaattatgacaaaccttgtgagaaatgattgcaattttgtgatacactgtttaaacgtttgaatgcaggtttgcagagcttgtggtttgttgggttattacaattacaagcttaagaaagcagtttgtacaacatgtaaaaatggcgataacattgctactatgaaactcccatacgcatgcaagctactattccaggtaaaaaccattggtctattcttcaaattgaaactctctacttcgtcccatttggaaaatgataaaataattctgatctctggatataaatttcttcctaaaataagtaaaaatcactgatgttttcggttttactggtttgtttctctgttatttcttaatcgttgtgcgcattacgtggtaacaggaactccagtcgatgaatgttgttccgcgtctgaaactcacagaggcttgatctcagagaaatgttatcaaactgtttgcaacttggatgattgtattttatacgacttcggttgcttttggtttgaaatttggtgcctctgtcaaagtcctcgaggttggatcatatttgttttgttctcatttgttgtactgaaaccttggaataaaatagaatgaaaaatgtttttaacttttcgtagaaagaatatcagctggcttgttaccatctctttacccaattgaactgtatctcttcaaatttgttcttccaaaatctgacttcatgggtcctttaatatgcaccaaattaaagttttagtcttgtaccattgattactgcaaccaagactcttaacatctccgtcaaagcagacctttttgtattaaattagtattacgtttttttgtcacaattgtgttttattcataatacagagccaatatgataggtcaatatttcacaaatactgaaacaaacaagtccaactaaaggaaaagcttgttgtacacaacatataaaacatgtggcaaatgggaaacaggtttggaagacacgtgggaagtggaagggatgggagtctccgatcacccacagatcgttgtgacgtctttgagacgttggaaagtttcaattccggccaaaatttgttcaatcggcagatctcaatcttggcccaaagatacaaaggcgaaattcatattttggctttgacgagaatatgactccactttattcaaatttgtgaatcttcttcttcaaacaacagcttttcaatcttcaagttgcagttcatccattggaaatcgaaagccttgacaagaatattattccacttaattcatagccggacgaagatgctatcgaagtgagaccaaagtcattggagaagaacgccggcaaaatctgaaccgaaaaaacttctttctctttgaaagatgaaagaagagaagggagagagaaccaatgccacttttttttttcaaaggtgtttcttttattgatatatactttcatagtacagcattccaacaatggaaaaaacattttggagatttaagtaatacaaaagataataaggcctataaatctgagcattcacttaaaacataaacgaaagataagcacatttttttcggactaagttttgttttctaattacaaaagagatatatatatatatatatatataaatctctccaaatacaaatatcttcagatttcacaaaggcagaataagtatcatcatgatatacactgttgttgttgtcaatgcaagcaaagtaaagtaacaaagacgaagaagaagcaaacacatgaaagtccagatgttctctactatgtgactaaccaaatgagatctctcttcaggtacgaatctaagcacaacacgatgaactcactgccgtagcccctggcccgtttgggagaaccattcctgtcgggttttcagctggctgtacacgtggtagccttttcgctgtagcggtttgaacaagagaaacaaaagtgaaaaagggatttaattgaaaacaactaattgttggaaatagctttcttgatgaaagaatgactcacctatttcgtagaatatgtctttgacatttgttgcggtcttcgctgaggtttccataaagaaaaggctgttctcttgagcatatatctctgcctcctgtaaatancaatatcaagacctacttaacaacccaactcagaaatgaaaaaaacaagtcggtaggtgatgtaatagaagatttcacaggcaccagtcgaatctcatccccgagtgttagttaacattttctcccggtactttcgaatttcatcaagatttttggcattagcaaagcaaaatcagacagcaaaagaaagaaagatttagtttacctctgcagacaccttccttgcgtctaataaatcagctttgtttccagcaagagccatcaccatattagggttacctattcacatgatccacattaacatataatggtaccaaataaaccacaccaactatcagaaagtaggaatcataaactagctaaaaccaaagtcagctattccataccttgtgcctgcagttcctgaacccatttcttcgccctctcaaatgaggcctgtggcaatagaaaaacaaaaattaagcaaacctaactttgcagagagccttaaactgccactaaagtccactgatattgcattcgtgactaaaaacacaaggatcgtgagttcgtacttgattagtaatgtcaaagacaataatagcagcagctgcacccctgtagtacattggagccaaactgtggtatcgttcctgaccagctgtatcccatatctcaaacttcacagtcgcatcattcacagccaatgtttgagagaaaaaagctgcaccaatggttgattcctacaacaaaacgagtatcaaaaagtcaagaatcaaccacaggaacgagaagaaaacctctatcaagatcacaggaggaaaatgccaccaaccaacctgaaattcaacaaactgatctttcacaaaccgtagcacaagacttgattttccagctccaacatctcctagtaatacctgaagcgcttaaccaagttaaccaccaaaaacaaaataaagggggaaaaaaacagatttttcttctgactcgttagaaccctaaaacaaaactaccagatcgaataaaatctataacctttactccaaaccctagttttatactgataaaccatgcgatttctaattcgatcacaatcatccaatttcagatcagagaatttggttgaaaattccccaaattggaaacagaactaactcatcgaaatcaacgatctaatcaaaattgacgatcatccttcaaaggataagcaaaacccagaataattaaactgaccaatttggcgttgatgttcttgtttccagagctagccatgattgactgattgattgatctgaaacagtatttgaagctcgagaaacttctgctaaaatagaaacaaaattgaagatggaaccacgcgttgacaatcgtaagacggagaagagagaccgaagaagcttccgtcaacaaacaaccaaatttctctctttgtatctctctctctctctctcttgaagacgaaagcaaaaaaacagagaagaaagaaacaacttttttatacggctcgtgaatatgacaagaggagacttataactaaaaaaaacacaagattatcgaaattacgataaatccctatatttgtctaaaatactaaaaacgccccaaaaacaaaaatatgttacacggtgaccttcatatattgtagacgatgtctcttaataataaagtcgaaaaatgtgta

SEQ ID NO: 3356 - DNA, 3505 bp, Arabidopsis thaliana landsberg
agtgattaattacgaatgatcacacattttttcaaataattgcgaataaaggagctcgtgttattgcgcaaagtgttttagatcgaggagtatagagttcgctcttacgtcgcctctagccatcagtctgggctcaacgatctctttgccagtgagagagttgaatccaatatatgatcgatttctttgacttcaaatgtgagtctctttttatatagggaaaattacagcatctgcaatatttttcaaaatcctttcaaaatctggcatattttcattggcctttcaattcatgccacatttggttggagaatgtcgattttgtctctctccatttcttctctattttatctctccttccttgaaatctgtgcgctttaaccatacattattatcttcccgaagacaaaacgaaacgcttttgtctctctctcacttctcctgacaacctgcacagattctttacatgtaactttcaattgattttgtcccccaattttattcatcataaattctctgttgtatctagatcttctccctgatttcatcatctttcaaaattatcatgaatcccacatcttaaccaccaattgttctcatttaaagatttcgaattttatttagatttttcaccatctattttggtccacagattagttgactattattgtcttcaccgacccggattattcttttttttttgctattgtaaaataacataaatatccagttataacatattatcttgtctaccattcgatctgaatttatccccgatctaattctattactcattcgatatgaacttgttcccgatataacatattatttaaataaaattatatgcaattgtaaacgtgtaggtgaagtcaataacgttcacctaatctgtgaatcaaaattgatagcaaaaaatctaaataaaattcgaaatccttaaatgagaataattggtggacaagatgtaggattaataataatagagcaagatgatgaaatggaggacaagacgtagacgcaacagagaatttctaaacggggacaagatctggagagaaaaacaaaagtctgtcaccaattgtcctttatctgacacatcagtctgtcaccatcaagggcaatttcgttcacaaatgtgcatgtgacaatgaaatgtgatagattttgtaagagaaagctttttgttgtatgaattgtaagaaaacttcaaaaaagtggtagattttacaagattcccttcttgaaaactaaaagagtagttttttttttaattattatttatttttatttttttaaagagtaatttagaaactagagagttaattagtattttagtgttaattagtattttcactgtattatttgaattaaaatcctcataatcgatatacttattctcctaatccatgtgcatgtatgtattgggaaacaagactttgatattaaacaatcataagtacattcttacgataaaatgtcttgtacaaggacaactgacacccacaaaatatgtgtgtttcaaaatatctgtgtagaggaaacgaatgtaagtttctgtctaattgcctagaacttgaaatattatttctgtcttgtacaaagactaagacttatcataattaagtgacaaccacaaaaattcaatctctaaaaatatctttgtatgtagtgtaaaaaagctttcgaggaaagtaagacgaagtttctcctctctttctcacactatgtcttgctgatttacttctcttaaaaatcttcgtctcttctctgagttcgctctatcatctcccatggcggcttcttcttcttctggcagacggagatacgacgtttttccaagcttcagtggggttgatgttcgcaagacgttcctcagccatcttctcaaggctctcgacggcaaatcaatcaatacattcatcgatcatggaatcgagagaagccgcacaatcgcccctgagcttatatcggcgattagagaagctaggatctcaatcgtcatcttctctaagaactatgcttcttcaacgtggtgcttaaatgaattggttgagatccacaagtgctttaatgatttaggtcaaatggtgattccagttttctacgacgttgatccttcggaagttagaaaacagaccggcgaatttggaaagggtctttgaaaagacatgcgaggtcagcaaggacaaacaaccaggggatcagaaacaaagatgggtgcaagctctcacagatatagcaaatatagccggagaggatcttctgaacgggtacgttgttatgattccaatatatctgcttgcgttttcaattgtctcagaactatatttttgcatagacttcggttcttcttttaggggtgcttcttaattgacaaaattgacttttgttattaggcctaatgaagcgcatatggttgaaaagatatccaatgatgtttcgaataaacttatcactcggtcaaagtgttttgatgacttcgtcggaattgaagctcatattgaggcaataaaatcagtattgtgcttggaatccaaggaagctagaatggtcgggatttggggacagtcagggattggtaagagtaccatcggaagagctcttttcagtcaactctctagccagttccaccatcgcgctttcctaacttataaaagcaccagtggtagtgacgtctctggcatgaagttgagttggcaaaaagagcttctctcggaaatcttaggtcaaaaggacataaagatagagcattttggtgtggtggagcaaaggttaaatcacaagaaagttcttatccttcttgatgatgtggataatctagagtttcttaagaccttggtgggaaaagctgaatggtttggatctggaagcagaataattgtgatcactcaagataggcaacttctcaaggctcatgagattgaccttgtatatgaggtgaagctgccatctcaaggtcttgctcttaagatgatatcccaatatgcttttgggaaagactctccacctgatgattttaaggaactagcatttgaagttgccgagcttgtcggtagtcttcctttgggtctcagtgtcttgggttcatctctaaaaggaagggacaaagatgagtgggtgaagatgatgcctaggcttcgaaatgactcagatgataaaattgaggaaacactaagagtctgctacgataggttaaataaaaaaaatagagagttatttaagtgcattgcatgttttttcaatggttttaaagtcagttacgtcaaagaactacttgaagatgatgttgggcttaccatgttggctgagaagtccctcatacgtattacaccggatggatatatagagatgcacaatttgctagagaaattgggtagagaaattgatcgtgcaaagtattgaccgagaaatcctggaaaacgtcaatttctgacgaattttgaggatattcaagaagtattgaccgagaaaactgtaagtttttcgcagctccgtttgaatgcat

SEQ ID NO: 3357 - DNA, 521 bp, Arabidopsis thaliana landsberg
atcattaggagactccggcggcgagtagagttttaaccaatttagatctgacggagaatcgacaccggaccattgtatcacaacggaatcgccagatcgattgagagcattaggggaaattgaaatggtcgctttagaatcagcagaggaaacgaagacggagacgaagagaaggaggaagaaagagaaattaacgatcatggcgacggaggaacgtaagaataaatgttgccggagcaccggagatggaagatatataaacagttgttcaaacgacgacgtttttaccgttcgttatgattggttagctatttttaaaaccaatattgatttatgacgtatcaccttcttatatatgggcctatctaagcccaatattatgggccttactctgtctatttaatatattaaaatattgttggaatttgaactggttttggtagtttagtttccactgagcttgcttttttcatggcgatgataaaaattctttttttcttacacacaattcacttccgatt

SEQ ID NO: 3358 - DNA, 617 bp, Arabidopsis thaliana landsberg
tctagttaagcatcgtcatcgtcgtcctgctgcgccgcatctacgtcctgctgttgagcctcgacagcggccttttgcgtctcctcctccatcgtatgggtggtccccctccccctcctcgtcctctgccttatcacaccacccaccatctttgtccaatcacttgcaattaagagtaagcaaataagtacatataaaaatatgtatttagaaacaaatgcaaaataaataaaatatagcattacatcgattgaaaataatctttatagtcaggattagtcggatcataagtctcatcatcacaatcaaccatttcatactcaacaccatctaaaggcgcaagttcgtcattgtcattgccaaaaggtaatccttcaagcatttctaagtcattctcattttgcacctcatcctcctcctcatcaacaaccatttcatcatcctcgtctaattgcattcagttcgctttggttaagtctatctcaaattacgcttctagcccatcttcttgaaagaactctgtcatatgtctttaaggctaagttataagcttcatcatttggaacaagtaatttacgtgcggtgatagtttatcacagcatccaaccttaagatga

SEQ ID NO: 3359 - DNA, 576 bp, Arabidopsis thaliana landsberg
aatttgcacaacttttaccatcgatgttctggagcaacataataggagcaccgatcttcaatactagtctattgtttgacaatccagacgtttttggcgttcttcataaaattttggtgtataaaccatcctttttttttgctgaggatcaacacctcgatgctatatgaaataagttatatcctttcttgacatgtcgatctataaaatgccgatagacttaaaaatcaaaaaacaaccattgcagatttgcacggctcattatcaacaattattagcaaaatcaatattatcacctttcatatttgatagcgtgtagtcgttaatgattccaacatcattattggttgagctcagtatagttctctctcggaaggaaaaaatatccataatgtggagaaagatccacattggaaagatgagtgggacttaaatagtatataaggatatagatttctttacttattgccaatttgttttgagttggaaaccatgaaacttaagtgggaattggagagatacatataaaggaatgtcttcggataatataacacgaaacacattctgtaactaggt

SEQ ID NO: 3360 - DNA, 460 bp, Arabidopsis thaliana landsberg
  unsure (1)..(460): unsure at all n locations
taccccgacgtctgtgggttcactgcggtttctgaggaccgcgcttgccaaggctaccgagcgcctctcccaatgaagcgccgaggcagcggaccttcgtttgctccgtgacgagctggcggcagacgcagcggcggcacgcgcagtggcgcgccggtcgcagttggagcttggccaggccatcggtgagcgcgatcagtctcggggccacgctgactatgctgaaagcgactctgaggcccttgggagccacctagttcacgcgctggctcccgcctggtgcattgcgcatgacctggctgtggacatcgggtctactcagtccggtcaagccgtagccttcgagtactgtatcctcggccgaagcctatgtcttggctgttttgaggttttggttcagcttcannnnnnnnnnnnnnnnnnnnnnntcatgctttgggtatttgccagacttgagttt

SEQ ID NO: 3361 - DNA, 521 bp, Arabidopsis thaliana landsberg
  unsure (1)..(521): unsure at all n locations
ccttggaggtcctttgcagggacgttcccaagatcctccaggtaatgacttcaggcatacctttctcgtgattaaggcgttctttgtgacgccctgcttcctnnnnnnnnnnnnnnnnnnnnnnnnnnnnnnnnnngtcatcgttcatccgctgcgaggtcgatgtctagggttcgctgcgatccctgaggaccacgcttgccagggctaccgcgcgcctctcccaacagagcgccgaggtggcggaccttcggttgctctgtgtcgatctgggagcagaggcggcacggcacgcgcagaggcgcacggcggcagttggagcttgaccaggttagcggcgagcgggaccaatctcggggccgggccgcgaggtccaaagccgggctgaggctcttggagtctagttagccgaggcgtctgctcgggccagagtccttgcagcagacctagctgtggccaaaccgcatcctcggagcagagtcccgagccgaagtatgtcttggttgtgttaagatttgttt

SEQ ID NO: 3362 - DNA, 483 bp, Arabidopsis thaliana landsberg
  unsure (1)..(483): unsure at all n locations
tggctaatctaagaagtgatcatgatgggagagataccctgacctccatgtatcttcacctatgaaaaaggttctaaaaccctaattcccctcttgagccattaaaccccaaacattggattaaagggaaaaattatgcaaatcaattcatgaaatgaaacctataccaaagatgaagtacattaataaatctacaaaatgtagtaagggaagtattacaagaaggcccaacaaaaaccccaaatcaagcccctaagtggagagcacactagagccatccatttttctctaagtccaaaaatcagccctaacctaaagatcagaagtgttcacccctttgctggcaccaaaaccacatggtccaaataacaaaaagtggccaaactacccaaggggcacccctgaaaaatttgaaaccaaaccagggtcgtttgacctgcgttggcatccattctgtcacggngtgaacagtgcagacataca

SEQ ID NO: 3363 - DNA, 501 bp, Arabidopsis thaliana landsberg
  unsure (1)..(501): unsure at all n locations
ataaatatgaatctctgggggtctttctcatacaaactaccacattagataactaattctaccttcgttttatgtctttagcctttaaagtaataaaaaaataagttatgttaaacaccagtgttgggctagagagatggcttagtggttaagagcactgactgctcttctgaaggtcctgagttcaaattccagcaactacatggtgggtcacaaccatgcataatgagatctgacactctcttttggtgcatctgaagactggtacagtgtacttacatataataattaatacatcttttaaaaaacgtgctaaaaaaccaaccccatcagtggtaccttagtatatgtctcttgattgctatacactgtatttggccaatgtactgcttctgttggggacctgattattacactagtgaatggaagacaagaccaacaagagtggctctaagagaatagaaagaaacagcngctcaatgttcctctaacatgggctca

SEQ ID NO: 3364 - DNA, 458 bp, Arabidopsis thaliana landsberg
gctgttcttctcgggcgcactgtttgtcaccagactggacaggggcgccttatgctgggcgaccctgactccgcctgccagcggattggacaggacgcattaaatgctgatagggcacgtcgctcgtcagcgtggtggcaggcggcgcgtactctccgcaataaatgcagaggctgcacggcgttatgggcctcacgtcaggcccagcccgttggcttatgtcatgggccacaagccacacggcagcagcgggtctttgccctgagcggggagcgtacggaagggccaggacgcgtgtcaacaccggacccttactcaagccggggtcctccccgtcccgggaccttgctaaggcccggaccttacttggagggacctggggcctacctaagggacccggcatgccttcttgggagctccgggctcgtacgcacaggggtccggcggtctactgtgga

SEQ ID NO: 3365 - DNA, 1241 bp, Arabidopsis thaliana landsberg
aaaatcatagacatcaaggatgtttcctcaacttgccggtagtgacacaattgagagcctattttggatatttaggagtaagcttgaatgggacgatggtgaaagaaggatcaccacatttaagctaatcaaggctctcttcctctcagtgtggcgagatattgttttgtcagctctgcttgcttttgtctacacggtgtcttgctacgttgcaccatatctcatggataatttcgttcagtacctgaatggtaacagacaatataagaaccaaggttatgtgttagtgacaactttctttgttgctaagcttgtggaatgccaaacacagaggcagtggttctttagggggcaaaaagctgggcttgggatgagatcggtcctggtttcgatgatctatgaaaaggggttgacccttccatgtcattcgaagcaaggacacactagtggcgagattataaacctcatggcagtagatgctgacaggatcagtgcttttagttggtttatgcatgatccatggatacttgttttacaagttagtttggccttatggatcttgtataaaagcctcggattaggatcaattgcagcttttcctgcaactattttagttatgctggcaaattatccctttgcaaagttggaagagaagtttcagagcagtttgatgaagtccaaagacaacagaatgaagaaaacatcggaggtcttactgaacatgaagattctcaaacttcagggatgggagatgaagtttctttctaagatccttgaacttagacatattgaagcaggctggctaaaaaagtttgtgtacaattcgtccgctatcaactctgttttgtgggcggcaccttctttcatatctgcaacagcttttggcgcatgtttattgctgaaaattcctcttgaatcagggaagatactggcggctcttgcaactttccggattctgcaaggcccaatctacaaacttcccgaaacaatctcaatgattgttcaaactaaggtatctcttaataggattgcatcttttctctgtctagatgacttgcagcaagatgttgtggggaggcttcctagtggaagttcagaaatggctgtggaaatcagtaatggtactttctcctgggatgactcttccccaatcccgacattgagagacatgaatttcaaagtttctcagggcatgaatgtagctatttgtggtactgttggctcggggaaatcaagcctac

SEQ ID NO: 3366 - DNA, 589 bp, Arabidopsis thaliana landsberg
  unsure (1)..(589): unsure at all n locations
aattatcactactgctttcttcttcttataagtttctgtctgcacttgattctgttcatggataatctgttcttcagtaactccaccttactcaacgctttcttgttctgtaatactttgatctgtgatattagatatcagcggattagaaccttctcctatgttctccatgacttcttcatagaaactgttctgagaatcagttttaaggtctttgtacatcatttcctctctgaatatcacgtttctactaatgacacacttcttttcttcaagtagccaaactttatatcctttaacaccctcaggatagctcgtgaatattcccttctttgctctaggattcaacttcccttgatctgcgtgtacataagccaaacaaccaaaccttctcaatgaactcatatccggtaacgctcctgtccatctttcttctggcagctcanagttcgttgcagtagagggagatcgatttattaaatacactgctgtagcagcagcttctgcccanaatctcttttcataccactttcacttaacatgctgcgaacttatccatatagttcgatgagtctctagcgacaccgtc

SEQ ID NO: 3367 - DNA, 532 bp, Arabidopsis thaliana landsberg
tgtagggctgagggcgacggtcttgggctggctaccgaccctcgatgagagcggggtggcggttcgctagaccggcggccgggagccccaccgcgggatccagatccccggtgtaccggccggaggttcctagcccgctggagcgggctccagagttcccccgcggcctctagccccttggacaagggcaaaggggctgcaggcagctcctccaccccgggtggaaccgggggatcggaggaagagaggcgatgccggctgcatcgcgcggacggatcgcttgtcatggatccgcccgttgattcagacccaccctataagtgtcagaggacagctggcggtgccgaggagatcggctcccaggcccagagcgcgcataggagcgtcagtcctccgtcaccgccaccatcggatccgccaccgtcgtcgtcatcaccaccatcggttctgccaccaccacctgtgggtgatctcccccagtggcgccagctacagcagcaacaacaagcacagcagcggacgtcctgcttta

SEQ ID NO: 3368 - DNA, 564 bp, Arabidopsis thaliana landsberg
  unsure (1)..(564): unsure at all n locations
gccattggatcatcacattcatcatcaaacctctccttttacttcctcacataaccaggccagtcatatagcacctccaaacccacacctgactgcataaaagaatgnnnnnnnnnnnnnnnnnnnnnnnnnaaatgaatagcaaccatcttcaccttcagatctgcaggtgtaaaatcaattccaaaaaactcttccaccttgaacaaccactccttaatcccagtaccatcaaaacgaggcaaatcaatctttcccaagcgagtcaggttaccgtaatgttgttgttgagattcataacggacctgatctagtcgattgtcacgccgatggtcctgatttagttgctggtcacggcgatgatcctgatcttgtcgctggtcacggcgatgatcctgataacccactctgtctcggtcgaggtagacaaacgtggtaagctcctctctccactcgaatgttcctcacgaagcttgtgagcagtggatctactcatcaccatcgnnnnnnnnnnnnnnnnnnnnnnnnnnnnnnnnnnnnnnnntccatcatcgattccaaacg

SEQ ID NO: 3369 - DNA, 6116 bp, Arabidopsis thaliana landsberg
aaccctcgacaatgtagacccattcatttgtttaatttgttttgctcatgtgagaaaacggcatcgtttaatataatctatatatttaaattattctcatcgttttaataataataaataaagcaagttaaaggctaaaagtgggaatgttgctttgttcgttgcttcgcgggaaaacttagcatttagccggcgaagataaataaggaatcaatttgctttcaaaacaaagtttgagttcaaataataagaaattgggcccaggaattaccagctaaaatttcttcaaaaaaatattaaagcatctttgaatcaaattcactacacgagagaaaacatgaaattctaagccttaatatttgatgttataatcataaagtagttcttggacaaaagaaagttataaagtagttccaagtagcgataataatttaaaattttaaggagtttttaagaattttaattaccatcaactgataaaggtaaacagtaaacttctagtttgatgcattatttgtcggtaccaaaattattagaagaaaaagcactttatccaaaaatggaaaagaagttaaataagtgaaagccaaagatctcaacaagatactatcagatcaacactgaaagcaataatgaaaatgtgattaacaaacgatttaaataaaacctcactcactaatcccatgttttcaaactcaacaacacataaccacaaaaataaaaattgaaaagataattaaattaaaaataaacaaagggagtggcagcctgcgtaattacgaaaggttttaagagcagagagacacggagacggctacggcggcgatcgtgaccaatgcggtgaacaacgacggtgtgctcacgccaaccgctgcgttagctgacttactgttcgctgaacctgttggcgagtctgaaggagcactttccggtgactcgtccgtcggaggtgccggtggtgaagctgcggtgggtgaaggtgcatccgctggagatggtgtcggtgcggtaactggctcaggcgccggtgccggagatggagatttaccattttccgaatagctcagcagggagaaggacattatccacagtgaatatcacaaccggagtcgcgtcgagcacagtgtccgcgagtctcgacggagcaacgccggtgtggagaataacttcgtcgccggaggtagaggtcgttagatcgaattttccggcgccgttagtggctaacgtggagatattgttcttgttagtcttcaatgagcctttaggtttatactcagcgagggcgtgatactctaagagcgagactacctcagcttgtgtgagcttcgtcagatctggtacaccttcagctttaaaagcttcatcggacggtgcaaaaaccgtcaagcctttttcaacggcggattcgtaagtcttgagtactccacttgagacaagcaaattagcaaaggttttgcaaccggctttttcgagtaatcccgtgatgtttgacaaggaggcggaaggagcaggagcggttaaaactccgggagcgatgatcggagcatcaatctcgaggattgagatgttgtaagggatttgtttaacggatttggtgtaagatgaatcgagtttggaacctgaagcggcggagccaaatccgactttgcctcctttaagatcggtgatgttgacgaatcctaggtttccgggagcgtttccggtggtttggtaaagtgtggtggagagagttgtgcctttggagatcttgtggagtttttgtggatcgtagtaatcgaggaggacgaggaggcttaaagcgcttttaataacggagagtggatgttttccggcgagagcagacattgcgccattgttaaggacgagaactgtaatcgtcgtgcggctgttgatctcgtcggcgagcttcgtctgagaaaggtagctgttgaaggaagagtaatctggagaatcagcgaggatttgagtgatgttgtggctactcacggtggaagcaaaggcgaggagggagaaagtgaaggcgaggagtgagaatgtctgtgacgccgccatgatgagacggttttgagttttttcaagtgtcagtgtggagcagaggaagtggagaagactgagtgagaagagagatgaagttaaaagagaaggatgattgttaaccacggttaaattttgatcatggttaggttagagtatttgactagagttaattttgcctttatatttttgaaatgtgtgttgtttataagaagtgagttgggttggattggggccatgtgttctttttcggacatagctggaagaagaaaagaggccattccatttaattgtcttgttgtttatattacaccaaaaaattagagatttgggcttctttttactcttagatatttgtttggcctaaataaaacactggagattgtttctcgttttcttcatctaaattgatcaatagtgtcgagttttatatgtggtggtcagtgtattcagtaatgctatctattttgttatcgaaaatgttttatataccataaattgtttgtggattggtgtagtgaccaatacaatatgtatcttactcaacaatgattcaaacctgacatttcgtatagtagaaaacaatatataaagaccaatacatataaatataaaagtattgatattatgtaatcatctacagtataatatgtatgattcaaattctatatatttatttcggttgccgacgttcatgttctacatataaatagaattatccacaattcggtgaggaccaatattgaatcactgcttcccattataggaatttttagagctgttaaagcattactttacacgtgtggacaatatttaaaaaaccactagtgagtgagtatatgatacaagcattacatgatcaaactttccttatatactataaataaaaataaagtattttgctctgtttttattttcctgcctactgaaaaatatagattttagaaatacaaaaatgtgaccaagatgaaaaggcatcaggtgaaagagaaatgttataagtaaaggccaatgagaagcaacaaattttgaatcattaaagcaaaaaaaaaaaaaaaagaagaagagtagagcccaacttaatggagtagtagtaatgggccttttatgataagatgggcccatatagaggaataagaacgtggagatgtaatgatgtatagtggagcagctggacagaggagttaacagtctctctgtggcattgtttaaagagggaaactcaactttttttattgtccgaaaagtattcaaataaggctgaaaaacgctgacgcatttgtcagaaacctgacaactgcctttaaatctcttcacactcgcctcttcgtctttcctctgtttttcttttactctttctctctctattgaacagtagcgagcagagcaagagattttagtatctgtttggttttgttgttaaagctttttcttcttgggaggtgggtttttgcttctctgtgtcgctagtttcaaaagctgtctcctttttcttggaattgaataaagcttccccaaaaatccaatttttgttatgaagatgcagagccctaaaatggagcaggaggaggttgaggaggagaggatgaggaataagtggccgtggatgaaggcggcgcagttaatggagtttcggatgcaagctttggtgtatagatacatagaggctggtctccgtgtgcctcatcatctcgtggtgcctatttggaacagtcttgctctcacttcttcctccaattacaactatcactcttcttctcgtaagtaatttgacattcgagttttcttttcaagaaattcttaggagtatatgcgtgatagttgagctagggtaagaaaaagacacaatttagaagattttagacaacataacgacaagtcttggacctcagaatctagagaagtttttgttctgattcaacagttgtaaagtttggggtattgttgtggaaatgcttgatgggttttattgtgcttatttaacttcctgaacatgtttttggcttttgggttctgagttggagaagttaaaagatttacatacacaacaaacttctgttgactgaatttgattttgtgcctattggggattgagttgcagtgttgagtaacaagggagtaacccatatcgacacgttggaaactgaaccaactaggtgcaggagaacagatgggaagaaatggcgctgtagcaacacggtccttctattcgagaagtactgtgaacggcacatgcatagaggtcgtaaacgttcaagaaagcttgtggaatcttcttctgaggttgcttcatcatcaaccaaacacgacaacacttatggtttggataggtataacgagagtcagagtcatcttcatgggacaatctcgggttctagtaatgcgcaggtagttaccattgcttcactgcctagtgccagatcctgtgaaaatgtcattcgtccgtctttagtgatctctgaatccacaaaaaaaagtgtgagtcacggcagaaagaacatggagatgagttatgatgactttattaatgaaaaagaggcgagtatgtgtgttggagttgttcctcttcaaggtatcatgataccatcatactcacaacagaaaaatatctatagaattcatttcttcattgctccatggattgaccaggttccattatttcattactaggtgatgagaacaaaccttcggttcaaaagttcttccctgaggtatctgataaatgcttagaagctgcaaaattctcaagcaacaggaagaatgatataattgcaagaagcagagaatggaagaatatgaatgttaatggtggtttgtttcatggtatccacttttctccagacactgttcttcaaggtattttacctttgcaaccttggcttatcgtcatttcatagggattttcagacatgaccttctgggtcttatatcttgcttcttcgttgtagaacgtggttgttttcgtttacaaggagttgaaacagacaatgaaccaggaaggtgccgaagaacagatgggaagaagtggagatgcagcaaagatgttttgtctggtcagaagtactgcgataagcacatgcatagaggtatgaagaagaagcatccagttgatactactaactcacatgaggatgccgggtttagcccgttaaccgtggaaacagctgttagatcggttgtgccttgcaaagatggagatgaccagaagcattctgtttcagtcatgggaattacactgccccgagtttctgatgagaagagcactagcagttgcagtaccgacactaccattactgacacagctttaaggggtgaagacgacgatgaggagtacttgtctttgttttcaccaggtgtttagaaacatagaaatgttgtcgaggttcaaatgatgtttttagtttcaatctaaggatctttctgtgttagatgttagaagaagtcaaatcacaaaaaaatatcgagacacgaattttagctaagattatattgtgctgaaatgagataatatatcacatggaaagtgcttttgctaaacttctaagacattagtctcataacattaaattacatataagctacttgtactgactcctgagattgggagagaatacatcaaatatcaattgaggcacacacacctttcggatctgcgttcttgacaatccatggatgttgcatgatcttctcaatagagagtcgtttggagggatccttaacaagaagctgcaaaagatttaaaacaactatatgttaatgcttaataactagtcaagccagagagtcgttgtgggtatgctttagcttggttgggtgtgtacctgactgataagatttttggcttcttctgaaacattcggtgtaagaggaaaactcagatcaatcttaagaattctgcatgacagtgaatacaaaacgtcatcaggagctgagcttctgtaattttctacaaaagataaaaagtctagtcttttcttacctcttgaatgtatctttttgactctccccttcccccggagggttcccgtagagtaactagaaacacagaaagcctaaggtccagttatcaagtgcataatcat

SEQ ID NO: 3370 - DNA, 2000 bp, Arabidopsis thaliana landsberg
aaccgaatctggtgtcgacgttggatgaaagaatcattagtgtggaccaaagccggtttatggtctgaaccagaaaaatccaaaaactctgtttcagcgtttggaaaatttgcagaccaaactgaatttatgaagactctgtcaagacaacattttattgtatgtgtgtgtctttccccaacccaagtgaatctatcccctcgtgaacgcatatcttcgagatcacaatataaaaccatagctttgaaattccggaaagtccattcttctcttaaagggccaccaatcttttcatcattggatagaatctcattgaaatccccaattaacatccatgcttcacttctattatctgaaatttgtttaatggtttcccaaaggtgaagacgttcggatggaacagggtgaccatacacacaagacaagtagaagctcttattattataagttacataggagtcaatgagtctttcattatgagaaagcaaggacaaagaaacattgttcttccacataagagctaagccaccactccttccaatgggggctgagttattatattaggaaatcctaaattacacgctaatttacataatacatcaaactgattaagagtttcaactagaagaagaataacatacttatagatacgagttaaacgggaaagccgtaactgcgtcagcggcacaccaatgccctgacaattccatgaggctatcctcctattcgatcccttaggggtaccgggcccccatgcctccgtctattccattacgtatcgaacaggagcctgtcgactctgttttcctctcctttttgtaaagtaggctcaaaaccgccatctcatctactgcttcaaccttttggtacatgtcttcaaactgaactctctttctctccatgaaaacaaactgattttgtgcattgtcagaggactccaagagtagatcattgtaatccggtgtccgggtcctaactctcgcgagtttggcatgtaggtaacgcgccctctcaactataagatttgtgtcttcaaagacacttgggacatatgaaggctccaagtctctcatggtatgaccttggtttgcaaacggtagcaaagctttgagtcctggaatgagggttgctggatcaaccgtctgaagggtgtatgtgtcactcatgtccttatctttgttgtctccttgatcatcgttatcatcctcgtcactcaagtctattgggtctgcatcatcaaaggtaaggagggtgcattccttagacatcatgtttcaaggaaccacatttggaacaatagtttctcagacgttcaaaatgatacttgatgacattgttttcatcagcagcaaattggaaattcctctggaagcaaagcggatcatctagattccaattaagccgcactcttagaaatccagcgtgattcacattctcatcaaagtctacaacaacaacatagcctaacctattttcaacgcatcttgccattgcattggtaaggaagagaagagagatacccattagttgtacccaaaacgggatgatcttcatctcggcttcactgatattcgggtaccaacgatgaattgagagcatcccgtcattgaacgactatggtccacgacggagaaccaagttcatcgcttgtttagtctgaaatttaagttggatcctgcctctgtccaggattctgccaacacacgaatcagggaaacctagactcttggcatctgaccaataagagcacgaatattcttgttgcgagggttcattgttgtcacaaccatagtgaagcggttaacaaacgcagcctgagaacaaaaatctcgagaaagagccatgagtttgtcatcgatccccaaattcaagtctctgaaaggattttcgtaatttgacacttatgattcagaatgagagtgtttcggaagaagtggaaaagggtgaaccgattcaatgaaataaagtgtctaccgcctgaatattaccacatggacaca

SEQ ID NO: 3371 - DNA, 1858 bp, Arabidopsis thaliana landsberg
  unsure (1)..(1858): unsure at all n locations
aaaaacgaaaaaaggaaacaacaaggctaagcggtaatgtccaataggatccattcaccttcattaatgtgagataataatattttcttaattaaaaactgttacattatttagtcgtatcccgaatattgtgttcaatcttacgaggaaaacgtcgttaaccctagtccaaagcgtttacgaaaaataaatgggagcttcttcttcgctttatanaaagtactaaataaagactgaaaagatatagaaatccctaaatattgattgttcctgcgtctccgagcataatgtaggtgtttctaacaatgtggagtgtatatgcatgcaacggcgaaattgcacttctccttgcttttttgatggatgcttcactgggtcgacattacgttttaaatgtatagaaagcctagctagttacataatcacactctttgcagtaataaacccaaagtttttccgacatatcttcttcacaaacatcacatatgaactttgcaccggtgtgttgtagagaagagtgagtggatgttcgtcatcttcccgctccacagtctcaggggcctttgtggacttaaaaaaataaataagtgaaattccaaagggagataattaaaaatcgatttggtataagaaaaatcaaccggtatggtatgagagaaccaaaatcgagcggtcgttaataattagaacgaaaacagaacaaagattgcgaagagaaatgatgatgatcagctcctcctccattacatgatccctttctcttctgtcttcatctcctgagaaattgcccctcagaaaccctatccagagatgcccaattacttactccggcttcagaacggcgagcgtgaacagagctatccggcggcagaggcagagtcaagccgtgtccgccactgaatccagggtttctctcgtctttgctctcgcctctgaggcatcctctgtctctcaacgccgtaaatgttccctctttcttcacttgctgacactttttttgtttgatttgactattgttttgcttttaattctggatgcttttgttttcgacagaacacaataaacgaaaaaagacccctgttgttactcgtaaagcccaatctgttggagaagagattgaaatgactactcgagtaatagctaccaaagtaattatctcatcaatggatcctggagggtttctttttggaagttcttagcttattttaacctagatagcatattttggagttgtttcgagtgagttggtttcttctttttttattaccagttttagtgaaaattgttctccataggatcatcacactcttttgctctagatcttgaagagatcaatgaatgatagtgtatagtattatttcttcatatgtaagtgctgggaacctggtattcttgattgttacttttctcttacaaaattgcaaattagttatgtttcgttttcttaccatgttcttggtcctcgtcaattagtatatttgcatgcttcaggcaaaaaatcaaactcagtggcggatgtcttttgtcatgccctcaaagtatggttcgaattttccattgccaaaagattcttcagtcaaaattttggaggtgccacgaaagattgttgctgttgtcgctttctcaggtaaagatattcaatttcacttccacatctgactatacacttgtttgaactttgaagaatcaaagatatacatcagagaatcccgaactaaatctagtcttgtatgtctgctagagatcatctttatgatcgcaaaccagttacaatagttagtgcattttcgctataataatgctctcataaattcgataaaaaggaatgtctagtctaatgtataatatacaaacacat

SEQ ID NO: 3372 - DNA, 443 bp, Arabidopsis thaliana landsberg
  unsure (1)..(443): unsure at all n locations
ccctaaaaaagaanggctcgncccagagnangnagaacccgnagnttttnnaccaccngaaacaaaaagacagacngggagacgcaaaaaaggaagacangaaccagccgaagacaagacaaaagcagcacaacaggcacaacnatcaaaacaacataaaagcaggcgctgtggtaaagagggtcataatcgagctatgtgtgatttagcaatatgaggaaggtatgtgtacctaaaattttaaaaacttagttagaaacatttttatgtgattttgctaacgttttttttgttttacaagttaaagcatcacagctttttgttctatttgactttttggttgttcttgttattggattcacttcaactttggtgcttctttttgctctaattggcactggatccactattacttatggaatgccctctgattattggagttt

SEQ ID NO: 3373 - DNA, 763 bp, Arabidopsis thaliana landsberg
aagtcagaaaagaggggggccgagacaagctttttcacttaactctgaagaccgcccacctcaaaatccacacattcagctaaagctacccaatgctttttgtcgaagttaaatggcaggtaaagataatcagcctctgaaaataactggacatggtcatcttccccaattcaagaaagaagatcaatcagcggagctggaaattgaaactccagtttcgaggtgcagcaagtcagaaaaagagggggccgagacaagctttttcacttcactctgaagaccgcccacctcaaaatccacacattcagctaaagctacccaatgctttttgtcgaagttaaatggcaggtaaagataatcagcctctgaaaataactggacatggtcatcttccccaattcaagaaagaagatcaatcagcggagctggaaattgaaactccagtttcgaggtgcatcgagaaaactgagtgaattgtcggcagaataaagacacgaactttgaatcaaggacttcgacacgaagtttctcaccatcaacatcttcagtcctcaacaaatgatgaccaaacttgatgagtgcatccattacctgagtgaatacgaaatacaaaaaataatttaattacaaatactaatatgttactcgttaattttgttaagacaaaaagtacctttcttgaaagatttttcttcccgtcaattaaaatcaaaatatctttattagacagagcaaaacccccgcatatgctaatagaactgta

SEQ ID NO: 3374 - DNA, 1559 bp, Arabidopsis thaliana landsberg
ttcttgattaacaggtgacttcccctgatttcctgttccaaaaatgacaaagctcataaatggaaaacatagagaaaatactattttgcctcagaaacaggaaaaatggaaaatcatcaaaaatagagtttaaaattaaaaaccgccccgaaagtgggtccacggttaaacatgagttttgagatcgccccgaaagttgggtccacgatcaatgtatcaaaataaattacaaggacgacctattcaagtcgtctggtttgtttcttcaacgcttacacgtcgaatatcgcttccgctaacgaggtcgacatttgagtcgtgctggtccgccacaggagcaatttgggaggcttgcctcgaaaaaccgagctgatccggggacatgttcaggtcatcatccccgagctcgatgacgtgcaaggcattgacttcgtcggacgcccttttggttaactccttaaggctgctgagttcggatgccgcaatcttcgcgcctctctgcatcagaatacctactatctcctcagcacctttggcctgattctcagcatccacctttggcccgacgaggtcctcttgctccttgagataagcctttactctatcaagacgagcttgggctttctttgtagtacgggcgaccttagcagctcgaccattccgcagtctgttgcactcccgctccccatgctccttcgcagcaaccaacgcgacttgaagatcgctaatctctttctgaagatcagcttctcgaccattgagcctcttgacctcgtcgttcaacgagctcatctccgccttatgaatctcggcagcatctccgaccatttccttcatgtctttggcatagatggctttggcctggtctgcgcacttcttcaagttatcgaaggcctctctgtcggcgagcttcagcttcaatttgcgatcataagtcgcgatcagatcattggccagggcggcggtctggaaaaagagacggttaaagccgaaatacaaagatattgagccacaagaaaacatggaactagcgtgtacctcaagtgatgacctggcgaacttctgatatccttctttcagaaccaggtcgtcgggattaggaaaatctttcgtcccggggagcatcaaattacgccaaagatgactggcggcctcctgatctctcacaaggaatttctcgccagaatacttgaacgtaaactggtcggagttgagagtctcacctcatctaaaccggcttcagaagctgacctcttcttggattgggtagccactcctttccctttctcctcacgggacctcctggaaatcccgagctccgcaacggtttcatccttgtcttgatcaaggatagttaggcccgcgttgacctcttcgctcgctggcgcggcggcataaacgacgacggagcggtcgccggtaacacttttgaacttcaggttcgacgacctgaatagattgattttgatcgcactcggcgatctcttgagctggaacgacgccggccccttcaagacatcctgtcttgagaatccggattgaccgtctcatgggagacc

SEQ ID NO: 3375 - DNA, 340 bp, Arabidopsis thaliana landsberg
gacaaccaccctaatccacaaaacttatcttttcttttccatgatatatccacaaagcaacaaaatccaaaataaatattatctttaattttagttctctataatattttaaatattttgtattaatatacttttaaataatttaccatctaattaatttatgtttcttttttaacttctaattaataagttttcatattaggttgcaatgcaaaatttaaatataaaagaccctttagttgttaaaaattacatcaaatgtcatagataataaaatatctaagagtaataaaaaagaataaagaacgagcattttcgtcataatagaaaaagaaaaagt

SEQ ID NO: 3376 - DNA, 383 bp, Arabidopsis thaliana landsberg
attttgaaaaaggttaggaaatatcctacctttttgcaacataaatgttagtaagaaatatggtatgagattgaaagcaattcgaaattttccgttattcgggtaggaattttttagaaaataatcctaccatgttctttgtaaatgtttcatatgaaaagttggatcaattatgggattggtacaaaaaactctatgcctttgtgaatttaggaacatctcaaattactcaccaaattaggtacttatacattctaatcttgtacaacttcacccctcaaagcttccgctaaattatgtgatttatggttgatgctagatctttctctactgctgaagcatcttctaaattgttcccattttaggagcactacccgactagt

SEQ ID NO: 3377 - DNA, 469 bp, Arabidopsis thaliana landsberg
atcgtctccattatgtcttctctgagttttttctatttgcatttattattctactagattaactcacattgtacgtaaaaacaattagtgaaaatatgtgtttagtaatttttaaatgtttaagactattccaaaataatgtattatgaaacaaaacggtaaaatgtatttctggatgacaaattgattagtaaaagatgaacgaaaaaggtgaagtgttttatgcagacataaaatataacaatttgtacaaatccttttcagttgttaaatttgattttaccgattttagacggaatcatactttttatagacacctaatgacgcataaatgttttaaaatgtgttacaatatagatagctagttaatttgtgctactgagtgaggagccaaatggatttcaaaccattacattacaagtatggattggatttaccttcaacaggatgacaaaaatggtgcttttaa

SEQ ID NO: 3378 - DNA, 466 bp, Arabidopsis thaliana landsberg
tttgcacaggtggtggtttaacagggggactgtaaattggtgttggaggcttgtgcactggtggtggcttgattggaggactatatattggtgttggaggtttatgcactggcggtggcttgagcgggggactataagttggtgttggaggcttgtgcactggtggtggtttgattggaggactataaattggtgtcggaggcttgtgcactggtggtggcttgattggaggactgtaaattggtgtcggaggcttatgcactggtggttttataggggggctgtaagttggtgtcggaggcttatgtactggtggtggttttatagggggactataagttggtgtcggaggcatttgtaccggaggtggtttaacaggaggactataacttggtgtcggaggcttttgtattggtagtggagaaatgggaggacgtataagttcgggtcggagtcttttgtatta

SEQ ID NO: 3379 - DNA, 519 bp, Arabidopsis thaliana landsberg
  unsure (1)..(519): unsure at all n locations
ggagatcttacagagactgtttcatgcttttattggctggctttgtggacaagaacaaacccgactgggtctgtcaactacacaaagcgttatatggtctcaagcaggctcctcgtgcttggtttgataaattcagcaactatctgcttgagtttggttttagttgcagtgttaaagatctctctttattcatctatatcaaagggaatgatcttatacttttgcttctctatgttgatgacatggtgttgacaggaaacagctctgcaacattggctaaacttctagaggatttgaannnnnnnnnnnnnnnnnnnnnnnnnnnnnnnnnnnnnnntttcctgggaatacaagctcatttccatgaaaatggtttgttcctctctcaacaaaagtatgctgaggatcttctcactattgcagcaatggaggactgctccccaatgcctactcctctgccacttcaactcaacaagggtgctcataaagaagacttttctctaatcctacttattttca

SEQ ID NO: 3380 - DNA, 1796 bp, Arabidopsis thaliana landsberg
ggaagtaggtcaactcgcccatcatcgacatcttgaacttttgcatcatcacccatgctaaactcctcacaaggcttttggttagtagagccaaatattatatcatcgacataaatttggcacacaaaaagatcaccattgcatgtctttgtgaaaagagtgggatcggctttcccaaccttgaaagcattagaaataaggaaatctctaaggcattcataccatgctcttggggcttgcttaagtccatagagcgccttagagagcttatacacatggttgggatacctgtcatcctcaaagccagggggttgttccacgtatacctcctccttgattggcccattgaggaaagcgctcttcacatccatttggaacaacctaaaagagtggtgagcagcataggccaataatatccgaattgactctagcctagcaacaggagcaaaagtctcctcaaagtccaaacctgcgacttgggcataaccttttgccacaagtcgagccttgttccttgtcaccaccccgtgctcgtcttgtttgttgcggaacacccacttggttcccacaacattttgcttgggacgaggcaccagtgtccaaacttcatttcttttgaagttgttgagctcctcttgcatggccaacacccagtctggatctagcaaggcctcttctaccctgaaaggctcaatagaagagacaaaggagtaatgctcacaaaaattaactaatctagaacgagtagttactcccttgcttatgtcacccaatatttggtcgacaggatgattcctttgaatcgtcgttcgaacttgggttggaggtgcctgttgtgcttcttcctccattacatgatcattttgtgccccccttgatcacacgtctcctctttatgaacctgttcatcgtcttgagttgggggatgcaccgttgttgaggaagagggttgacctcgttcatcttgttcctgtggccgcacttctccaatcgccatggttcgtatagcggccgtcggaacatcttcttcatctacatcatcacaatcaacaacttgctctcttggagagccattagtctcatcaaatacaacgtcgctagagacttcaaccaaacccgatgatttgttgaagactctatacgcctttgtatttgagtcataacctaacaaaaacccttctacagctttgggagcaaacttagaatttctacccttcttcactagaatgtagcacttgctcccaaatacatgaaagtaagatacattgggtttgttaccggttagtagctcatacgacgtcttcttgaggaggcgatgaaggtagaccctgttgatggcgtggcaagccgtgttcatagcttctgaccaaaaccgctcgggggtcttgaattctccaagcatcgtccttgccatatcgatgagcgtcctgttcttcctctctaccacaccattttgctgtggtgtgtagggagcggagaactcgtgcttgattccttcctcctcaaggtactcctccacttgaaggttcttgaactcggacccgttgtcgctccttatcttcttcaccttgagctcaaactcattttgagctctccttaggaagcgcttgagggtcccttgggtttctgttttatcctgcaaaaagaatacccaagtgaagcaggaaaagtcatcaacgataacaagaccatacttacttcctcctatgcttagataggcgacgggtccgaagaggtccatatgaagcaactccaaaggtcttgatgtggtcatcacatttttggtatgatgagag

SEQ ID NO: 3381 - DNA, 2491 bp, Arabidopsis thaliana landsberg
  unsure (1)..(2491): unsure at all n locations
atatttgtctacataaaaaagttataaattaatatttgataaattctaattttatatgcgtttattattatatttgacgttactccataaaacaaaaagaattcaaaatatgctatgtatatatattgggaagaaaaagaacactagaaagagaaaaacaaatatagttagagagatcaaatttgtatgtattgacttaaaattaggctaagtagaccaagttgatcatttcagaataatgtctttttagattctattttgtgacttaagcatgtgttttacttgccttatagaagacctgaacatgttaagaaactatttctcatatatttagggttttgtacatcaacatatttatataagaataagagacgagactctagtttttttcaattaagacattacctaaaacagagtaatcaaatattatgagataaatgtgaatcgtaatcgtatcactaacacgccccctcaagatggagaggcttgtgacactccaatcatcaacacatctgctaattggtcctttgtgttgatatgaactactcggagagcaccttgttgaacttaaccacggatgaaatgataatctatagcaatgtgcttcatctttgagtgtaagaccggattagcacaaaggaagatatttttgacgttgtcgcagtacacaacaagtggtgtgttgaaagtaattccaagttatgtgaaaatattacatatatacccaacttagttcagaggccgtgtttgcgacaacccaatactctacttctatagatgatcttgccaccccttccgtttcttggttgtccaagatattgggtttcgtcgtcctaggtagatgtgaaattccggatgaaccaagaatcgtattccctaaactcagaaccactgagtatcactttattagaaatctgattaagaagtttacaacaaccttaattggttttacacaagatctaaactactatatcttgtcacctgagatttctctaaacacacaagagtatatcacaagaacacactctttgatctctctagaattccaatcagactaaatcttagtctctaacaatgaaaagcgttgcactagctttttcactcacaatcatggccaaccctagcaagcaccttagcacctctatttatatcatcgaggtctttggtcttctaggttagtcttcaagatcttggatcactccagatctttgcgtgaatatcttctttccaaaccgaactcattctgttgtgatctccacgtcattcgttcatttggcggcatatccacgtcagcatcaattacttgatcttcactttaatcttctgaaacagcttccagtttgttccagcaatcaacactccttctggtttgacctgacagagggtgcactaacaagatgtacgagtacataatcgtctgaatctcaccgcaatctgcatttgaatatgcatgaagaatgagtttgttgtttgccgagaaaaagaggccatgagtgggtgtcccattaaggtagctagcttagaattcttttagcagcatgtcaatgatcttccgttggacgatgcataatttgtgataaacgattgaccgcataggcaatatcaaatttggtgaaggcaatgtactgcaagcttccaattaattactgcaacgaatgtcacaaagctctcataccatgtaaaaaatgtctttctaatatatttaaggttatgtacatcaacatatttatacaagaataagaataagagaggagactctagattattctaattacaagcattacattaaacagagcaatcacattactgatgctgttcttcttaaagtccagcattgtgtttcagctgctgagatgtggacgacgcttaacaagctttacatggagacctccttacaaaatagaatctatactccgcttagactctattcttttaagatgcttgaaactttgagcattgatcagaacgtggatgaattcttgaggattgtagctgaacttggaagtttacagattgtagttgcagaagaagtccaagcaatcttgatcttgaattcattgtctgtgagttacatacaattgaaacacacaatgaagtatggaactaagaccctatgtgtgcaggatgttgtttcttcagccatgtctttagaacgagaacttgttgaagcaaaagagtctaataaaggtgcttcaacagtgttgtatactgctgaaagaggaagagctcagttcaggaatcagcagcagcagaattccaaaggtaaaagcagaagcaggtctaactctaaatcaaagctcacatgttgtatctataaaaaggagggtcatgttaagaaggattgttttgcgagaaagagaaagatggaaggtcaagaacaaggagaagcaggggttataattaaaagtcttgaattctcagaggcttngaatgttggcgaaaagctggttaagacatgtgtgtactagactctgcatgtacatcccacatg

SEQ ID NO: 3382 - DNA, 817 bp, Arabidopsis thaliana landsberg
ctcagtcagtgactcgaagcttctgaggtccatggatcgatgttgaaaaaaactgatttttttgacaatccattggttctccattcatcagatcatgcaggtttatcgattgtatctcacattcttgatggaactaattacaacagttggtcgattgcgatgaaaattagcttagatgcaaagaacaagctaggcttagttgatggatcgttgtttagaccttctgaagatgatttgagtttccatgtgtggagtagatgaaatcgtatggtgaaatcgtggattcttaatgtcgtgaacaagaagatatatgatagcatattgtatatttaggatgctatggaaatgtgggatgatctattcactacgttcaaggttaatatcctacccagaaaaaatcaacttgaacaggctgtcatgacactcaagcagggagatcgggatctgttaacatacttcactaagaagaagacattgtgggaacaattgtcaaacacaaaaactcggactgtgaagaaatgtgactgtgaccaggttaagaacttcttgaggaagcaaagacaagtcgtgtgattcagtttttgatgggattgaatgataatttcaataacatgcgtggtcagatattgaatatgaaaccaagacctggattgaatgagatttacaacatactggatcaggatgagagtcaaagaattgttggatattcaagaccggtggtgtgtactccttctgcttttcaagctcaggccattcttactgaacagaacaatattctgagggcacaaggcaattcacagaagcctaagtgttctca

SEQ ID NO: 3383 - DNA, 1063 bp, Arabidopsis thaliana landsberg
aataagctccattcgaatttacaatgccacatattatgggagctttgggaagaagactaaaggggagatacagaagcaatgtctccctcgaggccgaggcatcattcgaaatctaaaatctgcttgaagagtgctccttatcaacccttgtttgcaacctaacagataaataacaaagattagtatcagtcatgttcaagaagcttacacaaaaccgtaaccaaaatatacacatatttatctgcctgtaacatgagaacatccgttaagaaataagcaatagaaaaaaaaattaattcacctcgcagatgctgctttcaagggaacatggtttgctcgactattctctcgactcaaggatgatgaaactgttttaagaaagcatatcgaggaagcttttgtctaatctcccatcatgtaacatattagcgaccaagccaatggttgaagcatctccaacaaacctgcaactcctcatttctctgatgagttcagctgatgctgctttgtcaccatctctcagatgtgccctgataagtgtattatatgtaccactatttggaagaggcccgtcttctttcatttttttagcaaggcataagcttcctgtaataggcgtttactacacaagcctgagatcatggtattgtaggttacaacattaggcttcactcctttaaggctgaggctacaaaatagatcccacccatcatccaccttcccagccttgcacatcccttcaatcatagtagtatatatgtaaatatcaagttttatctcactcttttgcatatagtaaaaaacaaccaatgctttctctagcttcccgttattacagagtccatctaacaaagtgttgtatgtcataatattgggaggcacgccatcagataccatctctttgaatatttcttgagccatatcacaatctccagcttgaaataacccttggataagaatgttgtaagtgacagtgttgccaaccaatcctctttgagacatctcacggaagacttccataccctcttctacccttttatacttgcaaaaaccctttattagc

SEQ ID NO: 3384 - DNA, 2831 bp, Arabidopsis thaliana landsberg
tacaacacaaaagcgtatatagaagaaaacaaagtaattgagggcaatacaaatatataactgcccctcacgtgtacggaacacgtacgtacgccatttccaactccatgttctctctttttttttataaagaaaaaataggaaaatgaggagaaagggaaagattttaataaacgtttctcacacatgtcctaatataattagtttacctaaaatatttattaataaaatatgaatatatttatatgagaaagtgaaatcgagacgcgttggtgatgctcgcacgagtgcatatttatgattttatgaatatttaatattgtgttgtttatatgtttatgattttacgttttctatatttcttgactttaaagccaatcattaactcaaatggaatccaggttaatatttcttcctaaatttcgtgcattttgtgtttgtatttactcatgttcttgctttttctttccactacataatcttcattgattcttctcttctagtttttgaccaacttcctttttaatcaaattatgtcaaatttatttttgtttatactttatacatttttaaaatttgaaaaatacatttttttaaattatattcttaccattcactgaataattcatatttgtttgatttataccctaacaatttatgcagttgcttagaattcgtttttattttttataaaaaaaaattaaacactaaaagatattttttaataatatatttctaataaaataattttaaatataaacttttatttcgcctatgttcttaaaaaccattggcacggctctggactcatgtgtgtgtgaaacctttggaatttgtttagtaaacatctagtttgatttgaggttctgtgttattgttgttgtttaaagagtctcaagagtgtttttgcttctaccaaagcttgtgattgatgtgtgtaccttttggaatttgttcagaggaaatatgttgtctgccaagtaaagtataagggtgaagctgcagaaatttcatatgagccaagtccctctttggtatccgattcgcataccgtcatagcgattaacggagaaccggaacctgaggtgagtccagtttctgagatgtttcattatgattcattactatcaacctgtgtctttacttgttgttgtctctttttacagcttcaggttgagcagccaggtaaagaaaatctcttgggtatgtctgtagatgatttgatagaaccaatgaaccaacaagaggagccacaaggtcctcacttagctccgaatgatgatgagtttatacgtggattgaggcatgttgatcgagagccggttgaatatttgtttgccaatgaagaaaacatggatggtttgtctattatgaatgacttgacaatcccaatgatcgcccaacaagaggatctcattctctctgagtgggagggatttatcgcagccacctttttcagcgacaacaacaataacaataaccttaacgtgcatcaactaacgtctttcttaccgggatgattatcagaatgcattttgggttacaacggataaaatttttgggttataacacttgtttccttgggatatggggaaaaaaaatatacaaaacaaaagagggattgatgattccaaaatttcgttattgatttgttgatgtcaccaccactacaaaagatgacatgaacaaatgatgcagcgcatcttcaagacaatcgtgcctccggtattcttcaagttcgaagagattgctcatttgggtttagttttatgtgggctttaagcgattgcattagcttgtttcttcttatggctagggttttcattatctttctcttatttaaaaagatgtaatctattatcgtaattaggtttgattctcgaataaagagttttaggagagctttgtgtaaagcctagagaagagtactctcaaccataagagcttgtgttcaagccctgcaaggagaacttgcaaaaccttgttgatatcgatcccttggaaccgatctcgaccttatccctattgcttcttcgtcaagtttcaacattctaaacaagatccgttcgtgaatccgagttcttctagagattttatgttctcgtccgttatttagcttccgctctctatcactatccctcaccgctctaacaactgctctctatcgacgttctcgaccgtgaccttcaaacactgtaacactttgttacaataaacccaagtttgtgtgcgaacatggggagaatgggacattgaaaacacaacatgccaactcaagacgaaaacactttaacgagactgactaaaatgattaaagtatgcaattgtaaaagtgtaacaaataaaattgtggttgcagacttttgagaaaaatgttggtacagtagaagcaatcacttgaccatagcaacaaacatgtgctttcacaataaatgaaatcaacaaaaattcctaccctcagaagtaggtattcttgcaaattaagattgtcgacaaaaaatgatgcatgttgtatatatagctgattgcaaactttatgattttatgttgtggtatggctaaagcagatacgtaaaacataaatatgacctaattaacacttctctcttttcagctaattagcaaaggttaaagaaagcttcaaaggactaagttcaagatcgatgcatttgactgtttcatacaaacaacaaggatatgtatttagatttgctatatcagcggccatgcatgttgagttatctgatataacaatgatcgataaacatatcaataatcgtaaatatgaaagtcttaaatagacaaacctagaaagaaagaaacggcctttc

SEQ ID NO: 3385 - DNA, 566 bp, Arabidopsis thaliana landsberg
taattaagagaggaacattaatattcaaatcttgcttatagtactataccagtgagttaattgtaaaattttaataaaacaactgaaagtgttaaacataccagccatctaggagattcaggaataaaaaataaacatatcacttggaaagcacttgggattgcacctagtcgatcgtagattgaatatcaagaattagtctaggaatatgactcaagtacaaatcttattattaagatagttcagatgagaaaaatatggttacttaaaagagctaatgttcgccaatggaaaaagtttccggtgaagaacatgagtgaaatcccaagacattgtagaagctgcaagttcaaacgcaagatgacaataaatattttgcttatgaatttattgaaagatattactataagttatttgatattgggtctctatttgataattacctgattggaataagaaaattctccaacaaatgtttctgggtgtaatttttgctatatacacagggacctatttattttataaataaaatgagtaaatcgacataacactctaataaggactaa

SEQ ID NO: 3386 - DNA, 706 bp, Arabidopsis thaliana landsberg
cttgtgttctcctatgtttttacttttatatggttacagagacagagagttacgaaatttacatggtcattgattacaaacggttttatgtttaaagaatcttgaaaattttaacactcttttctaaatgtaacaattagagagagataattattaaaatttcacgtcacaaatgtttttgtgtctaagaccatctccaatggtcacttctataattttctatattttagaggtgactctattttagcggtattgtggtctaatggtcacctccaaaatagacctcaaaaatagaggaaaaaatagagatgaatagtagacatttcaatttacagagacaaaaagtaaacatctctatattttcttctatatttgagaaaactctattttagagatgaccattgaaacacaatacctttaaaatagagtcatctctaaaaataaagaaaaatataggagagaccaccggagatgccctaagaaatcttgaaaatttgagactcaccataaaaaaatcattagacaacttttttattagaagattgacaatttgaaattttcctaggttttaatcttcctaattaagtttacctctttctcatacatacaagcttcaaaaaaaaaaatcacccgaatgaatttgttaccaaaacacatgacaatgcatagaaagatttgtctttaacttttttaaaaatatttgttt

SEQ ID NO: 3387 - DNA, 3004 bp, Arabidopsis thaliana landsberg
gggagttgtgagagagtagcatctccatggttgtacatatacagcgagaacttgcttgtgatccaagtgttgtgtctggttcagatacgatggtgttaaactctgatgcaccgagtttgtgttctgttttttctgcgactcaacaatacgaagccttttttggagagtagaaagtgttcgttctaaggactgaatcaattgagagagttgttgaggagagtaatgatcaaagtttggataccaattagggttcttcacataattcgtcttccctttatacttgtctttgtccttcatcttctctttctcgaggaactcatgaagattgaggcacttcttgcgttttctgtcctctttatacctcaaagccatatttttcactgtctctctatccttaggccatgttctcagatcaccgtctggtccgtaatagatgacgcaaacgtcaatagcacagagaatcgaaagctcttctgctttcttaaagattattttaagtctgtttgttaaacttgttggattacatgacgaagaagaagaagcttgcttcatcgtgattttgccttgattcgccaagcaagaaactagggttttttttttctccgacagagagataacacacaaagaagaagcagaattgtggaattgatggtgaaagattgtgaaacttcactcaatatgtttatatagattgccttggtgcctacgggaacaagcatacgcgacgcccacgcgtgaccaagataaaagcagtatctatcctcaaatctatgttaccgcttctcttattatttagcttatagtatatattacgtcaaataagataattgtttttcaagtttcattttattatttttataaattttacgtttatgtttttagaatatgtttctaaaaggttagttgtataaaacccaactttcttcagttgaaaatgctgtgaacatcttccacaatttttacaaaaaaaatctaaacaaaacataatgttgcctcaaccataagaaaacagataacaatctaacaaaacaaactgtttgccttacaaaattcgaacccgtcggtttcactcgtttcttgaacccatcgacgacgagttaacgaccttttccaccctgcaagaatgttaacatatcaaacctgatatctaacatctacctacattgcatctatatacagggggatagtattttcacaccttatgaggtggggttcctggtctaggaacactgttgttgaatccaaatctttctttcttctcagatgccttaaggatttgaaatgaacatgttaagctatcatcaacactcatcaatgcaccagcattgtcaaactcgccacagtaattgggtgcagagaatattgtcttcacgaaatcagagctactttccatcttcatgtatatattagctgattcagacaagaaggatactaagttacaagtttgttataagatgcaagagtaaaggatttcactttgcaggttgtatcaaccaattgaaacagtcttgtcaccataagtgattttagattataatttgtttcatgcaagtttttgtgaaagacttttatggaagttcatatatatatatgtcaatactaactgaaataccaacttaaaagtaaaaacaaaatctccacaaatggatctgttttacagttataacaacactgtaaaataaaaaaagacagtagcaggaagaattcagaagcagaaacagcttcaatctctctctgatcagcttcctacttataagtattgactgactcttaatgaagcttcaaaaaacaaatccttttggacagatttgttagcagagaagtcttgagttgtcagaaaaacaatagctgttaggaatgttgtggagaggtggcagagaagatgtctgtagcaaactgctcccatcatagctcgaaaacatatcttgagagaagctagtgttaccataagggaattcatgtggaacagtgtttgagagattaggatgttgtaaaccgttgttgttattgatgatttcactcatcatacacaagttctgatcaaaaccatgaagctgatcctgttgctgcatcaagtgattattcaacccgtagttattcgccgaaagtaacggtgagtagtcttgtgtgtttgacacgccaggatgttgaaagttgttgttgttggtgatgttgtccaaacacatgttctgaccaaaaccatgctgcatctggtaattgatgagttgattggattgtgaagcagacagtgggaagttgtgagagagtagcatctccatggttgtacatatacagcgagaacttgctaggatccaagtgttgtgtctggttcagatacgatggtgttaaactctcatgccccgagtttgtgttctgttttttctgcgaatcaacaatacgaagccttttttggagagtagaaagtgttcgttctaaggactgattcaatttaaagagttgttgaggagagtaatgatcaaagtcaggataccaattcttcacataattcttctttttcgaattcgtcttccccttgtcatttgtctttgtctttgtccttgtccttctccttctcgatgaagtcatgaagattgagactcttcttgcgttttgtggcctctttatatctcgaagccatgtctttcactgtatttctctccttaggccatgttctcagttcaccgtctggtccgtaatagatgacgcaaacgtcaatagcacagagaatcgaaagctcttcagcttttttgaagatggttttgagtctgtttgttaaactagttgaattacgtgacgaagaagaagaagaaaaagaagattgcttcatcgtgattttgccttgattcggcaagaaactagggttttttcttccgagagagagagaacacacaaagaagaaaaattatggaaatgagggtgaaacattgtgaactcaatacgtttctatagatgccttgatgcctacggaacaacgtgtacgcatctgtgttaattcaaaactagg

SEQ ID NO: 3388 - DNA, 602 bp, Arabidopsis thaliana landsberg
  unsure (1)..(602): unsure at all n locations
cggtaacataatgcatatatagcattaacactaaaatgaaaagtatagatttaccttgaaaagctccaactttaagatatttaatcgcgataacagggtgattatcagccatgtccagcagttcttggccaatgccagttgctagatcattccaaagggacaccacaacagttttctttgtctcatcagccaaagttatatctctctttnnnnnnnnnnnnnnnnnnnnnnnnnnnnnnnnnctcatggtaggagaaacactttgaacaacaccgataacatctggaaatgagaaacattaaagtcactaactaagtttcatcataaaccaatgtttacaaacaaaaagagttcaatatagataacagctcttaccaataaggtctttctgattcacgtatgtacccaactcatcaatgggtacaaagttgaatttagtttcaggggtaaacatttcttcattactagcttcttcaacctcagaattctcatttagggtcatctcataatcgttctgaaccgtcttgaactgcttattagcaagcttaagtgatcccctggatatatagtacacctttcccatctcgaatctgtcataaaac

SEQ ID NO: 3389 - DNA, 2088 bp, Arabidopsis thaliana landsberg
gattagttgatacgacaatggtggctgtgtctatacatgccggtcctacctatatataggaaggaatttttttgcgcgggaattaagaacattgtggtgctaaatttctaattaataatgtcgtcaacaaatctatatatgtatactcatactaatctaaatagcaaagttaacttttctttggatgacaagatggatattatttgtattaacatagattatattagttgatgatcatctattttatatacataaaattgtatattttgggtggattctattagggacaatgtctcacatcggaagttgagtaggatcttaagtgatatatataagatataggcctcttcacttattgtcaattggttttaggttggaagcccacactctaatatggtatcagagcccgatccgtacatactcaacccgatccacatcggtccggcccaatatttgtcccgccgatccatgcccaaacatattgagatcaatggctagaagagccatcatctcgaggaggcgtattagggacaatgtcccacatcggaaattgataggatcttaagtgatatatataagatatgtgcctcttcacctattgccaattggttttaggttggaagcccacactctaatatggtatcagagcccgatccgcacatactcaacccgatccacatcggtccgacccaatacttggcccgccgatccatgcccaaacatatcgagatcaatggctagaagagccatcatctcgagggggcgtattagggacaatgtcccacatcggaagttgagtaggatcttaagtggtatatataagatatgggtctctccacctattgccaattggttttaggttggaagcccacactctaataatcaactctattcgattcaaagcctttgagttctccggatggcaatttcagtttgtctttcacgaagaccggtaactcaactcttcctcctcttatcaacggcctcgagatttataaagtcttagaccttctagaactcgagacagatcaagatgaaggcaagtttagcatgttcttaaacccattttttaccaaaagtttcatgtcttataactttcttttgtttttcaaatgtgatgattgatcagtttctgctatgataaacatcaaggcaacgtatgatttgagcaaaaaggttagctggcaaggagatccatgtgctcctaagtcttatcagtgggaaggtttaaactgcagttatccaaactctgatcaacctcggatcatatccttgtatgttctgtttcttgatctcatggtctttcaatttcaaggtttcacatatgctaactcttttggatactttattgtttgacaacattacattaggaacttggcagagaacaagttgaccggtaccataacacctgaaatatccaagctaacacagttgatagagctgtaagtgccctgacacaccgattttattgtggtgagagaagtatctaactcttcaaaaactttgctttctgtgtctaatggacagagatttgtcaaaaaacgatttatcaggagagataccggagttttttgcagatatgaagttattaaaacttatgtaagcttctttatcagcaccctctctcttccattttttttttttttttttttttggttcagaaagcttaatgttttcatttgcagaaacttaagtggaaatctaggtctcaacagcacaattccagtctctattcaacaaagattagatagcaaatctctaatactaatgtaagatgtttatatttcacttgattcaatctcaaaatttctgagtaatgaaaacaatattaaacttcatatctctttatttcttgtttccggtttcccaacactttaatggttatagtttgagtaagactgttactaaaactgtcaccctgaaaggcaaaagtaaaaaggttccaatgattcctatcgtagcgtcagtggctggtgtgttcgctctgctagttatcttggccatctttttcgtcgttagaaggaaaaacggggaaagtaataagggtacgaccccatccctcataacaaaggaacgcaggatcaaata

SEQ ID NO: 3390 - DNA, 2633 bp, Arabidopsis thaliana landsberg
gcttccctatctattttagacaagttcagagccttctctgccaattgagcccatccccgcttcaatactatttcataaagagctcgcacaagacgtccagcactctaaaaatgatagaaaggaacgaaatataagtatcagaaaatagatacagctaatttatcaatgtaactagaagggacgagagaagaaagtgtagaacaaacctgcgtaatgtaaaccatgtcagatgtcaaagaaagaccctcaagctttagctgtgaaatatatgcctgcagcaatacatttattttggcactgggctcctccaaagtttccttgatcggaattgggacacgatccaaaagtttcgccagttccatcttctcatcttgccgaacagtcacatacttgaactcgtcactcagggagaacagacgataaagatctatatcacccattgttggcttcaaatgctcattgtatgtagctatggtcccatgggttatgtaatagtagcttgctatgcgtcccaaatctgtaacttggaagtatccacttttcctgtcatacttaaccaagttgtttttgtccaagatagtagcagccgaatgtatctgcaaaaacaaggattcaagcaaatattagacacagctcgccattaaaggatcaatgatatatgaaactttagaacaatgatattacataaccaaatgcaaactcattgttcggaaatctcaaaaagatatatgaaatactaatctgtcatcaacttgaagaagacaaggcaaacaccaaacagttcatcattgattgcatgtaatagacagtgagaaagctactgacactaggaacattatttatgggaaatgatatcaaataaataaacgtcattttcagagaaataaaattaaataatcaggtacatactccccattcaaaatactcaaaaagaaatttctgttactagattagtaatcaacatgatgatgcacaagtgatcccaacagtacatgatgatgcacaagtgatcccaacagttaatcacggaggcaaagctactgatgctaggcataatatttaggggcaatgatactatatgaaagagcgttacaaactcttcactaagaatattaacacaaataaaagtaactttcagagcagtgataaaaaatacgcacaattaatcacaggctgcataatagtaggctgtatgaaagcttcagatactaggcatagtatttatgggcatttaactatagaaaaataatgtgacagtagatagcaaaagccaaaatttatgcagatgaacaaattccgtaccaggtcagctcttctctcctccaaaactacgtcttttgcaagggcatcaggcgctaagccatacaacgttggattacgaaccatacggatatacaaatacgtgtaaccaagccaatggcaagcctctctagcattctgaacggttccaagcacaatttcagcattaagctgatcagcaagtttggaaataaactggctttcaataggtagttgctcattcatcaaagaaagataatattgcagctcgctgtagccagttataattataccctccccatgttgatcatactgaggtcttccagcacgaccaagcatctgcataacatctagaggactcagctccatccacgcccctttttcaggattatacacctgggttccttttataattacggtatgtgcgggcagattcacaccccatgcgagagttgctgtggaaaccaagacttgcacatgcccctgagaaaaaagagtctcaacaatctcacgatcaccccttgataacccagcatgatgaattgcaaaaccgtaaggcagaatatcttttaggtcactattcttaacaatgtcttcatgactatggagaacgtcacgactttgactatcttccttcaagaatctgctgagggtatcatttgccatagctgtgtcccgtattgcccttgcagtttttgctgtttccttcctcgaatgaacaaaaataaggacctggtgttttccagcaacagccactactttctgataacatatatcattcatcaactggaacctccgtaacggctttttcacattaattcctatatactgctgaccgagaggcacaggtctgtagctacggtcaaatataaacaacccatttttaagatccactcgcaaaaatgaagccacatcgtcacaatttggcagtgttgcagataaacctaccagacgaatatgctcctttgtgctttcaatctgcctaagagtcctagcgacaatactttcaagcacaggccctcgattatcatcaagaagatgaatttcgtcgattataagaagcctcacaagctgtgtataagtgcgatctccagatttcctggtgatgatatcccacttctctggcgttgtaacaattatctgagtctctttgatttcttgcccagtaagggactgatccccactgagttccttcacagtaactccaaaatccttcaaacgttgagatagactatccacgacctcagcaacaagggctttcattggtgcaacatagacaattttgtaattaccatgattaaacgttccatcagggttcatattcaatccaagctggtcagatatggtgagcacgg

SEQ ID NO: 3391 - DNA, 186 bp, Arabidopsis thaliana landsberg
gaacaccaccaattactctaatatcatatctcgagtatgtcaatgattgcaacaacaatccaaatattagctgcatcgtttaatttatatatctcccgacacacctccctgcaccctactctttaattcacattcaatctacaactccttaactttatttattccacttttacatatcatttacct

SEQ ID NO: 3392 - DNA, 1342 bp, Arabidopsis thaliana landsberg
cggaatttcacaaacaccaaaagctcaacactcttcttccataaaagagcatctcgtacttacctcacgattgaagcacataatcattctgacttgttcaccggacttgagaggcagagcatagcaagccagatgcgtctgcgccaatgactgcaagatcacagaccgagcaaatgttaccttcctggcttggtacaaaccgggcagtgcagtaaggacatgcaacgtctttctgtcctttgtagattggcacataagtggacccgcatatcacaaacgggtttctaaagtcgtagttgagtgttgttgcatctgtcatgttgcgttcagctgcttgcataacttgtctagccgtcctggcctggctctcaatagttgggtttgtatccaacaaacttctggcgaagtgagcagcagtagccatgttctttgacttgtagcagacggtcattgcactgaagtacgcgagccgtaggtgaggtgtttgaagtttacagtgagtgaagtaagcagcgagctcttgctgcctcaccggatcatctttcatctctctcctcttgagctccaattgaagaccgaggacatattctttaacaatgatgaccagttccttaacctcatctacttctcttcttgactcaactaccaccaatgggatggtttggagaatagagaggaagacgcgaagagcctcagatagtttcccagctgttgtagctttgtagccggatttgagctttgcttcaagctgagagaaatcaaaaacaagagctggcgggccacggacgttaggactggaagactcactccatccacgcgcaatggcaagaggaaccacaggagatgaagaaaaggcacgcagatagctatggctctcagtgaacagatcaagaaacatcgatttgaaaggtgggaagttcttaaacattttaactataatcaagtgaatttttagtgtttagtgttgtggaccagatcacgaatgtttaatgttttggacgagaacttgagattcgtcgatccgttaaattgatatggatggtgttcatcataggattctgtttatccagaatttggaaagctttttggaatgcagtttgacagtggacaaaactcaaccatcgtgtgccggagggggttccatgacatgactggcatgactatcaacggtcatgtttcgctaggaagcgttcatgtagttgctttgaggatccatgaagcagcaacatcatcttgatagttttggaagacaaatgtggggaaaattctctcacactcaaattgaagcgaccgggcaaattaaaaaacagaaaagaagtaaacaggcagttgtgatcgcagt

SEQ ID NO: 3393 - DNA, 1797 bp, Arabidopsis thaliana landsberg
atccttggttcacactctgtataaggaatcaataggctattatcatctaattatgtaccaagagatcaaaagtatcaaataaaagtgacttactcttgcagctgaggtttcaccaacttcagctgattgtctctgtaccaaaaaaaaaacaaagtcaaatatatgtactaaacgattgattagctttatgtataagtagacaagtgtttacctggttctttatcttgtcaattacttcttgtaactcattgaccttctgctggagctggtcctgtttctgttgcatttcagccatacatttgctttttacttggaaacaagctagtttggtcttgttcatatttcttcccatcgcccttagtctaccacgattgtcaggccctaagagttggctaagtgaatcttgtgcttcattcgtcccatttgattgaggaccactgctaacaatctcagctgcctttttctgcaaaccatcacacacaatcataaaccagtccacacaatcactggctaagttctggatttattgtctatcagattcatttcaaaaccatcacacacaatcactggctaacttctggatttattgcctatcagattcatttcaaaaccatcacaaaccaatccaatttctgttccatcactaacctatccaatttcacaaaccatcactaacctaacaatcatcacaaaccaaactgtcacaacttccaaactataacatactcacaattttttcagccgcatttgtattcactggtgttccatctttcttggtccgtgacttaacccaaacctttagcctcgtcacttcagttgggtcttcactaccagttttctgaaaaacacaacatgccaatattagtaaaaattctaagcgataaaaaacataacctaacaggcacataagataaccatatcttctgctagtctaaccatccctctgcgactacaagtgtgaggaatctggttgcgccttctttccttgtagctatcgcttataacctaacaatgattgttaattagtaactttctacatagtaaatatacttagtttaattttctcccttaacataccttaaattcacggctagttttgctcttcacaaattttctccactcaaatggagaaacatttttaggtctcagattcatcctctgcttgtttgtctttgcttctctaaacttagttacttgccttgatttccaggatctccacaaacatcccatttgcttaagcactgcaaccttttgatactcctcatctagttcaaaccttgccttcaatcaattacagaaaaagtgattattgctgtgataaggaaagatagtcaaatattacaaaaaaaataaaaagtgaagtgttacctggacagatttccagagaagtgtcctgatttcttcacctatttttgtccagcgatcaattgtgatagggacgtgttcacggaccaatgcgcctgcatatgatgctaacttaactaagcctttaccaataggctctcccatcatggtgtactccactctcactctggcatttggatccttagcaatatctttcatcctagttggtccacgctgcctcttggtcttaggttgaacagcttcttcatctcagaataattcaagctcgccttcaggttcttctgcttcgttttctgtctttccattgatatcttcatcagcttctttttctgtctctccattgatgtcttcatcagcttctttttctgtctctccattgatgtcttcatcagctgctttttctgtctctccattgatgtcttcatcagcttc

SEQ ID NO: 3394 - DNA, 591 bp, Arabidopsis thaliana landsberg
  unsure (1)..(591): unsure at all n locations
gaaatgtatcgtttctgtatgtttgattgcagatatatgttccaactaacccgcgtggtgcagaactacttcctccaggaatcgttgtggcgaaaactgatttttacttgcgtagattatggggagaacctaatgaagtattgacttctcattctatatttactttctcaatatatatggttttatctctgaaggccattagaatagttaatgtcaaaacaataacctttgcaggatttgaagaagaagccaaaatatcttgtgacatttacagttggatttgagcagaggaaccatattaatggagttgttaagaaggttctgcaatatcagcatgtgttttagcaagtattgctttatatattctttgtggatacactcagattttttgttttcttgtcatatcttcagttttctgaagatttccaaattttgctcttccattatgatggccggacaactgaatgggacccatttgagtggtcgaagagcgcgattcatattagtacaagaaagcaaacataaatgctagtcnnnnnnnnnnnnnnnnnnnnnnnnnnnnnnnnnnnnnnnnnnnnnnnnnngaaattc

SEQ ID NO: 3395 - DNA, 2511 bp, Arabidopsis thaliana landsberg
tcaacattttcagaaggcattttgtcattgctcccatcaacacatcaaaatttatttttgccccatatccccatgaccaagtcaaaaggttcagaatctggggggttactaaagctaggcagcaggatgaatcattatgttggcccgttagtcttcttttttttgctttcataaacttgtaaaaaataaataacctcttgtcaacaaatttcattttacatactccaagcccgtgggccaaaaggatcgtacggagccattttttgttggtccaagactccaagcgaagaagactatggacttcttgtattattagccaaaattaaaatttgaagttaggtaacaaatttatggatttaggaaaatacgtttataattgtattttcttatttagacattgcaaatcccatgccgttttcttttgttgttttgtcaatttcatgccgtatgattaaagtttacaatgcattttgtataagacaaatgctttttgataaaagaatattaaggtacaaaaaaagaaaaggaaggtaaaaagattcctttttccctctctttgggccttaaatagagacagagaccgaaagaaagaggagaaacctcacacaaaattggtcctaaacgagtctccttcagtcgtaatttgcagcagagcaacgatggcagcgactccaatggaaggcaaatgggttcaggtcagctttctcgcctttgtgtttctcttagagacgaatctcgtttcatcggatattacttgtctcatgttttcggatttttattgaatcgtacgagactttcggcttttgaaattctaatttcgttttggaatctgtttataattctctgtaaatctgtccaagttctctgttagattgctgatgtgattatacacttaggttcaataatcattttggttctacaacagaatctcctagtttatgctttctctgatcaattttggatttgtggatgatgagtttgtcatttattgaatggactatggattattcaccggcagagttgttcatatcatgttgattaatagtttactgatggaggagggtttaattttgtaatcatcatcacatataagtatttgaattatttatcttgtgtagacactattggattagtagactatgactttgtcattattcaattgactattatttgtgaatgctgactcaactctttgtttctttctcattgatttctgctaatactttttgtaatgttgattataaaaacattgtaagatttagtatttgagtaatttatgttttgtgttatttgtcattcagcttaaacagaaaggaaccggaccaggagcaagaagctctcatgctatagctcttgtgggaaacaaaatgtatgcctttggtggcgagtttcaaccacgtgttcctgttgacaaccagctctacgttttcgacctcgaaactcagacatggtctatccaggaagcttctggggatgctcctcctcctagagtaggtgtagccatggctgcagtcggacccatcatctatttctttggtggccgggactcgactcaccaggagctcaacgagttatactgttttaacactttgaccaaccagtggaaactactctcttcaggggaaaccggtccacagaaccgaagctaccactctattactgcggattctcagaacgtgtatgtgtttggtggatgcggagttgatgggcgtctcaacgatctatgggcttacaatgttgttgatcagaaatggattaagttcccatctccgggagaagcttgtagaggaagaggcggtccaggactcgaggtggttcaaggaaagatctgggtggtatatggattcgcaggagaagaagcagacgatgtccactgtttcgacatagctaaaggggaatggaaagaagttgagacaaaaggcgaaaaaccgtcagcaagaagtgtgttttcgactgcggttgttgggaaacagatactgatatctggaggagagattgacccgagcgatctggggcatatgggagcaggatgtttcacaggtgacgcttatgggcttgatacagagacgctggaatggaggaaatgggaggatggggttggatcggtggagcatcccggtcctagaggatggtgcgcgtttgcagctggatcacgagatggtaagcaaggtctgttggtttatggcgggaactcgccgagcaatgataggcttgatgatatcttcttcttcactcccaacactctactcaagtgattggtaactaagtatggtttggttttcttgccggagagaggggctgtgtgaatgttcctttttttttagtttccttttggattggatgaactatgaagatgtgtgatgtgtttcattttcctctagtatttgtaattaaataatcgaaatttttcattaaagaagataacgaataacatcagcttaatggttatgttagcaactaaaccataatagagatacacaactaatgatgagagcatctatggaagctttg

SEQ ID NO: 3396 - DNA, 2580 bp, Arabidopsis thaliana landsberg
gtaagaaaaccttaccgtgagtaagcgattgtcgaccgtgctcgagaagttctgcctgagacccagaaaactttcggaactaccgaatccgtgagttgcggtcgaattgtgtgtttgtttgcatgttttctagagctagtctttacaatatatgcatgcttactcacttagacttaactaatcggaattcggcataagttagaacttgaatcttaaagtgaatatgggcatttgacgaacttgataatattatcactaaggaatggaacggactggtgcatgactatgctaaatgaatatgaacttaactaagtttacttgatgaattgagatatgttttgagggcttacttgccttgttagattgttatacttatatgagatatgctatgaggttgtgaataaatccttgttatattatgtatatatattgatacgtgatttgctacttgattgtctatacttatttaaggtatggtaaactacttatatatagtactgcatgaggttattgtgtctaagtggtattcagggtttacctgataccatcatgttagagtaagcagctgccttcctttttgtgttgtgattgtgtcagtaagtcttgatcctgagtggtcacttacatgatggcacaagactcggagcgtatgccgggtaatgcatgacgatgcattaaagtgatgttccagttataagcctttgtggctatagctcgggtgttcacagttgtgtacgtacgtgtggtgtgggtgtgcacgtacgtgtgtgtggtagcatacgtgtggagaacatgtatacacgtatgcaggattttgtgccgatgttgtggtgcacctttttggtaaggttggtagtatgttgggcccaagtttcattcatgtgtctagtttggctgaatattctggtattactataagtataggataatacgtttattacgtgctttgtgatatcgaatggttaagtttacttattgagttgattaaaccctaaagatttatttgtgcatagacccagctcaggagtaatgttagattactcatgattctacttgtcttacaggaaaccatagtgggatgaccatggcgggaagacgaacactaggaaatgccgaaaataagatgttttgcgttgcttctgaaaaattacttgttattatgtaaattttaacaaggattcgatataatgatatatttttgggtaactctttgcaaagtataagctaaatactatgtataaagtgttttcatacaagcaaccgagtgtttaatgatataagacctagtctgggtttctcaacactagaatatcaagagggttggcaagtgtaagtggtgttcctagtgggaagagggtcgattttaatttggttaaggaaccggatttatctggaacctctactaagttgtggtcgatcatcttcattttagcgtaattgggttgcccgtggcgttacaacttttggtattagagcttggttatgtgatgctcgcggacacttaggttttcaatgattttatcgagtaaaattgagtcgcagaatgcaacattagattctgattatttgtctttttgatgactaagtgggggataggtatacctcgttttgcagatgtcgtctagtaaagggagcaaccctgtcagtctgtttcacggtcttaatgtgcccaacctctagaacttttttccgctaagtagtattgacgatgaaagttagtttgtggccatgaatgatcagtttatggccaaagatagtgaatccaccgagtctgatatatcgattgaatccgatccgtccgaatatctagaaagtacggaagatgctaataatcatgatggtccgttatctagtgaagaggcaaaccatgttgagtggatgatcaccgaggatggcgagttattcgcggtgccaaccgagaatgcgatcgaacaacaaacgaatgacagtctgaacaatatgttgtcacaattctatgtgccatcgacggacaaggagggaagtttccgtggtccgaatctggggaccattggggagcacgggttagaactggaagaagtgaatgcagacttgttcgatgtacccaggcggatggtgcatttggagcaatgaatgagtatggagccgacgatgagtatgatatgttaatgctcatgggaaataacgtagaagatgagaatggagccatagagaatgagatagagaatgagctagagcacgtggtcgattagttaattgctgaaggtgctcaagactttggtccgaacggggaaaacggaggaggaaatgggaacgatgggggttgattcctcatcggactcatttgaatttttaacgccagaacctaagagtgtgagtgttatcaacatctcattggacaggtcacatgctatcctgatgatactgaatcctagcaaggcggattcatgctgagaggatgaaatgtttaagggggatgaaccgagtgaagatgaaggaaatggaaggtgggatccgatgctacttgaacaggaactgaaccacgagtctttgattaattaatcgtctaagacttgatgaagaaaggtcgaaaggaaagtt

SEQ ID NO: 3397 - DNA, 3686 bp, Arabidopsis thaliana landsberg
cattttgctgaacaagaccagagagattgacaatgtcaggcgtcttgaatccacaataatttgttttttatgattctgcaaacgaagagcagatacaatattttcttgcaaaaacagtaagtaactaataaaaacagtttcaaatcaaaagttacctgtgattttaagtgcatctgccagtttcctacatcttgacgtgaacctgaagctaagacagaactctctttaagccttaacacatctttgcctaaattcacaccattgccaccttcatcagctagatagaagaagagatgtgtacttctctttacttcatcatcattcaacatattttgaacattgattctaatagaccaatctcctccataaccaaggctgccttcctcagacttgacaaaacttgtctccaaaaccatatcttgttcaaacagctcttgtcgcccaaaatctcttccattgtgttctttccaaccaaatgacttaagatcgttagagttttcacagaaatgtctcataacaggctttccatctttcataacgagccacatcaagccagcaacaagggacttgggagttctgcatagtcatctacaaaaacttagcagcttgtacaagaaacgaacactagctcttttagtgcttatatatgacaacacagaaaaacaaatcaattccttcaaatcctctgtaacagtagtcgtctagtggtctttgacttttaacagaataactgattcacatacacataatacagtttggtgaaagttgtgtatagaatcatatgataaagttgactaataaaaagcaacaaataatccgttaccaaataaatacctggctcgaactccaaaatacacctgaggacgataagttccccaatacgagctttccttgtgctcaccttgaaactgttgcaaaaaaaaaaaaagttccaaaaagtcaaactttccactgagaaaacaagaagaaaagcaaaaagagagttaccatggacaagtcggtgagtttaggagaaggaaaaggagtgataacacgaggtctctgggattcatcatccaaaagtggtttgatatcaccagatgggcttaatccggtcatctgagtatagatttgagaaatgttgtgctctgtaaaatgatcgttgaagctgagaaataacaagctaaagctatagtaggtggacttttgagctatttgaccaaatgtagatcgtgatagcaactgattgtcctttttaaatacttattgttgttgccaagtctttttataatacagaaattagctataaccattttatagtatttgtctactacacaattttcgacatctctctcgtatcttatcatgaagcctttctctttgtggctggtcccggtacgttctttcaccaaaattattttcggtaatccattttttttggtattgttgttgccacttttccacacgtgcgttaattttcttattccagctctttttgtttttgttttttcttgtcgtatcgagaactcgtgtctggttcgtgtttcaattactaatcgtagatttttgcgagttttgtggagctgacacagttcttctctttctcatcatcatccccattttattcgtctctcttccttcggttatgctccatttcttccgtttttcgtattttctcttctctttttatttttatttttctgggataataataaaaactctttcttggaacaaggtaatcgatttctctttggtttttgtttccaatgatcaaatttggttttcttgttttcaccacgacaatgattcgttaatttggaaatgagaaaggagaagactttgcgtcggatatatcattaatgcgtggttcttctgtcgtcactgattcatctctgtttcatgtcttcaggtttgtataaagctgtggctagctaattagagtctccagattgagttaagatcatggatgttagcgagctcgaggagaatttgttcgctgctagcgatgccaaggttatattctcataaatggatatgttttaaccatctctatctctaagattcttgtcggtagttgtaggaataaaatgaacaagggatatgcttagtatgttattgttatctccttttttgtgttttggttttggattgcttctatttttttatgttatagagttttgattctcctgaattcagacttgcccctttgatccctttccctgttaattgttagcaaatcttgtgttgagagagtatatgggaatcttagcggcattagtattatttccattcttgttctatgatgtaactctttcaatttgatggtgttctctattctttgctaaaagttgtgtgctgcgtaaaatgcagttacatggagatatgtgcaaggaactatctgcagtttattgcaaggtattgtccatcttcccttcgttggaagaagcaagacctcggagtaaatcagggattcaaaccttgtgttcgttacatattgcacttgagaaggcaaagaacattcttcaacactgttctgagtgtagcaaactttatttggttagttgctctttctttctttggatacattattctcttttgtgtgtttggtctctctcttgaattcctccacttttatatgttgagcaggccattactggggatgctgtactgttaaaatttgagaaagcaaaatctgcacttatcgatagtcttagacgtgtggaggacattgttcctagttcaattgggtctcaggtaatgtatatatcagtgcacacaaaatctttccttttgcaagttaataagtgtccagggcttatgtgctagatattggctttttttgtttattgattttagaattctagttgataaaatggtttatgctaatgttatttgacttcttcagattttggacattgttggtgaactagagcacaccaagttcctacttgatccatcagagaaggaagttggtgataggataattgcactattacaacaagggaagaaatttgacaacggcagtgacagtaccgaacttgaaatttttcaccaggcagctactagactcagtataacttcttctagatcagctctggcggagcggcgtgctttaaagaaagtcattgacagggcacgtgtggaagaagacaagcggaaggagtcaattgtggcttacctgttgcatctcatgagaaaatactccaagctatttagaagtgagatgatggatgagaatgactctccgggttcctatccatgttcgcctaatgaagatcatgggagtgttcatgggtttggtcgtcagctatcaaggtttggttctttaaacgacaagcccatgaacagcataaattcaggacagatgcctgttccacccgaagaactgagatgtcccatatctttgcaacttatgtgtgatcctgtcattattgcttcagggcagacttatgaacgggtctgtattgagaaatggttcagtgatgggcataatacttgcccaaagactcaacaacagctcccacatatctctttgactcccaataactgtgttaaaggtcttattgcgagctggtgtgaacagaatggaactcccccctcctagtgggccgccggaatctcaagacctcgactactggagactagctctctctgacttcgagtccaccaaatcacagtcagtcaacagtatagggtcgtataaattg

SEQ ID NO: 3398 - DNA, 370 bp, Arabidopsis thaliana landsberg
ctggggaattcattgcttagataatcaacactccaagagcggatgcatttttcgtgttttgagttcaagaatggctggtaatgcaatcttatttaattggctattcttttgccatgaaccctgaggattccctttacccgatgtcttttacctattgatttacaatcgctttttttttcttttttttttcttgctaatttctgaatttttggccaaaactctttagcattctagcttaatctaaaccatcatagattcataatttatatcgtattcacttggtctttgtggttcattccgtacatatactattgcgtttgttaaacacttgcagtatattttctaggaaaaaacacgtggatcacaagtt

SEQ ID NO: 3399 - DNA, 586 bp, Arabidopsis thaliana landsberg
  unsure (1)..(586): unsure at all n locations
gcagtctattttctaggaaaaaacacgtggatcacaagttgacgttgttgccgtggaccaataaacgagtgtttgtgaatttttggttaaattttatttaggaatatttttcatttcattttatttatatatttatatatttttgtttctgtactaactatttatttatccttcgattatacgaaagtgggcactacgtcaaaactagtcgttgccattatttctttgaaactgccgctttctctcttcttctgatttctctttctcagcttccccaagcnnnnnnnnnnnnnnnnnnnnnnnnnnnnnnnnnnnnnnnnnnnnnnnnnggttatggtgttaattacatagcctgttattagttagtacatctcaccaatcaattttttattagtataagtaaaaaaaaacattattttagttgggatacataaccatgtatagatgtcgattatatagccatcttttatatcttaactgatcattgactttgcgttcagatgacctataaattttaacattgtacggctgtaaactttctcaaatctatttaaatagaatgaggaaagatccgcaagttctatta

SEQ ID NO: 3400 - DNA, 786 bp, Arabidopsis thaliana landsberg
atgtgtctatgtgagaagttaagaacaacacattacaccattaaaattgtgtcaaacagagagctccatagaattagttaagtgataagctataaatcaaaatttgaatatatatatataagtttgattatatataagcgataagctccatgaacaattcagagtggaaatttgaatatatatatatatatatatatatatataagtttgattttatggtaaacaaaaatagaatgtcttaatcagaaaaaacagagttatgtagattcttactgtactgaatcccggaaaactctttgaagttggatcattccaacaccaaaaaccaaccctctaacaccttcttgagatttgactttaagcaactcccctaatgtaccttcggtcggatcattggtacgacgaaccagcctaaccggatggaaaactgaccaacctgtgatataaatcagcctccttgcccgtcgtatcgcatcagccatatcctcccagcattttccatgtctatactgaatctcaccatcaagatgtacactcggaagagtaccgtcatcgacatgagcatcctgataaagagtaaccctaccgcctttcctcaaagggaagtatgtaccgggaactcctacacactcaacaccagaaccaacacccttttggtaaagtctcattctttccattggagtatactgaatagacagactcaacatagcaccttttctacaaggcttcccactactgttaagtatcggaaacagcccttcgattctattcccggaacacaactgc

SEQ ID NO: 3401 - DNA, 446 bp, Arabidopsis thaliana landsberg
ttttttctttctgtttggggggttgatttaataaaaatttatatttcaacagatggatacctcatacctcatacgacatgattaaatatgaagaggtggtcaagaggattcacttcataaccccatcgtatttgggtttcagctgctcataggactcagcttttgggatggatgactacgttcaagaagagattccatagtggtcaccatcaacgcggaagtagatagactttgttttcaaattgattttaaacattttagttttgtccaataattcgattttataaatactattcagattcttaaataattatgaataaaagtttcaaattaatatgatcattaaaaccaattaaattggttttggtttaattaatttactaagaaattagttgaaatttgttttgtagaaaatagttttctacacaataactgtagaaaattga

SEQ ID NO: 3402 - DNA, 643 bp, Arabidopsis thaliana landsberg
  unsure (1)..(643): unsure at all n locations
ataaactttgaattggtattgaattattatgtggaagagagaggaaaggatgaggaagagggagatgatgatgtagacgatgttgaatgaaaaaaccattgttgttagtctaataaaaggaacttatcgaggcctttcaaagtgtccaactcagcattctcaaaaatactctttctaatggacacgtcagcatatgggagttatttgtggctctctttcgtttctttttttttctagaaatttattatgttcactcgagacttaccnnnnnnnnnnnnnnnnnnnnnnnnnnnnnnnnnnnnnnnnttcttctcttttcannnnnnnnnnnnnnnnnnnnnnnnnnnnnnnnnnnnnnnngctctaagtttgttccctcttttctctcaagttctccgggctcttggtgattttcgtcttatcacacaaaggttggtctcttacctctttcttgatttgatcagttgcttccttcctttcacagttgattttgtttttgacaattgtttcagattattggttgtgtggcctctcttgcttgcttctagcccatgatcattgattttaactatctctttgtttgcttggattaataaaatttatatttcaacagatggatacctcatacctcatacgacatgat

SEQ ID NO: 3403 - DNA, 454 bp, Arabidopsis thaliana landsberg
  unsure (1)..(454): unsure at all n locations
gaagggaccttcagttcctggtcctgttggtttgcttggggattggtccaacaatttcttgcccaggaaccggtatctattcccgctatgaggagcgtttattcatgtgttgacacttcaacacatggagctaagcttgttaattgtattattcatctaagtccagcttctgtaacacatagttctacataccgaagctggatgaagagattccattctgcccagcannnnnnnnnnnnnnnnnnnnnnnnnnnnnnnnnnnnnnnnnnnnnnnnnnnnnnnnnnnnnnnnnnnnnnnnnnnnnngatatgtagctttggtgtttggccaggaagaatatggagtttccaatcctgagagccagttctagaatcacagccagacttaactatttatgtccacagttcttcccagctcctggattttggtctcatcaacatgataataactcgat

SEQ ID NO: 3404 - DNA, 1878 bp, Arabidopsis thaliana landsberg
cttatcaccaagggtcatgtttgaaaaatgggagagacaaacctgcaagattcttgctctcgcttttttggttgggtgtgggaactcaatctttctgtctaatcgaccagaacgcatgagtgctgggtccagaatatctgcacggttagtagctgcaatcacctgaaaaaatagaaaggtatggttgttactgtttctttgagaacgatttttaagaccagtatgattagtccttagaatggataaagacactcaccttaatacgttcatcgctactgaatccgtcaagttgattgagcaactccaacatagtcctctgcacttccctgtctccgctgacttcactgtactctcaaccaaagaatgtgatttgagcaaatagctgagaaagtgcagaaatacatgaattggaatcagaaaaagatttgtacctgtcgaaacgctttgtaccaatggcatcgatttcatctatgaagataatgcacggagctttctctttggcaagttgaaaggcatcacggacaagctttgctccgtctccaatgaacatctgtatataaattgaatatgtcatcatgtcattacaataaagtatcattatagctcttcacatgtaattattattgccagaacactaaaatcttatatccagacagggtaaagaactctaagagatgagaattgaatctgacactcatatatatacctgaccaattgagggcctgccaatttaaggaaggtggcattggtctgtgctgcgcaggcacgagccattaaagttttaccagtccctggaggaccatacaagagcactccctttggtggacgaacacccagcttctcaaaacgttccttgtgcgtcatgggaagcacaattgcctctacaagctcttggatctgttccagaaataaacacaattagattcaatatgcacgctgaagcaaagtcaatacaccagatcaacacaatgggataaacttacctgcttctctagtcctcctatgtcattgtaatcttctgttggtttttcatcgacctccatggctttaaccctagagtcatactcagatggcaaggtatccaaaatcaagtagctatatttgttaactccgaccaagtcaccaggtttcaaactatcaggatccacgagtccaacaactggtagaaagatggtctgcactccacatcaagaaacaaaagtctttgctcagacatgaaacgagaaaagaaccagataatgtagagaacatatctggagaatgaatatggaagtctcacctgtcgtgtagacgttttcaacacaacacattttcctttccgttgagagccaagatcaatatttgcaccatcttcctcagcatcatcctcaggattcatctccaaaatctaagggcataatatgatatcaaaacagttagcacttcaaatccaagcaggtaagggtacaaataacaaacatttagaggccataaactaacggacaatttccaataggtaaaactctacaggaaagtgccaaaataagataagaaaactagttgaatacctcgacaatgttgccaaccaagtaaggcagctgcttgttgagtttaatcttctcctgattctccttaatcttctccttgtaagaatcacattctagatttgttctttgagcatcttcctagatccccattaaagaaaaaacacaagatcagtaatttcaagatatccaatttgcaacaagaaagaagtagcttttcaattcaatcaatctcaattgagttgaaaaatccaaactttgaaatcacaagaagggtcataaaattaaaggtctagttcatctcctgcttccacggattacacgaaactcaaaccctaaacccgtaatcgcgaaa

SEQ ID NO: 3405 - DNA, 4526 bp, Arabidopsis thaliana landsberg
  unsure (1)..(4526): unsure at all n locations
gttcagtgaatgaaggtagtgaaggaagtcagttctatatccaccacgaaataattcagtgtcaaagaagacaaacctagataagtttttcgacttctgggttgaagaagcctaacatttctgtaccagattcatgaagtccttcacccaaagcatcaggattatcagaagcagtctgagtcttgtttatcctattatatattttattccagcaagcagatggagtgtcccctttgaactgtccaaagatcaagtatcatatttacacatggctataacattctttctatccacacaagctttccacctagaaacctagcctgctcaccgctattggtcgtcactctgaaaacagggcgagtctttgactcggcatctctaagcacttccatcttgtacatggcagatgcattaggatctgcttaaagtcatagcaagaaatcgcgcatatatgacacaaaactgcctgattaatatagaaagcacaaaaactggtaaataatttaccttttagtgatatgaattttcttgtagctgtatacccttcaggccaagtatgcttactatccttgaaaaattctgagtctgtcacgatccttcctggcagacaaagacaagtgatatacgcctatccataatgagcagagtccattccaactaaggatgatccaacatactaattagtttcaaacattaccaagattaattatttgcagatcgcctattctatgcaagcaatctccaagttctgttggccgcaaccagacttctccatcttttgtgtaatcatcacccgagtttgagctgtcctcttctccactattaatcctttccgaacaatcagtatcagcaactttttgaagttgatccatccttcctggaagcttatattcttttacgtacctggatgaggtaagttacagcaatttaacacaggaattatgtttttgttcagattaagataaggaaatggtctgtttgttaacaacttcactatattaggaaataaaaaaaaagtagaatgtcagtgaaaagcaagagaaacttgcatttttgcctcctccnnnnnnnnnnnnnnnnnnnnnnnnnnnnacttcaggggggaccgtgagagaagcccttttagaaatgagaccgcttgtttgacttgtattctatatgaccaaaggaaatatagtcaattccacttcgaaattatgatttgtaacattaatttcaacagttcggtagtataactagatctctacagactttaagaagatctgctcacctagcaaaatcatgggtgccaaaaaactgtacgaggactgatcttcctccagagatcttgttgtttagacctttccgctttacaataacagactcatccacgataattgctggccacatagcatgacctgtccgaaaaagtttaacacacagcagtatggttttcaagatgcataattagttttcttcagaaaattattcggctaggcaatacatgcttactaagcaccacgaaattctacagcagattccagtaattaggtattaaagagaaagaaggtgactaatatacttcctaacagcatcatgtttcttacaccataaaggtaggttatatgcctaaatattttcaacaaaagctaagaaaatacgtgtacaagaatacagaaatcggttcggtttaaagcattcaccagttagtttggcccatatgatgtctctaggctcaaaatcttggcactcctcaaaagaagcagccaatataaccagttcatcataatcttgaccatcaacgaccacatcattagtaccaaacttcatgtttagcaactccatgtcgtcacgagaaattaaaaacttgatcttttcacgacgaagagctaattcctctccatctccatctccatatttaacctgtagtaaattttactaacagtcaccaaaaaaccaaaattaaagacatgtgacagatacactagacagaaataacttacaatgtgatgctttgtctctacattatatccgacgatagaaccaggataccaaacagcatccaatggccaaaaaacctaacaattagacaacaatcaacagttaacaagcccatctcataaacagagaatgaaatagctaaagaaaacaactctatagctcaaagcctaccttgcattgcagcccaatgaaatgtttaggatcgactccatcataactcaacctgccatgccaaaactcgtccatcatacaagagaaaactaacaaatagcgtgccagttatcaccaaaacgtctatattgtgaacgccataactaacaagtgcaacacaacagggcatatacatttcaaccaaataacttatatctaagatcacagagcagaattaatggttggtgaatcctaacctgacccatttcttagctgtagcagaagctgtaactaccttctcctgattcttgacagtattcctcttactccgggaagatccatcttgtttatttccgctacacacagctttaattcgacatccccgtaaaggcggggtagcagagacgcttaaagtagtcgaatccacgcccagtttcatgagctcgccattaccaatcctccttttcttctgcttcttcttcttattctcctcctccttctcatcatcaagctccgcactttcaattttcacaatccgatcatctctctccactccctcattctgaagtattgctaactcaaggaaagactccctccgccgccgcctcctcctcttacggcgacaatagacgtgaacaatctccggtcgccgatgaggctgcaactcaaaactatcgctcattgggagcttgagggcattgaccttcttgtgggaaccagcggcggtcttgcaacacaatgaagacgaggaagaggaaacggagtaaacgctctcaagagaggcgtaacgaacaggattatcagcagcgtggtcgtggagttcggttttgatttgggtatcttctccttcttcttcttttgggacacacgacattgaaatcattcaaaggaagagagtaagaaagttgttgggttaattgaaattgaaattgttaggttttgaaggatgtcgagaattagggttttagagaaagagggatggttttgagagaagagctgctcttcctccaaaaatatccgttttcccgccggctaaaattaaccagtagagagttcttcttcttctttcttcttccagatctgctcttcccaacttttttaataacttctgtttatgtgtaaacaagacacgacgccgttttgcctgaagattctcttttaatcgaatctgtctcttgttgtcttaatgataagtgtcagttccagttccagttcctaaaaattatagtttgatccaaattctttcggtttatctatatttgaacttggaaacttttcaaatccttattaaagctggttttatatttttttgaggggaaaaaaaaattcaaattcgtatttgtacagtatacaaaaacttgttcatttcagaatcagaagttgttgattgtgtgtatgtatacatatacattacattatatacgttttggtgggctcgagactacatgtgtatgcacaaaagtgtatatttcttataattttttatgtgcaaaagaaaaattgtttctgttttgatgtttcttcttcttgttcttcagtctccagagttttgagttatgtatgttgaagcttatgcttctggagatggatttacttctgcagctgaaggctgttgagtcccgtagttccacaagtctntgagttctttcctcaccaaccctagaatgaccgtgattcctgcaagccgctcaatatgtaagaaatcttgcatttggttgggtttcaatggaatgcatatataggggactaatcatcaaaattcagagtttttcatgagatgaacaagataccgagcgtgcaagggacaagatatagcaatgcaggttgaccgtgtccattcataacatacaatcccaagtatgttaagaagaggccaagtccgtagccaaacatcaaccacggaaaatatccattcgagacccccttgttattttccttgtcaaatctgagacgtaaaagagttaaaaagcggtcaaaaaacatattgagatggggcatattgaatacggacagcgtttgtaacagatgatgtgttcacaattggtgtcgtgaaccataatcgttattgagccaatgcatcatgcataagagggttacctgaaaataaagcatatgagaaggcccgggaaaagaatgtctccaaaaccgatcatgttgtaaccaccccatggatcagaaagccgtggaattctcaaaagcatgggaatagattctccagtgtctttgctcccacgtgcaacctatgccataaatttacacaaacagaagaatatagtaatcaactagaacgtgattgaggttaacctatcatcgaccttcttaattctcgctatgtgcaaacattttatacaacaagtgaactcaaactcaatctttgggtgttttagcagtatccc

SEQ ID NO: 3406 - DNA, 648 bp, Arabidopsis thaliana landsberg
ctctagaggatcccccttatttattattgtagtaaatttgttactatacatatagtcaaatctatcgtaaatttatttcaatgtaaataatatgaaattttgattttacatgtatcaaaaattatttcattttgaaaaacacaacacaaaataaaattaatatacagttgtcaccagaattattttctaaaatataaataaatataaattattttatagtattaaatattcaaattaatgatattcaccaaaaaaagtaattatctattcaaagtatatataaaaaaaaatatagaaacaaattttctttattggtatttgtttctattcaacctttaatacttagaagtgaaaataaattataattcttataccatttttataattatttttactataaagaataggtaatttttgctggtcaacaaaaaaacaaaaatactgatttctattgtaatatgttgactacaatgaatgtacaatcaatttaaatgttcaagctagtaagaaagtctatttattggctttaaaagtaaataattaatatcactttatctgttaagaaaacaaaattgtttgactagtttagataacagagagttttccgagtttctacccattacttatttgagggtgtttttttgcata

SEQ ID NO: 3407 - DNA, 842 bp, Arabidopsis thaliana landsberg
ctcggaagtaccaaaatcttggttcacagagattattagtacattacgttttgtggcgggcacctatcttttgtattattttgtattcatatatttgataactacatctaaaataaagtggaaagaattcacaaccgctaaaatcaacttgattaagaaaataaagatatcaaacgtaactgggactctatcgacagtgacatataagagataacgtcttcaaaataaatcaagagaagctatataagaaacaacgtatgttggtgtggtatgatttgctcttatgacacatctacctttactattagtatttgatatttcttttcttgaaaatgatatagtttttaacttgagaagagatctgaataaatttttaacctgaaaatgatttaatttaatacggtggctagagtttatgttaattttactagtaaatttagtccgcatacagcggaaatcatcatctagtgcatcattaaatcatttgaataaattatggtaatgttactaaaaatgatgtaatcagttcttggatttcacttgttccattatgtcttgtagcaagaaagagatgttagaatgagaagagcctccttcttccacagccttgtgagctgaatctccaagctctttggctcttcttcttctctcttttgcatcatcactctcacccattaattcttccactgccttcttcactccttctttatccaccaacactcctattttctcctcttctccccatttcataggctgttcaaccccggatcttacaccggcttttagtacctcaacgaccaatttctcattgcagaattggtctgcgaatagcggccatgtaa

SEQ ID NO: 3408 - DNA, 524 bp, Arabidopsis thaliana landsberg
  unsure (1)..(524): unsure at all n locations
tcgaagaaacatgggatgcctgccttcccattcggtacttgttttttataacagggcatttcaacctctgggagacgcttcaactgaccacagcaagttatcgggcgaaagagcatctttcaaatgtgaagttcgtcaaaggaatcctgaggtttcgtatgatagctatgtggaatcaagtgtggcatcaaatgttccaagcttgaatcatggatatcgcccggaatctgtcagaccttggagccattggatttcatcatgggagaaccgaagtagcagctcagttcagaaacctttgccacttcaagcgaatccattcttgacttttaatactcaagtacgagcagactcaagtgcagagatgagaagccgtgattctaacgggcttnnnnnnnnnnnnnnnnnnnnnnnnnnnnnnnnnnnnnnnnnnnntccatcagtaaactataaccatcttaacaatggcccaaaaggggcagntactaatggttctttgtgtgagagtgtgatgcatcagagtctta

SEQ ID NO: 3409 - DNA, 386 bp, Arabidopsis thaliana landsberg
tgttcgacgccgccgtcgaacacgcctgggacaacgagcacggtggcctgtgctacggcttcgcccccgacggcagcgtctgcgacggcgacaagtatttctgggtgcaggccgaatcgctggctgccgcgggcctgctgcacgcggccagtggcgagtccgcctacgacgcgtggtacggcaagctgtgggcctacgcgtggcagcacctggtcgaccatcgttacggcgcctggtatcgcatcctcacccaggacaaccgcaagtacgacgacgagaaaagccccgccggcaagaccgactaccacaccatgggcgcctgccacgaaatgctggcgttgatccggagtggcggcaagccctgaaatctcgacgccacctgtagg

SEQ ID NO: 3410 - DNA, 494 bp, Arabidopsis thaliana landsberg
  unsure (1)..(494): unsure at all n locations
tggaatccatgcgactgcacaacggttgggaaagtccaaggataacggttggtgcgagccgcggcatcgcccctccgggccggcgccatcatgcgcgcgcacggacaggcaccttcaccccaccacgttgagcacttcgtagcacgcgcccatgttgtggtaatcggtcttgccggcggggcttttctcgtcgtcgtacgcnnnnnnnnnnnnnnnnnnnnnnnnnnnnnnnnnnnnnnnnnnnnnnnnnnnnnnnnnnnnnnnnnngtattcccacaggcgctggtaccactgccaataagcgtcgtcgccggtgcgcgtggccagcaatgccgcgcaggccagcgactcggcctgcacccagtggtatttgtcgtcgtcgcagatcgagccatccggcgcgaagccgtagcacaggccgtcgaattcgtcgtcccacgcgcgcgcgacggcggtgtctaacaggtgccgcgcggtcggcacatccagtcttc

SEQ ID NO: 3411 - DNA, 1546 bp, Arabidopsis thaliana landsberg
gccccccctctttttttattttcattttatttttattactggtatgtgttttattttaggcaggttaatcattgttcatgttattgaaacatgaaatttaatttggaattccgttacgctagttgattcatataatcaattgtttatccagttcaatattgatcaactaaaaatgactaggttcccattagtgcatataactaaattcttttgttagaaccaattgtaactaatcgttagtgcataagctttaacccctgcgagaccttttcccgtttctttctaaccataatgaatgcgatatcgaatgtcatacttgatgcatattcactttatttgttcccttgtatgatgtactgtttgtttcccaatttgaatggatgaatgtatgtatgcttgcaatcgcatagagaacgatccggtcgaagagcccgaggaactcgcaggagaagcccctgagcagcagtcgtttggtggaggcaagtgtcctttgacctatctctgtcctattcattctttaattcacctcccgctttacacctttatacctaaggattgactagcttttgttatccatgtccttgcttacctatttgggttggattattactgtttagctttatgctattgctcaaactctaatcaatgaacatgatgagattatctatgatacgctgttttcccttctcttattatgatgttgtacttgtggtcttcaagggggctcgagcggtttctcgagtgcctctccgtaagggcctgttctatggatgaccgcccgggaaaacagtgcaaccatgagggtggaatgggatgcccttagctgaataattagaggacccgggtgtagttcacttagccgtcgtgccgtcaatggggctcggtgtatgcggctcgctctgccaagtttgggttcgccccttggggaggagtgcggtgcatttaggtaacctaacgggtggctacagtcccagggaatctctgtaaaggctacgtagtgatgccctgctaggccacctaggtagtggttaatggggagtagctctctccgggcagaatgggaatcacgacttgtgggtaaagtgcacaacctctgcaaagtgttatgaaactgatatatcagccatgctcgcggttatgagcagccaagggagctccattgattagagatacttgatcagagatgtatggtttacaggtggtgacgaggatgatggttatgattatgcttatggtactggtaagtggtattctttccgtttggaaaggatacatcaggttaataacttgggttaatgctaaaacctagatttctactagtaaataataacctgaccaactaaaagcaactgcttgacttaactccacataaagctagtccactgcagccaaacgggacattttgctgagtatgttgatgtgtactcacccttgctttacacaccaaccctgcccaggttgtctgcattgcaaccactgcttaggtgaagatgaaatcgtggagcggacttccaggagttccaagagtatgatgagttctaggctt

SEQ ID NO: 3412 - DNA, 531 bp, Arabidopsis thaliana landsberg
agcttgcacggttagcaaatttatcatcgagacagttctatttataaatcactccaacaaaaaggatgtcggtagaagaacatattctccattaaggagaaaatatttagtctcggtctctccaaaatggagataaactgcggaaggattttgccattgaggaagaatgaggaaattgatatgacttggttaataaaatttgggttcaaggacaaaattcttattacaaaatggttttttgtttttttgttaattacgaaacggatgctattttcaaccttttatgaaagtaatagagacatggttcaacaacatctcttatggagaattagggagtcggagaaactcattggatattcacttgtaatatgaaatgtacatcacttgttttctctggcttctagaaatagtaaacaattaaaaggttgatcaagagtttgattaaacatgtaaaaacgcgataactgtattactgtatgatgtgagaatctcttgtaatggataatagatatagaagtaaaagagagagtg

SEQ ID NO: 3413 - DNA, 434 bp, Arabidopsis thaliana landsberg
aagaaggaacctgttccgggggtcccgttgctgagcttttatcctaataacacgtaaatctcttcttctggagattgtgctatatcttgatcttcctgacctcaaccaccttatcctttcacctccgccgtccttcctccgcataaaccgatactttggaccaaatgcctagcacctcccatttattgctaaccctgcaaaacaaccacgctaaaatctaatcgaaatactatgataattaacgatcgtaagataatttaaacacaccactttcgaaaaatgagagagtgatacgggctttggattatgatgctagtgtatttatacaatagcgtcaacttatgaggccacgatacatgatactaatagataatccactatggaccataagtactattattaataactaacactgtcaataatccaaaacttct

SEQ ID NO: 3414 - DNA, 3379 bp, Arabidopsis thaliana landsberg
actatttgtttttaaaattctaacttaacttttttcatttgtcttttcaatcggcaaatttttatatcctatataggatctcaaccggtctcccgcccgtggtgaagaaggccacggtgtcgcgggaacttcgtcaagccatcctccaaagtctgtactaactgaggttagttgtataatttcagtagtcaaagttttctaatgtcgatgttagttactaactgcttaccaatgaaaataatccatccaggacaatcttatcggaattgatgttgaacaaaatccatcgacacctggcatcccaatggacctcattcctgatgttgcaattaccgttccacctgtcggtccacccattccaactgcatcacaagttgaggttttgtactaacaaccttattcggtaaataatcctgtaacggataaagaattaaatattttgtaaaagacttctgaatattttcctatgcattcgtcacagccggaaactagtgttaaagtttcgttttaattttttcagaaagcgattaatacaactgttagcaccaaaactctcccgagccattcggtccctttaaaggtttttttttgttcccctttaagttcgtatttgatatcattcttatgggctaacttttgtttagctagtaagagaagctttatccgcaaatgatagtaacttggattaaattgttttttgttcagggtgcggacgaggcatctggtcgttatactatgctaccaaccacactggtaactattttgcgaacttagttttcgcaaatctgacaattaaacacatcttgacttgtcatttcccattttattacctcatctcacatgtatcttttgttttcaaaatatataagaatgatgaggtcaatcaggattcagatgaggtaagttgaaatttttacacgtttttattagtgtatttccttatttgcatccgctttaatttgtttcttcaattattcctaggatttttctactccgcccccggctctggggagaaattaacagctgggaaagatgtagccgtatttgatgttgatgttaaccaaggaagaaggagcagaagacccaggacattgtcaagcaaattagatgggcggttccacttcgacaagaaaaccaagctgcttgttggtcatccatctcctctgataagcgccggagaggtggttgcagatccagaagaacgctaccaaaggtcgctcttgaagctcaagcggaagaggtaattaacttagtcggtaattcagttatatgataataaatgtatttaccgttactcacatccttgcgcagttctatcagcattgttggggaagtggccctttcaaacaaagagattttgacatcattaagcggaagaaacatttcaccagcaaagttatggatgctctcatcaggttctgtaggcatctactaaggacagacgacatagatggcgagaagctgcgggttgatctgttgggctcgaaattcgtctcacaactgactagactttttacaaagtttaccaaaacaagcccgcccgaggatttcgtattccctgcagcagttgttgaccttcttatgggggtaggtgagtctgaccacgtccgattgtttgcagaggctgattgtgtatatatgccattcaactttgacaaaaaacattgggtggcgttgtgtgttgatctcaagagtcataaaatcactattcttgattcgaacattcagcttcgacgtgactcatcgttgtttgcggaattgcagccattggcagccatgctcccttacctcttcaagcaggccaattcgtctggtggtcctatcttgctgcaacctttcccgctagatcgtcctcacgacatcccccaggtttcttccccgtttgattccggtgtgttttcagttttcctaattcatgctcatgctgccggaggggttgaggaatgcctggaatttgatgttgccgctcttgaccaagaagtgaaaagctcgtctcgactataatattgtccggtgttgcatcctaatttagttattagccctctaatattattgctcataacatgtgtgtgataaccatcgcggtgtgatacttttgaactcattgcctgtttttttatttattctaggttgtgttaaccgtcgagttatggtgtgtatgggttttttgaatatgattattaaacattaaattttttgttagtctcatttagatctaattagtcggtatttattttgctttgccatttgtgttcatacggttaaagtctttatttgtcgatccgttaacgtatatgttaacttgtaacccgtaaaagttattttgaaattttttacgttttgttaaccgtcggtttatgtggtgcatggttttgaataatatgataattaaacatttaaccttttcttattcccatatttgtctaattagtcgataattgttttcctttcacatgttgtgtcccaaatgttaatggctcatttgtcaatacgttatcgtatatgttagcatttaacccgtagtatattggtttcgtaattgatgtcaatggagttttattccttgtttgggtatcggcttatattagcccctaaaccttttattatcaaaaatgcattattagatactaagtcatcgtcatatgctttttctgatttggccaattccagagtatcaaaacattcaaatcgtatttgcttaagatttgggatttatcttctggagttaacataaatgttaccatttatgtcgtcgcgtgttccttgttttgagttgtttcggtaacacacaaactattactgtggttaggtaacaatttcaatgttgttcgttaatattttaataatctattaactttataattctattacagttgttcggatttaatttcttaatgtctgtccgctctctaatgtctgtcatctctcaagtattggttaacattaatattaccccatatgtcttcgtgtgttcttttttcgttgttgctataaccaataatctattacagatattagataacaattgctaagttattcgttaatatatagcgtatctgccaactttgagaattaattcctaaatgtctggcatctataaaacataacttttaaagtgcaaccaacctgctattaatactaataaataacaatttattagtttcttgctaacataaaagttagcaatatagcctttgtattattgttatcgttcaatataagttgtatcggggaatgtcaatatgtgttgctggtttggtaacaatttattagttattcgttaatatatttcaatgacttacctctctaaaatctaacttataaagcttattgggtttacattttgctaagatattagttatcggtgtaggttacaaac

SEQ ID NO: 3415 - DNA, 3564 bp, Arabidopsis thaliana landsberg
  unsure (1)..(3564): unsure at all n locations
ttctccgatgatgaaatcctctttgcaaacggcgcagagtaaaacggaatctggatctgaatcatcggtggaacagagcaaagaagacgagatctgaatcgtggggatcgaatcgatatctgaagatttcaataacgaagaagaagatgaagacgaggaagaagaagacgatcctgaattatcggaagcgagatgacgaagaagacggtgaaggtaaggactatcgaggaggaaattatcatcggaattaacagctggatcaacgaaacaccaatcttcttcgtcatcttcatcatcgttttctccgtcttgttcttcaaaatcaccgatggtaacgtcaaagagattagaagaagaagaatcgtgatccatacgttcgaggaaatcgacacggcattggggacataacagaggagaggaatcggaatcggaatcggaggaggagaggagggataaactcatatcgcattcatgacaccagtaagttcgtcgttcaggctcgccgtgcacggtggttgctgtggtggtggaagacgacattgagaagtggtggtggtggttgtgagagaaagaaagagaaaatgtgaaagaaggaaaaaaggaaaggagacacaaaagttagtggttgtggttgagtactagtgataatgggtttatgattggtttcaaagcctttcaaggcccttttttaatatataaaagttaaaatggattaaagttggtttataaagggcctaccattttacttggctttattcggaaggtttggtagtgggtctctctattctttgaagtttattacaagtctttgcacttactaattggactttgctagtgataatattgtttgattataataagtatgcatatgtgtgaatgataactactttgctatacctctattagatcaaaaaaatcacagatttgttcgtttgacaactgcaacaagtaatcaaattatatacaacattttctattttgttcgttttctagcggtcgctcttaattaccatattttaaaacgtaatctttttttctatcattgatcatcgtgatattcaaacgaacaacgttggatgtagtcaccaagtaattgccaaacatcgaatctgcgatactatataagttatatacggtacatttgtttattgtaatctcgtatgatgtattctaatatttgatatatgagggcagttgacaaacaaatgtatagcaaagtagtcacatttaaatatctaataacgtgtaaaaacatcaaaagtcgttttggtcgagtggttaaggcgtgtgcctgctaagtacatggggtttcccgcgagagttcgaatctgtcaggcgacgtatttatttttttagtggcattttaaatgttgatgctgcaacaacgtgccttctcgtgtaagcaagcaataaaataaggaaagtgagaaaatcacaatcataaagatttgagcttttaattgtttgttttcttatctaatgaaagtatgggcgttacaagcgtttagtagtagattccagttgcctgcaaaaagattacaactttttaaaagaatctctgacaaattgctatcaagattctatccattaactgatcccttgcaaacaaaattccaaaagtcacccataaaagccataaccaaatctggaaaatgaaaccgacatgaccgcatgatttctcagactatcctgcctctctcattcactctctgatcacttcaatttccaatattttataatactattttttcaaggtaaaagaaaaggtcttatgttcatagaatgactcacataatgacgttggaagaaaggtattagttagggttagtggagagagtgctcaatatgaaacaagtttttctctgtcttctttactccttctttttccctcctttgggggaaaaattgttgcttttgaggtttcttatagatcaatctctcatcacaagggctttcatttgaagttgattctgggtatgtgaaagctccttcctttgatttttactccttcatgggtttgaaaatttccccttcctctgttttctaggtctgaaagttcctatttttttcctgatttagggtttgatagctcaattttcatctcttttgtttctgattagctcaattagatcttattgaggagtttgataatttattgctaggggtttcccaggtccagattgattaaaaatcctcactttattccggggaaaatttcgaagcggttgagaaaatgaccggaggaagtgaggaggatccattcacaaaacccattggaagatggtctgtcttcttctatggagtagggcatatgcttaatgacattactgcttcttgttggttcacttacctcctcctattcttgacccaaattggtctctcccctaggtgcaattttatctaaattttcatataattctgacccttgatatgtaataattcaaccataatcaagttttcttcttctgtagagatgcagccattgttatgctctctggccaagttgctgatgcatttgctactatcttcactggtgaattggtactctacttctctgtttctgatttagtctttagcttgttgtttcttactagtggtgctaattcagtttgaggtagatgaatatggtcttctgttatggcagattgataggtttggacatttcaagatttggcatgctgcaggatcattactggttgcaatctcgttttcctccgtttttggaggttgtctgccttgttcgatcctccataacgactctttaacacttgaaaccttctcctacagtatgtttgcagctatatttaacattggatgggctgctactcaagtttctcacatgtaaaacaatctttctttcttttttcatttgatcttccctttagattaatctcaaagtttaatcagtgagatgttcattttttgcataatctttgtgttctttagggctatggttaattgcattacattgaattcaacaagcagagtagcactaacaagctcccgtaacgcgtttagcatggttagctctttccctttagtcttatttaggctctttaaaatgcctctttaggtttatatgtaacatttccatcgaccgtttattcaggttgctaatttaggcttatacgctattgctttagttgtatttggtgttagcgaggccgtgacaaaagaaaataccgaatctcaggtttgtgcttctattgacttgattatggtaatgccttttgatatatgattctaagtctgcctaagtctacagtatcgttggattgcttattcatctatcaccgttggctgctgctttgtggtcatatttcttatggggacaaaggaaccaaggtaatgcgcacttttctttgaaattttaccgacgtttcatgcatgatagatgatatttttattgaatctgagttgctttaatttgtttacaaaggctgagggtaaatctaagagaaactacccgatcaagaataccatggtcttattggttccgtaacattctatactatcaagtngctatggcatatctcctgactcgactagtattgaatgtttcac

SEQ ID NO: 3416 - DNA, 434 bp, Arabidopsis thaliana landsberg
gaagccccaagagaaagaccgagaagagagtgacaatggggaaatgtatgtagccattaaaagccgtgagccttagacaaggacgatacgccggtaaaaaggcggagatcgagaaatccttcgatgacgggaccgttgagaagaagtacggtcactgtctcgtcgccggattgaagaagtacccaagcaaagtcattcgcaaggattcggcaaagaagacggctaagaaatcgcgcgtgaaatgcttcttcaaggtcatcaatgaccagcacgtgatgcctacgcgctacactcttgatttggatctgaagaacgttggctgcgccgacgcgatctcgtccaaggataagaaagtgacggctcttaaggaagcgaaggcgaaggttgaagagagggttaagactggcaagaacagatgggtctgcaccaagctt

SEQ ID NO: 3417 - DNA, 443 bp, Arabidopsis thaliana landsberg
gagaggtaaggctatttcacatgtgatgttccttttgtcaaatcttcaaatcccattgtcttattctcgattccagatggaagagcggctaagtgatgaatgaaaactctttttgatcttcccatattatgaaaattgagctgagaatttgctgcctagggatcaagacaaggaaaaacagagctattcatcatgtcttactataatttcgcatctcataatagctttacagttgcatactctatcttctttaaccatcgtctttctcattgaacacaaataccctccactctttcactagcacatagcgagtttatgcatccctattctatatcattttctagagtctgatccttgttcctacttgtagccattatttctccaattcacctcttagtaaggtaatgtccatctgaaatgtcaacacataccggagcatgaat

SEQ ID NO: 3418 - DNA, 986 bp, Arabidopsis thaliana landsberg
tagtacaataatggtcatgataaagccagatcaacaagtacgacactgtttataggaaaaaatgtcactaaaagcctcaatttaaatcctcatctctcgaaataaaataaatatcaaatttctgttgattttctaaagaaatattcaacttttgttgattttcgagataaataccaaagtttcgttgacctgaccatattaagcatgacattaagtagattaacagaccatgttattataatttattgtgtgttaatagactcgttaattgaaaacgacaatgttccctctatcaataaaacgtcgtcgttttgtcatgacggctcaatgaaaacctagtttcaaattataaggggatttaaaattaggggttttgctcgattaaggatcttatattgaatttgggaatttagttcagtcattacaataaaacgatgtcgctctgttgttggaaacgataacgttttgaattaacaagtctctgttaacaaaaattacttttttaacgggatctattaatctacttaacagaaagcctaatatcaccatgtcaacataaattgaatatttatttagaaattaaacataaatttgatatttatttcgtttagaatgttttcaataaattgaggattttatgtttttcacgctgccactttgataggtaacaacttgcggtatcaaaagctagcatccgaaattctttctcatataccggttgaaaaaatcgtcatctgagttttactcagattcaacgatcaaagtattgaggacaaggaatgctgcattaatatcttaagatgtgtcttgcaaagttctaacaacaaatctttgagcaattcattaataatcttaacacaaaaacgaaactatcttcctaaatatccaacatttttttcatgcaatgataaataaacataagttgatagtaacttgaagctcgtcttcttgttttaccaagtgatcagccttttggacactgatca

SEQ ID NO: 3419 - DNA, 616 bp, Arabidopsis thaliana landsberg
gaggcgataatggatatatttatgcatcctcgcgactttgcatatctatgtgggtgtagatagtacaccaaaaaaactttgttctaggctcttcggaattcatgcatcttctaactaattttgtcgttataaatatggatgcgaatgaggatgataatgaaaacgagtataagaggagaattaactattaataatataatattacttttttagatgatatattaagaaaaaaacacaaagtctgagggaataatgtagagttagcaaaataaaacaacaatgataataagcaaagatatatcaaactctcgtttcctcatgcatgtgattgtgatatatactagttttttgagtacgacactagataaaattgttcatgttttagtgatactattaggaatatcatgcatcattaaatttgatatgtttgcaacccataagaagatacgaggatccacactggaggcctacaaatatatttaatatatctaagaaattttccactaaaccaaaatgtaaatttctagaacttccaatttttgtaacaaacaatgcttcatttacccgatttttattggggtaaaaacatcttgcacataaaagtagaattttacaa

SEQ ID NO: 3420 - DNA, 541 bp, Arabidopsis thaliana landsberg
gatacattgttcttgattatacagactaaatctctcaaacttccaactttcataactaataattctgcacttacccgatttctaatgggttaaaaacatctcgcacataaaagtggaattttacatagatatcatttaaaatttatctctgtttgacacattgtatcgcattatggcgactaaatctctcaaacttccaaccttcataacaaacaatgctgcacttatctgatttctaatagggtaaaaacatcttgcacataaaagtagaattttacatagatattttttaaaattcatttccatttgacacattatatcgcattatggcgactagtttttagcatgtaacttttacaaagtgttgaaaatgaatataactcactatttaaaaaaaacaatatataacttactataccaaaactaaattttattcaactaacatgttgtatatagtcaccgtaagtgaatacacattgtgctaaccagggagaaggatcagatcagacttatcttctctaaataaacctcatgagtcaat

SEQ ID NO: 3421 - DNA, 561 bp, Arabidopsis thaliana landsberg
ctgaggtgcttgatgaggatgagattggtggtgacgaggataataatgagattgttgagtctgaggataagaagaggaagaagaggaagaaggaggtaagtgaagttgcagagagtgagaagccgatgaagaaagctgccaaagggaagttgaaacctgatgttgagaaaccgatgaagaaagctgccaaagggaagtcgaaacccgatgttgagaaacctatgcagaaagctgcggtcaaggggaaagttaaaccagatgttgtgaagctggagaagagcaaggacggcttaaaggcgaaaaagacaacaatggttgcgaaagacgaatctggtggtggattgaagccgaagagaaagagtgtgcttaggaaatgaggcagaggaaggtcttgagtgtttgcttttgagtatgatttatgttttattttctatcgtagttcttattacatttttgagccatttcatatcttgtactacttttatgaaacatcgaactggtgaatgtgggtttgatggttttgtggaggaaacatactactgttcaccttttactttttaa

SEQ ID NO: 3422 - DNA, 2010 bp, Arabidopsis thaliana landsberg
agatggagagagacttctctcctctctgtaaagcaatctctgcatcattaacgcgttgagtagcctcaagctcaaatgctacagcttgttcagccaatttcataatattggcaacatcctcctcggctttcaacgaactgatctgtattgtctcagcgaactcattcaacttgtccacttccttttgcagctcgtcttttttgctcagcaaagcactcagttgggactcacaattatctaaattaacttggcattctttaatatcatccttggcagctaaaagagcttcttctttatcattaacatctattgtttcctcagtctcttcaaacacatgtggaatatcattccctgccccagcttcaagtgattccactataacctgaagcctagcttcagccagagacagggccatagtagccgtttgaacagcttctttagcaagagcctcctcataaacagtatctcgaatgacatcaagggttttgtttacgtcaagccaagcagtagcagcttcatccttgagtgctatggctctttctgagattctctgagccttttcctcaaacatggtactattgagcctagcaacttccaattctttaattgccttgtgtagtaactccttgagttcctccaaactatcagtgtcgttttccactctcgcatctttcaaatctgtagcttcagtttcatcactactttcggaagattccccgatccgatgattattactatcggcattacccagagattcatgaccctgacaacgtaacctaaatccaaaagggattcttttggcttggtggccattgccaagtattgattttgtagaatgcaaatgaccactacaaaaccttccagagaaacacgcattcatcaaattcaatgtaccactttgtgctacatttctcctcaatcgaaaacacgaatgcattttagaatccccagatgtaatgctgattcctttaggacttatcaatcgatttggaaagcagtaactcgcaccatctccaccatggaatggaatcggcctttgaaaagtagacgcatactccatatcggaaatcaaataaaaaaagtagccttactttattcctcgaaccttatatacaactcctgtgaagcaaaacgaaattccacacattcagacgaccaagataaaaaaaatcaacgacaagccacggacagatagagaggctaaccaatcatggaaagttgagtaagaatggaagaaaggtggaaacggaaaggagtggctctcgtcttcaattccgttcgtttcaaacagataattttggctcgtctcttcaaattttcccagtcaaacaactttctctgtctcctcctttttgagtttctcgccaaccagacatcattgctaaggccgtttttagatacttttacgaaaacaccctctctcacctaacgaaataatgaatgattcacatcacccgataaccacttggtttgatccggtatataagtagtttggtatctttgaaccgaacagatattacatcgaatatcatcatcaccatcggaaagcatatcataagcagcacacatagagtgaaaaaacatcaattcttgcctttttttcgtgtgtaataataaatgtataacgaatgaattaaaaaaataacaaaaaaattcatgtcttcatatggaaacaactcattacaaatgaaatcaaatctttcccccgcaacaacattcattcaatcattcactcaaaaacactcaggtaagagatattcaagactctgaaacgccattctcttccttggcctccacggcgacgtcttcggtaggttccggtggaagagtgttgcctgaggctgtgcgacggtgattggcggcttggaggacgtgagcgtagtttcctttctccatgaagagttggttaaagtgatcccggcaatagagaacgctatctaaggaagcgtagaaagagtgagtcagcgtacacccaccgtgagcgcaccgggaacatgtgtgtaaaaccat

SEQ ID NO: 3423 - DNA, 2230 bp, Arabidopsis thaliana landsberg
gccttcctaccaagcccataacaggttcgatacccccattgtgagagtacacgcctctgctaatgaatgttaacagcttaagttatatgattctgaaagttcttttagatcctgggccttaattttgtcactacggctttggcaaagtacatgtctagaacagtttgatgaattttgtgatggtggtttgcaggcaattgataaaagcatgattccaaagaaaatgtgagttcttttgttttcaaatctctcctccagatcaagatttttgttttccttaagaataatcaaagagctaagtagggaggagttgatatgttgcgtttttaatgtcttaggtctcttcgttttgagtcatttaacatgtcgtagtccgtgttttgcgtcttttgggttgtgccttctgtattttgcctgttttaggtaattgtgacgggactggatggttttgagctttttggagtagagaaagggcgagaaaatctgaagcagggagaagactgtgtagaccaatcggtccagtagagggtgatgatccattttggctttcaacagacggtcaaaaatggttgaccgatcgattaaaatctggaccgatcggtctgatttcctaacgcaggatttcggttttccttaactggatttattttcttttttctgtaattgggtattaaaactccaaacacctaattttgtttttacccttctttttctacaactttttgagagcttttctttgtaagcaactttgggagaaggatccatcctctttgacactttggaaaagatttctaatctttttttcttttatatttcattaatctattatatcttttcaactctttgtgttgtttattttgcttagagtgagtaatcacttaattgggttttgggttctaagtaggggattcaatgaattgatcgtttgattattgtttggagttctttatctttaagttctttgattcacatgttcttaatgtttgaataggttgtatcaccctgttttagagtctaggtttttctatgcatcaaaagtgtttgatagaatgcctaaaccaatgtgaattgagcatttaatttctagccaacaaatgttgacgttagaatgcattctgaacctaatgaacctaatcctaatgtaaatttgactaggaaattacaaatgaaagtttagtagtgaagcagtccaatttagtgattaataacttgattgagaattaggctaaacttgtgttcatgttcgagaatggttctttatgttgaatttcctgtctaatatttccattaatcatggatctctgaaataccctatggccgattgctttttatcatataagtttaatcgtttattttcttgcattttaatttataactctgaatactaaacaaacaatctctttagctttagctaagaacgagtcttgaaaatccttagagtatcttttgtccttgtggatcgacctcgaatatactatctaggggttaagtgtattcagtaattactcaagcaatcagacatcgtgaatgaagaagatcagagctccttcctgagcatcgcgctttttgtcattcacatagtaaatcctaacagaagccataaactgccgcactagctcaggatacaaatcgtactgcctaaaaccaatggttcccacacctatgtcatctagcaatcctaaaatagttttttctatctgcaaacgttgcatcaaactgaaatccgtaacacgagttggcgaaatttccacattccaggcattgtaaaacatagtatcataatcatccaaatctggagaaaaaggtgattgatatagtcaccttttgtgaattctctgttgatatccttatcccaaactctttgggaagcaatcctctcattaggcaattttggtcatggaaataaaaaaataggaggttgaggagctgcagccgagtattctggtggtggaggacgagcgccggctgtggtggagttgctcctacgaggatgagcgcggaggaggaagatgggccgacgctcttccttgccttctttttctatccatccatattgcagatcgaagaaatggagacttggaggaggtagaggatgaaaatctaatagatttagagcctgaaatcacaagaaatgatgaagaatcagagattctagagaaaatttagtgagttcggcggtttggagataagtgaaatgaagaagatgaagttttaggttaaattgacttac

SEQ ID NO: 3424 - DNA, 378 bp, Arabidopsis thaliana landsberg
agaagggttctaagagacaacattcaaggaatcacaaagccagcgattcgtcgtcttgctcgtataggaggtgtgaagagaatcagtggattgatctatgaagaaacgagaggtgtgttgaagatttttctggagaatgtgattagagatgctgttacttacactgagcatgcgaggaggaagacggtgactgctatggatgttgtttatgccttgaagagacaaggaagaactctatatggatttggtggttgatcaatttgagatctgggttttctggtgaatgatgatgatttaagtcttgcgatcaagaaagtccagaaattgggtcatatggagcgtcggcggtttgcatcttggaagccgcagcaatgagct

SEQ ID NO: 3425 - DNA, 3872 bp, Arabidopsis thaliana landsberg
  unsure (1)..(3872): unsure at all n locations
gagcataaggatcccttaatactgggaagaccctttttagcatcagtgggagcagtgatagatgtcagggaagggaaaataagtctcaaccttggaaagcatatcaagttgcagtttggcatcaacaaaactccacaagggtcaaccgaagatggaagaacctctggaaatgatagagcgatctcaggagaaggatgtgagactgaaagagtgaaagaacttagaaagaggtctgataagcagaatgaaactatagagaagctagccaacaccattgaggaacttaggagtaagctgaatcagatgcagaaggaagctcaacctaaaggcgggattaacactatcccgagaaaagaattcacttcaagatggtctcaagatacagattatcctccagaagagaaggaagcctattttgaagaaagggggattgagtattctgctgcagacctctccagggaggacgctgaatatgatgatggtatcagagaggattatgctgaccctctctacagttcattttcttcttgataagtgtgaggagtcaagctagagacttaaaacaagctcacttgggaggaagtcccatgactatccttgtaaataatttttaccttcttgatatttttgatttgttttagttgtgtttgtggttttcagagacaagagaacaacgcggagatagagtaaaaatttaaaacttttactctacagaagacctggagatcgagtgtacagcccgttggagtacaaaattttgaaaatcttctgttgcacctgagaccttgcactcgtgtacattggtcgagtatatgtgatgtttaaaacccaaaaaattttaaatcatcatttcactcgaccaacagaagctacagagacttgcagaaatttcctacagtttatagtagattttctgcaaagaaattttctcaatcaacagtgtgtggaccacgcgctgaggataagctggagagagaatctaaaactcaacctagaccactcattttgaagcgctactcgaccactccaaatccactcgaccttccacttttcatttcaccgccgacactctaatctccctacaccacaaatcgccgccgaaagagccactcgaccactccctcgcgccgtcaccagcccatccactccgtcaaccgaccaaaccacttcactcgattccttccatatactcgaccaattcatccgcatcaaccgtcatctctttcaaaagaaaccgatcgacctcgcttcctggtctcgtagaggcactcgaccgacgccgtcctaatcgacttcaagaaatcactcgacctcctgaaagcactcgacccctgcaatattatactcggcttcttgttcgtgaacacagtagagccttccaacttcagagaagctactcgaccactagctttcacgattaactttatctctacgattcactcgacccactgaagcaccacaactcgacctctgagaagatactcgattcatttcatctaagctcaggaacagctcaggttactcgagtacggaattgtactcgaccttttcaatctgtttcattgcctattgacaataattttgcttcattgctatctttgagactaacctattgacatttgagctttgagttctaaatccctacaggagaatcatgagcaattacagtggcagttcttctgttgatcctgactacaacatggatgagacagaatcgtcatcttcaaggccagagagagaacagagagaatacgaaagcttcagaaggaaagctgagatatcccgaggaaagagagcgatgacagagaggtgtgagcttatagacgaagatctggaagacgagtacatgcctgaacagactcgcagagctaccaaacttctgcacaagcccgacatattgcctgctgaggaatatgttaggcttttcaagctgaatgagttctgtagcacgaggtatccttgctcgacctcacttgcacaactcggattgttggaagatgttcaacacctgtaccaaagttgtcatctggacactctgatggcttatccgtatgtagcatatgaagatgagacaatacaattcctctccacactgcaagtagagctttaccaaggtatgacctctgatgagttggattgtgaaggattgggattcttgcgattttctgtgtatggtcatgagtataggctatcaatcaagtgattcgaaggattgtttggtttcccaagtggaacgggtactaagcccaagtatgacagagaagagttgaaagacttatggatcaccattggcagctctgtaccgctaaattcttctagatccaagagcactcagatacgcactccggtcatcaggtacttccagcgttctatagccaatgttctctactccctagagataacagggactgttaccaattctgatatggaaatgattgctatggctctcaaaggcactcttcaccaaaccaagaatggtatgtctcttcaaggtgaaaccaatgacacacctctctttgtacttcttctgatccacatgtgtggataaaagagatgggctgttagcaataaccacaagagagcacgaggcgctctttgcataggaggtgttgtgacaccgattccggtcgcttgtagagtcccaatcacatctgatggacttgagccacgggcaatggatatcgagcatctacatcactgagagttcctggagtttgcaatggttggcgacaggcaccgtttcaagtttgagcattctatagataagaaagccaacatccttcttcccagtcttgaggttacacgcataatagagggagataacattgattttaagcctgagcttgggaacctctactacgaggacgctcagccattggatgaggatgttcttatagaaaaagctacggaggatgggatggatgaagacagagaagtggagtttgaaactagcatgtatcattttagtgagctcacatgaacaacagcaagctgcagaagtggtgcaagaaacaggacaagttactagccaagtgcttaagggctatcaagtttctgaaggacaagctcagctgctcctcttccactacagctattccgcaaggacatctccctcaggacatgccttcgaggagatatgacacgcccgagccaagtcgccgcaggcctgagcctagagagcaggagattccgcatgtccctgcgaggcattcatcattcgagcctcgtgaatctgggaggaagaggaggaccacactcactcgatctagcagtaggagcggacgacttctgcagtctcgtactttacgcgaccgcgatgctggccgcagtagaaggagagaggtcgagtttcctcagagcggtgctggccgccacagagctgatgaggtcgagtacccacctgctggagctgatacagaacaaggaggttcgtctatggcctgggagcaatcgcaggcagccattgacgagcaactacgttcattcttcgactgaggtaagcgcctcacttcaccattgtactataccgtatgttgtgatttgtttcttcattttttgttaatgtgattggatttgtcttgagtactctcttccaagtttattcacacagtggactgtgtgatttaagtttaggggagggctcaggaagtgtgtgttgcattgtgtataattttgagtctgcattcatctaaggcatagaaaaaccgaaaaaaaattaaaaaatttcagaaaatgatttcacaaaaaaagagtgttcatgtagttgcatcacatttaggatcgagtctacagtgtttcatttaggnttgttgcatatgcaaagggantaatgatgagatagccttgtaagcattttgattcaccggatggac

SEQ ID NO: 3426 - DNA, 467 bp, Arabidopsis thaliana landsberg
tttttctagtcgacattatattgtttttgctttgctttggtttcatttttgcagtaatgacatggttaatccagatctcttaatcattataaataattttatttaggtacctgatctcgttattaaccatgtcaatcggtctctttactcctcttgaggagtatatatgctcctcttttaagaattcaatcctctgtataataatttattctttttatttttgatgacctatatttggaaccaaagttgtttatcacgttctttaatgtgttctagacaataatatatcatccgccagagacatatttttggagcattctttagctgggatatgacattttttatgaactcgctaaattcatatttatttgtatgaggatcaataattttataaaatttttgttcatcagctgtttgcatttggttcggaatttattctgaatagtgatcatttttaacatttgaac

SEQ ID NO: 3427 - DNA, 3349 bp, Arabidopsis thaliana landsberg
ttatggcttgtaaacaagtccccttattcttttggtcgatatctatgccccatttgaaggcctatttttcttttccacggtttgaaatcctattttacatttacatgtgacatcttcttattggatcatccatatcacaggctgtgataaacaatggaggatcatcctttcatatcttttcttttctcaagcaccattttgggtaacacaaaaattccaatataaagaattccaatttcttactatcattgcaagaatgaagattttttagctagataacctaattttccatgacaaattagctagatagcctaattccatgtgaaaggtttggttgtcattggtgagatgacaaaaaatatatataactataatgtaacggtaatgttaaactattgttaaaaatagtaaaaagccctaaatgaaacatatgagttttatttaaaaaattcataataaagctatagttaaaacttatgataaatgaaaatggagtattacaataatattcttcatagattgaaaaaatataaaaaaagataaagataaagttgaagggaattgttaagagttattcttgaaagtagaagaagcgtgtggattggacatgggcttaaagacacacaaattctttctacgaattttgttaatttttgttatatttccttcttcactattccgcttagagcacaacaccacgatgacgaccaaggccatggagagaggatttaaggtttgtctctctctctgctatttcttccctttttggtagaaatttgaaaaaaaatcaatgggaaaatgctgatgaaatgcgaaatatgctcaaacgtgaagctgatactgggttctcaatccatggcgagaaagaggattttggctgaaatgggatatgattacactatcgtggtatgttcaaattgtgattattattgttttgctatggatgttcataacataaattgagtttggctggggattatgttttttttaagactgcagacattgatgagaaagctattaggacagagaagcctgaagatttggttgtggctcttgctgaagccaaggtacataataatactctagggttttgtaatcttgattcaatgtcttttcaatttatgatgatggtaattgttttgactaggcaaatgagattatatcgaaattgggaggtgagagccagtttgcaaaagatcctcaaccaactcttttgattactgcagacactgtatgctttgatgcctcaacactttttgattagaatgttaactttttggtatctttagctgatgttatggtgatggagtttattaggttgttgtgtacaaaggtgttattagagaaaaaccaaccactaaagaagaagctcgtgaatttatcaaaggtttcgtacaagttaactatgtacatgtgttctatgatactataagccacttgtaaggctgatcatggttgtgtttaagcgttttgtttgtaatctacacaggctattccggttcacacggaggagttgtgggatctgttcttgttagaaacttgaaaactggagttaaaaaaggaggatgggacaaagctgaggtacgcagatataaacttttctttctgttttgtcaaattttcttgtggattgaacaatttgtggtgatgtgaatgttgtggtgatgcaggtttatttccatgagataccagaacaagtcattgacgatcttgtaaaacttctaaaaccactcttcttcttactatcgatctcttgaacttagtttgttttgacatataaagtttgtgtgttctattcaatcttcagattgatgatgcaataacttataaggttgctggaggtttaacactggagcatcccctcatttcaccctttatcgattctgtggttagttcccttaatacaaaaagctcgcgtctttgatctacacttgtttgattagttttgtttcagcatatcattaagatagatgttcaaagagatgtttatatgataacactccactaaaaagagttttgttgtaatgttattgtaggtgggaggggttgatacagtcatgggacttcctaaagaactcacagcaaaattcataaacgatgtgttgttgtagctcaagtccctttttgattatgtaggaatacttttgaatctctctaatcaatcatttattttgtaatttggttaaagacagatttatcgtatcatgtttttaagtagtgatgatgttttcagatttcaaactctcataaagcaattgaaatgtgtcaaagtttttgcagtttaaacaagtttcagacaaatgtggatttttaatgtctgaattacgatttgggccaattcacaatgttaaaggcccatatattggtccaatgactaaggggtaaaactcgcagggttttggagagataccattgaggtttctcttgtccttgttcctcttctaaaacctaaccgccgtttaaaccaccttcggcaccgccattgatatactctactgttttcgtcaaatcgaaggaaccctaatttcgagggcactgaggaagctcaatcaatggctacggtaaaggattcggggtttgaagcccttgagaagcttaaggcaacagagccaccagtttttctagcgccaagttcaatatctgaggatgctcgctctgcatctcagtatctattcatgaagttgaagccgcataaccctaaatgtccatttgatcagctctcttctgatgggtttgatgcggagcagatttggcagcaaattgatatgcaatctcaacctttgttgactagcttgcggcaggaagtcaagagatttgctaaaaaccctgaagagattcgtaaacttgggaagttggcccttaaggtttctcatgaagatgatgttgatgagatggatatggatggttttgactcggatgatgttgatgatgaggataaagagatagaatctaatgacagcgaaggagaagatgaagaggaagaggaagaggacgaggaagaagaagaggaggaagaggaggaggaggaggaggagaaggatggagacaatgaaggaatagaggataagttcttcaagataaaagaattggaggaatttttagaggaaggtgaagcagaagagtatgggatagaccacaaaagcaaaaaaggagtggcacagagaaagaagcaaaatttgagcgatgatgaagacgaagaagatgatgatgatgaagaagaagatgttgaggtaagcacatacctcagtgtttaagaaaagtggagtgagtgattacaattagctcagtttttctctcgaatgatcttttattgttcttgtcgtctagtttgatgcttatgctggtggtg

SEQ ID NO: 3428 - DNA, 2111 bp, Arabidopsis thaliana landsberg
ctctaattatcgatacaagataacatcgttttgcccatggtagtagagaattataagatgacccgccttgactccaagctcgttcggagctaaccctcacctcctcagctttagccctaattttctgtccttcttcctcctcttccgccataatctttctcaccagagatgccacttcttcccttccgatgactttctctgacggtaactccgatgtacgaacggccacaccaatctcctcagtcaataacgtggcattcatccactgctccgcataaagaggccaagcgatgatcggaactcctttagtcaaactttccaaagccgaactccaaccgcagtgagacaagaacccaccgatcgatctatggctcaagatctcaacttgtggtgcccattgcgtaaccacaagccccacaccacgcgtgcggtccaagaaaccttcaggtagactggtactcacctgttcatcatcgctggagatcgccccgagatatgaagcgggcctacgtagaacccaaacgaacctttgaccacttaactctaaacccaaagcgagttccactgtttgctcaacagtcaaagttccaccgctccctaaacacacaaacaccactgacctttcccgttgcttgtctagccactcgaatatactatttggtttgtctacatgctcgttagtcctaacaataggcccaataggataaaccggtactttcatgactcggctcaattcttcgtcctctctaagcgcagcgagagtgtttccttgtaactcctcccaagtatttaccaaaacactatcgctcataggtacctctaagccagctcgtacacactctttatattgctggcccgaccggtctaacatcgtttccatcagctccttcggtccgaccggtttacaacccggtatcttcaaaggctccttaatatcaacatactcaccttccactaccgtatctaacaccggcaagtacaccatgactgccaagaaccacgcatgagttggaacgtaaacgtatttagccgtcatgcctacgtcatcggctacggacatcagttccgtacccaaaaagtcaacaatcatgaccgttggttttcgtttcattaatttcacggcatctcgtaccgcgggcttcatggctcgcatcttcaccaccatcttagtgaaaattgtagcatctggctccacgaggttgtctacatccaccgagggaatttccgtaatttgacagattgttctagccgcggctgcatgtatggcttcggtttctgtcggtgaagaggagccggaggtgaccgcgagaatggtgacgtggatgtttaggacggaggagagacggttgccgagctccaggatagggatgaggtgacccaagccagggctagccactagaagcgcgtgaggctggtccatgatcgatggtcgaccacttacttttctttatagctgctagtttctgtgtagcaaaatcattgtggatcggatttcggtataggccatttaacaagtgatatttattatcattcggtatagaccaaacgttatattaatgagaccttaaaaacctaaattttgtcctgacgcctaaatttgtagacaaggacaaaagacgaatctactcgtggcgatgtttcgcagataactccattgcatatactctgtcgtaacttccgttcacaagaacaatgaatgatgatgacatgtacatgtacatgtacaaatgtctttccatacatcggacacacttctccgggtgatcaccgtggcacacgaaataagaagttttaataagttatatagacaaatatatttaaggatttatcatatatatatatatatatatatatgtgtgtttttatgtggagctatatacttgtttttctcacccgaaaaaaatcctgaacaaaaaccacattaatattcaaatgacaaattcacgaatggttggttccatgagacgattgcatatcatcgtattgggatgttattgggctcgttcgtcaacttaattatttaggctttgttttatggtttaagctttgtataagtctttcactttccattgttaacattggatatcatatcttatattcaaatttgtgga

SEQ ID NO: 3429 - DNA, 777 bp, Arabidopsis thaliana landsberg
tgagttccgagtcgaataggtttgttgcgtggactgctcgattagaccgtagagaaacatttcctctgagtcgttctcgttgaagggaagagagtaattgttagaagaagaggatgagaaagaatctggagaagatccgatagaatattccggtgagaagccggagaatggggactgaattaaaaatggatccatgtagaaaaaatactctgtttcttgactactctgttttcggttagggatcgttagtggattgacatggtctatatatatagagaaaaaaatgagtatgtatatgcaaatgtccaaattagacttgagtttttactgtctcagtgaaagagaaatgtcatgtaataaaagggtgaaatgggaatttacgaaaaataatgttacactcaaatgaaaaactatgttgcttcgtcgaagattcgagcaaagacgttttgcatatttcttctcttcgtgtgatatttaatgttttcgtaatatatgaattgttttgtaccgtttaaactaatcttcttactgtcgtgaatcgtaattacgtgagactaatatgaaactgtatattatgtaattatcccagaattggtatgtatatttaggtatatattcttcaaatgtagaatgagcagtgtaggttaggtatatcatttcgtattatcatcacatgattcatcgaatttttgtcacttttgcatcatatcacattttttagtttaaatataatttatttttctttttctaatcgggtattgacaaaaaatgatctac

SEQ ID NO: 3430 - DNA, 1608 bp, Arabidopsis thaliana landsberg
attttggccccgcaaaaaccctaaacgttttcgagtttacagaaaatcaaatttgcccttgaagacttccctatttgcattattagtccctagacgtttttagggtctatatattgtttttagacctaagtttcttttatcaagtcttttaatcaagcttttgcaaaaccctattgtgagagacataagctattcatccattgttcttgagagattcattccagtttttaatacagtgagagatcccttctttccccttctctatttactgtgtttatgctttctatctcaattatgttgtttgcttcattcaatatgtctgagtagtctgcttgttaggaataaggtttctcattagggattcatatggtttagtagattgcccactttgctaggttatctgtagaattcttcatctctaattatgcctaatgctagatctagagtaattaactagatcttgaatctagacaatagatatgcccgccataggtatttgcagttgggtctattatttgatgagtctggtttataggtgtgtaataagaatcggcctatctactaagatgaacaattgaactcgttaagaatgcatatttaggttgatagtttctcggcttctccggttattattggctatagatatagggagttttgcggcacgcccaccagttattccataattagagtttgagtttaagaatggttcgagaacaacctagctttcattagatctactaaccaatagtttcctgagaataccctgttcctagctctttattaaatcgtttacaacacagtcaatctgctgtctttttactttgttctctttttttttttactgataccatgctagctgaatctcgacatttaactcattgtttgaacaaaagaactccgtgaattcgatcctaaaatactgcaattgatctcttatttgagagagtagttctaggtaatttgaaccatatctgacacttcaaggtatatttcaagtatttccgcttcaaggaagaattatgagttttcatgcaaaaaggagtagaagtcaaaaaaaatccgttttagaacagtttttgtgcctcagatgtttcacatccagccaaggtcttaccgaccttggcatgaaggtatcttggtgtcattgaaaatctcgaaaagtcaagattaatgtcgaagtcgaatcgaagcaatccatgaatccgttcagaagttatggcgcaaagagtaaagacatgtcctaaaatcggggttttgaaaatgttcaatttaaaaccgccggccaaggtgacttgaacccgggcgtcccctcgagtctttcaccaaccactaggacgcacaaccactccttcccttcctcttgccgtcgacttccagcaaccctaaaagcccagaagcttgacccatcacttactaataaacggaaatacgtttctaccatttgacctaatgaagacctataaatacaagtctaagggaaaccctagaagacacccacaaaaagaggcagcctcctgcgtctcccaccaccctaaaatcctcctcctcttgttcttcattagatctatctattttctcttcaatggtctattctctcaatgtaaagga

SEQ ID NO: 3431 - DNA, 659 bp, Arabidopsis thaliana landsberg
  unsure (1)..(659): unsure at all n locations
gtgcggggtttcagtgcgagcctgtgcgtgtgccgagcgggctcagcgacgccttgccggaggcctgcagcggaccgtggccatcgtcgcccaggtccagccggatgacaccgccgtcgccttgcgcatgcagctggaaattccccagcgccacgcgccgaccgccttcatccaccgcagcgtcctgccattgcgccgccgcctccagccgcatcggccagacgccttgcaggctggcgtccacgatatggacgtttagccgtccatgcaagcgatttccgcgcagccacgccgatccatccagcagcgccgcatcggcctgcaaccgtacgtcgctccagtcgacctcggtggcggaaagtcggtgcagcttgccgctgaacgccatgcccggcttctgcagcgccagccgcaagcgcacgtcgcccagcaacgcacgccgcgacaacgtccactgagcccgacccaactccatgccatcggccgacgacacgcgcccggcgtgcccctgccagaccagcccgccgacctgttccagccggaccccgtgcaggcgcgcgccaagcgcgggcaccgnccagcgcgccggcatgaaccacaccagcaaggccagcgcgagcaccagcacggccacgcccgtcaacgcgatacgcaagatc

SEQ ID NO: 3432 - DNA, 319 bp, Arabidopsis thaliana landsberg
gcacgggatcgttcgtgcgcggcttcaacgccagcatgtaacgccagctcagcggactcagcgatgcatgtcctgtggcctgcagcggccccgtgccagcatcgccaagctccagctgaatgactccgccattaccctgcgcgtgcaggtgaaagtttcccaacatcacgcgccgaccgttttcatccaccgacgcgttctgccattgcgcatccgcatccagctgcatcggccagatgccctgcacgcgagcgtccacgatatggacgtttagccgtccatgcatgctatttccgcctggcgccaaggaggccatgag

SEQ ID NO: 3433 - DNA, 3414 bp, Arabidopsis thaliana landsberg
attcggaagtatgttagtcagcacagttgtgactcttcattaaagaatgttagtcgtcgtcaagcatctacaaggacattaggaagattgataagtaatcattttgaaggaggaaagcttctcctcatacttaaacagctgatggaaatatttagaaaaaatcatggagttgggatcaattattcgaaggcttggagagttcaagaacatgcagcagaacttgcgaggggtttacctgatgatagttttgaggttttactgatgtggttcaacatggtacaagtgacgaatccaagttctatcacttttttcaaaaaagagttttctaataagtttaagtatgcgtttctggcttttgatgcatcaattagaggttataagttgatgagaaaagtcatatctattgatggtgcccatatgacatgaaagtttaaagggactttgcttgctgcctcagtttaggatgaaaattttaatttgtatcctattgcttttgcaatagttgattctaaaaatgatgcgtcatgggactggtttttgaagtgtttgcagaatataattcctgatgagaacaatttagtatttgtgtctgactgagctgcttctattgcaagcggacttccagagaattatccacttgctcatcatggactttgcacttttcatttgcaaaaaaacttggaaacctatttcagaggttcttcacttataccagtttactacgcggtttctagagtttacataaagacggaatttgattttttgttctgggaaatcactactagtgatagaaaatttgcacaatatctttgggaggtagatgttaggaaatggtcttggtatatccctatttttactgattttaactatgttttaggtataggttttagagtctaattattatttctacagtcttttctagtctttttcaggtctttacatgtttgggatgcatttggagattatggagcattctggagtaaaacaaacaacttaagctgcaaaagcaatccggagacaaaaatgcacgtaggtgtcgaacgacaccacccctggtgtcgagcgacaccaattcctgacggcaatttcgagacgcaatttattgatgttttaaagattttcaaattcggcctataactttcttctatgtttaatgaaggcccatcacgtgttttagacatataattaggtttttagggtcattgtttagacttaagctttgggggcgattccctttatctcttctgtactttgggagcaaaaccctgtggaactccctttggatctttcttactctattatcttcttgttttattcattgatttctattctaatcatgttgtttgttttattcatcatgcttgagtagttttcttgttaggtttagggtttctcattagagttatagatgatttagtagattgcccccttgctaggttatctgtaggaattcttcattttgattgttcttaatcctatttctagagtagctaactagaacttgattgaataattgaatatcaaagcaacgtttgaaaacatgataacagaaatgatgaaagacttagacgaaaattgaatatcaaatacttgaaagtgcaaaaatacaaagtcgcaagagaaacattgcggctatcaaagttgcgaaatgtaaaagcaagataaataacggatgccctagggaaaaccctaagaggcagtttatataagcgagaaatgaaacaaataaggaaactaaatatatagcgaatcttcacgtcatgatcctgcgaccgaatttatcattggcatctgacgggctgaaatgagtttccttgtgatcgagtatgtcattgatcaaactgggcttcaggggctccgccttgcgatcgagtgagatgtagtgaagtcgagattgaatggtctagcgaccctgtgatcgagtgtgatcgagtggatgtcatgaggtggtgatcgagtggttgcttcaacttctcttctcttcttcgttctcagcttgtttggttgagtgcagaacgagcagataggacttctggtgatcgagtggtgatcgagtggttctgatggggtgattccttcgggcttcgcgcttgagtgaaactgagctgctagcttctccggggttgcgatagagtgatatgcctggcagggccccgaggctgcgatagagtacttttgctgaaggcgtcattgggcattctgacttctcgttctgtttctcctctgtttgaactccaaaagcatccaaagtacctgaaaacaaccaaatatgcaatgcacatgcaatcctaacgcaaaaaattgtcctaagtatgtaaaacacactaaaacgactcctaatgagacgaaatgtggatgaaacaatgataaagtggtgaagaatgattgcctaaatcatgcaaattatagacatatcactggtgcatcatagatagttcgtgatcctaatggccatgtgttgctacatagcagaagatcttattctcaggtgctttctttatttgatgcaaaattaaagagttgggagtgggcttgagatagcatgtataagcatcatttagagaaagttacgtttggagcttcttcagtagacatcattcaagctattgctaaaccaaaagattggccagctatagaaggtcatatagctgagcttttaagttacacaaaaaataagcctcattggttcatcttgttggagccttcaagttgtaatagaggagctgcgaaaatagctaacagtgtgatacactacaacaaatatccacattcttatcacgagagaaacgctataaaatatcattaatagcgttttcataaacgctgtgttatgcccctgttatggtagaccctccatatacgatagcattttttccgtatgttatgatagaatattccaccatagcattagtaaaacgctttcatttattgacttataatagcgatatatataggctatgatttataatgtttataatgctataatattcagtgtcatgactcttattttatgcggttgttttaatctatttgcatttggtgaaacctgattagttttcaaaatatcaaatacatatataataataaacatccaaaaagtatacaccatttcataaatcaaaaatcaattcatacataacacaagtctcaatccaacacttaaactaatatcctaacttttatatactacttttgccaatgaaattattgatgagatcatgcaaaatccttacttcgttttctagatattggactcggttcttcaagtaagttagctcagcttcataggttgttgtagtctcttcctttatcttaggttttcggaaaacactgctaccttttctattaggttttccccaaagactgttgtcttcatctatctcactgtcctcaacgacaagattcataatatct

SEQ ID NO: 3434 - DNA, 3944 bp, Arabidopsis thaliana landsberg
taaagttggactgacacgaagaatgcattcatgatccacttccttgatgattcagtgacaaaattactgcgggagaagaactcttcgttttctcaagctccaacagaaggtttgaaggcagcttggatcagattcaaatcctattagagagaatgtccccaacatggtttccaagagacccaactcatcaatatcttctacagagggatagccatgccataccaggctcagcttgatgcagcgagctactgtaacttcatgacaagaactactagtgaagcattactcctcattaccaatgctttaactagtctttcgacatagaaagttgacattaaacgaagaatttcagctgagaaagccaccgcaagcaaagagactcctgtttcagcaatttctgctcctatccacgccacccccacccccctccaccctcatcaaagaccagaatggaatctatgcttgcgcagcttcttgcaggcctaacaaagctcgaaagcaaacatgattctatcttcagcaagattgacaatctacgctctcatacatccgagctctcacctacatcaacctctatcaatgcactcacactacgcagcggaaagctgctcaacccaatacttcagcgcgaatgttcagctcagacttcatcttttccaattgcagaaaaagactcaatgtcgatcgatacaccagggtgtcgatcgacaccaattattcttgacgactttgttttgcctttgtcgagtggaatctacaacttcgcggaggaggaggaaattattcctgatggtgtcgatcgtcacccaacccctgtcgatcgacacccagatcgttcagataatgtgcaaattccaactgaaaccaagtcagcaaatcggcgaattcctttccccaagagtcctaaaaagtcaaggcaagccttagatgatgtcagatgcaaggctatgattgataagctgattgttgagatgcctctagttgaagctattcatctttctcccacaataagaaggtatgttaagacaatggtcactaagaatttgacgaaagaatgtagtgttatgatgatttcagagcagggcagcgacaacattcaagaacaaattccaaaaaagctacctgatcctggaacttttgtacttagtgtcaccattaatcacgattccttcccaagagctttatgtgatctcgttctagtgtgaatctgatgcctcgttcagttcctatgcgtcgtgggtattccaatcttgagcctacctttatcactcttgtgttggcagatcgttctacccgaattccatatgaaattcttattgatgttccagtgataattggaaagagcatgattcttacagactttgtagtcttgccttatgagaaggaacctaaggatccattaatcctagggagatccttcttgcacacagctggagcaatcatagatgttcgacaagggaggatagggcagaatgttggcgaccttactatgcaattcgatatgaacactttggtcaagaaaccgatcatagaagggaaaacctttttgatagattctttcacttcatcagcttcagatagtatttcagagatcgaataagaagacccactagagcgagttttggtctctttcatagaggatagtgcagatttggactgcgaaacttcaacatatactaagctgctagatgagaccgaaaatgtgatgcaacttacagttgaagaagctcttccatctgtgacttcaacaccgactcctactttagattgggatccagcaaaggctcctaaaatcgaattgaaaccacttccaccagggctaaggtacgcttttcttggtgaaaattctacttatcctattattgtgaatgcttctcttaatcccgcagagctcaccttattgctaagaaagctgcgcaatcatcacaaagctcttggctattctcttgatgacattgcaggtatatctccagacgtatcatgcataggattcaccttgaggatgagtctaagtcttcagtcgaacataagagaaggctgaatccgaatctgaaagaagtggttaagaaagagattatgaaactgttggaagcagggattatctatccaatgttagatagcagttaggttagtccagttcatgtggttcctaagaagggaggtgttacagtagtcaagaatgagaaagacgagctgattcctactcggacaatcataggacatcggatgtgcatcgattacagaaagctgaatgctgctaccaggaaagaccatttccccttaccatttatcgatcagatgttggagaggttagcaaatcataagtactattgcttccttgatggatactcaagattctttcagatcccgaatcatccaaatgaccaggagaaatcgactttcacctgcccctatggtacatttgcttatcagagaatgcccttcggtctgtgtaatgctcctgcgacatttcagagaggtatgatgtctatcttcacagatatgatcgaggatatcatggaggttttcatggatggcttttcagtttatggatcatcatttgaggattgtttagagaatctctgcaaagtgttagcatgatgtgaggagaaacatctagttttgaattgggagaaatgtcacttcatggtacaggatggaatagttttaggacacaggatttctgagcatggtatagaagttgatagagctaagattgaggtcatgacaagtcttcaagcgccagataatgtcaaagcagtgaggagtttccttggacatgttggtttctataggagattcatcaaagactttagcagaatcgcaagaccattgactgctttactctgtaaggaagtcaaattcgagtttacacaggagtgtcatgatgcatttcaacagataaaacaggccttgatcagcgcaccaattgttcagccgccagattgggatttaccttttgaggtaatgtgtgatgcaagtgattttacagatagagctgttctaggacagaggaaggataaaaagcttcatgcaatctactatgcaagtagaactcttgatgatgctcaaaggaattatgcaactacagagaaggagttgttagctgtggtgtttgcttgcggaaaattcagatcttatctcgttggatccaaggttattgttcacacagataatgaacccttccgtatttaatgcaaaaaaaggatgataagacaagacttttgagatggattttgcttcttcagaaatttgacatcgaggttagagataagaaaggagttgagaatggtgtagcagatcatttatcacgcattatgatcgatgatgatgtccctataaacgatttcttgcctgaaaagaacatatacatgattgatacagctgaagaagatgactacaaacgtgataggttgcagaatcgagcttcagtgtcgattgacactcccattatgtcgatcgacactcacatttcagaggaagtagacattcgaagttgtgcgatggtgtcgatcgacaccactgcacctgtcgatcgacacccttctagatcgacaagaaattggtcaccaattgagaattgcactgtcacaacggtcgagaaggactatccatggtatgctaacagtgttaactacctagttatagatgtggaacctgataatttcacagattacaacaagaagagattcctaagagagattaggcgatattattgggatgaaccttatctctataagcattgttctgatggagtttataggagatgcattgctgcaacagaggtacctgatactatcacattgtcaaagctctagctatggtggtcattttgcaacctttaaaacagtatccaacgttcttcaagcacgtttttggtggcctacaatgtttcgggatgctcagaagttcatatcgcaatgtgacccttgttagagaagggg

SEQ ID NO: 3435 - DNA, 729 bp, Arabidopsis thaliana landsberg
aatcactgtcggacatgtcattacttaccattttttgccattatgttagtttaaatttttaaattttaacaaatttatatactaagatatttatgaaaagtaaaaaaaaagatatggaaataagaaaaattatgaagagagatcaagaaacaatcgtacgaaagctcacaaattgaagtcctcaaagtaagaattcttatatatcatttgaacaacgaaaattgaaaattagaattgtatttttttcttttctttttaattgaaaatcctacatatatattaattgagattacaaaagtgggttatcatcttagtatctttttttgtcaaccaaaaagaaatttaagagtcatgtcattattgaatatctatgtggaatctcagattttttttaagtctttaaaataaatatgaccaattaagtttatttttttattatttaatattcgattatataatattaattatttaaaaatcattatattttgaatcacattttttgtttcaattggtaatcatgttcgagggaaactaatgaagaaactatattattactcttagtttctcaaaaagtttaccatttgagagcaaatgttttgacatgggatgcatttgaaacatgtcaaaataccagtccggtttcaaatgtttggttagatatttggcaaaagtctacaagaaattttagaaccttaaaaattggttgggtttttcctttttggcaaaacc

SEQ ID NO: 3436 - DNA, 2144 bp, Arabidopsis thaliana landsberg
cgtgattgtctgaatctctacgggaaagcttggtctcctttgacattgtattaccctaatctgaaacaaaacccagttcaaaatttatgaaatcgacacacgagaaatgataagtttagaaacttggaatccatagctaaagctaagaagctcgttgggtttaaaggctgaaatagatctcacctgtgtagtaaattgagcaacaaaatccaaaatttgtcgagcttctaaagagttcgctctctctctttctctctcactccctctctctttctagattcgcatgatttgagcagtgaagcaggacggagaaaggaatgtaaaagaaagaagatgaaatggacggctgagattgcatctttatgttttgtactttgaggcgctgttcgaatttgaatttggaaagggctttctcacgtaataaagtaggcttgtagaggttagtttcgtaaatgagaaacctattttcttttattttttcaaaaatattcaaacggctaagacattgaaaaaagcagtagagactagagagggtccattttaattcgaattatctcgcctcgtgattaaaatatatatttcctagcggcttatgtcaaagttcgagataaaataaaaaaaatagactaattttgcgtaggatttggtttggtttgggtctgttactataagaatgaaataaagagactatacaatatacaccgtaacaagtatatcctttaattttgtcatatgacaattattgttcttctttttctttttggacatggataattatattttgtttcattttggtaaattagggtcctgttcgtttgcctgtgttcgtttgcttgtctgtgttcgtttgcctgtcgctgacgactgaaaccagcgacaacgaccaaaagttgtttgtttgcatagcgatcaaaagtaacgacaatcgccagcgaccagcgaccgcaatttttggtcgctgaaatttttagcgatcacttactggtttcagcgattagtcgctggttttagtcgctggatccatcgacatgcaaacgaacaacttagcgatcaaaaaatataagttaaagaataattaaaaataattaaattaaacagaattaaattaaattaaacttaaataaatgtcttttgcattctgaattgttgtgtcttttcatcgcaagttttcgtaaaaaaatattgacggttgatatttctcgcttgtgtcttttattgcaactttcctatattgtcattttcagtcaaaatatttacggttatttttttccggttacttatatatatactattgaataactacaaaaatttataatatgcatcatttggagttagatttgttttaaagaaattattatataaacaaatttataatatttttctctgcgatatcacgaggggtttgagttctagtttaattattaatttttttattaaatgaagttaaaataaattaaattcaaataatgtaagctaattatagtcaaattaaatttgataaaactaaaataaagaaatatattaatttattttttctcatggtgtatgatatatatgatttacattttgattttaaaatataaattagcacaaaaaataattaatttttctaaacaatatagcgactgtttatagcgacagtcaaacgaacaacacagcgacagttattagcgattgtcgctgtaattggtcgctgaatccagcgacagacaaacaaacaatgtatgttgtcgctggttgctgtagctgatcgctggtcgctgtcgctgaatccagcgacatggaaacgaacaaggccaatgactcaaggtgttatccgtaacaataagagattactacagtctagatattctccttacatattagagtcaatgatatataatattccttacactaaagaaactgatcttaccaatgaaaagcagaaagatgaggctgagttacttggggttgagctctttatgagtgaagcaatgttcctactatctgatgacatatattctatgttactctttttttataagataatattgaagtatacagggaacaacgaaaggaagaatccaacacaagtggaaaaaatattgattaatgttaggttatacgtgtttgaaacaaatatcaaacccaagaatggagtctct

SEQ ID NO: 3437 - DNA, 5170 bp, Arabidopsis thaliana landsberg
  unsure (1)..(5170): unsure at all n locations
gctaaaaactcctgaagaaaaagtaaaagggtctagtcgtctgttaagttttaacaatgacaaagtcgggattaaattaaagcgaaataccctcaaagcaaaccattattggttttaaggcaagaagacaaagattttgaagaaggtgtggtgagttccgagtcaattggaagaggaagagtgggtaacgtgcttaagaagtatgcggtaaaagccctactttgtcaaacttatttcttgctttatacgaatgatgaattggtccactttaaagatgtatccaaatgatttctatttttttttaatagaaataaatgaatgatagtaacaattataaaaatgcagccgagaaaagcaagcaaatatgtgaaaataaagatcgtacaatttccaaatgaaatgttatcatctaggacattaatttggcctacgcattcaaatttcgatttggtttgattctagtttcggaatttagaactggtccacttaaaaatatcgaaatgatttgtacttaaaaaagaagaagcaagtagatgattgatacttgacccaaaaagagatgatttatagaatttatcaagcaatccacaacaaatgtcaatgtgaaaattaagatcattccaaagcaaaaacattcttatgtaaataataccaaaaactaactcttatgtcactaatgtcatttttttggagtagcttaaaatttaattttggataataattgcgtcgtttctacaaccgactaatttgtaaaaaaattataaggtttactacaaagataagttttcaaagtcgttactttcatttttttaaaacattgccaattcaaaagtaataaacaatataattactattgtttagtattcaagtttgtaaaatttgataaataatatatccaaacacgttttcttaataacactccaattttttcttaatgtataatactgtaaaaatattttttaaaatgtatataaaattatactacatatattttaaatttcttagaattgatccgtattttttgatttgcagacttaatggattggagtgttttactatatcgcttgtatttgtgaatcagtttattcattccggttggaccaaaacaaaagaaagaaatttcgagtcctgatcaacaatgccactgaannnnnnnnnnnnnnnnnnnnnnnnnnnttttgatctgcatgccactcttgtagtggataatatctatttacccttaatgaattatatcaattaattttaaaagataaatcaaaaacaaaatccaaatcgaaatcgaaataatcaatcccgacccaacccaattaattccgacccaattcatttaattcgagccgacatttaattccgacgagataggcgatttccgattaacttccgacatcggcgattttcgacattggctccgtcgagtctggggaaactttgctaggtcagctaatccaattctctgggcgtcgatttctccggtgctgcatgctacgtgagtcgatactattggatcgaattctttattgatctttgttgcggctactctggaaacgatccttctttagttcttccatctactgtaagtattatagttagtacaatgtaattgaattgaatcaatgtgtaagcagaatcaaaccatatttgcagaatacaatggatggacgaactgaaattgaatcagacactggtacatctcgtggttcaactggtactaatatagtgtttatatttgtaggaggcgatgaagaagaggatccagacgaacctacactttgactgtggagggtactatacagcagaccatgagtggagttgcaaaaattcaatatacggtatagtgtttaagacatcatctttggagagaataacatatgcggatttaatagataagatctgtagaaagattgctctaggtggagagaaaaggaatctgaaattgagttacaagatatttaaagcatggagagagtcttatattgtagataatgaggatgtgttgatatatttaacgtcattggataaagagggatttagacctgttttgcatgtagagttatgcagtgatttggaaagtaataataggcaagttccaatagtaaagcgaagaagttcatgcggtgtaaattatggggaattggctgccaatgttgtaatggttgcggatgtaaatacagaaattctgagtaccaatgaacttattattgaactagaggaacagtgtgagacagttagtgaacctattattgaactagaggaacaacgtgagacagttagtgaacctatgatgctagagaatggagtttctgaaactgttattgaaccgctgatgatagagtgtggggttaatgaagattctgataatgattatgttagggaagaatattgataataggtttttagtcaattaattctaaaacactatcctgtcgttgtagtattttaggtgtcaatccaaatgagtgtgatgcaaacagatgaaatgtgatcagaagtcactaagtcaagccaagcaataacagttttggggtttctaacagtcctaagcgaacatgcagaaaacagaaacaataacagaattactaaaatcactcgactacaacaagctgatgccagaagtaggatgtggtcgagtaactggtcgagtaacagacaggatatgaaacagatatactcgactgcacagtctgttgccagacactgggtgtggtcgagtatactggtcgaataattacaaaaataaagaatcaagcaatgagaacgattaagcaataacgataaaacagagaaatcagatagacgagaaattcctaaggatggggtaatcgaataaagtggtatcctagcctattcgaatggttaacaagcacaatcaagctatccctagacaacaggttcaacaacagatcaattctttcccgtgatagaaatcctcaagcaaagctagcccagattaattcccattaacggaatctaactatgcaggcaatcagaacagactaataaagtcaataaacactctaaaagtccaatcccttgggatagagatgaatatctcagaaactaggggatcaaacattccatcgaacaccttctgggtgcgagaatgcttggaattgaattccagtttatcagaaagaaataagcagtaaacacaactattcctaaagggattcaatcaattctaaacttaaccattctacagaatacggattccacaactactctatcccatccttaagaactctatgtcactactcagacaacatgctcaaagacataaacgcatgtaaatgataatattgcataagtaaagagataaagagtagagaaacaagatgaccgatgaaatcaaatgcggaatctaatattgcaagatgacttggaaaaacctcgaattataggttacagaagcaaaagcggcgcaaccagagtaaaacataaaataaaactgaagcaaaaaactcaatgtcgactagatgtcccaggacaaaacccttagacacttatttatacaaaacgaaataaaatgatagtagatgggccgggaacctaatcgaccggcccatagagtgataatgggccgagatggacttcgtgatgggatgaagctctggaccgcttccaaacacttcttcttctcctcttctcttccttgtgctcagcctgtctggttgagtgcgtttttgagtagactctaaagatgtggtcaagtgcttggtcgagtactggtgttggtggtgagtgatgatactcgacccgggggtcgagtaatgtggtagagcgaatggccgagtggtgtggcaaagtgatactcgaccagggggtcgagtggcgtcatcaagtggcctgagctgaggttactcgacctgggggtcgagtagatgggaagaatggctccaaagtcacttgaccagggggtcgagtatggtgctggatgcacgcgacctggtggtcgagtatgtcttctggttctggctcttttcttccaaattgctcgcaaacaactccaaattacctgaaaacaactcagaaatgcaatatgtatgcaacactatcctaatcatgcaaaggatgcaataatgatgagaaatgatatcaaacagtgatgaatgatacaaaactagactcaaaacgatgatgaatggacactgaaaacatgcaaattatagacatatcaataacacaatagaaattaaaaacaaagtttgaaattcaaaagtaacccttcaacttcaaaggccacgaaattgtctctttattttagtgggcttgggccttgaatcatcaaaatggattatatgaagtgaaaacataagcctcattaaaaaccttcctttggaaaacccattgagacaaaattaaatgcagggaaaaagggcactcatgaatcacttatccatcttgatgaggtccttcagcttggatcaaaaccaaagaggtaatgacttagctcaagtcctttggtcggtcccaaatgtggttgcgcatccctccaatggcttgattgaataacttaactctagataaagtcattggacaagtaggtgtgacaataacatcctccgctacaagcttctcctcaactacaagctccttcttagctacaagcttagctccttcctcagctacaagctcacgttcaagcccagttcatgctccatatccttagtgttgtccatgatcatatcattccctcccttttgaaagtgatttgacctcaaatctgtttcatttgcaataaaaggtatcaaatcagaaacattgaagctaaaactcacattatatttaccttgtaaatcgagtttgtaggcattatcgttgattcgtttgattaccatgaatggatcgtctattcttggcatgattttggacttcctttgagatgcaaacctctcctttcttaagtgaatccaaacttgatctccaacttcaaaaatcttccaccgtctttctttatcagcttgcttagcatagcgtttggccttttcttctatggttctcctcgtattctcatggatctgttgcactagctcggcattctttttaccatcaatactaactctttcactcaaaggcaaagggattggatccaaaggtgagatggggttaaaactcatacaaaatttaaaaggagaatacctagaaacagaatgcacgacattttcatatg

SEQ ID NO: 3438 - DNA, 1756 bp, Arabidopsis thaliana landsberg
cattggagaagggttcaagcgagtatgaaaaagcatcaggtcataggagaggcacaacgcgatacatgtctccggagcttatacgacatgggattgttgattacgctgttgacacgtgggctttcggatgcacagttttggaaatgttaacgggacaacaagtatggggagaacatagtgatctcggttctgtagattgggacattctcatcggtcaaagctgttacattccttatataccggattggttatctgaagaagcacagcattttctcagcagatgtttaaaaagggaccctgcttcaaggtgggggattggtgcactcttgaaccacccctttttgcaatgtggatctataattgtttactaacggttttgtttattagttttaagttgtaagatgaagtatccaactccctatttggtatgtgtttgtggaagttttgattagcataaatcgtacttgcgagataaatgataagagacttttataactttcttatagaaacaccaaatttaattgagtattatagcaaatcacaatcttgtttcatgaagatagaacagattctgatgtctaaagctaacaagaacaaacacaacaagaccaagtgttccatattagacaattccaccaagcaaagctaacattgccatgaagtaaaagagcaaaatcatcattggtgagaagagctgctgcaacttttgatatcccatgaaatatgcttgtcttcttcctcgtagaaagaaataaaaccttcataaacttgagcaaatgaaagaggaagcaacaaggctatggtgtctcttgaataaccaatgatcactatcagctcccccttgtcttggaacacatgtcatgtcatttcttgtaaaagacagtgtagtgtttgtgctatcaacaaagagaagaagaactggaattggaacacatctctgagcagcaacatgacacaagcatcacgcaatacatcactcaaaattgtgtggtgtattggactgaaccacgctctctgcgacagaaaccatcaaaaccaccaagctctcgagcaacaacatcatcactaacgaagacaattccagaatctgaaattatcattcattccagaagctaaattcatactgagaaagggccagtatccatgaacatataacatcaaacatgaaccagagagtatgaatgactttctggtggtcgcgtaagagatccaacgatgtaaccattataccaaatcctgttggtttagcagaatcatgagctggcatgagcatcacctgagaagatgtaaccattttaccaaatctcaaactagtagctgagatctatacgaagctcgtttttggcgatgattcgaacagaaacacgatcaattttgatgaatcaactggatattgaacaaattgaatactttgatcggagaagaaacagatcgaagaaacaaatcggaaacacacacggattgatcggaaaaatcaaccaatcggagaaattaaactatcaaacgaaacgaaattgactgtagaatcagaatatataaattggtttagaaagtaaactaaaccaaagtctaaaccaaagatactaaccaaactaaaccaagtgtatagactctattaccacaaattctgaaattatctagccaaaagtcagacaattaacatgtgactactggttttaggtttcgcatatttccacaaattctgaaattaaaaacaattaaactaattaaaaaaaaatttagaaaggtaaaattt

SEQ ID NO: 3439 - DNA, 489 bp, Arabidopsis thaliana landsberg
  unsure (1)..(489): unsure at all n locations
cggagactatatagaggggttgtaatgtgtaaaattatctgtgtattgtttttttcatttatgtggggaggcaaatagcatggtattatataaaaaacaatgtgttgatataccaaattggttaggattaagcttcaaagataatgcattgatcagtcagttcagtttttcaagacaagttgtatatggaaacagaagtagagtaaaataacagccatcaccaattttttccacaattcttatctcttgcttgtaaatccggtttgagactgtacttagtactactgattgagatcaatgcaaaagattttctcacaaaataaaccggttaggtaataagttctaaaccagaaccccaccgctttgcatatctcatccctccgtgtagggttttgcgatttccagagagagagagagtgagactgagattgaagtctcctgaatcagctgacgccaaattcgatnnnnnnnnnnnnnnnnnnnnnngac

SEQ ID NO: 3440 - DNA, 3231 bp, Arabidopsis thaliana landsberg
atggcatgtcacaggggggtgtcatatcatattttttcttgatacttgcactctcctacctcttctttcaacatcaccttcatcctcaaaatcttattattactgttcttttaaaacattctttccaacacttggcatcatagttgctaatagcgcaaacgacgtcgttcacaacttaggctctgaatggtgactgcgttttgcggtgcgggagaagtgcggtatggttcaaatagttacgaaaatacatagatacatatgtatatgtagagattttgatactgttacagcactgttgcggtgcggttttgagtgcggttttggtcaccattcacaaccttagttaaaacgatgcaataccactaatataccaaacgacgacgtatcgacatttccattaatctcggattcgctcgcgggacagagcagtgacgatggaggagcgagccagatgcgcatcgtcgccaacagatctgcaacaactgcgatcgaccaaacgcgatttgtctccgccacgtcataccggctgatccaattccgaagaatacagagagcatcatcctccaccatccgcacgagtataaagcttgtgctaaggaaggaaccattgggaggatatgtaactacggcgcttaggagccattgaacctgacggtgaataaatcgagaggaagcttattagtgtttagaaagagatggtgaggtccaatctaactcaattgatgggttaatttgttgtttctattccgaagaaatacagtaagagcaatgagagattggacaagactcagattgtttggagcctgtttactgatagatatattattccatatttttacatgagcaagctctctctagaagcaaaacatgtgactctctagctacaatctactcaagactttagcaaaaagctgggaatggtgaaattttgaacaaatcagagcttgagaataaggccaatggggcaatgatcacttccattgatatcagggaggatgtaagaatcatggacattggccgcaattgattgggacaccaagaagtagtccagtctccatcctgtttcacaccatttcaccagtttaaaaaccaaacatatgaatctgaatatgtaccaaacaaacttaattacctttgttggttttgcggccaccatggcgataaccccaataagtgtaaccgacaacaccaggatgttgttttctaaaggtatctacaaatcccttgtctaacaagtttgcaccaaaggactgcctttcttctattgtaaaaccagcacttcttttgttcccctagttacaagatatggtgaagaactaagaaaactgagagattactgttcgagaagaagcattcgagttatagttaccgcaggattgaagatgtcaatttcttcatgagcacagtttagatcacccgtcaagactacaggcttagacttctccagctcctgcagatgcaaaagggccattgagctcgtgtaacaaggacaaatacaacaaaataaagaaactctgaagaaacgtttcatactttgatgtgattgctgagggttcgatcccattcttcgatcctgtatgacttgaaaacccacggaatccactcgttagaatacaaagattagtagagtatatatgtcaaccgtgacaataaaatacaatactattatttgagtaccagtctttttaatccatctgcggaattagggacataagtatttatcaagtagaaggagtcgaattcagcagttacaatacgcccttccgtgtcatgaccagatagaccagtaccatatctaactgagagtggttttatctgtcaaaagaccaaactgatcaaaacacatacaattcactttgacgtatcagataacaaatgagtacattcttctgttacccgtgagattattgcagttccagagtagccaagttttgagacgctgcaggaccagaaactatgatcatagccatcaataagagttttcttaatttcctcaacatctttcacctgtcataagtttgcgtatgtctttagtacaagagatttctagattggctgtgtttaaaatatagagcagaaacaacttaagaagggtctaaagttatgacctggagtttagtctcctgcaagcacaagatgtcaaaattttctctttgggcaagctgcagagcagagaagctctcaaacttcaacaatcctctcagtccattaacattccaagtcataactttcacacatttggtaccctctggtagagggggaggtctcattgtctttgggttgtaagctttccagtccttctgaggcttcttatgagcaagtacagtccacggttcactttgactcggggatgagataatttcttcagttttcagtaattcactagagatggtcgatgatgtttcttcttttgactgaatttgctgcttacctacgtagattaatcacacgcatgttttataatactctatgtagataccagtatttattacataaaattcgtttattttaacacgcgacaaacctgttctcatcaatgacttctgttctttcgcgatagctttcgcagaaactttagaattcaagttattctcagtagactgttttactcttttttctccgtgttcaatgtcataagcttcagagttagtgcattcatcttcagtaggctcttccctgttgctgatctttcttttgatggtgacactatccgaacgggtggacgaagaagtttccttttgatctgaaacagaaatttcatctgacattgataaacaggaaaggacttggttttcacttcaagagaaaatgtaaaacagacgcagctccgaaccaaaattctttactgctttcaccaaataatcagaagctatagcagttttgagacttttattctaattcaaatggaacaagcttagacaactactaaatgcaaacaagttcatgcctttttctcgatatgattatatgaaatagaaaagtgtgtgttcttggtgtgcagttacataccaggtaaattgctgtccatatgaagtcgtaaagttgagataagttcttgtttgcgtcctttcacaggtaccccaagtttcccgattatcaaaaccattgttaacacattacaaaaacgttccacatgtttaaataatgaacaagaatctggatgtccacatatacaataacaaagcaagcagagaaaagaaagggagcataagcttgcctcaacgtggatct

SEQ ID NO: 3441 - DNA, 4147 bp, Arabidopsis thaliana landsberg
  unsure (1)..(4147): unsure at all n locations
cattgtgaaaagatcgagcagaaggttcataagaaaaattgttgttatccactggaaaaggtgcgtctgctggttttgcatctttataaactgccaaacccgtggctttctgtgcatctatgtcttccaagcaatctatataaattataaacgcatgacatcttggaactaagacgcaatatacatttcttgattggtttacataaatgtaaaatcaaagtaaagcggacacagaccttgaaggccaagtttagaaagcatgagtcgtccgccaggttgcataaactcacccatcattctttctggttctctcatgtccctctcgatcacatttactcgacgcccatcctatagtcggatattagcataggaaaatgattgtgtataatatttgtattcaaagccgactctgccttaaggtattttttcctatatttattcggtccctttttgactaaaatgttcttgcagacttgtaatctagtgctagaggtattataacgtggacgaaaaaagttctagagttacacatctcctaactcaattctcattagttttccttttaaagattcctaattattgcgctttaatttgttcttatatccttaggcgtttttcaattcttagagccgattttgattgtatcatgcaaaaacaaaatattacaatatctatattgccaaaaaaaaaacacatacatgatgtgtataggttttatcctattatccatacggagattttagtacaagaaaatagttaataaaagtgtgatgcagatttaatatttggacgcaaaactatgacgccactttacataccttagcaagagcatatgcgagagccgaaccacctacaccagccccgacgataatgacgtcagcagcaccgtctttttgatcctcagccaccgtatcagccaaatccgtcgccttcttcttcatgttggtaaggtagaacaccgtccacgtcagcacgaaggcgactaacgtccataaacaaacgtgcgtagaagccatatataaccaaatctatttgttctcaatatgatttatgagtttgaaaaacaatggtttatgagatagttgtggaaagaggagtgacatatatatagttcaaagatatgtcagtttgaacgtggcattagtaccacaggttcgttatcatatctcagctgtcaaagtttgacataaaagaaacgataagtttatatcagataacaaacagaagatattgaccaccctaattaatgagtttttgttactatatagaacaagcaaacaaaatgtaccactcaaattattgacattttgactattataattcatttaagagtttgaaaaatcgcaataatttactaatataaaatgtcaagaagttaactagatgttttagaagagagttgcagattcgctgagattcgatacttagaccgattacgaaccttatgaagtgcataggcgagaggcgagccgccaacttcggctccaacgatgatgacgtcagtaccaccgtcttttttcatctaccgcattatccacaagtctgttattaccttgctccagatggctactagggaaatgtccaagtcaacaagatagtttagtagcgtagcgtctataactataattaacggcaaatccatatccattaaggcttaggatctagagtttagtctttgcgggagggatacttaagtcttcatatggcttataagagaatttagaaagcacggacgtgactcattacatacatgattatatcaattaacttctacatcaaaaaagaaatcagagtgaatacacatatttcacaatgaatgatgtcacttcttgtttcgtgttccgtttaatgttgtttctatttttgtcaaaggtcgacgtaaaatatcgtttcgccataaattgttggagactaattcattttttggctgctttccatgaacaagtcaatataatcctcaccacataactttatcaatgattgtgattcggtgtccatattttcttcatatatatcttatctacacataaattcactatcgtcttaaagttttcttcttcacatttactctgtcttggaaatatagagatattgggagggaagtcaaaacaggaaatatcaagaaattaaacactgctcctaagaaactaaaatanaataaaataaaaattcctacatgcaagataattttcatagcgttagacgccgtacggtggcagacttttagtcttgttacatcaccgtcaccctctgattttctcgtcgcacagaccaccgtcttcaaagaaatgattatgacgtcaacacacaacttctattttccaaaactgaaaagaaaagatgtgagctattaaccagtcactgtacttaaataaactagtcagcgagagaatgtagcgttccaatatattaaataaaacaaaattatattcatatacccttatgaaaaaagcataatacttcattatttgatgctcattgctcatctcatacacaaaattagattcataagcaaaggcgacgacgatgaagaatgactaaataagttgaaggagtcgtctccatgataaaccgtaaccaaaccctgcgacattctattgtatgcgtatttttttttttttttggggtcataattgtatgtttttttttgtttcttggcattgtcactgaaaattataccttttcatttttgccttctaaataacccaattgtgttactttacagaaaagcccatccaacgaatatttgtcttcagcccattagcccattaagttcaggataaagataagagctacgttcaactctatggtcagaaaaatcagagaaagaaagaaaacagagcaattacttgaagaatccataggaagctgaagatgagaagaattcctcgtatcaaatttcctcagagacattctatctcatctggttaacatttttctttcactactcttattttctttagttcttgctttattcttgttcttaacgtctccttttttgtgtgtgactttctcaggttctggaccggcgccgggatctgtttccggcgttaagaaaaatgtgacgacgagttctgatgttccggcagctccgaagaacactgctgatggagggaaagcatctctccagccgaaacgtacacctgtctccgacaaagaaatcgaatctattatggtgagagattatataacttgctaacaaataaagttagtatccttttgttgtcaaacaataacaattagtaactgaactctgagttttttttttgtacttgtgaatttttgcagttgggtggttgcatatgacatttggggagttacgaagatttgatcgaacacattggtgttcttgtcttgttcggctggtgatgtttattttgctgtttttaaatgtaaagaagtaactaataatgtagagaatatgattttataagaatgatactctttctcgttattattatttaagataaaaggcctctttcgagtttctgcattattgtcttcacaatttttttattaagccactaggtaacagatgagagccaatggatatacaaaatgattcatgaagacctcttattctcatgtctctttccaactaaacataatggcaaaaggttgtgtcactgatgatgcaatttgcagttgcaactgcatcactaatgatgcaatcttacttgtgatattgagaactcctaagatgtttaaagaataaaagaaatctttgtatttgatcacacaatatgccaaacaacgtttaaagactgaagcaacaaaagagcttgaagcaacgaaatacacacacgagcttcaagaccccaataaaacaaactcactgtgcattacttccgactcacacgatcaggtgaaaatacaaacaagattcgtttaagaataatcagatctcaagttcttgagaccagtataaaacaattttatgtgctttgtgttttgctgccagatgacttactatagctcggtgtcacaaagacggatcattatttcagagaccattctccgtgcaaatggaatataactgaggctgtacctgtcattacgatgtgtacagaaacatgttcaatccaataaggttttaaaatcttcgggtccttagagaaacaaaaccctttttgggttgaaggttagc

SEQ ID NO: 3442 - DNA, 773 bp, Arabidopsis thaliana landsberg
  unsure (1)..(773): unsure at all n locations
agtaaaacagattcaaaataaaactcaaatagaataattgagaatttttgacattttcgttgagttcgtttttttaacttgtgtaccgacctgatcaactagtgcattcatgtggttcagacagaaacaccataacatcaaggtgttttttggtaacagaaaaaaaaaaaaaaaaagctacacgcgaagttagaccgagtcagtattttttagcatagatgactagtggggattgatttgatgtatctataaaccttgaaatgtgtgtggaaaaaacttttgacctgtttcattgccaacaaaacagattttagtctactaaacgaataacatcagcgttggaaaaaaatggtggtcctgcttttcaacttgcctcttggaaggaatagtggatcataaaacctctgagttttgttgcttccgatgcaaacaataatatgtgacgcggtcgtgctggccaatttctagctaactttgatgccaatcctaaaaggtccattaagaattggtctgactcatcgaaatctcctaatgtcttcgctgtttcaaaataataagaagaagaatccttaagaatcgcatagaagcaaaaactgtgactcaggggcgtgatccatttaccttggtgtgtagtcgagaaatcgcattggaatgttactatggagagtggaataataataataaggagtcgaatggcttagcatgagagagagaatgctctttactctccctttgtatcctttnttccgataagtctgtacatcgcatccttg

SEQ ID NO: 3443 - DNA, 2577 bp, Arabidopsis thaliana landsberg
ccccaggcctttttgagatccttattttttccctcccccttcatttttttaaaaaaaaagaaaattggttctttttcaacctttttggctcttgaagaactccagctttgaaatttaacaaagggtatgagagctcatctattggtcacaaatgttccatttgttgaagaaatctgattatataaatggattgatatctcatatttttgtctggagacaggtacacaaatggaccaggaatctaacccaggctatgaaccggatcggattccacattcggttttcgcaacctcggtaactccaaagcaagaatggagtatccaatcgatcgagtctttgttcagtattcacatgggagaccatagtttctccaagatgtataaatctggagaactcaccaatttcgaatatactgcttcgccctatattagctactataacaataacattgataacaaaattgctccgactgacgctggaaccaaagaagtcaatataaccatggtggaaaccggaccaaaaaccggtaatcgagatggcttaaccaatgttcctaaaccggatccacgacaacagattcctatttctccaaccaagtcttgtcactccgaaacaagtaataacagtacaacttctttcgcatttcccacgtaagtcgttctctaatcttccatgccaatttgctcggttaaaaccagactcgttggactgaaaactcggttttaattaattgagttgtgcttatgaggtctattggtttatttttaaaatcctttgtagattaggagagtaccaacaagagcgaaagacatcactaaacacgaagagtgaaagtggaaaaagagaactatcaagacttgactcgaagaccggattgtacccggatgattcgaaacatggcggtgctggtgctggtgttggtggttggctttcttgttgtctctgtttttcggtgaaaaattgaggttattactctttgtcatgtcaattatttaggtcatagctgtccaagagacgcgagacattagacaaggtaattaccgattgtatcctatatattcctatgtaacgaaattcagatactacgtaatcttaatgtgtcgatggaatgaaaaaataaagtattctgtaaatattttctatatattatttagcatatatacgctttataaattataaatttggtccctcccaaatacatgaaaacaatgtagtgataaaaaaaaaaacaaattctgtatatatgctatttttataacataacaagcatttttcttagtcggttaaaatttcaagtgtttaatacttttatataattatgaacgtaagttataatctatgttttttttggtcagtccattattgattattccattcacactatatgcaacctatattcttcctatgaaacttttgatcgtgtgttaaataataatacaaatttgatttcatctaataggtgggtggggactctctaattacgttctttgacatctactcatcaacatttggctaatctttctaaaggaattccatctaccggtcatttttgtttaaatgctctcttgtaactaaaagtccgtaccaaacttgtgtaatttcattaaacattaattatttagtccattccatgtcaaatatgacttatgctcttgtcctataaattttaaagcaatgaggattcaccaagtatacatgcataacaaattaagagcgagcaataatgagggtttctcaatctcttatcccttttgccataattgctttgttcctttcctttgtcaatgcttatgatccaagtccactccaagacttctgtgttgccattgatgacctaaaaggcggtacgtaaagaaatctccggttatctatttctctacttttctccttatgattaactttgacgtagtaatataatatatactctttgatattatatttctacatgcagtttttgtgaatggtaggttttgtaaagacccgaagcgagtcgatgcaaaagattttttcttctcaggtctcaatgtgcccgggaacaccaataatcaagttggctctaatgtgaccactgttaatgttgatcagatcccagggctaaacaccatgggaatatcattggtccgcatagactacgcaccgcatggccaaaatccacctcacacgcaccctcgtggctcagagatccttgtccttgtcgaaggaacattatacgtcggttttgtctcttccaatcaagataacaaccggttattcgccaaagtattgcaccccggtgatgtttttgtgttccccataggaatgatccattttcaggtaaatgtggggaaaattccagcaattgcttttgcgggattgagtagccagaacgctggtgttatcacaattgcaaacactgtgttcgggtcaaaccctccgatttatccagagcttcttgccagggcgttccagttggatgcaagtgttgtcaaagaacttcaggccaagtttgggtccatatgaactgatcatctatgtcgtttaagagtgtttatcagtgaaacacttaaattaaaggaatacactactatgaaatattta

SEQ ID NO: 3444 - DNA, 7792 bp, Arabidopsis thaliana landsberg
ggggatggctggaggagaaggcagctgatatggaagagcgaacgaggaacttgtcctcggtctttgtaggcgcagatcctgattctgaacctctctgtcgtttttggtcgacactctcttcttcttttttttttttttttaaaaaaaaaaaatctgaataaaaatcttaagttaagaatcaaatgaatgaaatgaataaaaagaacaaatacttaccagtgggttgcctcccactaagcgcttgtttatattcaatagcttgactctgcagttgcttaatcaacaggtgggtcctaaagatccaaaggcttttctactggaatcttggcttcatgccagtaaagtttgactctctgtccattcacggcaaatggttttccattgttgtttttgaaaatgattgttccatatggcctaaccgagtggacatgtgtagggacctgtacaacgagaagacaatttgccaggaaataatgttaatctagaaccataaagaagtacctggtcattaggctcaaaggtccgagtaaagatcgtcttatcatggtaggcttttgttcgttccttgtagagcttcgagttgtcataagcgtgaattcgtatttcatcaagctcattcaactgaataagtctcctttctccggctgatttgatgtcgaaattcatcatcttgactgtccaagctgctttgtgctctaattccactggaagatgacaagctttaccatatagaagatgaaaaggtgtggtaccaagcggagttttgaaagctgtcctgtaggcccacagtgcatcatctaacttgtaggaccactcctttttcgaattacccactgatttctcaagaatctctttgatttgcatgttagaaacttcaacttggccgcttgtttgtggatggtagggggtagcaacccgatgctggactccatactgaaagagcaattttgcaagaatcttgttattgaaatgcttacctccgtcactaatgactatgcgtggcactccaaaacgagggaagatgatagacttgaagagtttcatgacaactgctgaatcattcttcggactagctatagcctctacccacttggcgacataatcgacaactagaaggatgaagagattcttgttgaatggtgggaagggtcccatgaaatctataccccaacaatcgaagacttcaacttcgaggataaatttctgaggcatctcgttacgcttgctgatctttccccttctctaacaaggatcacactacgatatgaacttctgagtatcctgaaacattgtaggccaccaaaagcctgcttgaagaactttggatactttcttgaaggttgcaaaatgaccaccatagctagagctgtgacaatgcgatagtatatcagcaatgtgaaaatgaccactctattgcagcaatgcatctcctataaactccatcagaacaatgcttatagacgtaaggttcatctaaataatatcgcctaatctctctcaagaatctcttgttgttgtaatctgtgaaattatcctgttccacatctagagctaggtaattaacaatgtcagcataccatgggtagtccttctcgaccgctatggaaccgcaattctcagttggtgactaatttcttgtcgattcaggacggtgtcgatcgacactatcgcgtaattgcgaatatcaacttcatccaaaaagtgagtgccgatcgacataaaagaagtgtcgatcgacactgaagctcgattctgcaacttatcacatttgcagtcatcttcttccgctatatcaatcatgtatatgttctcctcaggcaagaaatcattaaaaggaacatcatcatcgatcctaatacgtgacaaatgatctacaacaccattctcaactcctttcttatctctatcctcgatgtcaaattcctgaagaagcaaaatccatctcaaaagtcttggcttcgcatctttcttttgcatcaaatacttcaaggcagctttatctgtgtgaacaataacttcggatccaacgagataagatctgaatttctcgaaagcaaaccacagttaacaactcctttatgtagttggataacttctttgagcatcatcaagtgtcctacttgcatagtagatggcatgaagtttcttatccttcctctgtcctagaacagccccaactgcacaatcactagcatcacaccttacctcaaaagatagatcccagtctggtggttgaacaattggtgcgcttatcaaggcttgttttatctgctgaaaggcatcatgacactctagtgtaaactcgaatgtgacttctttacagagtagagcagtcagtggtgttgcgattttgctaaagtctttgatgaatctcctatagaaaccagtatgtccaaggaaactcctcactgcttaaacattatcgggtgctaaaagacttgtcataacttcgatcttagctctatatacttctataccatgctcagaaatctggtgactaagaactatcccatcctgcaccatacagtgacatttctcccaattcaaaaataaatgtttctcctcacatctcgcaaacagtttgcagagattctccaagcaatcctcaaacgatgatccataaactgaaaaatcatccatgaaaacctccatgatatcctcaatcatgtctgtgaagatagacatcatacctctttgaaatgttgcaagaacattatgaagaccgaagagcattctccaataagcaaatgtaccataggggcaggtgaaagtcgttttctcctggtcatctggatgaatcgagatctgaaagaatcatgagtatccatcaaggaagcaatagtacttgtgatttgctaacctctccaacatctgatcgataaatggtaaggggaaatggtctttcctggtagcagcattcagctttctgtaatcgatgcacatctgatgtcctgtgattgtccgagtaggaatcaactcatctttctcattcttgactactgtaactcctcttttcttaggaaccacatgaactgggctaacccaattgctatctgagattggatagataatccctgcttccaacagttttataatctctttcttgaccacttctttcagattcggattcaaccttctgtgatgttcgactgaagacttagacttatcctcaaggtgaatcctatgtatgcatacatctggagatatacctgcaatgtcatcaagagagtagccaagagctttgcgatgattgtgcagcttgcttagcaataaggtgagctctgcgggattaagagaagcattcacaataacaggataagtagaattttcaccaagaaaagcgtaccttagccctgctggaagtggtttcaattcgattttaggagcttttgctggatcccaatctgaactaggagtcggcgttgaagtcacagatggaagagcttctccaactgtaagttacatcacatgttcggtctcatctagcagcttagtatatgttgaagtttcactgtccaaatctgcattatcctctatggaagagaccaaaactcgctctagtgggtcttcttattcgatctctgaaatactatctgaagctgatgaagtgaaagaatctatcaaaaaggttttcccttctatgatcggtttcttgaccaaagtgttcatatcgaattgcatagtaaggtcgccaacattctgccctatcctcccttgtcgaacatctatgattgctccagctgtgtgcaagaaggatctccctaggattaatggatccttaggttccttctcataaggcaagactacaaagtctgtaagaatcatgctctttccaattatcactggaacatcaataagaatttcatatggaattcgggtagaacgatctgccaacacaagagtgataaaggtaggctcaagattggaatacccacgacgcataggagctgaacgaggcatcagattcacactagaacgagatcacataaagctcttgggaaggaatcgtgattaatggtgacactaagtacaaaagttccaggatcaggtagcttttttggaatttgttcttgaatgttgtcgctgccctgctctgaaatcatcataacactacattctttcgtcaaattcttaatgaccattgtcttaacataccttctgattgtgggagatagatgaatagcttcaactagaggcatctcaacaatcagcttatcaatcatagccttgcatctaacatcatataaggcttgtcttgactttttaggactcttggggaagggaattcgccgatttgctgacttggttgcagctggaatttgcacattgtctgatcgaacagggtgtcgatcaataggagctaggtgtcgatcgacaccatcgggaattgtttcctcctccttcgcaaaattgtcgattccactcgacaaaggaaattaaaacagattcgtcaagagtagttggtgtcgatcgacaccctggtgtatcgatcgacactgatccgttttctgcaattggagaagatgaaggctgagccgattgttcgcgctgaagtattgggtttagctgctttccgctgcgtagtgtaactgcattgatagaagcggatgtaggtgagagattggagaattgagagcgtagattgccaatcttgctattgatatctgtggagacagaatcatagttgctatcaggctttgtggagagagattcatatttgctatcaagctttgtggagagagatttatatttggtatcaagctttgtgaggcctgcaagtagctgcgtaagcatagactccattctggtctctgatgagggtggaggggggggggcttggataggagcagaaatttcaggaataagagtctctttgctcttggtagctttctcagctgaaattcttcgttctttgtcaaattcctgcgtcgaatgaccagttaaagcattggtgactaggattaatgcttcactagttgttcttgtcatgaagttacaggaggttgctgcatcaagttgaatctggtatggcttgtctattcctttgtagaagatgttgatgagttggctctcttggaaaccatgttggggacattcacgctgataagacttgaattggagccaagatgctctaagggattctgctggagcctgggtgaacaaagaaatttgcaaacgaattgcctctgtcacggactcatcgaagaaatgatacatgaatgcatactatgaatcagcccaattggttaaggaacctggttccagttgacgcaaccatgatgttcctctgctcgcgagagagtgggggaagagtttgcaaagaaggtaatcagctggtacaccttctgctttaatagaggaaccgatgcctttgaagacttccaaatgatctaatggtgattcattggaggtagcttgaatgctgatcggtttgtgtagaagagatcatttctgttaaatcgcctattgtagccgtctggttctgcagagggtgtcgatcgacaccctgatattgtctgtcgatacagccgtgaaagtctgccatgggaaagtgattctcaatttgaaggtaccggaaacacaagagaccaaaagacaaagaaacacgtcaataggtggtagaaaagtaatatctagacttaaaatgacacctagtataatggtgaactaaaatagaacttcggcaacgccgcatattgtgatatagctcaaactgccttaagcttactccctcaaataagaaatcgtcgttagcacttaagggtcgaattccactgagctctcgatgttcacacaatggacttatgatgttttcaattaagctagaccaatagattataaaataagaaataaagaaaagcaataaatatctagatgtaaatcagataagaaaagagtcaggtttagggtaatctcatgagatagatgattagtacatctagtgatagttggaatgttatcgaacgtttcttaaactcaaactctaattatggaataaccagtggtgtttcgcgaaactccctatgtttatagctaagaataaccggagaaaccgagagatctttaacctaaacatgcattctgaacgagttaaattattcaccttagtagataggccgattcttattacacacctataaaccaggctcatcaaataatagatccaactacatatacatatagtgggcatacctgttgtgtggattcaagttctagttagctactcaagaactagcattaagaacaattaaagatgaagaatcctaacagataacctagcaagggggcaatctactaaatcatctaaatccctaatgagaaaccctaaacctaacaagaagattactcaagcatgatgaatgaagcaaacaacatgattgaataagaaatcaatgaataaaacaagaagagaatagagtaagaaagatctaaagggagtctccacaaggttttgctcccaaagtacaaaagagaaaaagggaatagccttccaaagcttacgcctaaacattgacctaaaaactatatatataagtctaaaacacgtgatggaccttcattaaacataggagaaagttctgggccaaatttagaaatcttcaaaacttcaataagtttcgttttcaattgccgtcaggtattggtgttgctcgacaccaggggtggtatcgttcgacacctacgcgatttttagtctccgtatttcttgagcaacataaattttctgtttttcctccagaatgctccattatcttcaaatgcatccaaaacatgtaaagacctgaaaaggactagaaaagactctaaaattaacaattagactctaaaacctatatctaaaacatagttaaaataggaaaaatagggatatatcactatgtctctctctttctctgaaaggacaacttcttgacccctatgcaatggtctgccttcaacaacacttccatcagcctcaacatcgacattacggcttacagcctcttgcactggtataaaattttggaggaactctaagcagaaggcaatgcactctccaactaagtatccttcagccatacacgcttctggtctagcatagtttgttacatatcccttaagtgttttcatgtacctgcaactcatacaatttgtagtcattatgtttgaaagtaacttctgtcaaagcacataatgtaaagatagaaataagaccattcctgtcaaatagatacatccaacgaaagtgcactggacctcctaatcgtgcttctcttgctagatgaattgggaggtggaacatgatatcaaacagagaaggaggaaagtacctcacaagttgacacattgtctctacaatttcagactccaaggaaattagattctcagggtcaatggaacgttggcacaatctgttgaagtagttgcagactcgagtcaccgcagccctaggtccgcttggcagctagcctcttaaagcaacatgtaacaaattttggatgagtacatgatgattatgggactttagacccccaatcataggagggttgactgaaacacaattagcaatattcctacaatagacatcaggacctctaaacttagacaatctttgacaaaatacttttttctcgtccttagacatccaataggctgctggaggcaaatctgttttctttccctgagtctctaggtgcaaatgccttcgaattccaatatcttccacgtattttctcgcctttaagccatctttagacttagcactttgcatcaatgtagatagtaaagcatcagacaagttcttctccacatg

SEQ ID NO: 3445 - DNA, 506 bp, Arabidopsis thaliana landsberg
agtacagttaaagtctctatagccaaaattaacactggttaccaatcagcctatttatctgcgattaaaccgcaactgacaatgcagagcttaaggtagtgaatgaggaaacctttttggcgtacttcatttgttatcattgaaaaccaaacctatgtcacaattcaacacattctcagaaatcagtgtttttttttaaaagtaaactgcggatttcaaaaaagggttgaaaaggcatggaccacgtttcaaattgaagtcaggtccttacaatacggtccaaccgaaaaacgcagtgcacactagctacttatttacttttaattttttttaatgttataaatcattatgtatatatactcttttaccatatatatatttcttctcttactcttttctcttacactcttctttgcacaaaaaaaattatcggtgccatatacatctcttctcctttaaataatagacctcatacttggtaagataaggaaaaaaaaaactttcta

SEQ ID NO: 3446 - DNA, 592 bp, Arabidopsis thaliana landsberg
ccaagtatgagaatctattatctaacggagaagagatgtttatggctacgagaattttttttgtgataaaagagtatcagagaaaagactgagagaaggaatatatatatatggtaaaaaagtatatatatacataatgatttataacattaaaaaattaatagtaaacaagtggctattgcccactgcagttttcggttggaccgcagggtaaggacctgacttcactttgaaacgcggtccatgcctttttatatctttatttaaatccacagtttacactctctttttaaataataaccacacagatttttaaaaaggtgttgaatggtgatatatgtatggtttttaataataaaaaatgaaaaacgctaaaacgctttccccattcactactacctatatttctgaaaaacgttctgaacataaaaatctaaccaaccaaataaagcgtttttattttggtcaacgcaatctaaaattaaagggtatatcaatcataggaaaaaggtataaaccgctatattatactgctgtcaatactccaatttcttgtagtgcttggggtaaaatatgtgttttcccgagccat

SEQ ID NO: 3447 - DNA, 1784 bp, Arabidopsis thaliana landsberg
tgtctgagacaccctcccttagccgataataagttcagaatcaagtttcttcagactaccaaactgtctcatgtgggtagattggttccaagtgacttgtttcgatttgttgccttctccatgatcgaaaataagactattaattctttaattgtccatggtaactttcttatttagattttttaaaaatattaagtctgtttatttggaaatatatatctttcatgttatcgttttttattgtagatgcttatggtgttgtcgtgagagttgggaatataagaagaccggattttgttcctcaagcttcagaaaatcctatactttctcaatttctcgagtttgagattaaaaatacttggttagtattttccactatatatttaaatatatagcatatattttccaaaatacttggttagtattttctcgagttcgacatctatttggttatatatttaaatgcacaaacatagtaaatcatgttatctttatagttggcttaattcatagaacttagatgtttttttgaaataattttgatattgttattaagggaaaatctctgatatgtgttgcaagaggatatacttgtgacttgtttgtgcaattgtggaggaaacttggtctaaaccttggttatcagtggaccttcggtatgaatcctacaaactgtgtgcttcgattttggaatgttgatgatcatgaaggtatatttaagactcttctcatcttatcaataatttatatagctaactcatataataaaaacattaatattttaagtcgtcaatgtctaatctcacataatggtgtttcaggaattattttcaatcaaagttacccagagattaacatggatcgcatcacgtaagaacgtttatattttcattatcatttaattgtttattgtatttttaaaaatgtatttttaaaatttttagtcttggttactttttttcctactgttttagaacccaattctttgaacggatgcagccacctgagctaggtgaagttgtggacgagaactgaaaatgcaacaccagacccctatctatcgttttgtttaaaaacttatctacatatgttttaaagttgtacttttaaagactttgtttattttttattgactttcttatgattatttctgttaaactttaactttattataactctttttatttaatgcttactaaataactatataaccgtaaacttagatcaaattataactgcttttagattggccaattattaggttattttgatttaaataatgttgatattttattgattttaataaaatgtatttggattgcaaattttgattacaatgtaatctaaaatatgagttagatatctatactattaatcaattaaaaacaaaaaccaaaccttagagtttattaaaagatttgtccaaagaaatttgtcattaaaatgttacagaatcttctaagctgaaaacataatttatttcaacgaggattctcttaatcaatcatctgttaatttgtgttctaatttgcacaattatagactagataaactaaattagaatatacattccttatgttgtgccctaatagaattaaattatcgattgttttgtgaacaatatattttcatatatatgatttccttatttttaatcacttccatcattaaaaatattaaaaatatttattatttatttgactccataactaaacatttgtattaataatttttttattaaaggtgtcaaacattatacgatcttgtgagtattaataatttat

SEQ ID NO: 3448 - DNA, 568 bp, Arabidopsis thaliana landsberg
gggaggtgctcttctatacaatgtggcatagtcctgttctgctatttgcatttgttagtgtcccattgttgattgactgaccaaagcctggtatgtaatggcaggttggttaattttctcttctcggcctcagagatggcgtataacgaggtctcagttttgtgtttacattctagtgctgttgtatgcatttagaagaggggcgcttattggcggcagaaagttttagggtccatttcacccaatctcttacaactgtgatcaacgtgtataccaatggtttgttatagtacacgaatattttattcaaataaagattttttttctttttctgaagggattccataacacattgcacgaagacacctaatattagcagtcactaactttaggattgagaaaagtgttctccaagaattctaggtggaagtagtaatgagttcttcacttggccttttttattccttggttttagttttttccatatcgttagctacaacaactttaatattctgccatggatatgcctttctggaagaggaacaaaaagttcatggagatatcgatg

SEQ ID NO: 3449 - DNA, 509 bp, Arabidopsis thaliana landsberg
taccgaacctagtttgaggaccaacccttgagtgtcgataaggtccggaccttgagggtagttggtcagatgttctagggcggtggaaggcgtaggcttacggtatggaaccaggctaagtggctacctagctccagaccaccctcgagaatgtggactctttccctcaggacgagtccctaatgatccattacttatgtgtctagtcataatctatgcaataaataatctatctatcagcttctatggttttgactaagtgttgctatctctacaacaatgagttatgcaacctagtttcaaaacttatctactagcctaacaactaagctacaaaagtaaaccacacaaccaaggtacacaattagaggtggtaatgggctctaaattttacactataaaatttaaggatcgaagcatatctaggatcaggccctatttctatttatttgtgaacctgaggtcaattcggagctgtacgcatcatggtactacatttggatcatgat

SEQ ID NO: 3450 - DNA, 5586 bp, Arabidopsis thaliana landsberg
ctagacgggaaccaaatacagtcactgaggacagtgaaggtcaagatggggaggatttcagtctcggaaaaaatcgagctgacagtaccactcgagcatccactccagcatccactagagcaaccactcgaccacgttactcgaccaaccttcccagcgacatcaccaactgctccaaaaccagttgcggtcaagaacaacgaaaaggtctttgtccctcctccttaccaaccatagcttccattttctggtcgtcacaagaaagcattggtggataagtttagagctatatttgccaagaacatcagggaggttgagttgcggatacctcttgtggacgctctagcactaatcctggattctcacaagtttctaaaagatttgatcgtggagagaattcaagaagtgcaagggatggtggtattgagtcatgaatggatgcagtgctatcctaagaagcttagtgatcctggttcattcactctaccatgctctttaggtccattggctttcaacaaatgcctatgtgatttaggagcatcagtcagtctcatgccgctctttgtcgccaaaagattggggttcactcaatacaaagcctggaatatatcccttatccttgctgataggtcagtaaggatccctcatggtctactagaaaacctaccaatcaggattgaagccctagagatacaacctgactttgtagtcttggaaatggatgaggagcctaaggaccttttgattctggggagacctttcttagcaactgcaggttctatgattgacgtcaagaaagggaagattgatctaaaccttggcaaagactttagaatgacctttgatgtcaaagatgcgatgaagaagcctaccatagaagggcaactcttttggatcgaagaaatggatcagttagccgatgagttactggaagagctggtagaagaagatcatcttaacagtgctttaaccaaaagtggtgaagatgggtttttgcatttggaaacattgggataccagaagctgttagactcccataaagcgatggaagaatcagaaccctttgaggaattgaatggaccagcaacggaggtaatggtaatgagcgaagaagggtcaactcgagttcaacctccactctcgaggacgtactcgaccagccactcgaccttgtctaccaacgaatctggggagccgatcattccaacttcaaatgactggtctgaacttaaggcaccgaaggttgatctcaaaccacttccaaaaggtctaaggtacgcattccttggtccaaactctacttaccctatgatcattaatgctgagttaaatagtgatgaagtgaacctgctattatctgagcttagaaagtataggagagcgattggttattcattatccgacattaagggaatttcacctagtttatgcaaccataggatccatcttgaaaataaatcctattttagcattgaaccacagaggaggttaaatcccaatttgaaagaagtagtgaaaaacgaaattttgaaactgcttgatgctggtgtcatctaccctattacttgggtttctccagtgcattgcgtccataaaaagagtggaatgactgttgtcaaaaatgaaaaggatgaactaatccctactagaactataactggtcatagaatgtgcattgattataggaagttaaatgctacatctaggaaagatcattttcctttaccattcattgaccaaatgcttgaacgtttagctaatcatccatattactgctttcttgatggatatagtggtttctttcaaataccaattcaccctaatgatcaagaaaaaaccactttcctatgtccttatggaacttttgtttataagagaatgtcatttggtttatgcaatgctcctgcaacatttcagaggtgtatgacctctatattttcatacttaatcgaggagatggtggaggttttcgtggatgatttttcggtctatggcccctctttctcctcatgtttgttgaatcttggcagggtattgaccaggtgcgaagagactaatcttgttctcaattgggaaaagtgtcatttcatggtgaaggaaggcatagtgttgggtcacaagatatcagagaagggtatagaggttaacaaaggaaaagttgaagtgatgatgcagttgcagccaccaaaaacggtgaaggacatcataagtttccttggtcattctgggttctacagaagatttattaaagacttctccaagatagccaggccgttaaccagactattgtgctaggagaccgagtttgaattcgatgaggactgcctcaaatcctttcacaccatcaaggatgctgatatgagtcaaattaccctaatgactactctctcaaataaagaggttgttagagcacttagggatcgaattccacaaagttctcggatcacacaatagattaatagtttcgaataaagctaaacagaaaatattataaaaataaaagacaagaaaacaattaaaattggttgtagatttagatgattaagacgtcggatttagggaaattcctaggagatatcagaatagtagaactagcattaagaataatcaaagatgaagaattctaaatatattatcctaacagggtttttgatctactaattcatccaaatccctaatgagaatccctaaaccgaacaagagaactactcaagcatgatcatagaagaacaaaacatgattgaataagaaatcgattatgaaattaagaagagaaaagagtttagaagaatcttctataaagggagtctccacagggttttgctcccaagaataaaagagataataagagttaggtctaaacaatgacctttaaaactatctatatatatatatgacctaaaacgtgcaagacttctttagaactaggagaaagttctgggccaaatttgaaaatcttcaaaaattgaataacgttgcgcaatcgaattgccgtcagatattggtgtcgctcgacgaccaggggcggtgttgatcgacacatacgtagatttttgtctctggattgcttctgcagcttaagttgtctgttttgatccagaatgctccataatctccaaatgcatcccacatatgtaaagacctaaaaaagactagaaaaactctacaaataacaaaagattctaaaatctatacccaaatcatagctaaaaacagtgaaaatcgaggtatatcaactctcctagacttagcttttgcttgccctcaagcaaaacacaaatgccgaacccgtgaaagaggtttgaaaacacagaaactcccaatctctctagcttattaccttgatcaaacaaacccaatccatgcactaaacagctcaagtcgaatcctgaccactatgtaattctctgctagcccacacaacatcctagattccataccaaagcactcaactatatccattaggctctcatcgctgggtctcatcaatcaatttaatgtttaagaacctactagactcattcctgtactataccataacaaatcaaccattcattttctttttatttctggtattctttctctcccccagagttattctttttagagagtaaacaaaggggaactcgcatattggatcgacaccctcggcatttttccaacctttgtaatttatcgttccaaataattttataataatggggtcataggaaacatttctacccttatacactatctgaaagtcttctcaatctctcattatttattttattattattattattatttaaaacccgggagatgaacattttctttttaacacattagtcgacttatcaggtacgaacaaggcgtcaaatcctatgaacactaaccgttttgataaggtaaaaggaagagtagtgagattagctccagcctttgtggattatgttgggaatggatgtccttaattttattgattggctttttggattttccattattcggattgatttgaatatgcagtacttaagcaatccatgcaataaactcgaaagatagatcaaaatttcagacaaaaattttgactcaataaaacgactcaaaaataagaaaaagaggagtaagaataagactcgaaaagaaaaacgtagttagtaactgccttccccagaattaaacgtcactgtctccagtggcattcaaatccggagtaagcgaaaaagacacaaataaaggaaaaagaaaaacgaaacaccataccagtgggttgcttcccataaacgcttgtttatagtcaataccttgacttggcggagttcacgacttggatgggggaacatgggacctgtgctgcaatctcgccttccaatgcggtgtgtaaacagatctgctatgtgcagcatctggtgtcgatcgacattggtgtggtgtcgatcgatactaactctgttacttgcaaaatcagtagaggaaacaagctcccgagaaactcgatgttcgtttaccggtgaagcacacttcaaagattttgaagaagtaatagaaggataagtaagagaagagatggaggagtacctatcatagggaactgaaatagatgtgggctaggaaggaggtgcagaaccatctgtctgtgaagcacgatagtgtcgatagacagggggtgtggtgtcgatcgacactgattctctgcagctctcatatgcccgtgaattaacgttgccataattttcctgcaaacttgtgtcaaccaagtagatactttcttcaggtagaaaatcattgataggaacgtcatcttcaaccttgatccgtgacaaatgatcagcaactccattctcaatcccattcttatctcgtacttcgatgtcaaactctcttgaagaagaatcctagtaatcttggcttagcatcctttttctgcataaggtacttgagtgttgaatgatttgtatgcacaatcacctttgaaccaatcagataagagcgaaacttctcaaaagcaaaaaccacagctaacaattctttctctgttgtcgcataattccgctgtgcatcatcaagtgttctacttgcatagtgtataacatgtagtttattgcctttcctctgtcccaaaacagctccagctgcataatcacttgcatcacacatgatctcaaaaggtaaattccagtctggaggttgaactattggagcactcactaaggcattcttaatctgatataaaaacagcatgacactcagagttcacatccttacaaagcaaagctgttagtggtctgacaatcttactgaaatccttgacgaacctcctgtaaaatccagcatgtccaagaaaactcctcacagatttcacgctatctagtgccttgaaacttgtcataacctctatcttggctttatcaacctcaataccatcacctgaaactttgtgaccaagaactttaccttcctgaaccatgaaatgacacttctcccaatttaagaaccaaattcttcttttcacatctagctagaactttgcaaagcttctccaagcatgcttcaaatgaagacccatatatagaaaagtcattcataaagactttcatgaaatcc

SEQ ID NO: 3451 - DNA, 1517 bp, Arabidopsis thaliana landsberg
  unsure (1)..(1517): unsure at all n locations
cattaaaaccctttttcgcaagtaaaaaccgtaactaatgatcaataaaggcttcccccccaaaaatcctgttaacttcttagaatttttcttggggacactgcaccagcaaaaaaacccacataccgatttaaaaaaatgttaccattttgaaaacaaattcatttcccacaaaaattgaaataacacttacgctgcagttggagcaggtgtagcagcaggtcctggagcagctacaggcgcaacatctccaccgggaccctacaagcaaacaatccacaacacataagaatctcggatcaaaataaaaaaaaacttataaagtttgtaaaaagttaagctctgaccttagctaaacgctcctctctcctagcatgcttcctttctcggctagccttgttcttcgccctcttagcctcaaactgatcagagagagtcttctccctagccttctcagccttagacttgtggatactctccatcaagacacgcttgttcttgaacacattacccttaacacgcatgtacatgtcatggtacatgtgcttgtcaatcttcttcgtctctctgtatttcttcaacagacgcctaagaacacgcatcctacgcatccacagtacctttgttggcaacctagcttcacgggtacccttcctcttacctatttaatcataaacacaggaaaaaaggcaagagtaaacaacgctaatcattcttcaaaatcacgattaaatagagggattttcagagttgtgaagtatataccgtatccagagtgacgacccttcatcttggcaatcttcattttgcgagctctggaacgagagtgaatcttggtaggcttcctgatgatgaaaccatccttcacaagcttcctgatgttttggcctacaataagttcaacaccaatcatcagcttcttaatattttgaagctacaaagatcttcaaatatataacaacaatactcgaaatggaacatcattcaaatcctcagtctattaagaagcaatatcagaaatcaaatcttctagctttgattcacaagacaaatcacagttctacaaggcctataactagagatatgaaaccgtaacaacacctacaagcactaaattttcagatcggaaacaaacacagtgattcaaaacctaagaccgtctaccaccgtcgcagacaaacacaggacaacaataaaagcaaaaggatgaagaaaaaagtaacaacatacgggaattggccatggagatgtcggggctttcattgggatcgagccaaactttgcccttcccgcacttcatcactgatgcggcgagtcgcttctggnnnnnnnnnnnnnnnnnnnnnnnnnnnccccttttctggagattggtgtggcggagaactgattagcgaacaagacgaaaagaatttatataccacaatgtttctagggtttccccttttcgagcagtatattgggctttaaaattaaaatgggcttctctaaacccaattataagcattttaacgaatgat

SEQ ID NO: 3452 - DNA, 279 bp, Arabidopsis thaliana landsberg
tttacgggaacaactcacggcggcgacgagtgtgatcttaacgcccaatacgggacagaataaagtttcgaagaaataactggggattacctaagacaccaccacctgatacaggagggcctcacacacatcttctgtttccaagatcgcatggaatcgcacttgagtacgtggagatgtcgaatggacccaagtatgaactggactgtcttgctggacatatctcatacataggtcctggtgatgcaacgagagaaaaacgaccggtctgtaccaaat

SEQ ID NO: 3453 - DNA, 573 bp, Arabidopsis thaliana landsberg
agaagctaaagaagctcgcccccaccaagaaaatccaaaagaagaccaagagccaaggacgccagactgagcggaagaagaaagcccctctagctctacctccctccgggataaagaatttgtccgacgtcgaggatatgtccctagctagccttgatgaccttctcaaggaatttggggacaccttagaaaaggagttcggaagtaccttagaaagcgctcgtgtgtagtgcgacttgtggtaactgtatgcttgtaatgaattggtgtaatgaataaaataacttggttgaataaaattggtatatgcatagtagtaactctctctccccccaggtagatggcttcagataaaaccacgcctaccgcctccgggattggagcagggtttccctaggagctgaaggagaagccgatggagaagggagtgagacccacctcccgcacctccggagctgccattagatttagcccaagttctagccaccaaacccgactcattgaggtcccactagaagtctggagaacagcgccaaatggtggaagacatagggcaggatgagagatttctga

SEQ ID NO: 3454 - DNA, 538 bp, Arabidopsis thaliana landsberg
tgcatagtagtaatcctttctcccgctggcagatggcttcggataaaaccacgcctaccacctcagggattggagcaaggtctcccctaggtgatgaagtagaagtcgatggagaagggagtgcgacccacctccccacacctctgaactgccattagacttagcccaagttctggccaaccaaacccgactcattgaggtcctcaccagaagccttgagaaccagcgcccaaacggtggaagacctcaggacataatgggagattttctaaggctcaagcctcccacattcgccggatccagcaatctgctcgatgctgatgactgactgcgcacaataaaaaggaagttagaggccatcgaatgccctaaaaaccagcgtgttcatcttgctgctcatcaactctccaggatggccctatccctggtgggatagcttcagcgctgccgtctgagatgctacctagaatttgaagccgcttccgagaacatcatgtgccctagggatcgtccagctcaaagaagatgatttcaggga

SEQ ID NO: 3455 - DNA, 469 bp, Arabidopsis thaliana landsberg
  unsure (1)..(469): unsure at all n locations
ttatggcttattgatgttaaagtataacataacatatttatacgattttattttatatatcttttatttatgtagttctgtttctttttagttgatgaaatatttgctcttttatacatatgtttgctaagcatgtgttttttctatcaaacttgatactaaataaaagttttgtgatcttttaatgatagggaaatctacacttacggattcacttgttgctgctgctggtatcattnnnnnnnnnnnnnnnnnnnnnnnnnnnnnnnnnnnnnnnnnnnnnnnnnnnnnnnnnnnnnnnnnnnnnnnnnngtccactggtatctctctctactatgagatgactgatgcgtctctgaagagtttcaccggagctagagatggcaatgagtacctgatcaacctcattgactctcctggacacgttgactttttttcagaggtcacagctgctctccgtattcactga

SEQ ID NO: 3456 - DNA, 563 bp, Arabidopsis thaliana landsberg
  unsure (1)..(563): unsure at all n locations
aggcaccttcttataatagtacagagagtaacgcttttgcttatcttttcacgtccaaggctgcacccgtgctggctccatgttggttaagattttagtttaccttcgctccctcttcttcttcttcttttcccatttattaattttttacagattgttgattctctcttcttctctctactgctgatctatgaattctagtattattttccgataattttcttactgtctcttctttctctgcagagaattttgtaggcgtgaggaaaaaagcaagtcaagatggtaagctttttttcttttctttcagagtactattcatttattttttgtgtagtgatctgccttgtgttttgtttaacacgtttttgttaaaaaatcttgcaggtgaagtttacagttgaagagcaacggaaaattacggatcgtaaacacaacatccgtaacatgtctgtcatcgcccatgtcgatcatggtatttatctctctaanaatngttcgttgtatatgaatctcatatcactctgtttttatggcttattgatgttaaagtataacataac

SEQ ID NO: 3457 - DNA, 1138 bp, Arabidopsis thaliana landsberg
cagtgggagccgtgatagatgtcagggaagggaaaataagcctcagcctgataagcacatcaagttgcagtttggcatcagcaaaattccgcgagggtcatcagaagatgaaaaaaactctgaagactatagagtgatcccagtagaagggtatgagactgagaaagtaaaagagcttaaaagaggtctaataagcaagaagaaactatagagaggaacttaggagtaagctgagtcagatacagaaggaagctcaacctaaaggcggaattaacactatcccgagaaaaaagttcactttaagatggtctgaagagatagattcccctctagaagagaaagaagcctattttaaagaaagaggaattgagtgttctgctgcagacctctccagggaggacgctgattatgatgatgatattagagaggactatgcagaccctctctatcattcattttaatcttgataagtgtgaggagtcaagctagagactttaaacaagctcacttgggaggaagtcccatgtgtatccgtgtaaataatttttactttcttgtaatttttgagttgttttagttgtgtttgtggttctaaggaagaaaggaataacgtgaaggtagagtaaaaattcaaaacttttactctactgatggcctagagatcgagtacattggtcgagtatgagtgatgtttaaaaacccaaaaaaaaaattttaatcatcattttactcgaccaacagaaggtacagaatcttacaaagagtttatcaagtttacagaagattgcaggatttccttgggattttacagtgaacagagagcatagaagaaagacaagaagacacagtgtgacccacaactgacgcccatgtcctccatgcagcagaccaagagacattgaatctcttcacaccccatcccttcactcgatctccacgaaaccccatcttcaccttacccactcgacttcttctctcttgccaccgagttcaatatctccgagacttgtttctcactccgatcatcggagacttgcctcgcttccgtctccgttggttcctccagtcgctgaggtttcgtgtttcttttggttttggaatcggaattgtcggttgacttgttacattgacttgatag

SEQ ID NO: 3458 - DNA, 544 bp, Arabidopsis thaliana landsberg
  unsure (1)..(544): unsure at all n locations
atttacagattatcaagcctcaggactagtagccagtggcagcagtgggctgggacacgctaagaagaacagaagcagaaatggtttttctaaaagtcctaagccagatgatatctgctattactgtaaggagaaagggcattagaaatcagactgtcccaagaggaagcaacaaggatctgctgctgtagcagaagatgacaataagtctgaacatgatgttgctcttgtggctgctggaaacgcccacaactctgatgtgtgggttcttgatagaggagcatcatatcatatgtgtccatggagagagtggttctcaacttatgcacnnnnnnnnnnnnnnnnnnnnnnnnnnnnnnnnnnnnnnnnnnnnnnngttgctggaatcggctctattcagatcaggacacatgatggcagattctgcacactgaacgatgtcagacatgttccatcgatggaaaagaatttgatatcactgagtctgcttgatagcagaggtcttgaatattctgggtgagacggaattttgcaggtctatcag

SEQ ID NO: 3459 - DNA, 6568 bp, Arabidopsis thaliana landsberg
  unsure (1)..(6568): unsure at all n locations
agctcccttttgtttggatctcctctatatgttccatccttttatcaatcaaggtttccaatggtcttatttcttcatatgtggtaacagatcgatgaaatcatagccaggtcgatggaacaagaagagaattctctccgggcttcttctagtcgtgcttctactcgtattacccgaagctctaataccgtaagtcatggataagaaaatttcctgtgtttgcgtcttttttacctggttctttcgattttctgtgttcagatgcgagactaatctttatcaaacatgaaagagttctttcgtaaacttgcacttaaaaagaatctggctttagggatcatgttagtctcatccgttgttttaatgccaatgtatattaattacagatcgcagcaaatccacgtgggagaagtcgcctggaagcacgactgcaacaacattcttcaaggaggcgattcaatcctccacaggctcgtgctcctgttagagcaccagcacggggtcgaggttatcgtttaggcggtgcatctgcttcactacgtacagctctgaatttcagttttccaattgatatgggcttagactcggtactctttttaactccgtttatatcctgaatgttgcctaatgttgttaagtaccgtagaatcatccttaccctttttaatgtaacagagaatggatattctggaggaattagagaatgctattggacactccattaccagtagtaatcttcttcatatggatcgtgactttactgagtatggtatcttattgatagaatttcgtcattatcttactatgattcttcaatatatgaagcttgatagttcaaccatttccggtgcagagatgattacgaattgctgctagctcttgatgaaaacaaccatcgacatggcggtgcttctgctaatcgcattaacaacttgccagagtctacagttcaagtaagctaaaggttcacttgtaaaattcagctttttcatatcgaaattttgttactaaaagcttctatttgattgcttatgtgttaatttgcagactgataattttcaagaaacttgtgttatctgtctggaaactccgaagattggagacaccatacgtcatcttccttgtttgcacaaattccacaaggatgtaaggatctttactgattcaaatgaaaaccccttattaagaacagagattcgaaaagtaaccattgtttatttattgtgcagtgcattgatccatggctaggacggagtaaatcatgtccggtttgcaaatcctcagttacttgacaaggctttcaaattcatcggagaatttgaaaactaccattttacccttccaaaccggtcgatctctggaatcattttgcgggtaagtcaaacattcttggccatcaaatttgaactcattaaacggggttttactaccgtttacgcgcgagggatgattatctgtgtatctctgtgattattttctcgggtttaaatatatctagctaagaactttttgtagattaagaaagttgatactaccacttattcactttagtttaaacatataccttttaaaatcaatttaaatgcacaaggctttgtttaatcgttttattcactttacttgcacgaagaagcaagatacaatcatattcaaagagtaaaacaaactaaagagaaacgacatacatttcagttattgttacatatataacgaattagttttcttaaatgacatgcattggattttagctcctcatcaatgcacattacggttaaacaaattctcagtgacctccgccgccaattcctccaccaatttctttaccggctcctccgccgattcctccaatggctccaccgtcaactcctttacctgctccaccgtcaaatccttttccgactcctccctcaattccttttccgattcctccctcaaatcctttgccgactcctccatcaaatccttttccggctccaccgtcaactcctttgccaactcctccatcaaatcctttcccggctccaccgtcaactcctttaccggctccaccgtcaactccttttccgaagccaccgtcaactcctttaccggctccaccttcgaatcctcctacaccaaatccaccggctattcctccaccaaagcctccaacactgcctccaatccaaccgccacctgctccaaagccgcctccaccgctgataccaccaccgccacctaagtcgccgaattcttttttaaagcccctcttgtggaggagaggatcagggtgagggtgagaaaacaagggcttctcatcaccaaactctgcttctcccatagtaaaatctgtgaccaaagcgaacaccaaaacgaacgcacgcacttcgccggcgattagacccattgttagtggaaacttaaaatgtttgtagttaaaatattagaagctattggaagaggatgttttgatacgaaattgcttcttgcatgagcagtatatatatagacttagagagagatcgtgatagcataagcacttttcgtcaatgtgcatggattcaacctgtacaacaactaggatataattgctgttgagtaaaaacagttaaagatgtttcaccggtcactggacaagttttatgtttcattgtctgcccaactgccatattgatctcatccaacacaaagagaaaaatatgatgcaaatatagttgaaaaattgaagaacatatgacaccaattattatatacagttccttgaattatattaatcatacattcatatcaattatattaaaatttaatttgaaggttgtccaggtttcagagggcaataactaaaaatgaaaatgtttctgcatgtctattcataatttcatattaagtgaaaactcgtatggtctaagagaaaatatttactagaaaataattctgacttgataaaagatgtagtcgctttataggttggaggacaggccatgtcaatctatggaatattgaactatctatataaaccctaaaatgtgatttcatttatttgtgagctttagctttttaggtgtcatcaatcaatgatgtaaactagaaactcatatgctatacttccaaacaaaccaataaagtttttattatgggccgctagattggtccattaacactataagatatatagtctggcccatcattagacccaattttgtattccgactttatgattttgtttggatccatcatatatatttggggtgaaagtgtaatcttattaaacatttaggggtattggtaaaaattacttgacttgttgggtaagtatcttaatattcgataagtctagaatttcgattttgattagacttgtgaaaaagtgaactcagaaattgtgctcgcccaaagtagttcggttcttgtgttcctccgtctgatcaactcttcttctccacctctaggtttctaattttccgattaggataatggccgccgccatggttagttccgccggtgggttactggcaatgctcaacgaaccccatccttccttgaaacttcacgctctctcatatctcatcagattggttgaccaattttggcccgagatctccactagtgtcccaatcatgtattcaattctctcttctcttttttttaattgtttcccttcgtgaggctattctgtttgcttactgggagtaaagcttatgggatttggatgagttttagcactcttgatatttcttagttagggtattacattccaagtttttccactcttgtgtcgagttagatttgaatgcgttaattcacaagtgacaaactttattgaattgctttacttaattctgttgattctgaatagaaccattgttatctgggctaaggacgctcccttaccgtcatgatgcggaaaatttgttcttttgaaagttgtagagactctacttttgcttgagatcttaaactgtttttgtgctattctgagacctttttttgatttttttgtagagagagcttatacgaagatgaagagtttgatcagcatcaaagacagcttgctgccttgttggcctccaaggtacagtttatctttttatttaacttacatgatgactggttttatataaattgttagtggagatacgagtgccagttaaacggataccttaaaagctggtagattgctacagaagttcagagcttgaatttcctgtaatcaagttatgttattgtattataagacttgttttctaacgtttatgttaatcttgttttatctcaggttttctattacttgggtgagcttaacgattccttgtcctatgcccttggagctggatccttgtttgatgtgtcagaggattctgattatattcatactcttctatgtaaggattttgaagtttgctactttcttctcttctactttttttatccaattctgtgacagtagacactagctcggttatcattcttaataggcgtaaattcaaaatcattccaacctgattaaatggaagattaagaaaatagtttatacgatatattttctaactaataagacttgaacgtccatctttcttttaataagattgtgctgctagaaagttacgcaaagacatgataagatagtgatcttacagttactaactgtttaatgttgaatgttttactcatggatgcttctgttttccttatcagccaaagcaatagatgagtatgctattctcagatcaaaggcagtcgagtcaagtgaggtggtggaaattgacccgagattggtggccattgttgaacgaatgctagacaagtatgggatgcagaatttatttatttatgtctgtctacaagtttttcgtttttccttacatggttttctgttttatagatgtatcactgacggaaagtatcaacaagccatgggcattgctatagaatgctcgagattggataagttggaggaagcgatcataaagagtgagaatgtgcagggaacattatcttactgcatcaatgtttcccactcttttgttaatcaaagagaatatagacatgaggtgagtctggtggccacaaaactggattttaatagatgtattatgttaatgatactatgagctcatcttctttattcttttcttacaaatataatggttataattcattgcattctttatgtcaactcaaaacatttttgtaggggctgttaatttgtaaatgataacatccttacttcgttcttgcaggttcttcggttacttgttaatgtttaccagaagctggcttctcctgattatttgagcatttgccaatgccttatgttcttggatgaaccacaaggcgttgcaagcatattggagaagcttcttcgttcagagaacaaagatgatgctttattggctttccaaatctctttcgatcttgtacagaatgagcaccaggcattcctcatgagtgttagagatcgccttccagcgcccaagacccgtcctgtagaagcaattcaagctgttgaaacctctactgctcagaatgagaacactgcaggggatgttcagatggcggatgaaactccatctcagacaattgtgcatgaaacagatcctgttgacgctgtgtacgctgagaggttaacaaaggctaaggggattttatctggagagacatcaatacaactgacactccagtttctttacagccataacaagtgaggcagtttatttaccttttttgatatctcgaaggatatttcattcttaagtcgtttcttccacatagtaaaatttacagcaatggccattgtttctttgtagatcggacctgctgatcctgaagacaatcaaacaatctgttgagatgcggaacagtgtatgtcacagtgctacaatttatgctaatgctataatgcatgctggaacgacagttgacacttttctcagggagaatttggtaaaatttattttctctaccactttttaacttgtttcaacgtcaactatgtggcatattatttaatcttcttttcttttccattcatgtttgaattgtcaggattggctaagcagggccaccaattgggccaagtttagtgctacagcaggattaggtgttattcataggggtcacttgcaacagggtaggtcactgatggccccatacttgcctcagggaggagcaggtggtggtgggagtccttattccgaagggggtgctttatatgctcttggccttattcatgctaannnnnnnnnnnnnnnnnnnnnatttctacgtgatagcctacgcagcactaatgttgaggtgattaattaatatcttacttcaatatagtctctcatattccctggcagcctaattaatacttattggaaaaatatggatgcaggtcattcaacatggagcttgtttaggtcttggcttgtcagctctcgggacagctgatgaagagatatatgatgatgtcaaaagcgtgctttatactgaccagtgcagtgctggtgaagcttgctgcatcacatggctttatttattcttggaactgctnactgaaaggcaagtgagatgctcgcttatgctcatgagacacaacatgaga

SEQ ID NO: 3460 - DNA, 898 bp, Arabidopsis thaliana landsberg
aagtgaggtcgagcaaggatacctcgttctacagaactcattcagcttgaaaagcctaacatattcctcagcaggcaatatgtcgagcttgtgcagaagtttggtagctctgcgagtctgttcaggcatgtactcgtcttccagatcttcgtctataagctcatacctctctgtcatcgctctctttcctcgggctatctcagctttccttctgaaactttcgtattctctatgttctctctctggccttgaagatgacgattctgtctcatccatgttgtagtcaggatcaacagaagaactgccactgtaattgctcatgattctcctgtagggatttagaactcaaagctcaaatgtcaatagttagtctcaaagatagcaatggaaccaagattattgtcaataggcaatgaaacagattgaattggtggagtacaattctgtactcgagtaaactgagctgttcctgagcttagatgaattgaatcgagtatcttctcagaggtcgagttggaatgctacagccggtcgagtgaatcgtggagatagagtgaatcgtgaaagctagaggtcgagtagcttctctgaagttggaaggctctactgaattcacgaacaagaagccgagtagaattttgcaggggtcgagtgctttcacgaggtcgagtgagttcttgaagtcggctaggacggcatcagtcgagtgcctctacgagaccgggaagcgaggtcgagcgatattttatgaaagagacggcggttaatgtggatgaattggtcgagtatacagaaggaatcgtgtgaaatggtttggtcgggtgacggagggaatgagctagtgacggcggcgaggtggtcgagtgaaattatcagaggtcgagtagctgtttggacg

SEQ ID NO: 3461 - DNA, 577 bp, Arabidopsis thaliana landsberg
acactcatagatccatcttatcttaaaagatactctatcttgaaaagattttatctcatcctaatagatctaactgacctcaaaagattctatcttatccttatggattcatcttgccccaataagcatatttatcccgcactagtgtaacaaccataatctaatccaaagtaattagatattatctagtctaatctagttataccgatctaatctagatcccatctaatctaatatggtctaatctaaagtgagttacttaatggaccagttaatacttgtgaaatagattagaccctatccacatgttttaacctagttcaccctacactaaataaaggaacgatagatcaaacaataaagttatgatggattgcataatctgtctatccccacctaacatcaaaccagattttgacctacatcatatagtccatttcacctataactatttcaaccatatgctccatctctactgatatacattaacccgaagcaatgagaccaagaccggagaaggaaaagatcaacctcgtcaaggaaggagagaagtaaactcaaccttcagttgcattgc

SEQ ID NO: 3462 - DNA, 1438 bp, Arabidopsis thaliana landsberg
agtccgttcctgactggattgcgatagtaggaagtggttatatcggtcttgagttcagtgatgtttacacggcccttggaagtgaggtaacattttgattttgtgctaatgatttgcactggtgtgatagtgtgttgttttttgcgttctctttagttttctgttttctctcaatagtaacaaaaggctcttaggatgttgttgtattggtaacctgatcgagcaaatgggcgatagctatattttgcttaaggtttgtgatgctctgcaactccaggaagtgaccaagctcaggggaactcttttttttttttacaggtaacttttattgaggcactggatcaactaatgcctggatttgatcctgagatcagtaagctggctcaaagggttctaataaatacaagaaaaattgactaccatactggagtatttgcaagcaaagtaagcctttttgtctcatgcattttaaattagatatcttccttatacagtgggtttacgaattttttttgttaacgcttctttacagatcactccagcaaaggatgggaaaccagtgctgattgaactaattgatgccaaaaccaaggaacccaaggatactttggaggtaacaaaatgttctgcagatatctgaaaatttacaagagaaaatagttgtctagttactctcacacatgttcttttcacatgcaaagtatataaatcaatgacatgcatacttttgtaggttagccagggcttttcgtattataaaatcagatcttttcctaaaaattaaaataataataataataataataatagaatgtcttggagttacaatcacatttgagacttttatgtgtttttttcctgcactgaaagtttgaccataagttccttgttcaaggttgacgctgctctaattgctactggaagagctccattcaccaatggtcttggcctggaaaatgtatgaattaacaataaaccccattccttatgaatatgttttcattttcgttccctgaggaccttatttggttactaaagaaataataaaagctgtgatttcctcacagatcaatgttaccacacaaagaggttttataccagttgatgagcgaatgcgtgttattgatggaaatggaaagctggttagtggagttttctttcatatagcttatttcttaccaaaagttatatatttttaagctactgagtcactcttggttgataggttccccacttgtactgcatcggtgatgccaatggtaaactgatgcttgctcatgcagctagtgctcaaggaatttctggtaaatggttttatcaatatttcactccaaatgcatctttctttggctttaccttattcacactgaatacgttagattgacctttattaaactctatgcgtctactagtagaggatacacattgaccaagtcac

SEQ ID NO: 3463 - DNA, 655 bp, Arabidopsis thaliana landsberg
catacttccaataaatcaaaagaaagattaaaaaggtgaaacagtgagcaacccaatttttacctaaatacttatgatataaactaccagagaaaaatacgaaactaagataaaaatattatgtaatacacctcaccccctaccccatgaaaaagaccatatattccaagaaattctaccaccccttccctttgagcaaaattagctaacttctagaatgattgctcttgcacaaagaagaagatagaaaaattaggaaacctgttgtttgacatttttcaaatatagtagtagtagaaagcaccactaggccctaaaactttagaaaatcacaataaaatgaccaataggttccattggctaaaatttggtacaaagtcttattattacccctagatgccagcaaaaataaaccttagggaaaaatccactgttagaaaggagttgtagttcaaagtacccctttgccctaagttttaatatttttgcacagggaaaaccattatcattttaagcctcaatttttgagattgagttatgcaaactagtaagaagccctgtaattttcagaatttttgtaaatttttgaactatgttgtagttcaacgtctctaaaatgcataagtaggcaggagaaagagaggataatagaagt

SEQ ID NO: 3464 - DNA, 532 bp, Arabidopsis thaliana landsberg
  unsure (1)..(532): unsure at all n locations
tttgatttttttcaaatggaatgatagtaggaggcaccggtaagccctaaaactgtagaaaatcaccatttattaaccattacgtatctttggctaaaatttggcataaagtcatattattacacctagataccagcaaaaatagaccttagggtaaaatccactcatagaagagagttgtagttcaaagcatctcctctgtcctaaattttaatatttttgtgtagagaaaaccattctcattttaagcctcaatttttgcgactgaattatataaatcagtgaaaggtcactataatttttacaggatttttgtaaatttttaaatcaatgttgtagttcaatcccactctaaaagcctacttagaaaaaaggaaaagaaaggattaatgaagtactaaattaagccataatannnnnnnnnnnnnnnnnnnnnnagtcttcactaagacattgaaggtttgttgagtacaaccttaatccaacttcctagatnggccacacctacttctaattaccaagtataccacta

SEQ ID NO: 3465 - DNA, 3012 bp, Arabidopsis thaliana landsberg
  unsure (1)..(3012): unsure at all n locations
agtagacctttatttctacttgataagtacggttccataactattccacattctctgtataaactatagagggaacacctttatgaactgaaatatatatattgaaattttgtgttttggtgtgcaattacttagtcactcatgtatagtcttcaacctcatagtttcttttgttgatgcttcataaaactgattatcatactgaagttaatgtgtttgttttgttttccagaatggatttagagtctatacaattaatggcacttctcaatgcacaaaatgacttaatagatatgaacgaagaagacgcagaagtgcaagcaccggagcaaagtgaaaaacaaattcagccaactcaaactcaagttccacgaaagagaggcaaaacgtcaactgtgtgggacgattttattttaataggattaggaaataatgataaataaagagctaagtgcatccattgtggtgtaaagttggtgataggtactagtagtaaaccacatgaaaattatggaacaaatcacttaagtcgccatttagatacatgtcctaagatgcctaagaagatagagaggccggtatatgaccagaagatagatcgtgagatagttagtgcaataattatctatcatgatttaccttttagatacagtaaaacctctacaaattaataatgttaggactgcaaaattttattaatttacagaggtattaatttatcgataaattaatatttataaatttatagagaaattttcttaatttggtaactttttaaaaatttctataaaatttctttcattatagaaaatatctaatatctttctaaaacccgttacaagtaaaacatgataataatgtatagaaaacaacactaaaagttttgattcagtaaaatatgaaaactatagtcaaagaaagaacaaatgaatttaagcaaaaaaatattataaatctattctaaagagtttttttacatatatatatatatatatattgataagtttatacaattattaatttattatattgatgggaccatatgtttacatatgattttaaaaaaaagttattatcttattaatttatcaatttatgtcattttttatactaatcctaatttataaaagttattaatttatcgagtattaatttacagaagttttactgtatatagatcgcacaaaaaccattagaatgaggaggagatggcagattcatcaatgtcattactggtttcatcgtcgtcactgatttcattttctcctatgttttcgccaatattctgtgaatcttctgtatcatcgccactattattatcttcggaatcagtgtcactcatgagatagattctataatgtataattaatctcttttcaaactcaaattagcttcatatattactatattttacccatttttttactactttctctttttatatacaaattaatactgatttttcttcattttttatttatactttctcatttgtacaaatcaaaaacttaaaaaaaaaaaaaaataccaattaaaaatgtatgtactacaataactttcgtttgcaaaacaattcactaatgcgcacaaaaaaaaatgtaatggtaaatttgggggtgaattgaatgaaaaattaaacaagaggggcatttttgtgagttgtttttttttcttttccttcgttggctctggagtctggacaacatcgctaaaagagagatctctagatcgctggtggattcgaagaatctctcacggtcgtttcttgacgacggatcaagctctattcctctagtatcatctaatccatcgagcaattctcattttgatcctccgttttcatcatcttctggaatcaattttgctcttgttaaatctgaaagttctgaggataaaatcatgaattccaacttcgggaagagatcatccggatcgaccaatagcttcgatttcgatctggggcttggatcgagccaaggtagacctctgaatggtcagaagagccaaacatcttcttattcgagctcgaattcgcagccgagacctgcgtggcagcctggtaagccgtcgtggacgcatcaacctgcaccgaagcagagtacgatccgatctgagatcggaagtggaccgacttcaatggtgggtgatattcatggtaagacgtggggttcagcttcgggatcgggttcgggtattgggattgtgaataaggatcctagtttgtttggagatttggttggttctgcgataggtcaaggtaaatctagtagaaacgtgccgttgaagaatgcaccgcctgtttcggcttcaggttcgagtaagagtactttttctatggggaatttgggtgattcgttgcctaaatctggtaattcaatgaaaaatggtggtggtatgggttatagtagtaatccgagtggtttttctggtggttacatgagctccggtggttttaatgctaatcttggaggtccttcaatgaaaaatatggctgggggcaatctaaatgggtctggtcttccttcgaatagtgatccatttggttctttggttggtttcggatcaaaatcatcaggaagcaaaccaggaaaggttaacaacaatgcacagaatgatacttgtgggaattttcaaggagtgtcgaaccttaacagtggcggttctacgggaacaactactcaaatcaacgactttgggggtttccaggcttcgaaatcaaacacattctcatcaggaggtagcttcaatgcttnnnnnnnnnnnnnnnnnnnnnnnnnnnnnnnnnnnnnnnnnnnnnnnnnnnnnnnnnatccattaggaatgttctctaattccaaaccctcagctgcaccacctacgccacagaccgaagattggggatttgaaagttttgacggcgangctggtcctaccacgagcttgatggtttccacggcgtcaacgggtgtatcagtacgtcagctaagacaagggcattgataccagagcaaggcaagtatgctgatgcataaa

SEQ ID NO: 3466 - DNA, 558 bp, Arabidopsis thaliana landsberg
  unsure (1)..(558): unsure at all n locations
tttgtagtatttatttggctgattttctatactgtgatagatggtttccaaactttatagagctaaatgttgttatttaatattgtagatatcctttcatgagctctaaatatttgatttgatttgggtttaccatataccgatctatttataagattttcttcggatttggtttatctatatctatacttctatatctatatctatatatatctatatctatattaatctattaagaactgacactctggatccacccactacaccatataaaaaatagtgcagaacaagcactattaagaacctctgaccccacccgcgcagctaccatcaaaccacacgtaccttagtgtttagaaataaacaataattatataaaacatattgcagagcgagcactcgaacccacattccactactccagaaatttgggactaaccgtcaaaccacacgtacattagtgtttagaaataaataataattatatttgaataaatatcacaatacatatttatatgatataaaaaactagcanagcacgggggcactgctagtaaa

SEQ ID NO: 3467 - DNA, 545 bp, Arabidopsis thaliana landsberg
caaatcagaaacagatcaatcaaagattttgaaatgtgtaagtgctttatgatactaatgtttacttcagagaataattttttcaacattcatcttgtttattttttggagttgcaccaaaattagcagcaagtctatactaatctattaagaacctaatgtggacacctggtaataccacggcttcgccctccgctaccatacagtgcaaaaaatagtgcaaaacgggaacttgaacccacacccccttgctacaaacatttaggggtaaccattagaccacacataccttagtgtttataaataaataataattatatttgaataaatatctcaatacctatttatctatactactctattaagaatctaatgtgggcacctgatgctaccacaacttcaccctccacgatgcgcccccgactggttctcccgtccctctctcagctactgccctgtagacacgctgacactctaggcccgtccacactctctgactggttctcatgccctctctcagctactgcctgtggatccagcgccac

SEQ ID NO: 3468 - DNA, 590 bp, Arabidopsis thaliana landsberg
tgttattgttgcccagctacccgatgagattgttgaggatttcaggagactcaacctgggaatagttgcacatactgaaggagtcactattgaggtggaacctatcttagaacaagaaattcgcaacggtcagattggtgatgctaaaatacaagagatcaaagatctgattactgaaggtagaggtccaaaattcacggaggatgaacaaggcacgatatggttcaagaaccagatatgtgttccggagattgatagcctccgtgagactatattgaaggaagcccatgactctgattattctattcatcctagtagcactaagatgtatcaggatttgaagcagaagtactggtggtatgggctgaagagagatgtggctgcacatatggctatgtgtgatgtgtgtcaaagagtcaaggccgaacaccaaagaccagctggactattgccccattaaagatacctgaatggaagtgggaagagattggtatggactttattgttgggttgctcgcatcccgaaagtagggatgaaacggggacgatacagctggatacagggtcatccgtatcctaccctaatgtat

SEQ ID NO: 3469 - DNA, 543 bp, Arabidopsis thaliana landsberg
  unsure (1)..(543): unsure at all n locations
tattatattacatgggtccgcctcgttaaaaacctcaccaccatgaggaaaagagtgcgggcctgattgacattgtttgaagaattacaaaggcacttgggccttgaaccttagataaagaatttgcgcaagttatctatattccatgaatgctctaggtcttcaccagatgatgtggtnnnnnnnnnnnnnnnnngcgatgcttttgtcttgacgatgcatggcccttcccactttggctcgagcttgccccgagactctgttctgatggttcttgtgagtacgtaggtctccttcttttaattctcttgtgacgacattgttgtcacgccatgccttagtttgtgcttgatacttgtgcagggcctgcaagcggaggacacgatcttcgtcgataagatctttagaagttgattcgtcgacgtcaaggatggctaatttgtctgttagtggggatccgtgctttaactcttgcgatgtcattgcctcggatccgtacatcagacggaagggtgtcaactcggttgactgcattctgttgtg

SEQ ID NO: 3470 - DNA, 462 bp, Arabidopsis thaliana landsberg
  unsure (1)..(462): unsure at all n locations
tcgggcattgggtgttagacgaagaatttgcnnntgttatctatgttccacggatgctctaggtcttcgtcggatggtgaggtgagcctgtaagcattcgtcgacgttttggttttgacgatgtagggcccctcccacttgggttcaagcttgtcccgagactctgttctgatggttcttgtgagtactaagtctccttctttgaactctcttacgatgattgtgctttcgcgccatgccttagtctgtgcttgatatttgttcaggcttccagagcgacgacgcggtctccgttgataagatctttggaggttggctcgtcgacgtcaggggtggctgttgggcttgttcgtgggatccgtgctttagctcttgcggcgtcattgcttccgatccgtacatcaagcggaaaggtcgtgaacccgttgctctggactctgtcgtgttcaacgcccatatgac

SEQ ID NO: 3471 - DNA, 517 bp, Arabidopsis thaliana landsberg
tgagacaaagctatccactttcgtcgttcttgaccactacaactcgttcttgactgttttcaagaacaaaggaccggaacctggtaaacccaaaaagaaaagtttaaattttggatcctagctaaaatgttcatttttcttttatgatccttatatatatatatatcttttgtgaatccctcaggtgtttcgaggtttgggaacccgttaaaaccgtgttgtgtcggggtcaacagcagttacgactgctcaaatgtggatgagaagggtgagaagaagtacataatttgtgaagatccaaaggctgccttcttttgggacatctttcatccgagtgaagaaggatggagatctgtttactcagttctacacaaacatctcaaagctatttggatttaagagtaagactaattatatgctcttcttttttggttgttatatcattactcagccgtctcggcttgtcttgtagtaaagcgagtttcacaagtcaagctcactggttcgaatgtcaaca

SEQ ID NO: 3472 - DNA, 1676 bp, Arabidopsis thaliana landsberg
tctgaatgtagcttggcttagaccaaagaaaaatgaggcttatctaaagagacaaggtctctctggaactcctttcacctttcttgtcggagacattaaaagggaagccagtatggtggagcaagaaaagtccagacccatcaatctaactgatgattacacgcatcgtgtcatgcctctgatacaacagaccgttaaggatcatggtaagaaatggtttgatctgaactcaaaacagagatcctctgtttttctaatttatgcgttggttagtgttaatatcctctgtttctatggttggtttttgtttagggaagacatcttacatgtggatgggacctatagcgagtgtgattgtgacgaaaccagaacacatcaaagatgttctaaacagagtttacgatttcccgaagccgccagtgcacccaatcgttgagctcttcgcgactggagtcgcgctgtatgaaggagagaaatggtctaagcacaggaagattataaacccttcttttcatcttgaaaagctcaaggtcttacttacatcagttcttatggtttcacactttttaccaatccttatctgattgtttgcttttttctttattttgtagattatgatacctgcattctacgagagctgcagcgagatgataagtaaatgggagaagttggtgaccgagcaaggatcatcgaatgagatcgatgtttggccatatcttggagatttaacatcagatgtaatttcacgtactgcatttggtagtagctacgaggaaggtaagagaatctttgagcttcaagaagaacaaggccggcgagtgttaaaagctcttgagttggcttttatccctggaatgaggtaaacggtctttagtgttctttcgcttttataaatatggaaagatcatatggttcttctcattgtttaggtttctaccaacaaagaacaatttgaggatgagacaaattaacaaagaagtgaaatctagactgagagagatcatcatgaaaagacagaggggtatggatacaggggaggctccaaagaatgatctgttaggaatacttttggaatcgaattctggagatcatggtatgagtatcgaagatgtggtagaagagtgcaggctgtttcacttcgcgggccaagaaaccaccgcggtgctgctcgtgtggactatgataatgctgagccatcaccaaaaatggcaggatcaagctagagaagagatattaaaagtcattgggaagaacaacaaacctaattttgatgcactctctcgactcaaaacagtaagtactcttgtgtatttttctgataatcagaggattaccaaaacttagacttacttttcttttgacagatgagcatgatcttgaacgaagttttgaggttatacccaccagggatactacttggtcgaaccgtagagaaagaaacaaagcttggtgaagacatgacactaccaggtggtgcacaagtagtgattcctgttcttatggttcatcgtgatcccgagctctggggtgaagatgtgcatgaattcaatcctgaaagattcgcagatggtatctcaaaagccacaaagaaccaagtttcgtttcttccgtttggatggggaccaagattctgtcctggccagaattttgctttgatggaagctcagatggcactt

SEQ ID NO: 3473 - DNA, 558 bp, Arabidopsis thaliana landsberg
  unsure (1)..(558): unsure at all n locations
aaggtgcatcacgaaaagggcattagaaagaaattttcaataataaaagaacaaagaatttgtagaactgttattatataattaaaaatattggaatacaatattattaaagttaatcttatttttaaactaaaaaattaaaatgtacataattattctaaaatttttattttgtggtacgaggagttgcgtcgataacttttaaacattattcctttagtataggagggaaaaagagaatgaatggaatttttgatatgtaattggcttcagtttccaaaaatgttttgcaataaacaggaccaatgttaccaaacttggcacattgaatattaattgagaaatttctgcaaagcattctagaatatccattacagataaccaatatttaattatatcagttaatcttgatatattaagaattgactgaaatgaaaataaaaaaggaaaatgagctggaaactacggactacggtaattggttatttacataaancgacacacatataattactaggaagaaatcatgttcttaatagccaattagccatgatgaga

SEQ ID NO: 3474 - DNA, 2469 bp, Arabidopsis thaliana landsberg
taccctttacaatcgattacaatcatgacacaaactatcatgcatcaatctgccttttcatctttaagtcggtgcaaccttcgtatcaaggcatgttgtcatgccgaagttccctggaaggtagcttcgtcgttatttctgtgctgatcttccgaaggtgtttcttcttacaggaccttcggctatgaagcagacccccaacagtagccccttcgcggtgctagatcgtttttcgtaacgagcttgatccgtgaaaaattgtcttaggcttcggaatgccgaaggtccgaaaaacaccttccctgagctcgttgccgagaaacgattaaaataatccgaacgcgaggtggcctcccatgcggcgggtatgcgcgatctggcgattcatctcccacgcaccgtggtccaccgttcagtgggtgcgggtaactattgagcgggtgcgggcaacttgacgattcaccttcccacctgcggcactatataaacagacgggtaggtgtgaagttaccacaacattcattgctattgcactgttttgctgccaaaattttagtcatagccgaagcttaatcatcgtgctcagacgaaactttgcttttgattctacttcgtcacaagagaaagagcttcgggaaaatcaaaaaagtcaacaacaaaaatttcaagaaagtcataatcaaatggccagagttcgctccactgctagggttgatcgtgagggagatgagaccgaagctagtgagacttttccgatttccgaagcaatgaagcggtctgggctggtaacatcggaggacgtccctgtcgctgaagcagagcaagctgatgttgaggagactgaatctgaagatgattatagcagccggtgccgagcaaacccagccatctggatttcgaaaaatccaccatctccgaaggtgacctacctaagatgttcaaattgggctattttaatgaagaaaagaaagagttggtcgcttcggtggggaagaaactaccccgaagccaggaaaggatgaaatagtcattttcaagagcttcctaaaagctgggttgagattccccttaaataggatgatctctgatgtgctgcaaagatttggcatctattttcaccaacttactcccaacacgattgtcaggctcagcgtctatatctgggctctccgaagccaggcggtggagccgtttgccgacagcttatgtcgagttcatgagctgcattaccaaactaaggccagaaaagatggattacatgaaaattttggttgctataattttgcttatcggaaaaccacaaagtttcctgtgattagctaccgaagcaaatggccggcaggctggaagtcagaatggttttatgtgaaagttgacgaagacaaagagaagctagtacaaagccctcttgaattgatcttcggagaaacaagaccgcgatgccaaatgtcattagaaggtcccacttgggctgcactggctgagtttaaaattatttcagagcatatcggcacaagagacctggttcaagagttcttggccttcagggtttttcctactttaaaagaatgggaaatgccgaagctagaggtggagaagaaagaaggggaacttgtgcggttaccttatcatttaaagtttaaaaaacattttaaaacaccttgccaagagtggttggatacaattgaggttatgtgcaacgagatcctcggcaactattctaaaaaagaagatcaattaatgattgcggctttcggcactcgtccgaagcaaagaatgaatcgggtgatggatgctttgaattttgattatcctgactatgggcagttgggcaaagttgctgaaaggcagaaaagaaaaagagttgccagcgctcttgacaaagaaggtaccaaattggctaaaaaaggacaaagaaatttctgagaaaagaaaactgagccctgagtcgaagatagctgctccaaagaaaagaaaagctgcaaccccgaaaccaaagacgtcgggccaagaggaggaagctcctgcgacaccttctgctaccgaagtggaagagattctaaaggtaatgactgaacctttgcctatcaagctaagcccgtggcgccagaactgacgaagttttttcagaaggacaaggagcccgcgaaaacgaagaaggcgggtaggccaaagaagcaaagaatcattacagtgatagaatccatcgaagggacaccaccacaagcttcagcttcgaaggccccagctattgagagcacaacagctactgaagctacaaatgccgaagctgctggagccgaagacattaatttagaaagcatggttgctgatatagataaaatactattaaacatggccgcggaagaagctgccgcagaagaggctgtcgcagccaccgaagagattacggcctcagagcccgagagaaagaaagaaataaccccagacccttcggaagatgaagct

SEQ ID NO: 3475 - DNA, 543 bp, Arabidopsis thaliana landsberg
  unsure (1)..(543): unsure at all n locations
ggatttgcccatcaattatcagccagaggtaagatactaatctcnttaacttttttttttgcagctattttctgtttagagtatgtttgtatttaccatttgctctgtttcgacaggtgatgctgaacttcttgaaggactttgagaccaagctggaaatcaaaatcacttgctcacaagagaccgagccactaggtaccgctggtcctctggctctagcgagagacaaattgcttgatggatctggagagcccttctttgttcttaacagtgatgtgattagtgagtaccctcttaaagaaatgcttgagtttcacaaatctcacggtggggaagcctccataatggtaacaaaggtgagattatcgaaacataatactctccagttacgagataagtacgttattcatctaatgtggacttgcatgtattggttatataggtggatgaaccgtcgaaatatggagtggttgttatggaagaaagcactggaagagtggagaagtttgtggaaaagccaaactgtatgtatgtaacaagatc

SEQ ID NO: 3476 - DNA, 2177 bp, Arabidopsis thaliana landsberg
gttttgttcttcctcgctactttgttcattacctttgatcgtttgttcatatacctcgttcaattgacagttgatagtaaaaaattaagtaatctgaactgaagtagtatatcttagctagtcgtttttatttagaagtttttgatcttacacatgtatacgatttttaaaagtaaaactatcagagagagattatacaatattatttgattgagaaacagtcaccttttacgtggaacttcgtaatgagtttaggtccaataacattaacaccgcatagaaactagcataaattaagtttactaagtcaatcttcagatactttataatataaaaataaattttatatgatatgtatgtatgcacacatttctaattaaatcatagaaacctttcctatatcactaaaaatattcgagaaaaagtagtttctgatatgcccattttttaattaatggtgtatgttaatgggcgttgataatcaaatcccaccaagagtactgattaggtcaatttgtttttcaaaatctagtttcaaatattttaacttaagcttttttttcatctttatataatatcatatttagtaatattaattttctacattttcttccttaattaaaatcatattttaaatccacttcttttaacttcaaacattccaattagtgttcactaactacaggaatatgaagataatgttataaaattagtgaaaggaaagagacgagaaatatgagaagagttagtgggcatggccgcagtgtcgaggcagaggataacatccgccaagggaatccaatgaagctactcgtgcggcttttcttatcattttctctctctctctctctctctctctctctctctctctctctttttcacaaaaattaaaaacacatattaatcacatcatcgataatacagaattgattattcttttttcaacagaataaagaaatgattcttaactatctatacaagggtcaaagcaatcaaaagtgtacatgaagaagctctagttatactagaaatgtccaaaacaatacacaattcaccaaacaaggaattagaagccaatatgaaaaaataatcatatctcttttaagctaattgatttgcttaagaaaggacaataaatattttgaacaaaaaaacaagaaatggataagaaagatttgacagaaagaacaagaaaacactatgattgtgattttaattgattaaacccgtacaatagtatctccattctatataaaaaaaagttttcaatcacataattttataaaattgtgatttatgttgaataattagccatttcaatgattttctttaaaaaaatatttctatttctctagttacattatactttatcactttactctgcctatatgtattattatttttacaatctttttcatttcttcagtactactagcaatcatgcaagtactaaagagctgaaaagctaaaaatatataaaaccaaattaaagatgttgaagaaagaaaaaaaagagggtaagctattgggcctttataagatacaagctttaatacccattataggcccaggtaaattaattacacatacactcgaattttaatatctactaaaaaaaagttatatgttgccgccgttcacgtggacagcacgtggcagctaaaattcaaaacggaacaaaaaatacttcttacgacgacgatcaaatacaacaacaacaaaataatataataaaattcaattccataaatatttttttttttgttctttcctctgactggaaaaagcttcctcagatcgtttcatcgtccaagcggaagaagcgtctccttcaatcaccgtggacacctccgagactgtctccgattgaatggtatctcgaaatttcagtcatttatgattgcatgaacctgcttattcctttgttctagggtttttgttgtcttgttcccatctctcaatttttttttttcaaagttgcaaaattcaagtttcgattttttgtgaattctatcttcttacgtttctgggttttgattgtttcttgttactgaaatcctttcgtggagtattaagagtcaaaattgctgaattttattgaaattctgttggtttgtggtggatgttttggtcctgtttcgatagaatgggatatgtagttgtagatcatcactaaa

SEQ ID NO: 3477 - DNA, 596 bp, Arabidopsis thaliana landsberg
  unsure (1)..(596): unsure at all n locations
tatcggcacagtacttgaccaggttagcccgtcttagttttgttactgtatatattatcatcaagaacaacaggaaatggtttacctcttgcattttaaatattacattgctctgatctgtatgtttttttctcatattagttcggcgttttcaaatctatatgtttctacccatattttatatgatgtcaaccttttgatgcagtactcaaagtttgtgaagcctgcttttgatgacttcattcttccaacgaagaaatatgcagatattataatccctcgcggtggggataatcatgtagctattgacttaattgtgcaacatatttgcaccaagctgggtcaacatgatctctgtaaaatatatcctaatctctacgttatacactcgacatttcaggtaattgatatatcaatctcatctacatacgagtaacattctcttaactaccaaacaagatccagaaaattgatttctcttgcagataagagggatgcacacccttatacgagattctcagacaaccaaacatgatnttgtcttctattctgatcgattgattaggctggtaggattattaaagctcatttaaatg

SEQ ID NO: 3478 - DNA, 1907 bp, Arabidopsis thaliana landsberg
  unsure (1)..(1907): unsure at all n locations
gctctcagcagattggcaagtcactttcctgtcgcagtaaagacaaaatctcagcacagaacaatgatttaaaaattaaataaaaaactagtaataaccaccgatttttttttttttttttttcattcatcttcttacaatttccaaaacgtttttgattaccaccaaatctcacatcatcgagatacccaaaattcataggtgtaaaaaaagagttgaaaatgattgaaagaacacataagccaacctgttaccaaagagttcacatttagcttgttgctgttgttagtcatcatcattgctctccaaaccctaatcatggcaagatccagaagaaaaaaaagcactaggcgtaaacagagccataagaaagagccatgagtgacacagcggcttgttcttcttcaccaagcttctgtcgttgcttctgcaccgatgatctcttccttatgcccaaatccatcaaactctgtttgaacgattcaccaaatttacggtttccgccgcccgaactcgagttctttaagtgctaattatctactggacctcctcttctcttcttgctgcttctgatcccacacgcgttacgcaacgactacacagaaccaaaaccaaaacatatcagaatcagagatcagagacaagatcaaatgatcaacctcgattttttccccaaaatcagagtgaaattagggtttatgtatgaacctttggaccnnnnnnnnnnnnnnnnnnnnnnnnnnnnnnnntggttccacaatcagcacaagtcttcttcttgtcgttaacactagtgttgttctgttcgatcatatcttcagctcttgttttcatggtttctgaatcaaccaataagacctgaaacaaacacagaagaggcgatcagcttattattagatcatcgtcgtcagaatcgaaaaatagagatcagaagaaaagcaaatcatttttaccttttcactgtgatctagcattctgttagatcgtcaattgaaatggacttattgaggatgtggttgaagtttggcgccgcgatcgggaaaacagagatcaaggaaaggatcagaatcaatctggttactagggtttagagaagatcacgtttcttcgcaaattcacatgcagaggacttggaaagagtgaagaagagtgtcagcgaggaagagagggttttcaaagggtcgaaccgacagagacaatgatccaaagaaaaaccaaacgcgattataaattggttcagaattaaaccctaggatttggtttttaaatgacgaaactgcccttttattcgtccccattatcagaagaagccacccgccaaaatatggaatttttgaggaaaatgtgtattttcgcttattgtctgatttggtgaaaagaaaaagggcgccactttgaccattgtttgatcagatacggtaaagagtaaggtttcttcgaatggtcaatgatgatgattcacatgtatttgatcgtagccggtcgttaacgatctctacaaatttaacggttcttttcttccgtgtggatttaaggatttttttttttttttttttttttggagtgtacagcactagacaatcatataaatctcacagataaaaaatgtcataattcaattctttttgtgtagatcagattgcaaagtaagcaaaatcacaaatttttttatgttgggtgtatgtaaattttaaatatagatgcattttggttatatcctaagtagaagatccactgggaaaccaaaattagtgaaattttagatactaaagatagatggattataaagaggaagaaacaaacaaagagagtggtaggggttaagccatgttgactactactagatagaattcacaccatatattattggtttattctgcatagttccaaaataagaaagtgcgctt

SEQ ID NO: 3479 - DNA, 1826 bp, Arabidopsis thaliana landsberg
tgtgacaactgtgggaggaaaggacatgtcgcaaagcattgctggggtagcaaatctgatgagagagcttcagggaaaccaaaccggatcaacttctcagtcgctgcacctgtggaatcagagactcaggcaacaaccaacaataatagggagtagtagctgatgattgctgaaaccaaaatgtttatatcaattcacagatatacttagaggtaagtcttttgaataccgttgattcaggattcagaagcagtccttttatgaccttatttcagcttatccatatgtctggcctattagatttatgacactgaattgtataaaatgaaaacagagagatgacgaatagatcagttttggcctgatttaatgtaaacgtaaacttttatgaatgagaactttgcacaaaaaagaatgagaatttttatgtcaaaattgcttcttaaatcctatttggaggatccaaaataaaaacagaaacctcaaaactgacatacaaacaaataaaatgacatcaattgaggtgacatacttaacaaaatcttttacagcacaaccaaaaattaagagtttctttgtcccaatcagttatggaagatattcaaacttgaacgtggaaattttaaaaaggaccagatgggaataatacaaagttagagggtgaaaaataaaagaaattaaaagtttcagggtgaaaaggaaaaaaaaagaaacctgtcagaccgccgtgcgaccaccccgacaaggtagaaccgagccgagtaacgatcctctacagcaccggatgcatccaaggacgatcgtagccgtcaatcacgctctagccgcacggtcatggttcatcaaccagggtttaaggcctgtctcttgagaaatcaaggaaacagaggtacgagcctatagaacagatcctgttcaagtaaggtcgtgacccttgatgctttctatgcatatataaagaaaacgtttcttcactagctcaccgatgtgggacgtaaaattcgtaacaaaaagcaatcataagctaatgggcctaaattgttaacaaagccaatatgttcaagcccaataattaaagaatatggttttattagaacaaagaattttaaattcaaacgtcatttgacattttgaagtgtataacattcaagcaaacagaaattatcatttttgtcttttacacacaaagttaacgagcatcgaactcggtaattgtaacatcattcaaagacgcaatatgattaatctgattggtgtatcttagaattgattctccatctccggtgtaaaaagcgggttgcgagggtctcggtaaagtgaaagaatttgcattgagcattacaacaacagaagccattgttggtctactctctgcattatcctgaacacacaacaaaccaatgtgaatgcatttcatgatttcatcactgacacctattgtttcaacgaaacttggatccacaatgtttaacacttccccttctctccagctcttccatacctatacgtataaaagacaatatatgactttaaatgaagacaataaatgagtcctcaattacaaccccaaactcaaagtctagagtcaaaaaaacaaaacaagagttttattcacttacatagctaaggaggaataatgagctgtcttcttctggagaccagttgtttttcttacctttaataatctccaggactagtacaccgaagctaaatacatcggtttttaccgagaattcgccactcattgcatactcgggagccatgtaaccgctgtaacaaccaaataagtttcggttttcattttgctttacagaactgataataac

SEQ ID NO: 3480 - DNA, 2371 bp, Arabidopsis thaliana landsberg
gcttctgtgtaagccaactcgtaccaaatgagctcgaagaggtattaccaaacctgtgtaatgtcattcttgaagcctcaacgtctaatggagttagatgaagattcttctccatctcatcaattagcgctctaccacccgcatggatacagaaatgatcgaatgcgagcttgaaatccggaatgtaatgctttagcttggggttgagaaacttctttttaacgaacctcacaaagaagtgaaacttctcgcttatgggaagaacaagcggacccaaagttgcgatattgatctttagggttcttgcagctaccattggtagattctttgacaaggaaaccccaactatgccatcttcatcctcttcttgagttgcacattcataggatcggtcatctgctccggtatggacccgcacggtgtgaacaagctcgtattttgcgcgtttacgatctatagaccggttagaaagcaaaatcgcggccccacctatacggaacaaacaatttgtaaccaacattgatttgttgttacccatgtacaagttttgagtgatgttctccgtgctcaccacaagagcataagtgtttctatgaacttgtaacaagctcttagccgcatcgatagcgatgactccagcgctacaccccatcccaccaagattcaagctctttatattgtccctaagtttaaacttattccctaagatacttgacaacgaaggtgttggattaaaagtgcttgaattcaccaccaatatacctatatcactagggcttattccggtgttgcgaaacagattatcgaccgcaccaataataacttcctccgtctctatacgtgatacagccaaattctgttgtagtggcaaagtttgaagaccttcgggtacgtacgtctcttggcctagaccggaacgttctagaatcttctcgcagaagtccatcaagtaatcggactcttgcttccacgcgcctgcttctcgtacaagccttacgtgttgcatgatcctctgggtgctggctttgagatgcgacggtgggaggtagcagctaaagtcaacgagataaacgggtttgggtcgggtcatgaggtaaagagtcgacccgagagcgagataaaggaagaacatggttagagatgtgtggttgttttgtaagtagaggtaaaagttttggagatcttgtgtggaaagacgagacgcctccacggctatagcaaccattaatggtaagaagcagagcttgaagcgatgcgccatgaggtagttgaaaaagatttttaccttcttcatggggtaatccattttagtgatttaaattcttgatgtgcgtctttgttttttctgactcgttttacatttatagaggttgattgagtcagagagtcgagaagaagagagagagagtcccctacatgcatgcaatgaatgtatgatagcaataaataagcaaaaacatgaatgatttcttgtgatattttcttctttggataacgacgacctaaccaaagtttgcaagtttctaaccagattaggtatctagaaattttagggcatatgcattgttgggaataataaattcattttcatctataacgaatcataaaatcaatgttaaaaaaaaaggattcaaatgaaaaatcaatatcaatgtaaccaaaccaatataccggtttaggggggatacacggatcacgcaaaccagataacggcttagaaaggtgctaagtgctaaccacagaccaggatggtcgagccatgtggagacatatacgtattgaagttttgaatataaatatggatggagacactttggcgtttatcagttcactctcaacaacgaatagatgcatgcgtggtcactgacaatgcttttagccaacccgacccaactagttggattatccggtaaatgatatcataaatcgacagaaaactcacaaaaaatgatcaaaatttaccacttttaattagaaaaataaatattaacaacttatgatggtagagtggttcgaaattcactatgttagttgagattttagttatggtgtatgcacaaaagtattggacatcacaactacatatcgatcttaagacattgacaaactagttataaaatatgctgctgcttctcttgataacatttgtcattctttataaataatgctagaaaatgataaatgcgagaaaacaaacatgtgcatttctcaaatcagaaacgaaattgacgcaacactcaaggtagtaaatgcgagtaaaacaaacaaccacctattttcttactcatattcataaaattcgcatcattttgctttagaagaaatcaggaatattaagtctatgtcaggtaacttgggcttttaccttttt

SEQ ID NO: 3481 - DNA, 541 bp, Arabidopsis thaliana landsberg
gaaccgccgatcgaaattacctagtccgtcgttgaaatttgaattttcatatttattaaactctgaaacacgcgacagagcaagagggcaaatcagttgcaaaacacactctcctgaactgttctacgccggccaccaaagctccactcaacacaattcacgatcttaaagaggcaccttcatcgttaccagattatggtgccaacatgggaatgaaggctttattctcttcttactcagaattgagcaaccaatggtctacaagattatgaattagacactcagcttctaagatttaagatatgcaaaaggtggatcaaaactataaaaattaaaaaaaaaaagccataaaggctaacagaagctcgcacttaggcgagaaaacaaaaaccggacaaagccagagacaaaaaatccgacacaacatcacctgaaattaaaagagaagagctttctctttctaaagattttagtgtgagaagagggagaaaatcttgttaaatgaatttttgtttgggaaaaatgtcatttacatcatgac

SEQ ID NO: 3482 - DNA, 1105 bp, Arabidopsis thaliana landsberg
  unsure (1)..(1105): unsure at all n locations
ttctctccaacagaggaaaaaagcttctactataaagcacacatcttcttcttcatctctctttcgctctcagaatcctcttttaagtctctgtttcataaataaaactaataaagaagaagaagaaaacagagcaattaaagtccttaaatcttcttcttctccaattcaatggctcttccgttgccattgatcttccttatcttctctcatttgttcgtttctggtacgaatcttctcctatagatcaactttagttatgattaataatactgtgattctgatgattttatggttttataaacaggagttagatcaacgagcttcattatggtgaacaaatgcgaatacacagtctggcctggacttttatcaaacgccggagttccaccacttccgacgaccggattcgttctccaaaaaggcgaagaacgaacaatcagcgctccaacttcatggggaggaagattctgggggagaactcaatgttccaccgacaccgacggaaaattcacttgtctcaccggagattgcggatctggtaccctcgaatgctccggatccggagcaacaccaccagcaacactagcggaattcacactagacggatctaacggactcgatttctacgacgttagtctcgtcgacggttacaacgtcccgatgctagtggctccacaaggaggctcgggtttaaactgtagcagcaccggatgcgttgtagatctgaacggttcgtgtccgtcggagcttaaagtgacgagtttagacggcagaggtaaacaatccatgggatgtaaaagcgcgtgtgaagcttttcgtacnnnnnnnnnnnnnnnnnnnnnnnnnnnnnnnnnnnnnnnnnnnnnnnnnnnntcgtcgtactcgttgatgtttaaaactgcgtgtccacgtgcttacagtacgcttacgatgatcagagtagtaccttcacatgtgctgaatctcctaattacgttatcacgttttgccctactcctaacaccaggtgattattccatttatacccttttataactattaacacaccttgcctatgagggtagttttgtcaatatagaatgtatcttcttcactgttgcac

SEQ ID NO: 3483 - DNA, 2273 bp, Arabidopsis thaliana landsberg
  unsure (1)..(2273): unsure at all n locations
tcacgcgggtaggtagagccgtgattgatgagctagagaagagtttaaagctttctccaaaacatgttgaggcgtctagaatgactttgcatagatttggaaacacttcctctagctctatatggtatgaattggcttacacggaagctaaaggaagaatgaggaaaggaaacagagtttggcagattgcttttggtagcgggtttaagtgtaacagcgcggtttgggtggctcttcgcaatgtcgagccctcggttaacaatccttgggaacattgcatccatagatatccggttaagatcgatctttgaactcataaaaactagtagattggttggttggtttccatgtaccagaaggcttaccctattagttgaaagttgaaactttgttccctactcaattcctagttgtgtaaatgtatgtatatgtaatgtgtataaaacgtagtacttaaatgactaggagtggttcttgagaccgatgagagatgggagcagaactaaagatgatgacataattaagaacgaatttgaaaggcnnnnnnnnnnnnnnnnnnnnnnnnnnngtttttgtcaaagatagtggcgattttgaaccaaagaaaacatttaaaaaatcagtatccggttacgttcatgcaaatagaaagtggtctaggatctgattgtaattttagacttaaagagtctcttaagattcaatcctggctgtgtacaaaactacaaataatctattttagactatttggccttaactaaacttccactcattatttactgaggttagagaatagacttgcgaataaacacattcccgagaaatactcatgatcccataattagtcagagggtatgccaatcagatctaagaacacacattccctcaaattttaatgcacatgtaatcatagtttagcacaattcaaaaataatgtagtattaaagacagaaatttgtagacttttttttggcgttaaaagaagactaagtttatacgtacgttttattttaagtggaaaaccgaaattttccatcgaaatatatgaatttagtatatatatttctgcaatgtactattttgctattttggcaactttcagtggactactactttattacaatgtgtatggatgcatgagtttgagtatacacatgtctaaatgcatgctttgtaaaacgtaacggaccacaaaagaggatccatacaaatacatctcatagcttcctccattattttccgacacaaacagagcaatgacgtccgttaacgttaagctcctttaccgttacgtcttaaccaactttttcaacctctgtttgttcccgttaacggcgttcctcgccggaaaagcctctcggcttaccataaacgatctccacaacttcctttcctatctccaacacaaccttataacagtaactttactctttgctttcactgttttcggttgggttctctacatcgtaacccgacccaatccggtttatctcgttgactactcgtgttaccttccaccaccgcatctcaaagttagtgtctctaaagtcatggatattttctaccaaataagaaaagctgatacttcttcacggaacgtggcatgtgatgatccgtcctcgctcgatttcctgaggaagattcaagagcgttcaggtctaggtgatgagacgtacagtcctgagggactcattcacgtaccaccgcggaagacttttgcagcgtcacgtgaagagacagagaaggttatcatcggtgcgctcgaaaatctattcgagaacaccaaagttaaccctagagagattggtatacttgtggtgaactcaagcatgtttaatccaactccttcgctatccgctatggtcgttaatactttcaagctccgaagcaacatcaaaagctttaatctaggaggaatgggttgtagtgctggtgttattgccattgatttggctaaagacttgttgcatgttcataaaaacacttatgctcttgtggtgagcactgagaacatcacacaaggcatttatgctggagaaaatagatcaatgatggttagcaattgcttgtttcgtgttggtggggccgcgattttgctctctaacaagtcgggagaccggagacggtccaagtacaagctagttcacacggtccgaacgcatactggagctgatgacaagtcttttcgatgtgtgcaacaagaagacgatgagagcggcaaaatcggagtttgtctgtcaaaggacataaccaatgttgcggggncaacgctt

SEQ ID NO: 3484 - DNA, 1296 bp, Arabidopsis thaliana landsberg
gtgatgttgtttcgttattattgaattcaagtatgcataatctttactgttgaaacaaaacaacacttattttatctggttaataattaaacagatacttgttcatcattatatatatgataacactttattaaatttcagtacataacataattttgtaacgatcatatctaaaataaattgtagtctctctactcccctaaaagaaccttgtcaacgaccatctgaaaatttagttccgacgaaccataaataggcttcgtcgcttcctcagccaagcgctgccactcttcggccttttgcctcattttctttcctttgtctccgtccatgagttctctaaccaactcctcaacctcctccctcctcacatctccaccgatctccatccccacttcccattcatcacaacaatatttataatttgtttgctgttccgcaaagaacggccaacacaccattggaactccaccggagagactctccaaagtcgaattccatccactatgcgttaagaaccctccaactgccggatgagaaagaactttttcttgaggacaccaactcgctagcatccttcggttagccgtctctattagaaagtccggcggaagcattggcacatcaccggctactaaatccggcctaatcacccacaaaaaatcttttttggtcgccgctaaaccccaagcaaactccacgagttgtttcgcactcatcactgttatgctaccgaaattaacataaacgacactgtttggagacttagtatcaagccaatccaaacactccatctcctctctccacatattcgttcctatctgtccgatgtcactttcctcgtcgatatcccgattcacaaatagatgaagcggtccaatagtgtacacttgaggtatgatagaatgaatagaacggacgacatcatgctcaagactatcgaatgtgttgagaatgatagcggaagcgcgtttggctcggtcagcctcatggacaaaaaagttaagcattatgtcttcagtattagttgcacggataaagcttgggatgtctttaagtcctaggtttttcatcgatggtatgcaatttatttttgtgtccaaagaactttcatctgccataatccacttccattttataagtataagtttatatctcaatatttactataaaaacattcaagcaccgtattatatgcaaatttttgatgcatttaattttgatcaattaatactatagattaatctcagagtaaggatgagttatatctggtcgccctaacaatgacagaaaaag

SEQ ID NO: 3485 - DNA, 2609 bp, Arabidopsis thaliana landsberg
ggcaatgtctgataaaaaacattcaattaatagaacatccatgatacatgttagataactcattaacatgttatcactaacctgagttttaccgagtttgtcatacacatctggcattggaaaccctttcatagtgcttgatttaaacttcattttacaaatccggggacactgagatctgcacattcaatatcttcgcataaatttttcctgaaaactggaatcgacttactacaaaacaaacaaaatacaaattattcaaaactaagttgtataattgctaataaaaacaaagttgtacacaatttaactttcttaaaacaattaagagatgaataatgaaatgacatacctccaaaggcataacaaaactaggaaacaccttttgtggaccaactactccattgcattggtccatcaaatagaaaatgtttttcacattttcatcaaatgcatatctcccccacgaaaatattttgcacaactctagatcagccacaaccctaaggaaaaacttctccacacttggtgcattttctcctgtcttaccctttccaacgattacactacataagaagtagagcacagctactctcagacgagcctcagaaggttttttcatagacattaacttttcctccacatctggatattgaattgttgctctgggtccaaaactcttgccgacaaaagtggtactgcccaagctgttgaagggtttggtataactatgacagtagaatcctgacatgagtgcaaattcttcgagagaataccggatcggaacgccattaacaataaacgatacttccctcttcttctctaaacatgatgtacgaagaaataacagccacatacccatcacaccttatgatttgggtccttatgcatgtggaagaagtgtttgaactgtgggtgatccaaaaatcacttcaactcagagtctttaagatgactctccaataatcttattgccttatgaagataacactttgctgtaatcttgaatggctttgtatactcacttggaccaaagtacattttaagaggttgaagagctttggtttcctcatcagaatcttgcaatcaacatagatataccttagaaagcaacatagataaattagaaatcaacatagatatacgtagattatacatagatataccttttagttttgaaaatttataagttagattcgaatatagatatacctagtttatacatagatatacattttagttttgaaaatttataagttaaattcaagtttagatatacctagtttcaatatagatatacattttagtttcgtataatttaatggtagaaatcagcatagatatacctaatttgaaagtagatataccttttagtctctaaaatatctaagttatattcgaacatagatatacctagtttaaatatagatatactttttagtttcatataatttaaaggtagaaatcagtatagatatacctaatttatacatagatatattgtttagtctctaaaatatctaagttatattcgaacatagatatacctagtttttagtttcgaaaatttctaagttagattcaaaatagatatactcaatttatgcatagatatactaatttatacatagatatactttttaaaatttctaagttacaatatcaacaaagatataccaaattcatacatagttatacttttctaattgtgtaaagtttaaagttcataccgctctatcgtcgttagagattgaatttgttgcttcagaatccacttcagcagccgacgctactactacttcgtcattgattgtctgtgaaaccaccacctccgccgcggacgccgccgccaacggcacacatgcgttctttgttcgagccatttctccaaacctacaaacaaaatcatttggattagcactactcttcaatcaatttcgatcacaaaacccaatttgaaacaactcgaatcgaatcgatgaacagttaaatcacttacccaatttcttcgtttcctgtagatataccaagatcgacgaacagttatgttgttgtggttgacgagaattgagaatggttttactggattttacagtgaagaaataaagaagaaacagaaaacaaagggaagaaagagatgtgaatcgattttaccgcagagaattaggggaattagggttttatttggatttgacccgaaaacagtgggcttgggttattttaggatccatttgccctggttgggtcgtaattaagcaatattcttagggttttctgagtaatttactttttttacggaataaaaaaaaatcaaaaaaaaatttctttttataagaagaatatatgagattactcttcagccaagaggagcccctgagaatttgatcgcacattttaaccatagtaacactaacaaagctactaattgcttctaagaaattttttgttggttttagcctcttttgagagaaaatgggtataagtgttgtctaaacactcctaatccatctttaactcgtataattaggccaatgcattagtttgtgacacattttaaccataaaaacaccaacaaagctatttactgtttctaagcaattttttgttga

SEQ ID NO: 3486 - DNA, 534 bp, Arabidopsis thaliana landsberg
  unsure (1)..(534): unsure at all n locations
tgtgtttagaagtcgagtcccataagatcatataaatatatttatcaaaattgatatgatcttatacaattttaccgaagaaaaaaaggttgtaatgaattttcatttattttctcgaaagttgtatagatatttctttttttgacaatcaaactccatatattaattcacggaaaagaactcgattctatagagagccaatcaggtaccgttgaacttacatgggtaaaacaaaacccgcgaactcttgcacattttgcaagatgatctgcggaagtgttaccactacgagagatatacttaatactaaaacaagcaaataaatctctgtaatagacaaaatccctcaattctgcagaaaaagttggccactcctcaggattagatttcatctctaaaagatctgaacaatccgtnnnnnnnnnnnnnnnnnnnnnnnnnnnnnnnactaaacacttcattgaccacaaaagagtttccaattcaacatgaaggggtgaaagacttctacgtgagcctttaagtcctaaatgc

SEQ ID NO: 3487 - DNA, 567 bp, Arabidopsis thaliana landsberg
cgcctataatcctattttgttattaaagaaatactaatagcatttagcttttatttttattttctgttctttttgggcgatttgggatttttttttcctaaagcactttcattttttacagaataaaaagaatgaagatatataaatatcaccggtatttttcatttcataaattatgactttattattctttaattaatcgattaaatatagcaaggacatacaattatataattgaaagaaaaaggaaacaaaattacaacaaaccttttttcaaaaaaaaaaaagaacaactgtttaatcacttccgtttgttcttgctaccaatcaagagagtgaaataaaacaaaaccctaaagaaaaaaccccaagcaacagtaatccacaaacaattccatttactaatatccgtaatcccttgctgttacaaaatatcaatccccgtcgtacacaagtttccgccgtcacattcgtcccccatacaccgctcatacttcttaacagattcactttcacatcgttctgatactcccccaacggcgaattgtcgaataactgaactccttt

SEQ ID NO: 3488 - DNA, 558 bp, Arabidopsis thaliana landsberg
gcaggtcgactctagaggatccccaaactcgatttagtgaaacaatgtacatcacaaggagtttctcagagtaccggagaatccagcagagctaacacagcctcctcctgagggtccaaattctggaattttggtaatccaagaccaacactcacggacacgggctacatcttgcttcggctcgtggttggttgtggactcttctctaagtggtttgccattgccccaaaatcttaagctagcagtcacattcaatattggaggtgatgacagcactcgtgacccagttgtgttcattcctgttcttgataagcctctatcttcaaactgttattacgctattaaacggcatgggaagcattcagggtatgaagtttaatccgcaaatctgaaattcttgaatctttcttcttatataacctgaaaaagtttacaaaattttggttgcattgcagggaagcgtctggaagtgcaaaagaggacgatatagtctcctgctgcttttgctaaagttttgttcatgaagccaaaccaaaacagttagatccttttgacatg

SEQ ID NO: 3489 - DNA, 623 bp, Arabidopsis thaliana landsberg
  unsure (1)..(623): unsure at all n locations
cgctttgtttaaactattttatagatacttgatgagaggtgacaatagggtaggccaagatctttatggagatccagtcaagtttcttacaacgagccatccaaaaaagtcaagtcaccttgtgttctgaaaacttgttgagtctataaaatatgatccaagtttttctcctagtctagatataaacgattactcgatttggtttactcttacaaaaatcagtggaaatgtatgttacgaggtgtttgtcagagtaccagagaaatccagcagagctaagacagcctcctcctgagggtccaaactctggaattttggtaatacaagaccaacactcacagacacgtccatgttgcttcggcttgtgtttggttgtggactcgtatctaagtggtttgcccttgccgcaaaatcttaagctagcagccagattcaatgctggagaagatgacgctacttgtgacccagttgtcttcattcctgttctcaataagcctctatcttcaaactgttactacgctatcaaacgagtggggaagcattcanggtatgactctgaatcttgaagatctgaaatcttgcatctttcatcttatataacctaaaaagtctctaaatttgtt

SEQ ID NO: 3490 - DNA, 2151 bp, Arabidopsis thaliana landsberg
ttgggggtcatctctcttaacgttgtatattttcttagatgtttaatttgattttataaaaatatctacgtactttaagaaccaaaataacataaatcttcttcggttgtgagttttacatttttaacaaattacctatatacagtataccttgatcgcatgtaaatcaagaattttaaacagagtaattgaaattgttgtttgatcctaaagaaagattacatacgactgcattcattataactttcataaatccgagcgactggtgataagagatgcatgcaaaggcctccaagtttggtttgactctggaaactaaagtctcaaattcttagaatattttcagacttttcaaatgaatatatgtcacacttggtgtactaaaaaaacttatgatacatatttttcaaaagaatgtcagatttttcaaaagagttatgtcacatatatttctaaagaatgtcacagtcacacttgatgtaatcatgtcatatttttcaaaagatgtcagatttttcaaaagaatatctcacacttgatataagaatgccatatttttccaaagcatgccagatttttcaaaagaatgtcagatttgtggtaatatttatttgagtctagtttaacattacattcaaaacataaataaaaacttgtaatcttacgaaagtaatagatagattcatgtcatgtacattcagttaaataatcttgtcttattttcgatgaacaaataaaagatctttagatctctaaagaatcttagaacctctaaacatcatatgattagatgtctataacatatatagccacagtataagttagagatcaaacgttggaatttcagaagaccaaccatgtgaggcctgatacaacatcctaggcaataagtgtctgtagggatcactctctcttttcacttttaaatagtcaatgcattgttctacctcagatttaacttgcaagtagagctcttgtgccttctctttgtcttttagttctttctccttacctgccatgaaaaagaaaaaccaccattattgcaacttgcaagtatagaggtcagtgatttgaagtagagagcatacattaagactaagtacatacctgctgtttctattggtttgccaaagtaatagtagaaccgccctggaatcttaggtacaagtcctgggaaatagcactcttggtttcccaattcgctctcatcgccttccctgacgttcaaaatcaatgttcatatgaatattacttgaaagaagtattatgagaacaaattataaatagagtatgtgatgcaacaccttatgttgccagcgtcctttgttgccttttccattaaatccttgaggatagggatgttcctttgatcattagaatccaggacaatctgagaatcattcaatgtccaaaccaaagttacgccaaaccgaggttcggatatttataatgtatagcatatgagaaagcttacttcgcagatatcgtcttctccaacaacaccaaaaggaacaattttggctccaaatttagatgcaactctcacaaactctgaaatgtttggccaaaacagcttgtattcttcaccctgcaaattttgtttgttcattaaagcctctaaaataacaagtttcaagaatgcagaaacccggaaaaagtttacaaactattatatcacctttctgtgcaaagcttcacggacacctccaggatacaaaaccacatgagcctttgagcgaagtagtttatagaaattgatatttgagacaggaactgcgcctatcatcctaactgagtcgaacatatgcatatcagggagttttgagccatattttttggcaaacatcactggatgtgcaagtcctcgcaacagaatgttcttttctttcaggaaatgaattgctgctggacgcaattcggtaccaagcaacatgtgattgccaacatagagaaccggtccctctgaaggtattcccgcaagtgatcttactactgtaccgttatctagagttgagagaaagactggggaggttatagcagttagcaatctggaccagaaaaataataacagcccttcagtatttgcttacagtagcagaaggaaatatcctattctagctaagtagtactatacaaatattttcactacat

SEQ ID NO: 3491 - DNA, 245 bp, Arabidopsis thaliana landsberg
  unsure (1)..(245): unsure at all n locations
aaagagaaaatttaatgaagctaatctttatgatgtagccaccacacatttcangtttaggagagggtaagtgaagtttttgtttttgttaatgctgaggaagaagttcgcacccccatcagaagagattgtcgtcgaggaagaggaatagcaaaagaggtttggatgataatgatggggttgagaaaaaagaagagtccaacgactcaaaccattcagctatttagaagagagtgagaaaagag

SEQ ID NO: 3492 - DNA, 1932 bp, Arabidopsis thaliana landsberg
ccgagaaagcaaagcatttaatacatctatgcttcctcctttttatttatatcatgcgctcttagcacatgggtattgacacaattacatgtgcatacatatatatatatatatagatatatacacatacatgtacgatgatcggacgctataaccaaatggccttagcgtctttaagcatctgcttgagtgacccgtccacgtggaatgagatgatgtctttggctgatccgatgtaccttcctccaacgaaaacagctggaaccgccgggttcgatgagccgagggcacgtagggcccgttccatttcacggccttcagggtctttgtcgagctcatggatcgccggactagcgcctagttcgtagaatagcgtcttgatgctatggcacatacaacatgagctctttgtgaatatcaccgccgctttcttcgacgacaaatctcttattctctccatttgcgatggtcaagaaagttagtgatcaataagtgttgttttttgtaatgagcaaggcttaggttgtattgaacatatgcttggataagctgttatttataatggttattgtgaaagattttggattattttattttagccttttctttctacaaatatattatggataaatatataaatgatataccccacactaaatttatattgttatatattgaagtaccccacgaacaaaatttcctagaaagaagctaagttctttgtgatataaatttggataagaaaaaaatgcttatagcctgatgatttcgtgtgatggagacacttgctcttatttatttattttttgttaattgttttttttttatatagtttatacttagatttcagttatatatatgtatactatagatgggattaagtgtaagattattacaacatatattatatcaaaaacgaatagagagatgagtttacatcactttcggtccgtggctggcatctgcatcacgtacccaaaacattaatttttataaatttataaattttccattttttctatagtggaaacgtggaaggttaataatttgctgtaatgtggcataaacaaaaaggggatcgttgatgcgttttgctgttaataaatatatttcggacataatgtagttgacattattgtatctatattataaagtctaattacctgaaaaggataaaagccatttctagacaaaatcatctcgtatatgttggcaaatctggacgacaaaaaatctacagatgcatgaatttcgttatatgatcaaatgtgtatgattaatgattaataactaaacaattaataaaaggtctatgcattaatgtttcatatatagttgttacacttaaaataaactaaaaatccaaaaaaaacagtttttcaatgtcaaaagttaagtgtatgcaaagagaaaaaaaaaagagagcagagatttggtggtggtggctagtgactgttgcgtcatctttgacatggaaaaaaaaaatctgagataagaagtttatccatatctgaccccactccacaaatcgatgtttagacaaaacatatgaatattattttcgtattttattgttcgtttacttgatttatattcttagaaatatcttcacctatataggctagataagttcttaagccattgtcgaaaccacgtggcggtacctcctcatgtaagcatagacctatgtacttttacatattatcatacataagtttctgatatttatttttgtaggtcacaatatcgaccgtccatagattcattttatcgattagattcttttttactttttaatgaccaaagcgttgacagaataatatatcgtctctacttgcccaagatttatgttcctcactgattcttcgacaagttaaatcacagtaacgaataacgatgattgcgataatatacaaaccctctaactgacat

SEQ ID NO: 3493 - DNA, 576 bp, Arabidopsis thaliana landsberg
  unsure (1)..(576): unsure at all n locations
gcggacgacaaggacntcacggacatcaacgtcaaggttttcacatttaagaagacgatgttcggcgtcggcatcagttcgtattaagacgccgcctccgcgctcaccgcctccaagatccactacgagaatatcaagatggaggactcagccaaccccatcttcatcgacatgaagtactgccccaacaagttgtgtactgccaacggcgcctccaaggtcaccgtcaaggacgtcaccttcaagaacatcaccggcacctcctccaccccggaggccgttagcctgctctgcactgccaaggtcccatgcaccggcgtcaccatggatgacgtcaacgtcgagtatagcggcaccaacaacaagaccatggctatatgcacgaacgccaagggcagcaccaaaggttgcctcaaggagcttgcatgcttctagaccctccgtcgactgacccatctctctagttataatttttctctcgnccttgcattgcccattacatgctatccattggtaacgcacaacagtaaaacgacagacatccgacagctatattatgttcgacggtgtaacacc

SEQ ID NO: 3494 - DNA, 548 bp, Arabidopsis thaliana landsberg
tcttgtttttcgcagattaactttttcatttagaatctaaaaaatatctttacaccgatttagagtgccgactctttgaaagattctcatcactttagatctagccatatgcaattgtggccttgtgtgggagatatactacatagcttcatgtacctcaactcatgaagattatatatgcaagagccatattaaccatcaatcgaaagaaaagctatcttacatacaaaattttattttacttgaaagagccatgagtgatacgaaattagaaaacaaagatcttttttagtatgcccaaaaaaggtcgaggttgccaaatagtcatagatcaaagttaaagataaacatttgactatgttattcgggagcttgtggtctagtggtaaggagacgggcttgggacgctaacacgtttcaagtttaatttacttgctgagtgaaaattcaacacattttcctggacacccgcatggatatgggctcatacttacggccgagttgaatatctggagataaggattatctatgggctgcacctccctcaa

SEQ ID NO: 3495 - DNA, 348 bp, Arabidopsis thaliana landsberg
cttcccgtctctgatcacaccttcaatgtcctaggcagttccatagagtttctcaatggcatctccagctcgttcaatgtctgaaagaacctttttctagaagctcaactcaacgatcaaaggatctgttgtgtaatcgagcacgacttgctcttcctcgtccattggtacactgcaagaaaacggaaagaaaaatttcatggttgctccaatgttgttaagatgatgagatcaatacaatgacgataagcctcttctttgcaatcctcataaattggaattctttaccccattacctgcatacaggcctgcacctacataaccttcaagatcttctccattggaatc

SEQ ID NO: 3496 - DNA, 360 bp, Arabidopsis thaliana landsberg
acggttatgcgcacgatggagcctatgaactggctacttgactgatgcccctaagctgtagccgtttggctttggttgataatacctaggcgaagacagataccgactgtggttcctccatctaagctatgtgaagcaagaagaagcttggtttgatatttggggcctgaaccgactacatgtcatgcgcacgattgcctctactaactagtattgtgactggttactctagctcacgaaaagtacggttatgagaggatacacagtctatggctcttaccgactttgactttacgatgatacctgtggggcgcgattcgatgcgtgtctcgagtttaggtgtgactattgactcgatga

SEQ ID NO: 3497 - DNA, 1384 bp, Arabidopsis thaliana landsberg
ctccttaaaccgcttcaccatctctcgcctctcaaggtcactcgatcgcctagcacaaccaaggaatcactcgaccgcgagttcaccaaaccgaaaaaaaaacaagaaaaaaaaagaaaaaaaaaatttggtacactcgatcggtttactctgttggtttgtgtttttggttttgttgggactaacgtattaacgtgtatctttgagtttaattttgttttcaggttccgtaatgagtaactacagcggagaatcctctgtggaccctgattacaatgtggatgaagctgagtcctggtccgctagattgagagagcaacatgtttaccagagtttcagggatgaactcgaacgctctacagcccgacataatcagagaagagctgaaatcgccagaggaaagagggcgatgtcaagtaggtatgagccgattgatgaggatatcgaaactgagtatgagccagagtcatggcgcaaggagacaaagctgctgaacaaacccgacgaggttacagtggaggagtatatcagattctttgagatgaatgacttctggggaacgaggtatccgtgctatgagactttagtccagctggggttactggaggacgtgcagcatctgttcgagaagtgtcatctggagacactcatgtcttacccttacgctgcctataaggaggagacaatcgagtttctttccacgctgctagtggagatgtatgagggactcacagactttgagctggataccatggggttaggcttcttgacgttctcagtggatgaacagcgatatcagctttcgatcaagaagttggaagaactgtttggtttccctagtggaaagggaacaaacccaggtttgacagagaggagctcaaggatttgtggaccactattgtgaacaatctaccgctaaactcggtgcggtctaagagcaaccaaatccagagtcttgtgatccgctactttcggcgatcggttgccaacgtcttttactccagggagtctacgggcaccgtgtctaacacggacatggagatgatagattctgcgcttacagggattctccaccggaagaaggggaagaatgtcttgagaggcgatctcaacaacgcaccaccactaatgcctctgttgatccatctgtgtggatacaggaagtgggcgatgatgaacgggaagaaaaaggtgagaggagcactatgcgtgggtggcgttgtgacgccaattctgcaagcttgtggagtaccgctgaaaaaaccagggttagcaccgaggatgatggacttgaatcatttgcgccgatgtgagttcttgaagtttgacatggctggcgactttcaccgctacaggttcgagcattcatcgattaaaatcgcca

SEQ ID NO: 3498 - DNA, 445 bp, Arabidopsis thaliana landsberg
gtttctccgcggataccaccaattcttcctccaaagactccaccaaccgctcccccacaaacaccaccggtttctccaccaaagagtcccccaaattctcctccgcgtgcaccaccactttctccaccaagaactccaccaacatctcctccgcgtgtaccaccactatctcctccaagaactccaccaacttctcctccacgtgcaccaccaattcctcctccaagaactccaccgacttctcctcctcgtgcaccaccactatccccgccaagaactccaccaacttctcctccacgtgcaccaccggttcctcctcctaatactccaccgacttctcctcctcgtgcaccaccactatcaccgccaagaactccaccaaattctcctccaagaacatcaccaacttctcctccacgagcatcaccagttcctcctccaagaa

SEQ ID NO: 3499 - DNA, 617 bp, Arabidopsis thaliana landsberg
  unsure (1)..(617): unsure at all n locations
tatctcctccgcaagaactccacaatgcctcctacacgtacaccccctgtgtccccaccaacttctccttcacggacaccaccaggtactcctgcaagggctccaccaaccgctcccccacaaacaccaccggtatctccgccaatagttcccccaaattctcctccaaagagaccaccgatgtctcctcccataactccaccaacttctcctccacgtgcaccaccacaatcaccgccaataactccaccaatttctcccccacgtgcaccaccaacgcccccagggacaccttcagtaccaccgccgccgaggactccaccaccgcctcccccgagtggtagatgccctaggaatggtatcccactacaaatatgtagcactatcctaaatatgttcgatggtttcctaggattaggaacggcgcaaccatgttgttctctcattcgtggtctttctgatgctgacgcacttgcctgcctttgtgaatcagtgagagcaccaagtcgcagtcttcctcgtaatatcatcaacctctttatgacttgtggtcgtagcattcccccaggcttcacttgcccatgaccacctnctttcccacantaaactaaaaacct

SEQ ID NO: 3500 - DNA, 5593 bp, Arabidopsis thaliana landsberg
ataatcgtaaaaaacaaaagtcacgaaatgaaattacttactaaatactggtgaaattaccaaaatatttttgccataaattattatgtttttttctcgaacatatatactgtatatgattactacgtatcaaaagcaattcctgattgaatttggaatttgatttggtttagattgcctcgtcataactggctttagaaaagtaaaaagagtgcagtttgtgacgacttttagatatggctttgattcacaaacgtcaagctctcaattctaggggggtggattggtcggagcttcctgaggatgtgatcagattggttctgcgacggctgagactctcggattttcatcgagctagggcggtttgttccacttggtgtagggtttggggagactgtgtctccaaacctaatcaggttccgtggctaattcttttccctgatccagcacaaatcagacgcagttgcatgttgtacaatccacaggaagaagaaaacgtttacacaattcaagaccttggtgtggatccttgccttgcaagttgcggcacctggctcctcatgtcggaccctcggttaaatctatatcttgtgaatgtgctaaatttggagaggattaacctagtagctatcgagtctcaacgtgaccagctcttttcagcgtactctacaggaaaggtcattttgcaagcaaagccgagatgatggggtaccctagtactgataaggcagttgtgtggatagacgagaaaactaaagactacgtagttgcttgcagctggggtggagacaagcatgcagccttttgcaagaaaggcgattgtgaatggcgccagattcctcctttgttggggtgtagtgatattgccctcaaggaccacaaactttacatttactatgaggatggtagcatcggaatctcggatttgaagtttgttacacaaaaactgctcatgttcagctctatccctttcgcttccgcttgggatcttttagcccttatgatacaatttggacagactatcttgactggaagaccaacatagtaatcaccatctctggagattttttgatggttggctgcgttcttaaacgtcgtgacctttcctggctttttcgcggcgaccaggccgtgatcttggatctaggtatcaccgtgcaagcatcctccgatatccaaggtattaccagaaactccacctatttcagcggtcttccatctagccaaaaggatgtcttcgtcttcaatctctcctcccagaaggttcaacgcctttcgtcttcttctatctcctccagaccattctctaatgctcgctggctcttccccacttcttagttcacaatgatactctttccaaacattttcgtttttgttcaactttaagtgttttttttttttaataatgccaatgttattttccttttgctaataaaaacatgacttaaccattaacgcaaaggctacaaaacaaagctaattatataaagtagtaatgtttcaacatacacaagattacagatacactagttcacttttaaaccagactaatctcaacaatatcttctactaaaaatgctcaaacagatgaagagacttgtatcgtcaagaaactcaccaactccctggcccatcgttcccagctgctggcctccggttcaagtaacgtataactgcatcttcgaccctgcaaacattttaccccaaattatgattcagaaacattttacaactctttgaccaaaaaaaaaaaaaaacattttacaactcttaatacatatcatctgtgcgaataaaggccagagtagcagagtctagatgattagcttaccaaggttggttgaagaagtctgatcgacgttctctctcagcatttcgactggcttctcccgcaacgacctttagatccttgctctgagattcgatcagggcgtttatgaattcaactggcgattggctgaaccccaagaaaaatgcccgcctcctcctatgctcatggattttccttatggctgcacatattgcttcatcacaagcctcaatctctttgttcttctctgcgttggctagcaaattgttcagatctctttggatcgggaagggtacatccactagcacatcgtaacatgctgatacggccggattatttcctgagagcttgattttgtgttatcaggcatacctcgtgaaggccacaaggcatgtcatatactccaacctacaataggaaccatctctatggatgctccatagtttccaaaccaaactcatcaaactattcccacagaaagaaaccgtctttccccatttggctcgctatctttttcacccgacaaaccaagtttggggtatggtcaatagaacatacaatgcctacttatcaagagcagacgagacgcttggtattcagatacgggtattccagcgatcgagctggatattttcagcatgtaatggatcaggtcgtagcttgtacacaaagagagaaccttttgcctgaaccagctgcacaagaagaaccaaaagtcaatatatcaagaagccagaaacttaaagctgttcttgtcacatctttgtatccagagtactctgaaaccttaaagaacatgtattgggaacgaccgagttcaacaggggagatcattgaagtttatcagccaagtggagaaagggttcaacaaacagacaagaagctacacgaccaaaaggcgctcgccgagatgtatcttctaagtctaactgataaaatagtcacaagtgcaaggtctacatttggatatgttgctcatagtcttggaggattaaagccatggttactctatcagccaacaggtcctacagctcctgatccaccgtgtattcaatccacgtcgatggacccttgtcaccttactcctccgtctcatggatgtgaacccgaatggggaactaactccgggaaggtagttccttttgtaaggcattgtgaggatcgtgggaacgatggtcttaagctatttgatgagttatagatcttctttaatatagctgattcaataggattgtgagttattgaaacagagaatctttgatgaattcttctgattgcatgtaataatcaaattttaatctttgtttctttagagtcgtctataataatcattattagtgtcctggttcagtttttaattaaacacacaaataagagaatcatattttcatgcttaatgaataccttaacagtttacagtttcatcctctgtattaatatgttaatgcacagaaacaattagttgttaaaaacatttacaaggcttgtttgctttattataataactctgtacatttacttacaattcaaaatcaataaggctcctgtagccctgtgtctgagagctttgaaaatcctctgtttcagagtttcttaatcctcgtccttcttggtgaggttcgtgctttacctgaattcctgcagcagtagtgttgtagattaagaaattaggcgatttcatttcaaatcttctcacatttaaaagtatgcgaaccaagaaaacatcatttagtaaatgtgaaaacataaaactagtttctacctttatgattcctctgttctcaagctcgtggttccttcgttgcctttttctttcccgaggaagaagtgcattgacatgaaatgagctcacatcctcatttacgcgttgcagatcccaaatttattgtcaactgataaagaactctgttctcaatacctataaccgtgtttccacattctcactttgaccttttagatataggctctcttcataaattcttggatcacttttttagatcgaagtctcttggcctttaatatagcatactgtactgtagacagggaagctgtagttggctcaatgccctttccccacatctcttggataagtgtgaccgccttatgtacgaatccattcctacaacaactagctattagtgctgtgtaaggcacaacatcaggctccaatccactttcaatcatttcagcaaaaattctttctgcctcttgaagatcctgaatcttgcactgctgagcaattaaaaacgtgtagtagacaacgtctggtttaacatcaaaggccttcatttccctcttcgtatcaaactttggaatattgagcaaaactgtgcatgttaccacatcaggtttgattcccattgtcttcatccttataaaaagagcataggcttccttcagctcgtttaaccggcagtatgtgttaatgactgtaaaagtgtacaaatcagggatcattcctctagcaactaaaacattaaattctgccgggcttctctcacattattaactcgacaccaagcaccaattagctttccatacatgctcttctcaggttcgactccaagttcccacattctttccagtaactcttgagctttgctgatataatcattctcggcgcaaagactagtgaatagtgtgaaatacacactcttgggtagaggacattccagactaatgaatcgttcaaaggcctgatcaagacagccagcttcacaatagcctttcaccatacttgcatcattttcccgagatttatgttccaatctctcataaaaagcttcagcctcgtctagtttatctgcaacaatcaggccttcaatgaccatgttgtgtgtaacagaagtgggttctacaccccgatcttccattagtttcagcgaatgcctcttgtacaagaccattcctagccaatccaccagcaaatacgttatatataacaatatcaggtgttttacctgtcccgtccatttcaatcatcaaattaaaggcatcaaaacattaaccttgaagacagcaaccacctatcaatgtcgtgtagttgatgacatcaggagctattcctttacccgtcatttctcggaacaagcttcctctactttgccaagctttcccaaagcaccaaatgcaacattgtagcaaaccttatcaagagaaatgttcatctctctaaactctttaaacagatcaaaagcttccgagaaatttcccatctgacaaatgcattgaaggattgagcttacaatcacacaatgtattctttttcttttcttcaccattttgttaaaaaaatccaaagcttagatatattcagattcttgcgatatccctcaattatggacgagttaaaatagacatccggatcaatcccaagttcctccatgtcaagaacagcttttttagcctcttctattctcatctcattaaaaaccacgaaccactctgcgatatgcaattccaagatcactcttatccaccagaatatttgcgtccctcaatggttggagtacaagattagctatacctgccatctgatttaaacagagtccttcaatgaaattcatataaaacacactacatttcctaggctctgaatttaacagtctactaagaagcttctctactccttttgtatcctcattcctacacaatgcttgaaccacaagcacataagtatttgcatccgcatccagccccagccgctctatttgcatgaaagtagccacagccatattgttttttccagagcaatcatacggttcatcaaaaaactcaatgctt

SEQ ID NO: 3501 - DNA, 450 bp, Arabidopsis thaliana landsberg
ggtttatatttaaaacgtcccggcttcgatgtcgttgatacctggggcgtacaggttaccattcttgttgccccgctgcttgctatttctgcaacgcagatccgtaaccagattaaacagggcaagtccatccgctaccttgtgcaggataacgtgcgggaagagattgagaggaataattactataagtagtaaccgcagtccatggtccatggaccatggtatacagaagcgatcagaattgcgctgtcatatctatcatataaaaaccattcttgtccatggaccattaactatggaccatcgactatacattttcttatcttttcccagcctatctaaaaaacttgacttaatgaaaccaagactacttcacttgctgctatgtttatctgccggcatcacagttcatgcacaaacgcttactgttgagaagattattgcgcgatc

SEQ ID NO: 3502 - DNA, 542 bp, Arabidopsis thaliana landsberg
  unsure (1)..(542): unsure at all n locations
cgaataaaacaccgccngnatctccatatattatcattggtggtgaacatggaagccataagagtttttggaccaaaacttggatctagactctctattcgttctcacaccactgcatttccggcatgcaaactctctcgctttccgctaacgtcatttcccggtaagcatgcacatcttgttcttttgaaggccactactattcctctggcttctgatgacaaagaaaataatcgcaaattcgaaaagttgggtccttctgaatggggcaatcaattcctttctgctcatgttgatctctcagtaagtctctgtctcttgccattatatagaggatatgaactcatgcatgtttctttttttaagatgaataccttttttataaggaaatggatgcgcttgagagagagattgaggcactaaagccgaaagtgagggacatgttcatgtctttcaaaggaatgaagtcgaacaagagaatttgctcttgatatacttgcttgtgagtcttggtctcgctcatcatttcgaggatgagatcg

SEQ ID NO: 3503 - DNA, 495 bp, Arabidopsis thaliana landsberg
acgccccggttttgattttgttgatacctggggcgcacattttacctttcttgatgccccgctgcttgctatgtctgcggcgcagatccgtaaccagatcaaacagggcaaatccatccgctaccttgtacaggatacagtgcgggaggaaatcgagaggaataattattataagtagtaattctggtctatagtcgatggtccatagtccatagcacgatgaggagagtagtattattctgttctactctattataatagataacagttcttgccatggaccatcgactatggtctatggactacagcccattaaccgtctacattttcgtatctttcccagcctatctaaaaacttcacttgatgaaaccaagactactacacttgctgctatgtttatttgccggcatcacagttcatgcgcaaacacttactgttgagaagatcatgcgcgatccgaaatggatcggtacatccccttccaatatatcatg

SEQ ID NO: 3504 - DNA, 574 bp, Arabidopsis thaliana landsberg
acggtggccgccacgatcgcgtcggtccagccgtcgaactgggcgcggtcggcctgctttcacccttaggaagtgtgcgacgaccatcgagggcagcggcttgaacagttcggtgacgatgtccccgccgccggtggagcgcaatcgttcgatgcgctcgatcgcgaactcgcggacctgcggttcgagttgcttgacgtgcgcgggcgtgaaggcgcgggccaccagcttgcggaagtcggtgtgtcccggtggatcctgcatcaccatcggcggattggccgccaggccgatcagctccatgtcgtcgtagttgatggtcaggcccttggccgaggagaacgtctcatggtcggcggcggccgcccagacatcggcgtgccgggacagcacgtagtagtcctggtcggggtcgctcgccgggaccacgtggtgcaccgggtcgtgctcgcgcagcgcggcgtacatcgggtggggattcggccacgtctcggcgttgcacggcacaaacttcggttgagacatcatcgtcgtcatgtctcagtgatacgacacaaccgcgtcgatgtcaatg

SEQ ID NO: 3505 - DNA, 518 bp, Arabidopsis thaliana landsberg
agccgctcgaggcgctcgacgacgaactggcgcaccttgggctcgatcgcctccactctggcgcggcatgaagccgcgggccaccagcttgcggaactcggtgtgcaccggcggatccgtcatcaccatcggcgggttgtcggccaggccgatcatctccagctcgccgtagttgacggtcagtccttgtgccgaggagaacgtctcgtggtcggcagcggccgcccagatgtcggcgtgccgagacagcacgtagtagtcctggttcggcgcgttcgccgggaccacgtggtggaccgggtcgtggtcgcgcagcgcggcgtacatcggccaggggttgggccaggtgttggcgttgccgagctcaaatttcggatgagacatcatggtcgtcatgtctcattgatacgacaatgtcccactcggtgtcaatggtcgagtgtgaaatccacgacgcgacgcgccgggggagcgtcggcagattcacgctcgaggcggtgggtcagatccccgaaccc

SEQ ID NO: 3506 - DNA, 438 bp, Arabidopsis thaliana landsberg
atggccgacatggtagacgatcaacgccttttccagcacttatttaggcttcgggattaataggcttatcagatgcagaaagcgcttgggatgaatatctacccttcaccccaggaggataatattcgggaatactgtaagatagtgggcctcaatggctggattagggtgaaatcgtagatagaaggtaggtctgtatcgtgtgtaagacttcaacttgccgagcattcgacggtagctcggctgcagagatttaggatgctccgcgcacgtgatatctagccagagttatcccgattggtcgccgacttcaatggcgacccacatcctcacaagggagccatgaggtcaactctgggcagagaaacttcagtatggatgtggtcttgtgggtaccaaaagaaatggccggtcggcgcaccaccctcatgatgaccc

SEQ ID NO: 3507 - DNA, 501 bp, Arabidopsis thaliana landsberg
  unsure (1)..(501): unsure at all n locations
aatctattggccgtatataagccgaagcagaaggagtttaggtttttctgttagcgcaagcaatatcaagatataagggtcatgacagaagataagctcctcctcttccttattgaggaggtcgcggatcggccgcttagggccaagagctataaggcagctgaggatactctataggaggctatgcggcttatctagcgatcagtccgcagctatataaccgctatcaccaatctatattatatgcagaaagcgcttgggataaatacccacccttcaccccaggaggataatatttaggagtatcttaagtccctctagcactaggatatataataggataaagccagctatgccgataagggccatgataccctcctcaatggatatatagagcaggaatttaaatacatctgctataagctctaggcgcataacagcactactgctaaatgccacctatggactctngtggatctactgctcaggcactatatgctg

SEQ ID NO: 3508 - DNA, 748 bp, Arabidopsis thaliana landsberg
cttcaaatttttaaaaataatttcgataaaacaaaagtaattttagtgtaggttcagtaccacgaggaaaaatgtgttttctttgtttatttgatttgttttttgctttgggccttgttaaacctataggctatagcccactacatttgtacacacatgattcgtagaagtaattcaatcagctagtttggagattagcttccctgaaaaggcattttaagtcaaaagtaatagaaatagttgataaagagattgcaccatgcatgcttttttactctttgaaaattttaatgttgtgaagatcagtttcataaagaaacttcaagtctccacaaaacgttacattgcttgtgattgtattcaggcttcctatctcttgaaaactttatgattgacatcctttgtgcttcagtctcaataaagtatagttgaaggtagctcattacttcttctttttgtttttgggcgtcgaattcgtattctttataatattgatcctgaagaaaatgaattattaagaagaccttccattgaacgaccgaaccatatttgaaaaacttcatcaaagtttcttcatttatgtggcaatcctacctatgagtttttgtattgaataagtttagattttaatattaggagatatgtagttcttgcgcttagttatgtacattacttattgcgataaggagaatcgggaatcgacgatcgagatgacaagaccaaaatatgacaagaatatatgattgta

SEQ ID NO: 3509 - DNA, 575 bp, Arabidopsis thaliana landsberg
aaattaagggcaagccctaggggtgccagtaccacgagcacaaatgtgtgttttctttgttcatttgatttattttttacattgggccttaggggggggcctatagccctatgcatttttgagtgctactgttttagtttccaattttcgatagagttgagagtagcccattgcataggcacgggcctggtagagagattgcaccatgcatgtttccttactctttgaaatttttaatcttgtggagagagattcataaagaatcttcaagtctagataaaaacgttacattgctaggatttgattgttgtattgaggcttcttatgtcttgaagacttgaagtgacatcctttttgctactgcttcagtctccatagtctccatagagtatagttgagagtagcctattacattgtttttgtttgtcattgaaatcgtattccttctaatatcgatcctgaagaaaatgaattattaagaagaatcaccaaccttatattcaacgacccaacaaaatttgaataactccattaaagtttcttcatttatgtggcaatcctacctatgagttctt

SEQ ID NO: 3510 - DNA, 3439 bp, Arabidopsis thaliana landsberg
ccccatttgcccgtcttatcatgtataggtaagaaggcagtttttcaaaattactatcaggggttcccagagtgagctcccgtgcaaacctgagcgtcttgtatgacttccaataactcatctgttaacacaaacatattaatcgataagtcagcctaaactataccacaactcaaccaacaagtgatcttaagtcagccttgaaagtcataactcaaccagaatgtaattatatgtcagccatactatatcaataagtcaaccgtaaaatatctataagtcagccagcagataaatagtaagtcagccgaaacattgtaattacctttactcgaaaattctaagtgatgattattccgactgattttggtttaacatccggaccaacgtcaccaagatagtccctgtaaagaactcccagaacatcaggtgttgcttgtcgggatcgaccagaacgttccgtcacagaacatgtgtgttccgaatcgtatatataaacatgaaaattgggatcatttccttgtctagatgcacgaaccctccaaagacatctatccacccagcactcgtaagatattgtagtcttattagaagttggtacatcaaaatcaaacccatcccttatcgcaagaagtttgagtcgatactccaaatcgaatttgctacggtattgttggcctaccgcgagtgttagcgtagacagctccaactttaaatcagtcaggctcccagcagatccgatcatttccatggtctgagttctcttcgaaggagtaagtttcggtgaatcttcgtctttattattaggctcgccgtatacagcaaagtcctcatcatcagatgaggcaccatcggagtcgtcgaaaacatcaaaccggctagaaaattcatcatcttcttcttcgtcacctgcttctttgtcagatgcttcatcgacacctgattcatcgtcccattcttcatcatcacctgattcatcgtttcctgcttcatcgtcttgataatcgtaacagacgccttcaaaccccccacccggaactttgaatgtagattctgctcttgagtcagattcgatagggcgtttcgaaccccttcctcttgatccgtccttccgactaatatcacttgaatcttcagctgtaaactccacacagagacgtagctgctcgaattttgtcaaacctagataacattgcaattgttgatcattagagatataaactgttggagtatcgaacgacatatttttcaaagtcttgttggagaacatgtaactcagccgtaactgatgagtcgactgattcactccgtaatcatcgaccaccatcttcaaaagactatcgtaaactgttctttccgcttatagctgcacaactctacaccctctttcgtcggggttaaatacgaatctctgtttctttacccacgaaccagaaacaactatgaccgtagcgggaccagccatatcaagagaaagatgaaagaaattgaagatgtatgagaagatgaatgaagaaaagaaagtttcggtgatgttgtaacgttcaggcggtgaacacagtctgggaaaatgatttaaagaagcaagggacgtttcgtatttccgtcgaggatgctgacatggaatgatgacatgggttattacagtcaacgccgttttgaagtgatgacgtggcaagtcagccaccaaacgaacagttcataacacagccatgaagcaaatctttaaggcagccgcaacatgaatactattacagtaattaaaacaggaaaaaaacaaagttaagtcagccgtgtaatgtcgtaactcaactaactcagccgtaacgttttaaaactcggctgtaactgcatgctattatagtaattaatcttttgcacataagtcagccgtaacaaggctgagttatttagtaatcgagctctttacggctgatttataacactcgatcataactcagccgtcacatcattccataactaagccgtccaaaactataactcggccgtgtcgaggaaataagtcagccgttttctcataactcagccataacgttgtttgggttatcgtataacttcttataactcgaccgacattccttaactcaaccataccgttgcctgagttatactataactcaagcaacattttacaactcagccgtaacgtctggctgagttatactcatacttcgccgttttgttatgactcatatatttttgtcgtaagtcagccgcaacataccgtaactcagccgtaactgccgctgtatcgcgttacggctgagttcatttaatacacgtcagcaaattctgacgtggcagtggcattccctgtaattacgttttttccggtaaagtttagtaggggcacgctgggtattaagaaaaagacgaaaatatcacagtaattaaaaaaagttctgtctgattctggtaataacacctaaattgttacccatcacagtaaatctcccttattttataccccaggttgagccttgttaactagtttgcatttgtcggtccatttcttctttcgtcaagatcaaccttatcgtaatcagaacaaaacaggaaacaaacgtaagaggcaaaatccttgtttgtatgaactaagttcaacgtctctgtgttacggttgtaaaggcaaacacgatcccaactagaaatcattacgacgtcgttgcttggagtccacacaatctgacctaatccaatgcttttaatatctttcacttttatccacgcctttccacaactgctctttaaaacccataatccgtgaacatcttcttgatctttgtttatccagtgaagaataacacctagcttcccttcgtatctgaccaactctgggaaactaccaaagttggggatacgtacgaaagaccaagtttcggttttgagacagaaccggatcaccttgttgttccatgatctccaatgcaagaaccccgaagcttgtaccgggtttgaaagaattaaacggtctgttcttggtagacgcagattttttaacctcttccacataaacgaatcggaatcaaaaacttcgcacgcaaaagtactgaaaggattcatatcggcgtgttaaaaagcctgaatactttataccggaaaggctccaatccagttaccgttataccgagtgacttatcacggctacacaattttgggtttggtatgatctgatactgttttgttgttggtttgcagactatgtattccggtattggtcttgtatcattataacaaagcaatatcccatgacgtgcatcacaagctttgatctttacctctccttgtggcagaaaatcgatggagactcctttgttatccaaatctctcctctcatggaaaaaactggtatcaagtttgtatcctctttcgtagcgttctaggaagtatccagagatattgttggttcgatggagat

SEQ ID NO: 3511 - DNA, 3256 bp, Arabidopsis thaliana landsberg
  unsure (1)..(3256): unsure at all n locations
caaaatccaccaatttgaataaactcatatctctagtcattctaccttttcaaattttaaaaagctccaccatcattaacatattacaaaaaaaaaactaaacaattttttgggttttttaatttaattatagaaaaaatggaatctaagacgatgaagattataatttttcttatggtttttgtttttgcaatgacttggtctccttcgagtgctcaaccaacggattcggaggggtgttttaaggcgtttaaaagcacatcaggaggatgtctcgaaagcataaaaggaattttacatggacatgtccatgggatcaagaaagaatgttgtggaaccgttagtatagtttctgatatgtgttggccaataattttcccaagcatgccttacattcgttttgtattaaagggtatttgtactattaaatactctttgcattgaggcatttgaggattcgttatgtttaataagtgagaataaaagaccatctatgataataaaatatgaacaattcttacattcacctcttctctaataaccaattaaaagttgacatgtcatctatttaaaataacaaataaaataaatcattaataattcaaaactgaattaattgtaaagcccactaagtctcttcctaaatccaaactaacgaaaataaaactaaaccctaattctcactttataaggcattaactctaaccttatttatagtttttctctattcttcttcccacacatacaaaaaagattagttttatcggaggaaggatatcattatcattgtttccacacaatttgaatataagtcaaaatacttatttatatgtgcatcaaaatttcttagttttttattttattttggtgattttgttgtactaaagttcaaataatggcatctgtggaaagaaaatactaaggataaataaggtaaatactaatttaattaatttatttaaattctaaaaaggaaaatacattattaattaagaaaatgaccaatcaaaataaacatataagattttgatatctaacttagcatattaatttattattaatcatatatttttcttttcatctttacatgattctatttttgtgaaacaaataaatcttcatataaagaaaagctagatttttttctgcatatgccattatttgaattttgaaaaacgaatcgaaattgttcaatctatgatagaaaacttgtaatgggtcaaaaattcagatttgagtaatatatttcttttaaccaagaatagatttaacaaaaactctcattgagtaacgggttagaacttgaatatctatattcaatttcatacatttattatttggaatgtataattttgtatataaccaaaaaaatttatatatttcactacaagaaaacaaccgttttgcaatggaagaatatgtaggtaatccctcgcaaaaggtcattcgcaagggaattgcaacgatagaatattcgtcgcaatacgcttctcgcaaatcgggatacgttgctaatccgtcgcaactattgcgacgaaaagtattcgtcgcaaattgtggaaggaagaatattcgtcgcaaacgcctcgtattttgcgacgaacatattacttgcaatagcgttgctaattattgtgtcgtacatccgtcgcaaatattgcgaggcatttgcgacattgcttttgttgcaaattcatgaacagtagaccggtgtttcgtcgcaaacgccttgtattttgcgacggacatattacttgcaatgtcattgctaattttagtgtcgtacgtccgtcgcaaatattgcgaggcatttgctaggtttttgttttctattgtaatctcgtagcatgtgtttgcgacgaatatgcaaggccaagctgaactgttacagtctgtttctcttattttgtaatttgattttgctgagaaaacaattcaaaagctaagaagaaattgaactggaattgaaattaaaattgaaaattcaaatgttgtattcaaaagtcttagaaagttggttacaaggaaacaagttaagaaagagtgacattgtttaaaaggacttagataaagaggcggttgcggttgcggtaccattaccggggttgtctcccatgttttctcccgtcaaaggtgtcaccggtgtagtctgaggagtgctaactcggtttgcttctgtgttggtggccgttgactcgttttcagactctaacattgcagcaaacacaggatctttcttggcaaggtactcaaagacttggtgcatcttctcggcactcttttgtagttgtgtcgcctgagcttgaagagctgcttcagcgtgtgcaagcttctccgcaagaagaacaggatcttcagctggaggaggaggaccgctataggcagaggctgcttcttgctgcaaagaaccaacaccataaattctatttttctttctcggagcaacctgccaacaaaacaatccatgtgtaagctttgattcaaaactaacaatctttaaatcgatggagcattacaacaagtaaactgctaagcatacatcctaactatttgcatcatcatcatcaaaatcagacaattaaataataagggcaataaaaatctgagaactaactagcaataacaatctatatatgcaagtcaggtcaacacaggtacttacactagttttcagaaacaacaaagactcaaagaccaactgtttttcagacacaactagcactaacaatctctatatgcgagacagaagaacacaactacttacaactattttcagacacaacaagactcaaagctcaagctgtttttccagaaacaaaacaagactcaaagaacagcaacaatagttattccagccagacaacaaagactcaaagaacagccataatcttaactttaaattttacctctgtgtagatcttgttctttgtatgaatcgacagcccaccagacccactactctcattctccccagcacaaagctcagattccagctcttgtatccttgatgagacttccttgtatatggactccgactttccatcagtaaaagaaccatcaggctttctatgagtctcctctaggacttgaaggaaatcaggagttagttcccggttttttcagctgcaaaagagagttcattaatcagtcaacattagtgtgcataagttcattgtctgaaaaagtaactgacacaacttacatgtttccgggcacgagctttaaaagatgtntgccctgagcggtgtttagatat
